United States Patent Application Publication US 2024/0327476 A1 - sequence listing, part 129

SEQ ID NO: 244843 - DNA, 774 bp, synthetic construct
  misc_feature 1..774: note = Description of Artificial Sequence: Synthetic coding sequence
  source 1..774: mol_type = other DNA
atggcagccgacggagtcgacgaacggagccctttgctgtccgccagccattctgggaacgtgacaccaacagccccaccctacctccaagaaagctcccccagagccgagttgcccccaccctatacggctattgcctcccctgacgcatcaggaattccggtgatcaattgtcgggtttgtcagtcactcataaatctagatggtaaactccaccaacacgttgtgaagtgtacggtgtgcaatgaggctacccccattaaaaacccgccaaccggcaaaaaatatgtgagatgtccttgtaattgcctactaatctgtaaggataccagcaggcgaattggatgccctaggcctaactgcaggcgaatcattaatctgggtcccgtgatgttaatctctgaggagcaacccgcacagcccgcactccccattcagccggaagggacacgtgttgtgtgcggccactgcggcaacacattcctgtggatggagctgagatttaatactctcgccaaatgtcctcactgtaagaagatatcttccgtcggatccgcactgccacggcgacgatgctgcgcttacatcaccatcggcatgatctgcatatttataggagtaggtctgactgtaggcactccagattttgccaggagatttcgggcaacttatgtaagctgggcaatagcatatctccttggactaatctgcttgattagggcgtgttattggggtgccatacgcgtctcatatcctgagcattcatttgcatag

SEQ ID NO: 244844 - DNA, 2745 bp, synthetic construct
  misc_feature 1..2745: note = Description of Artificial Sequence: Synthetic coding sequence
  source 1..2745: mol_type = other DNA
atgagcctgagccattggccatactttcggctggtcctgaatttccgtccacaggttatctgtctacctcaaccaccgaaggttctgggatataggctcgaacctccgcaccttaccttggcttgtacactcgaggggatgtacaacataatagaggagatcctggagagggacattaacggtaccctgttgagtcaagctacctgtgaactttgtgacggcaacgaaaatagttttatggtagtcaatgcactgggggataggtgtgtcagatgtgagcccacttttgtgaatacaagccggtcatgcgcttgttccgaaccaaatatcctgacagggggtctgtgcttctcaagcacaggtaactttccactgagacgcattagcgcagccagatacggggaggtgggaatgtccttgacatctgagtggtttgcaaaatatctccagagttcagcggcagcttgctgggtgtatgccaacctgacgtcttgtcaagctttgggaaacatgtgtgtgatgaacatgaactcttacgatttcgcgacctttgacgcttgcggattattccagtttatatttgaaaacaccgctggattgtcaaccgtgcatagtatttccttctggcggcagaatctaccatggttgttctacggggaccagctgggcctcgctccccaggtccttagctccactagtttaccgaccaacttttccttcaagggcgagaatcaaaacaccaagctcaagttcgtggctgcatcttatgacatccgtggaaactttctgaaatggcaaacccttgagggcggagtgcttcagctctgtccagataccgagactaggctgaacgccgcatattcgtttggtacaacttatcagcagaactgcgaaattcccatttcaaagatcttgattgactttcccactcccatcttctacgatgtgtacctggaatacactgatgaaaaccagcaccagtacatactggccgtgcccgtgttgaatttaaacctccagcataacaagattttcgtgaatcaggacagcaactccggtaagtggttattaactcgacggatctttctggttgacgccgtgagcggccgagagaatgatttgggcactcagccccgtgtgatccgagtagcgacccagatttcactgagtgtccacctggtgccaaatactattaacggaaatatctaccctccactaatcacaattgcttacagcgacatcgacatcaaagacgctaactctcagagtgttaaggttagtttttccgttacctatgagatggaccacggtgaggctcatgtgcagactgacatcgccctgggcgtacttggcggtttggctgtcctggccagcttgctcaagacggcaggctggaaaaggcggattgggtcgcccatgatcgacctacagactgtggtaaaattcttggtgtactacgctggagacctggcaaatgtttttttcattattaccgtcgggacgggtttgtattggctgatcttcttcaaggcgcagaagtccgtttccgtgttattaccaatgcctatccaagaggagcggtttgtgacctacgttggttgcgctttcgctctaaaggccttgcagtttctgcataagctgatctcccagattaccatagacgtgttcttcatcgactgggaacggcctaaaggaaaagtacttaaagccgtcgagggcgaggggggtgtgcgttccgctaccgtacccgtgtccatatggaggacatacttcgttgcaaatgaatggaatgaaatccagacagtgaggaagatcaactcattgtttcaggtgctgaccgtgctgttcttcttggaggtggtcgggtttaagaacctcgccctgatggactcatcttcctccctcagccgtaacccgccatcctacattgcgccatacagctgcatcctgcggtatgcagtctcagccgcactttggttagcgattggaataatccaagtggtcttcttcgctgttttctatgaacgcttcatcgaagacaagattcgccagtttgtagatctgtgcagcatgagcaatatctctgttttcctcctttcccataagtgttttgggtattacattcacgggaggagtgttcatgggcatgctgatactaacatggaggaaatgaacatgaacctaaagcgggaggctgaaaatttatgttcacagagaggccttgttccgaatacagatggacagaccttcgaaatcgcaataagtaatcaaatgaggcagcactacgaccgtattcacgaaactctgatccgcaaaaacggtcccgcacgactgctctcttcatccgcctccacctttgagcaaagcatcaaggcctaccatatgatgaataagtttctcggcagtttcattgaccacgtacacaaagaaatggactattttatcaaagacaaattgcttttggagcggatattgggcatggagttcatggaacctatggagaagtcgatcttctataacgacgagggctatagtttctccagcgtcctttactatggaaatgaggccaccctcttgatattcgacctcttgtttttttgtgtagtggatcttgcttgtcagaactttatcctcgctagttttctaacctatctccagcaagaaatatttagatacattcggaacacagtaggtcagaaaaacctggcctccaaaacgctcgttgatcagagatttctgatttag

SEQ ID NO: 244845 - DNA, 2988 bp, synthetic construct
  misc_feature 1..2988: note = Description of Artificial Sequence: Synthetic coding sequence
  source 1..2988: mol_type = other DNA
atggcaacgcgaggaggagccggagtcgccatggccgtatggtccttgctgagtgccagggccgttacagccttcctgctgttattccttcctcgctttctgcaggcacaaaccttttccttcccatttcagcagccagaaaaatgtgataataatcagtattttgatattagcgcattgtcatgcgtaccatgcggtgcaaatcagcggcaggacgcacggggaacttcctgcgtctgtctaccagggtttcagatgatttccaataacgggggacccgcaatcatttgcaaaaaatgccctgagaacatgaaaggggtcacggaagatggctggaactgcatttcctgtccatccgacctgaccgccgaggggaaatgccattgccccattggccacattctggtggaaagggatatcaacggcactctcctgtctcaagcgacctgcgaactctgcgacggaaatgaaaattcctttatggtggtgaacgcattaggggacaggtgtgttcgctgtgaacctaccttcgtgaacacatctcggagttgtgcctgttctgaaccaaacattctgactggaggactctgtttttcgagtactggaaattttcctcttaggagaatttctgccgctagatatggagaagtaggaatgtccttgactagcgagtggtttgcaaaatacctgcagtccagtgcagccgcatgctgggtgtatgcgaatctcacgtcctgccaggccctggggaatatgtgtgtcatgaatatgaacagctatgactttgccacttttgacgcctgcggcctttttcaattcatatttgagaataccgccggactgtctacagttcattcaatctccttttggcggcagaacctgccgtggcttttctacggggaccaactaggattggcccctcaggtgctttcgtcgacatcactccctacaaacttttcgttcaagggggaaaatcagaatacaaaactaaaatttgtggctgcatcatacgacatcagaggcaacttcttgaagtggcagactttggagggaggcgtactgcagctgtgcccagacacagaaacccgtttaaacgcagcctactccttcggcacaacctaccagcagaattgtgagattccgatcagtaaaatactaatcgatttccccactccgatcttttacgatgtgtaccttgagtacaccgacgaaaaccagcatcaatatatattggctgtgcccgttctgaaccttaaccttcagcataacaaaattttcgtgaaccaagactctaattcggggaagtggttactgacccggaggatctttctggtggatgccgtcagcggccgtgagaatgaccttgggacccaacctcgggtgatcagagtggctacacaaataagcctgagcgtccatcttgttcccaatacaatcaacggcaatatatatcctccgcttatcactatcgcttatagcgatattgacataaaggatgctaacagtcagagcgtgaaagtcagtttttctgttacatatgagatggatcacggtgaggcccatgtgcagacagatatagccctgggcgtgctcgggggacttgctgtgttggcgtcactactgaaaaccgcgggttggaagcgtagaatcggcagccctatgatagatctgcaaacagtcgtaaagtttttggtgtactatgcaggggatctagcaaacgtgtttttcatcattaccgtcggcaccggactgtactggctgatattcttcaaagcacagaaatccgtgagcgtgctcctcccaatgccaatccaagaagagaggtttgttacttacgtgggctgcgcatttgctcttaaggccctgcagtttctgcacaagcttatctcccagatcactattgatgttttctttattgactgggagcggccaaaaggaaaagttttaaaagctgtggagggggagggaggtgtgcgatctgccacagtgccagtaagcatctggagaacatattttgtggccaacgagtggaatgagatacaaaccgtgagaaagataaactccttgtttcaagtgcttacggtgctgtttttcctcgaggtggttgggtttaagaacctggcgcttatggactcaagttcttccctgagtcgcaatccaccgtcttacatcgccccatactcctgcatcttgcggtatgccgtgtccgcagctctgtggctcgccattggcattatccaggttgtgttttttgccgtattttatgaacgttttattgaagataaaatccgacagttcgtagacttatgcagcatgagcaatatctcggttttcctcttgtctcacaaatgtttcggatattacattcacgggcgttccgtgcacgggcatgccgataccaatatggaggaaatgaacatgaacttgaagcgcgaagcggaaaatctctgttcccagcgcggactggttcctaataccgacggccaaacattcgagatcgcgatctccaaccaaatgcgccagcactacgacaggattcatgaaacactgattcggaaaaatggcccagctagattgctcagctcttccgcatccacgttcgaacaatcaatcaaggcatatcacatgatgaataagttcctgggcagctttattgaccatgttcacaaggagatggactacttcatcaaagacaagctgctgctcgagagaatcctcgggatggaattcatggagccgatggagaagagtatcttctataatgatgagggctattcgttttcatccgtcctatattatggtaatgaggccacattgctgatattcgacctgctcttcttctgcgttgtcgaccttgcctgtcagaatttcatcctggcgtccttcttgacatatctgcagcaggagatctttcgatatatcagaaatactgtgggccagaaaaatttggccagtaagacactggtggaccagcggttcctgatctag

SEQ ID NO: 244846 - DNA, 783 bp, synthetic construct
  misc_feature 1..783: note = Description of Artificial Sequence: Synthetic coding sequence
  source 1..783: mol_type = other DNA
atgctattccttgctcttggcagcccatgggccgtggagctgccactctgtggacgcagaacagccctgtgtgcagcagccgcactgagaggcccacgggctagtgtctctcgggcatcctcgagtagcggcccttcagggccagtggccggatggtcaaccggacccagcggcgcagccaggttgctgcggaggcctggcagagctcaaatacccgtctattgggaaggttatgtccgattcctcaatacgcctagtgataagtctgaagacggaaggttgatttacactggaaacatggcacgggctgttttcggtgtcaaatgtttcagttacagcacaagcctcatcggattgacctttctcccatacatcttcacacaaaacaatgccatctccgagagtgtacctcttccaatccaaatcatcttctatgggatcatgggatcctttacggtgatcactcctgtgctgctgcatttcattaccaaaggctacgtgattcgtttgtatcatgaagctactacagatacgtacaaagctatcacctataatgcgatgctcgcagagacttctaccgtattccatcagaatgacgtaaagatcccagacgctaagcacgtgtttaccacattttatgccaagactaaatcgctcctggtaaaccccgtcctattcccgaacagggaggactacatccacctcatggggtatgataaagaggagtttatcctctatatggaggagacatctgaagaaaagcgccataaggacgataagtag

SEQ ID NO: 244847 - DNA, 324 bp, synthetic construct
  misc_feature 1..324: note = Description of Artificial Sequence: Synthetic coding sequence
  source 1..324: mol_type = other DNA
atgctgttcctggctttaggctccccctgggcagtggaactgcccctgtgcggacggaggacagctctgtgtgcggctgcagctctgaggggacctagagctagcgtgtctagggccagctcatcaagcggcccatctgggcctgtcgccggatggtctactggaccctccggtgctgccaggttattgagacgccctgggagagcacaaatacccgtgtactgggaggggtacgtccggttcctaaatacaccttctgacaaaagtgaggatggccgactgatttataccggaaatatggcgcgtgctgtctttgggaaatag

SEQ ID NO: 244848 - DNA, 918 bp, synthetic construct
  misc_feature 1..918: note = Description of Artificial Sequence: Synthetic coding sequence
  source 1..918: mol_type = other DNA
atggagctgcactacctggccaagaagagcaatcaggcggacctgtgcgatgcgcgagactggtctagtaggggtctgcctggcgatcaggccgacaccgcggctaccagggctgccttatgctgccagaagcaatgtgcctctaccccacgcgcaacggagatggaagggtccaaactgagctcctctccagcatccccatcgtctagcttacagaactcaaccctgcagcctgacgcgtttcctccgggtctcttacacagtggtaataaccagatcaccgctgagcgaaaagtgtgtaactgttgcagtcaggagttagaaacctcattcacctacgtggataagaatattaacctggagcagcgaaaccgatcatcccctagcgcgaaaggccacaaccaccccggagagctcggctgggagaatcctaatgagtggtcccaggaagcagccatctcccttatttcagaagaggaagacgatacctcctcagaagctacctccagcggcaaatcgatcgactacggctttatctcagcgatactattcctggtaactgggattctcttagtcataatttcatatatagtgcccagggaggtgactgttgatcccaacacagtggccgcacgagagatggagcggttggagaaagaatctgcgagactgggcgcacacctggatcgctgcgtcatagccggattgtgcctattgacgcttgggggagttatcctctcttgtcttcttatgatgagcatgtggaaaggggagctgtaccgcagaaacaggttcgcctcttcgaaggaatccgccaaactctatggtagcttcaactttcggatgaagactagcaccaacgagaacacccttgaactctctctggtggaagaagacgccttggccgtccagagttag

SEQ ID NO: 244849 - DNA, 951 bp, synthetic construct
  misc_feature 1..951: note = Description of Artificial Sequence: Synthetic coding sequence
  source 1..951: mol_type = other DNA
atgtcaggagatacgtgtttgtgtccagcatcaggagccaaaccaaagctcagcgggtttaagggcggaggattgggtaataagtatgtgcagctgaacgtcggtggcagcctgtattataccacagtgagggctttgacgagacacgacactatgctcaaggcgatgttttccgggaggatggaagtcctcaccgataaggagggttggatactgatcgaccgatgcggtaaacactttggaaccatcctcaactacttgcgcgacgacactatcactctgcctcagaaccggcaagagatcaaggagcttatggcagaagccaaatactatctgatccaggggctcgttaatatgtgtcagtccgctttacaggacaagaaggactcgtaccagccagtttgcaatattccgatcatcacctccctgaaggaagaggagcggctgattgaaagctctactaaacctgtcgtcaaacttttatataatagaagtaataacaaatactcatacacaagcaactccgatgatcacttattgaagaacatcgagctgtttgataaactgtcactgcggttcaacggccgtgtcctgttcatcaaagacgttattggcgacgagatatgttgttggtcgttctacggacaaggccgaaagctggctgaagtttgctgtacaagtatagtgtacgcaaccgagaagaagcagacaaaggtcgaattcccagaagcacggatctacgaggaaactctgaacgtgctcttgtacgagactccaagagtccctgacaactctctgctcgaggcgacctcccgttcacgcagtcaagcatcaccttccgaggatgaagagactttcgaacttcgcgatcgggtgcgtcggattcacgtgaagcgctacagtacctacgacgacagacaactgggccatcagtccacacacagagactag

SEQ ID NO: 244850 - DNA, 210 bp, synthetic construct
  misc_feature 1..210: note = Description of Artificial Sequence: Synthetic coding sequence
  source 1..210: mol_type = other DNA
atgacgacactaatacccattctgtcaacctttctgtttgaggacttctcaaaagccagtggcttcaaaggacaacgacctgagacattgcacgaaaggttaacactcgtatccgtgtacgccccatacctgttgatcccctttattctcctgatttttatgctccggagtccgtattataagtacgaagaaaaacggaaaaagaaatag

SEQ ID NO: 244851 - DNA, 1125 bp, synthetic construct
  misc_feature 1..1125: note = Description of Artificial Sequence: Synthetic coding sequence
  source 1..1125: mol_type = other DNA
atggtgctgtgggagtcacccaggcaatgtagcagctggactctgtgtgagggattctgttggttgcttctcctacctgtgatgctactgatcgttgcgagacctgtgaaactggctgcctttccaacaagtctgtccgattgccaaacaccaacaggctggaactgctctgggtacgacgacagagagaacgacctatttctctgtgacaccaacacatgcaaattcgatggcgagtgcctcaggatcggcgatactgtcacctgtgtgtgccaatttaagtgtaataacgattacgttcccgtgtgcggctcaaacggtgagtcataccagaacgagtgctatctacgtcaggccgcttgcaaacaacagtccgaaatcctcgtagtttccgagggtagctgcgcaacagacgcaggcagcggttccggagacggtgttcacgaggggtctggcgagacgagccaaaaggagacttccacctgcgacatttgccaattcggagccgagtgtgatgaggacgcggaggatgtctggtgtgtgtgtaacatcgattgtagccaaacaaacttcaatcccctgtgcgccagcgatgggaagtcatatgacaacgcctgtcagattaaggaggcgtcctgccaaaaacaggagaagatagaagtgatgagtttggggcgttgtcaagacaacactaccacaaccaccaagtctgaggatggccattatgccaggaccgattacgctgaaaacgctaacaagttggaggagtctgccagagagcaccatattccttgcccagaacattacaacggtttttgcatgcatgggaagtgcgaacacagcatcaacatgcaggaaccatcctgtcgatgcgacgccggttacacaggccagcactgtgaaaagaaagactatagcgttctgtacgttgtcccgggacctgtaaggtttcagtacgtgctgatcgccgctgtaattggcactattcagatcgctgtcatctgtgtcgtggttctgtgtatcacccggaagtgtccacgctccaaccgcatacaccgccagaagcagaatacaggacactactcctcagataataccacacgagcttctacaaggctcatctag

SEQ ID NO: 244852 - DNA, 528 bp, synthetic construct
  misc_feature 1..528: note = Description of Artificial Sequence: Synthetic coding sequence
  source 1..528: mol_type = other DNA
atggtactgtgggaaagcccgaggcagtgttcttcctggacactatgcgagggattctgctggctgctcctgttgcccgtgatgctgctgatcgtcgccagaccggtgaaactggccgcattccccacctccttgtcggactgccagacgcctaccgggtggaattgttccggctatgacgaccgcgagaacgatttgttcctatgcgacactaacacttgtaagttcgacggcgagtgtctgagaatcggggataccgttacctgtgtctgtcaattcaagtgcaacaatgactacgtgccggtgtgtggcagcaatggcgaatcatatcaaaatgaatgctacttgcgacaggccgcttgcaagcagcagagcgagatcctggtggtgtccgaagggtcctgcgctaccgacgcagggtcagggtcaggcgacgggggacggtcctgcctatttacttaccttaaaatttattggtggattctgctgtgcatcttcacctatgtatgctccatcagcgacatatag

SEQ ID NO: 244853 - DNA, 2427 bp, synthetic construct
  misc_feature 1..2427: note = Description of Artificial Sequence: Synthetic coding sequence
  source 1..2427: mol_type = other DNA
atggccgaattgctggcatcagcaggctccgcctgttcctgggacttcccaagggcacctcccagtttccctccacctgctgcttccagagggggattgggaggcaccaggagctttaggccccacagaggcgctgagagcccgagacccggaagagatcgcgatggggttcgcgtccccatggcctcatccaggtgtccagctccacgaggatgtcgctgcttgcccggagccagccttgcctggctgggaacagtcttgctgctgctcgcagactgggttctgctacggacggcactccctcgaatcttcagtcttctggttcctactgccctccctctgctgagagtctgggccgtgggcctttcgaggtgggccgtgctgtggctcggcgcttgtggagtattgcgcgctaccgtcggaagtaagtccgagaatgccggagcccagggatggctggccgcactcaagcctctggctgccgctctggggttagcacttcctggcctcgccctcttcagggagctgatatcctggggggctcccggatcagctgacagtaccaggctgttacactggggttcccaccccactgcattcgtggtgtcgtacgcggctgctctccctgcggctgccctctggcacaaactagggtctctgtgggtcccaggaggccaggggggatccggaaaccctgtgaggcggctcctcgggtgcctaggcagtgagaccaggcgactgtctctgtttttggttctcgttgtgctctcatctcttggcgagatggccatcccttttttcaccggacgcctgacggactggattctgcaggacggaagcgccgatacatttacccgcaatctgactctaatgtccatactgacaatcgcctcagccgtgcttgaatttgtgggtgatggcatatacaacaacacaatgggacacgtgcacagtcacctgcaaggagaggtgtttggcgctgtcctgcggcaggagactgagtttttccagcagaaccagactggcaatattatgtctagggtaaccgaagacactagcactctttccgattcactcagtgagaatctttccttgttcctttggtatttggtaaggggtctctgtctgctgggcattatgctatggggtagtgtgtccctcaccatggtgactcttatcactctccccctgctcttcttactccctaaaaaggtgggcaagtggtaccagctgttagaggtgcaggttagggagtcactcgctaagagctcccaggtggccattgaggccctctcagcaatgccaaccgtgcgctcttttgctaatgaggaaggtgaagcccagaagttccgtgagaagttacaggagatcaagaccctgaatcagaaggaggctgtggcttatgccgtgaatagttggactacttcgatatctggcatgttactgaaggtcgggatcttgtacatcgggggtcagttggtgacttccggggctgtaagctctgggaatcttgtcactttcgtactataccagatgcaattcacccaagcagtggaagtcctgttgagtatctaccctcgagtccagaaagccgttggctcctccgaaaagattttcgagtatctggataggacaccacgttgccccccatccgggctcctgacacctctgcacctcgagggacttgtgcaattccaggatgttagcttcgcgtacccaaatcgcccagacgtcctcgtattgcaaggcctcacgtttactcttcgccctggagaggttacagccctagttggcccaaacggatccggcaagtcaaccgtggccgcattactacagaatctgtaccagccaaccggcggtcaactgctgcttgatgggaaacctcttcctcagtatgaacatagatatctccatcgccaggtggcagcagtgggacaagagccacaagtgtttgggaggtccctgcaggagaatatagcctacgggctcacccagaagcccacaatggaggaaattacagcagctgcagttaagtctggcgcacattcttttatctcgggacttccccagggctacgataccgaagtggacgaggccggttcccagctgtccggcggtcaacgccaggcggtcgccctggcaagggcgctgattaggaagccttgcgtcctcatcctggatgatgcaacgtctgcactcgatgcaaactcccaacttcaggtggaacagttattgtacgagtctccagagcgatactcccgcagtgttctgctaattactcagcacctgagcttagtggaacaggctgaccatatcctgttcctggagggcggtgctattcgggaaggaggaactcatcagcaactcatggagaagaagggttgttactgggctatggtgcaggctccggcagatgcccctgagtag

SEQ ID NO: 244854 - DNA, 2427 bp, synthetic construct
  misc_feature 1..2427: note = Description of Artificial Sequence: Synthetic coding sequence
  source 1..2427: mol_type = other DNA
atggctgagctactggcatccgctggttccgcctgcagctgggactttccccgagcaccaccctcctttccgcctcccgcagcttccagggggggactcggcggaaccaggagcttccgacctcataggggagccgaatcccccaggcctggcagggaccgtgacggagtgagggtgcccatggctagctctcgatgcccagcaccccgtggatgtcggtgcttaccgggagctagcttggcctggctgggcaccgtcctgctgcttttggccgattgggtgctgctccgtaccgccctgcctagaatcttttccctcctggttcccacggccttgcctttgctgagggtctgggcagtgggcctatcgcgctgggccgtcctgtggctcggcgcttgtggcgttctgagagcaaccgtgggctccaagtcggaaaacgccggtgcccagggttggctggccgctctcaagccgctggctgcggctctgggattggccctgccagggctggcactctttagagaactgatctcatggggagctcctggatctgccgacagcacgcgcctgctgcactggggcagtcatcctaccgcctttgtggtctcttacgccgcagccctcccggctgccgcactttggcacaagctagggagtctatgggtgcccggagggcaagggggatccggcaatcccgttcgccgactgttggggtgcctgggatcagaaacaagacgcttgtccctgtttcttgttttggtggtgctcagctcactgggggaaatggcaatcccttttttcactggccgtctgactgattggatcctccaggacggatccgctgacaccttcactaggaacctgacgctcatgtccatcttaacaattgcctctgccgtactcgaatttgtgggtgatgggatctacaataacactatgggccacgtccattctcaccttcaaggcgaagtgtttggcgctgtcctgaggcaggaaaccgagttcttccagcagaatcagaccggtaacattatgagccgggttacagaggataccagtactctaagcgattccctatcagaaaacctcagcctgtttctctggtacctggtgcgaggtttgtgcttactgggcatcatgctgtggggatcagttagcctgaccatggtaacgctgataactttgccactcttgtttctgctgcccaaaaaggtggggaagtggtaccagctgctagaagttcaggtgagggagtccctggcgaagtcctcgcaggtggccatcgaagctctgagcgctatgccaactgttcggagcttcgccaacgaggaaggcgaggcccagaagttccgcgagaagttgcaggaaataaaaacactcaaccagaaggaggctgtggcctatgctgtcaactcgtggacgaccagcatctctgggatgttgctcaaggtgggtattctctatattggcggacagctcgtgacttcaggcgctgtctcgtccggcaacctggtgacatttgtactgtaccagatgcagtttacacaggccgtcgaagtgttactcagtatataccctagagtgcaaaaagcagtggggagctccgaaaaaattttcgagtacctggataggaccccacggtgtcccccaagcggcttgttaacaccactccatcttgaaggcctggttcaattccaggacgtgagtttcgcctaccccaaccgccctgatgtcctggtgctccagggactcacgttcactctgagaccaggagaagtaactgctctggttggcccaaatggaagtggtaaatccaccgtcgccgctctactccagaatctctaccagcctactgggggacagttgcttttagatgggaagccattgccccagtacgagcaccgatatctccaccgacaggttgctgccgtgggccaggaaccacaggtcttcggacggagtctccaggagaatatagcatacggacttacccagaaacctacaatggaggagatcacagctgcggctgtgaagagcggagcacacagctttataagcgggcttcctcagggctatgataccgaggtggatgaggccggttcccaactttctgggggtcaacggcaagccgtcgccctcgctagggccctcattaggaaaccatgtgtattgatcctcgatgacgctacctctgcacttgacgcaaactctcagctgcaggtggagcagttgctttacgaaagcccagagcgatattcacggtccgttctcctgatcacccagcacctgagtctggtggagcaagcagaccatattctgttcttggaaggtggcgctatcagagagggagggactcaccagcagctcatggagaaaaagggctgctactgggccatggttcaggctcccgctgacgcacctgaatag

SEQ ID NO: 244855 - DNA, 2427 bp, synthetic construct
  misc_feature 1..2427: note = Description of Artificial Sequence: Synthetic coding sequence
  source 1..2427: mol_type = other DNA
atggctgaactcctggcatctgcgggttcagcctgtagttgggacttccccagggctcctcccagcttcccaccccctgctgcttcacggggaggtctgggaggaaccaggtcattcaggccgcacagaggggcagagtcaccgagaccgggaagagacagggatggggtgagggtcccaatggcttcctcgagatgtcctgctcccaggggctgtcggtgtttgcccggagcctcactggcctggctggggacggtgctccttctactcgccgattgggtgcttctgcgaacagccttaccaaggatcttcagcctgcttgtccctaccgctctcccccttctccgggtttgggcagtgggcctgtctcgctgggccgtgctctggctgggagcctgtggagttctgcgagctacggttggaagcaagagtgagaacgccggagcccagggttggctggcggctctcaagcccctggctgctgccctgggccttgcactacccggtctggcgttgttccgggaactgatttcttggggcgctccaggctctgcagattcgacacgcctcctccattggggctctcacccaacggcctttgtagttagttatgctgcagcgctccccgcagccgctctgtggcataaattgggcagcctttgggtgcctgggggtcagggcggatcagggaaccccgtgcgccgtcttttggggtgtctcggatccgaaacacggaggctcagtctttttttggtgctggtggtgctctcctcgctgggagaaatggcgattccattcttcactggcaggttgacagattggatcctgcaagacggctccgccgatacgttcactcggaatctgaccctgatgtcgatcctaactatcgcttccgccgtcttagaattcgtcggcgatgggatctataataatacaatgggacatgtccactcccatttacagggggaagtgtttggcgcagtgcttaggcaggagactgagttctttcagcagaatcagacagggaatatcatgagcagagttacagaagacacgagcactctctccgactcgctttccgagaatctttccctgttcctctggtatctcgtgcggggtttgtgcctgctgggaattatgctctgggggagcgtgagtttgactatggtcactttaattaccctcccacttctgttcctcctcccgaagaaggtcggaaaatggtaccagttgcttgaagtccaggtgagggaaagtttggctaaatcatctcaggtcgccatagaagctctctccgccatgcctacagttcgttccttcgcaaatgaagagggtgaggcacagaaattcagagaaaagttgcaggagattaaaactcttaatcaaaaagaagctgtggcctatgccgtcaattcatggactacctctatctcggggatgttgctgaaagtcggcattttatacatcggcggacagctggtgacctccggcgcagtgtccagcggcaaccttgtgacctttgtgctataccagatgcagtttacgcaggctgtcgaggtactcctgtccatctatcctcgggttcagaaagccgtggggagctccgagaagatatttgagtacctggacagaacccctaggtgtcccccttctgggctattgaccccgctccatcttgaaggccttgtgcagttccaagacgtgagctttgcctaccccaaccggcctgatgtcctggtattacaaggcctcacctttacactacggcctggtgaggtgacagcattagtcgggcctaacggaagcggaaagagcacagttgccgctctgctgcaaaacctgtatcagccaactggagggcagctgctgttggatggtaaaccactgccacagtatgagcaccggtatctccatcgccaggtggcggctgtcggacaggaaccccaggtgtttggaaggtcactccaggaaaacatcgcatatggccttacacagaagcctacaatggaggaaattacagctgctgcggtgaagagcggcgctcactccttcatctccggcctgccgcaggggtacgataccgaagtcgatgaagccggttcacagctttctggtggtcagagacaggccgtggctctagctagggcgctcattcgtaaaccgtgcgtgttaattctggacgacgccacatccgcccttgacgcgaactcacagctccaagtggagcagcttctttatgaaagccctgaacggtattcaagatcggtcctccttatcactcaacacctctctttagtggagcaagcggaccacatactgttccttgagggaggagccattcgcgaaggtggcacccatcagcaactcatggagaaaaagggttgctattgggcgatggtgcaggcacctgccgatgcaccagagtag

SEQ ID NO: 244856 - DNA, 2427 bp, synthetic construct
  misc_feature 1..2427: note = Description of Artificial Sequence: Synthetic coding sequence
  source 1..2427: mol_type = other DNA
atggctgagctcttagcgtccgcgggatccgcctgctcctgggattttcccagagctcccccatcgtttccaccccctgctgcatccagaggaggattgggcggtactagaagcttccgaccacacaggggcgcagagtcgccccgtccgggtagagatagggacggggtccgggtgcctatggcctcctcccgatgccccgcaccccgtggttgtcgctgtttgcctggagcctccctagcgtggctgggcactgtcctgctgctgctcgcggactgggtgctgctgcggacggcacttccgagaatctttagcctgctcgtacccacagctttgccgttgctgcgggtgtgggccgttgggctgagtcggtgggccgtcctttggctgggcgcatgcggagtcttgcgagcgactgtcggctccaaatccgaaaatgcaggggcacagggctggttggctgctctgaagcctctggccgctgcattgggactcgccctgcccggactagcactttttcgcgaactgatatcctggggcgctccgggaagcgcagatagtacgagactactgcactggggttcacacccaacggccttcgttgtttcatatgccgcagccctcccggcagccgcactgtggcacaagctcggcagcctgtgggttccgggtgggcaagggggttccgggaatcccgtacgacggctcctcggttgtctcggctcggagaccaggagactgagcctgttcctggtgttggtggtcctatcatctctgggagaaatggctatcccattcttcacaggcagattgaccgactggatcctgcaggacggatctgccgatactttcactcgtaacctgactctgatgagcattcttaccatagcttccgctgttctggaattcgtcggtgatgggatctataacaatactatgggccacgtgcacagtcacctgcagggggaggtctttggagccgtcctgagacaggaaacagaattcttccagcagaatcaaaccgggaatatcatgagcagagtgacagaagacacatctacactcagcgattcactctccgagaacctaagtctgttcttgtggtacctagtccgtgggctttgtcttctcggaatcatgctgtggggtagcgtgtcccttactatggtcacactcatcacactccctttgctctttcttctacccaaaaaggtgggcaagtggtaccagctgttagaagtgcaggtgcgcgaaagtctggcaaagtcttcccaggttgccattgaagctttgtccgccatgcctaccgtgcggtccttcgccaatgaggagggagaagcccagaaattccgagagaaattacaggaaattaaaacactgaatcaaaaagaggccgtggcatatgcggtgaactcttggaccactagtattagcggcatgttgttgaaagtagggattctatatatcgggggacagctagttacctcaggggcagttagcagcggtaatctggtcacattcgtcctttaccagatgcagtttacacaggccgtggaagttcttctcagtatctaccctcgcgttcaaaaggctgtgggctcttccgagaaaatttttgaatacctggatcgcactcccagatgtcccccatccggactgctcacgcccctccatctggagggcctagtacagttccaggatgtctctttcgcctatcctaatcggcctgacgtactggtcctgcagggactgacttttacactgcgcccaggagaagtgaccgctctagtgggcccaaacggttctgggaaatccaccgtggccgctctgcttcagaatctctatcaaccaactggcggacaactgcttctcgatggcaagcccctcccccagtatgagcacaggtacctgcaccgccaggtggctgcggtggggcaggagccgcaggtcttcggacgaagtctgcaggagaatattgcctatggattgactcagaaacctacgatggaagagatcaccgctgccgcagtgaaaagcggcgcacacagctttatcagtgggctaccccaaggctatgataccgaggtggacgaagccggatctcaattgtccggcggtcagcggcaagctgttgccctcgccagagctctcatccgcaaaccttgcgtacttatcctggacgacgcaacatctgcccttgacgctaatagccagttgcaggtggagcaattgctctatgagtctcccgaaaggtacagcagatcagtgcttctcataactcaacacctgtccttggttgaacaggctgatcatatcctgtttctggaaggtggagccattcgcgagggaggcacacatcagcagttgatggagaagaagggctgctactgggccatggtccaggcacctgctgatgcccctgaatag

SEQ ID NO: 244857 - DNA, 2427 bp, synthetic construct
  misc_feature 1..2427: note = Description of Artificial Sequence: Synthetic coding sequence
  source 1..2427: mol_type = other DNA
atggccgagctgctggcttcagccggatccgcctgttcctgggattttccaagagcaccaccatcttttccacctcccgcagcatctcgcggaggcctgggcggaactcgcagctttcgaccccataggggggcagagtccccaagacctggcagagacagagatggggtgagagttccaatggcgagttcacggtgcccagccccacgcggatgtcgatgcctgcccggagctagcttggcctggctcggaactgtcctcctgctcctcgcggattgggtgcttctgcggacggctctgcccagaatcttttcgctgctcgtgccaacagccttaccgctattgcgggtgtgggccgtgggtctgagccgctgggctgttctgtggttgggtgcgtgcggggtgctcagagctaccgtcggatcaaaatctgaaaatgctggtgctcaaggctggctcgctgctctgaaaccgctggccgctgccttaggcctcgcactaccgggtctggctctctttagagaactgatcagttggggggctccaggatccgccgacagcacaagattgttacactggggctctcatccaaccgccttcgtcgtgagctacgcagcggcactgcccgctgctgccctgtggcacaaactgggtagtttatgggtccccggtggccagggcggatcgggtaatcccgtccgccgattgctgggatgtctaggttccgaaacaaggaggttgagcctgtttttagtcttagtggtgctcagcagcttgggggagatggctatccccttttttactggtagactgacagattggattctacaagatggttcagctgatactttcaccaggaatcttaccttaatgtcaatcctcactatcgcaagcgctgtactagaatttgtcggggacgggatatataacaataccatggggcatgtgcatagtcacctccaaggagaggtgtttggggcagtgctccgacaggaaacggaattttttcaacaaaatcagactggcaacataatgtcgcgagtgactgaggacacaagtaccctgagcgattccttgagcgaaaatctgtccctgttcctgtggtatctcgtccgcggattatgtctactggggatcatgctgtggggctctgtgtctctgactatggtgacattaatcacacttcccctccttttccttctgcctaaaaaagttgggaagtggtatcaactcctcgaagtgcaggtacgggagtccctcgccaagagttcccaggttgccatagaagccctttccgcaatgcccacggtgcgctcctttgccaatgaggagggcgaagcccagaaattccgagaaaaacttcaggagatcaaaaccctgaatcagaaagaagcagttgcatatgcggtgaatagctggaccacttcaatttcaggcatgctgctgaaagtggggatcctgtacattgggggtcagttggtaacgagcggagctgtaagcagcggtaatcttgtgacatttgtgctgtaccagatgcaattcacccaggccgtagaggtgttactatctatctatcctagggtccagaaggcagtcggcagctctgaaaagatttttgagtatctagatcgcacccctagatgccccccatcaggcctgctcacaccactgcatctcgaaggtctcgtccagtttcaggatgtgagctttgcctaccctaatagacctgatgtcctggtgctgcagggcctcacctttaccttgaggccaggagaagtcacagctctagtcgggccaaatgggagtggaaagtccactgttgcagccctgctgcaaaatctgtaccagcccacaggaggacagctcctgctcgacgggaaaccactgccacagtatgagcatcggtatctgcaccggcaggtggccgcagtggggcaggagccacaggtgttcggcagatcactgcaagagaatatagcttacgggctgacccaaaaaccaaccatggaggaaatcaccgccgctgccgtgaagtctggcgctcactcatttatctctgggcttcctcaaggctatgatacagaagtggacgaggccggatcacagctgtcagggggacagagacaggctgtcgccctggctcgtgccttaataagaaaaccctgcgtgctcatcctcgatgatgcaacctcggcacttgatgcaaactcgcagctccaagtggaacaattgctgtacgaaagcccggaacggtactcacggagtgttctgctgataacccagcatctgtccctcgtcgagcaggccgaccacatcctgttcttggagggaggcgcaatccgagaaggcggaacccatcagcaactcatggaaaaaaaaggctgctactgggctatggttcaggcccctgcggatgccccagagtag

SEQ ID NO: 244858 - DNA, 1644 bp, synthetic construct
  misc_feature 1..1644: note = Description of Artificial Sequence: Synthetic coding sequence
  source 1..1644: mol_type = other DNA
atggcaattccctttttcacaggacgcctgacagattggatcctgcaggacggaagtgctgacactttcacgagaaaccttacccttatgtccattctaaccatagcttcagccgtgcttgaatttgtaggagatggtatctataacaacacaatggggcacgtccatagccatttacagggcgaggttttcggagctgtcctccgccaagaaactgagttttttcagcagaaccagacaggaaacatcatgagccgagtgaccgaggatacgtccaccctttccgattccctgagtgaaaatctgagtctctttctgtggtacctggtgcggggtttgtgtctgctgggcatcatgttatggggctctgttagcctcaccatggtgacgttgataaccctgcctctcctgtttttattgcctaagaaagtggggaagtggtatcaactgctggaggttcaagtcagagaaagtttggcaaaaagctcccaggtggcaatcgaagctcttagcgctatgccgaccgtgagatccttcgcaaacgaggagggggaagcccagaagttccgcgaaaagctccaggagatcaaaacccttaaccaaaaggaggcagtcgcatatgccgtgaattcttggacaacctcgatctccggcatgctcctaaaggtgggtattctgtatatcggcggacagctggtgacaagcggcgctgtgagctccggaaatttggtgacattcgtgttgtatcagatgcagttcacccaggcagtggaagtcctgcttagcatttaccccagagtccagaaagccgtcggctcatctgagaagattttcgaataccttgacaggaccccaaggtgcccccctagcggactcttgacacccttgcacctggaaggcctcgtgcagtttcaggacgtgtctttcgcttacccgaacaggccagacgtactcgtgctccagggcctcacctttactctgcgtccaggggaagtgacagcgctagtcggaccaaatggaagcggtaaatctacggtagcagcgctgctgcagaacttatatcagccgactggcggacaattattgcttgacggaaagcctttgccccagtatgagcacaggtacctacaccgacaggtagccgctgttggtcaagaaccccaggtttttggtcggagtttgcaagagaacattgcgtatggcttaacacaaaagcctactatggaggagatcaccgccgctgccgtaaaaagcggggcacattcctttatttcaggcttgccccaaggctacgatacagaggtggatgaagccggatcccagctgtcaggcggtcaacggcaggctgtcgctttagccagagcattgataagaaagccttgtgtcctcatcctcgacgacgccactagcgctttggatgctaacagtcaactgcaggtggagcagttactctacgagtcacccgagcggtattctcgcagcgtgctgctgataacacagcatctatccctcgtggagcaggctgaccacattctcttcctagaggggggagccattagggaagggggtacacatcagcagctgatggagaagaagggttgctactgggctatggtacaagctccagccgacgcacctgagtag

SEQ ID NO: 244859 - DNA, 2427 bp, synthetic construct
  misc_feature 1..2427: note = Description of Artificial Sequence: Synthetic coding sequence
  source 1..2427: mol_type = other DNA
atggccgagcttctggcgagcgccggatctgcatgtagttgggatttccctcgggcacctccatccttccccccacccgctgcttcgcgcggtggcctcgggggaacgaggagtttccgtccccatagaggggctgaaagcccccgacccggtagagatcgggacggcgtacgcgtgcctatggccagcagcaggtgcccagctcctcggggatgccgatgcctgccaggtgcatccctcgcttggctggggaccgtgctactactcctggcggattgggtgctgttgagaactgcccttcccagaattttctctttactggtaccaaccgctttaccactgctgagagtttgggctgtgggcctgtcccgctgggccgtcctgtggttaggcgcatgcggtgtgctgagggcaacagggggaagtaagagcgagaacgcaggcgctcaaggctggctcgcagctctcaagcctctggctgcggctttaggacttgccctgccaggactcgcactgttccgggaacttattagttggggagcgcctggaagtgctgacagcactcggctgctacattgggggtcccacccaaccgcattcgtcgtgtcttatgccgctgctctgcctgcagccgcattatggcacaagctcgggtcactgtgggtgcccggaggacaagggggatcgggaaatcctgtgagacgtcttctgggctgtcttggatccgagaccagacgcctctccctgtttctggtgttagtggtgttgtcttctctgggggaaatggcgatccctttctttaccggcaggctgaccgattggatcctccaagacggaagcgctgatactttcacccggaatctgactttgatgtccatcctgaccatagccagtgcggttcttgagttcgttggggatggaatttacaacaatacaatggggcacgttcatagccacttgcagggcgaggtgtttggcgcagtgctacgccaggagaccgagttttttcagcaaaaccagacagggaacattatgagccgggtaaccgaggatacctcaacactgtccgactcactgagcgaaaacctatccctgtttctatggtatctcgtcagaggactgtgcctcctggggataatgctgtggggctccgtgtcattaactatggtgactctcataaccttgccattgttgttcctcctgcctaagaaggtaggaaaatggtatcaactattggaggtgcaggtcagggaatcactggcaaagtctagtcaggtggctattgaggctctctccgccatgcccaccgttaggagttttgcaaacgaggagggtgaggcccagaaatttcgcgagaagcttcaggaaatcaaaacactcaaccagaaggaagcggttgcttatgcagtcaactcatggaccacatccatcagcggaatgctgctgaaagtagggatcctgtatataggtggccaactggtcaccagtggtgccgtgtcaagcggtaacctagtcacttttgtgctgtatcagatgcaattcactcaagcagttgaagtgctattaagtatctaccctagggtccaaaaggctgttggatcttccgaaaagatctttgaatatctggacaggacacccagatgtcctccttctgggttgcttactcctctgcacttggaaggcctggtccaattccaagatgtgtcattcgcataccccaaccgccctgatgtgctggtgttgcagggcttaactttcaccctccgtcctggagaagtgactgccctggtaggccctaacgggagcggcaaatccactgtcgccgctttgctccagaatctctaccagccaactgggggtcagttactgctggacgggaaaccgcttccacagtacgagcaccgctatttgcataggcaagtggctgcagtcggacaggagccccaggtgtttggccgatccttgcaagaaaacatagcctacggactgacccagaagcctaccatggaggaaatcaccgcagccgcagtgaagagcggagcacactcctttatttcagggctcccccagggttacgataccgaggtcgatgaggccggatctcagttgtcaggcggacagagacaagctgtcgcgctggcccgagcattaatacgcaagccttgcgttttgatactggatgacgccacctccgcattggacgctaactcgcagctgcaggtcgaacagctgctgtacgaatctccagagcgctacagcaggagtgtgctcctgatcacacagcatctgtcactcgttgagcaggcagaccacattctgttccttgaaggcggagccatacgcgaggggggaacacaccaacagttaatggagaagaaaggctgctattgggctatggttcaggcccctgcagatgctccggagtag

SEQ ID NO: 244860 - DNA, 2427 bp, synthetic construct
  misc_feature 1..2427: note = Description of Artificial Sequence: Synthetic coding sequence
  source 1..2427: mol_type = other DNA
atggcagagctcctggccagcgcaggaagcgcttgtagctgggatttccccagggcacccccaagtttcccacccccagccgctagtagagggggtctaggtggaacacggtcttttcgacctcataggggagctgaaagtccccgacctggcagagaccgcgacggggtccgagtcccaatggcctcctctaggtgcccggcacctcgcggatgcaggtgtctgccaggtgcctcgctggcgtggctcggcaccgtcctactgttgctcgcagattgggtgctgctcagaactgccctgcccaggatcttttcgcttcttgtgcccacggctttgcccctcctcagagtgtgggccgtgggcctgtccagatgggccgtgctgtggctcggggcttgcggcgtgctgagggccaccgtcggcagtaagtcggaaaacgcgggagcgcaaggctggctggcggcactgaaacctttggccgctgctctgggacttgccctgcccggactcgccctgtttagagagctgatcagttggggcgctccaggatctgccgattctacacggcttctgcactggggtagccatccgacagcctttgtggtttcttatgccgcagcacttccagcagccgcattgtggcataagctgggcagcctgtgggtccccggaggtcaggggggatctggaaaccctgtgaggcgcctcttgggatgcctcgggagcgaaacccggcgtctgtccctgttcttagtgctcgtcgtgctgagctccctcggtgagatggccattccattctttaccgggaggctgaccgactggatcctgcaggatgggagtgctgacacattcacaagaaacctgacattgatgtccatcctcactatcgcctccgcagtgctggaattcgtcggggatggtatctataacaacaccatgggacacgttcactcccacctgcagggggaggtgtttggcgctgtgctgaggcaggaaaccgaattttttcaacagaaccagactgggaacataatgagccgcgttacagaagatacctctaccctgtcagacagcctttctgagaacctatccctttttctctggtacctggtcagaggcctgtgcctcctcggtatcatgctgtggggaagcgtatcgctcactatggtaacgcttatcaccctgcctctgttatttctcctgcctaagaaagtgggaaaatggtatcagctcctggaagtgcaggtgagggagagcttggccaaaagttcccaggtggccattgaggcactttccgccatgcctactgtccgctctttcgctaatgaggagggggaggctcagaagttccgtgagaagctgcaggagataaagaccttaaaccagaaggaagccgtcgcttacgccgtcaattcctggactaccagcatttccgggatgctcctcaaggttggcatcctgtacatagggggacagttagtgaccagtggggctgtgagctccggcaatttggttaccttcgtcctctatcagatgcaatttacccaggctgtggaagtactgttatccatataccccagggtccagaaggccgtgggaagttccgagaagattttcgagtatctggaccgcactcccaggtgccccccttccggccttcttacccccttgcatctggagggcctggtgcagttccaagatgtgagttttgcgtaccctaaccgaccagatgtcctggttcttcaagggctgacatttactctccggccaggcgaagtgactgccctggttggccctaacggatctggtaaatcaactgtggccgcacttctccagaacctatatcaacccactggaggccaactccttcttgacggaaagccactaccccaatacgaacaccgctacctgcaccgccaggtggccgctgtgggtcaggagcctcaagtgttcggaagatccctgcaggaaaacattgcatacggcttaactcagaaacccacgatggaagagatcaccgctgctgctgtcaaaagcggagctcattcattcatctccggcctcccccaggggtatgacactgaggtggacgaggcaggatcccaactgtctgggggacaacggcaggctgttgccctcgccagagcccttattagaaagccgtgcgttctcatcttggatgacgccacctcagctttggacgcaaactctcaattgcaggtcgagcagcttttgtacgaaagtcctgaacgctactcccgctccgtcctcctgatcactcaacacctgtcacttgttgagcaagctgatcatattttgttcctagagggaggagcaattcgagagggcggaacccatcagcagctcatggagaaaaagggttgttattgggccatggttcaggctcctgccgacgccccagagtag

SEQ ID NO: 244861 - DNA, 2427 bp, synthetic construct
  misc_feature 1..2427: note = Description of Artificial Sequence: Synthetic coding sequence
  source 1..2427: mol_type = other DNA
atggctgaactgctggcctcagccggttctgcctgttcttgggacttccccagagccccaccatcgtttccccctcctgccgcatcccgcggaggcttgggtggaacacgaagttttaggccccacaggggtgccgagtccccgaggcccggacgagaccgagatggcgtcagggtgcccatggccagtagtcgctgtccagccccacgcggatgcagatgtttacctggtgcctcgctggcctggctgggtacggtgctgttactactcgcggattgggtgcttcttcgtacagctctgcctcggatcttcagcttgctcgtgccgaccgcgctgccattactacgcgtttgggcagttggcctctctcgctgggctgttctgtggctgggcgcttgtggagtcctccgcgctacagtgggctcaaaaagcgagaacgccggagctcaaggctggcttgccgctctgaagccgctcgctgcggctctcggtctggcgcttccaggcttagctctctttcgggagctgattagctggggcgcacccggaagcgctgattcaacgcgcctgttgcattgggggtcacatcccactgctttcgtggtgtcatacgctgcagcgttgccggcagcagccttgtggcataaactgggatctctgtgggtgccaggtggccaaggcggtagcggaaacccagtgaggcgcctcttgggctgtttggggagcgagacgcgacggttgagcctgtttctcgtactggtggttttgtcttcacttggtgagatggccatccccttctttaccggacggctgaccgattggattttgcaggacggctcggctgatacattcacacgaaacttgaccctgatgtccatcctaaccatcgcaagtgctgtgttggagtttgtgggcgatgggatctacaataatactatgggtcatgtacactcacacctccagggagaggtcttcggagctgtcctgcgtcaagagactgagttcttccaacagaatcaaactggaaatatcatgtccagagtcactgaggacacatctactctgagcgattcgctctctgagaatctgtccctgttcctgtggtatctggtccgcggtttgtgtcttttgggaattatgctctggggatcagtgtccctgactatggttacccttattacactcccgctccttttcttactcccaaagaaggtgggtaagtggtaccaactccttgaggtgcaggtgagggagtcactggccaaatcctcacaggtcgctatcgaagccttgagcgccatgccaactgtacgctccttcgctaatgaagaaggcgaggcccagaagtttagagaaaagctccaggaaattaagactttgaaccagaaggaggccgtggcctatgccgtcaatagctggacaactagcatttctgggatgctgctcaaggtggggattctctacatcggcggacagcttgtgacgtccggggcagtcagcagcggcaaccttgtgacttttgtgctgtaccagatgcagttcacccaggctgtggaagtgctcctctctatctatcctagagtccagaaagctgtcggttcctctgaaaagatcttcgaatatctggaccgtactcccagatgccctccttccgggctcctaaccccactccatctagagggactggtacaattccaggatgtttcctttgcatatcctaaccgacctgacgtcttagtgttgcagggcttaaccttcaccctgcggccaggcgaggttaccgccttagtggggcctaatggaagcggcaagtctacggtagcagcactcctccagaacttgtaccagccaacaggcggtcaattattgctggatgggaagccactgccccaatacgagcatcgctacttacatagacaggtcgccgctgtcggacaggagccccaggtttttgggcgatctcttcaggaaaatattgcgtacgggctcactcaaaagccaaccatggaggagattacagcggctgccgttaagagcggtgcccacagcttcatcagcggactgccccagggatacgacacggaagtggatgaggccggaagtcagctttcgggaggccagcggcaagcagtggctctggctcgggctttgatcagaaagccctgtgtattgatcctggacgatgccacatcagcccttgacgcaaatagccagttgcaagttgagcaattgctctatgagtcaccagagcgttatagtcgctcagtcctgcttataactcagcacctgtcgctggtggagcaggcggaccacattctctttcttgagggcggagcaatccgggagggcggaacccaccagcagctcatggagaagaagggatgttactgggccatggtccaagcccctgctgatgccccagagtag

SEQ ID NO: 244862 - DNA, 1644 bp, synthetic construct
  misc_feature 1..1644: note = Description of Artificial Sequence: Synthetic coding sequence
  source 1..1644: mol_type = other DNA
atggctatcccctttttcacagggagattaacagactggattctccaggacggctctgcagacacttttacccggaacctcacattaatgagcatcctgactattgctagcgcggttcttgagtttgttggggatgggatctacaacaacactatgggccatgtgcactcgcacctgcagggagaagttttcggggctgtgctgcgtcaggaaacagagttctttcagcagaaccaaacagggaacatcatgtctagagtaactgaagatacatctaccctgtcggacagcctcagcgagaacctaagcttgtttctgtggtacttggtgaggggtctatgcttactggggatcatgctatggggtagcgtcagcctgacaatggtgacgctgatcacgttgcctctgttgttcctgcttccaaagaaggttggaaagtggtaccagctcctggaagtccaggtgagagagagcttggccaaaagctcacaggtcgctatcgaagcgttatctgctatgccgaccgttcgatcattcgctaatgaggaaggcgaagcacagaagtttcgcgaaaaactgcaggagattaagaccctgaaccagaaggaagctgttgcctacgcagttaattcctggaccacatcaatttcaggaatgttactcaaggttgggatcctatacatcggcggacagctcgtgaccagcggagccgtctcctccgggaacctggtgacctttgtgttgtatcagatgcaattcacacaggccgtcgaggtcttgctgtcgatttacccacgggtgcagaaagcagttgggtcttccgagaagatcttcgaatatctggataggacaccacggtgcccaccttctgggttgctgacccctttgcacctggaaggattggtgcaatttcaggacgtgagctttgcatatcccaaccggcctgacgttctcgtactccagggccttacatttactctcagaccaggtgaggtcactgctctcgtcggacctaacggatctggcaaaagcactgtagcagcactcctgcagaatctttaccagcccactggaggccagcttctgctcgacggcaaacctctgccacagtacgagcatcgctacctgcatcgccaagtggctgccgtaggccaagagccccaggtgttcggtaggagccttcaggagaatatcgcttacggcctgacacagaagcccacaatggaggagatcacagcggctgctgtcaagtcaggggctcactccttcatttccgggctgccccagggctatgacacggaggtggatgaagctggcagccagctaagcggagggcagcgccaggccgtcgcactggcccgagccctgattcgaaaaccgtgtgtcctgatattagatgatgcaacatccgctctggacgcaaattcccagctgcaggtggagcagctcctgtacgaatccccggagcgctattcccgtagtgtcctgttgatcactcagcacctgtcgctagtggaacaggctgatcatatcctatttttggagggaggggcaatccgggaaggagggacccaccagcagctcatggagaaaaaaggttgttattgggctatggtgcaggcacctgccgacgcacctgaatag

SEQ ID NO: 244863 - DNA, 1644 bp, synthetic construct
  misc_feature 1..1644: note = Description of Artificial Sequence: Synthetic coding sequence
  source 1..1644: mol_type = other DNA
atggctatcccttttttcaccggaagactcaccgactggattctacaggacggcagtgcggatacattcaccaggaaccttacccttatgtcaattctgacaatcgcctcggccgtcctggaatttgtgggagacggaatctacaataataccatggggcatgtgcactcccacttacagggggaagtgtttggtgctgtgctgaggcaggagacagaattttttcagcagaaccagaccggaaatatcatgtccagagtcacggaggacacgagcacactgtccgattcattgtcagaaaacctgtccctttttctgtggtacctcgttagaggcctgtgcctgttgggaattatgctgtgggggtccgtgtcacttactatggtcacgcttatcactctccccctgctgttcctactgccgaagaaggtgggcaaatggtatcaactcctcgaagtccaggttcgggagtcactcgctaaaagttcgcaggtggctatcgaggctctgagcgccatgcccaccgttaggtccttcgccaacgaggagggcgaagcacagaagtttagggaaaagctgcaggagatcaaaactctgaatcagaaagaggccgtggcatatgctgtgaattcctggaccacctctattagtggcatgcttctgaaagttggcattctgtatatcggcggacagctggtgacctctggggctgtctcgtcgggcaatctcgtgaccttcgtgctataccagatgcagtttacacaggctgtggaggtgctcctgagcatctatcccagagtacagaaagccgtgggatctagtgaaaagattttcgagtacctggacaggacaccgcgatgccctccctctgggctcctgacccccctgcatctggaggggctcgtacagtttcaggacgtgtcatttgcatacccaaatcggcctgacgtcttggtattgcaaggccttacgtttaccctgcgccctggtgaagtaaccgccttagtaggaccgaatggatccggtaaatcgacagtcgcagccctcctacaaaacctgtatcaaccgactggcggacagttgctcctggatggaaaaccccttccccagtacgagcataggtacttgcaccggcaggtcgcagccgtggggcaggagccccaagtgttcggaagatcgttacaggaaaatattgcttacgggctaacccagaaaccgacgatggaagagatcacagccgcagcagtaaagtcaggagcccattctttcatcagtggcctgccgcagggctatgacaccgaggtggacgaggccggaagccagctttctggcggacagagacaggctgtcgcattggccagagcactgatccggaaaccctgcgttctgatactggacgatgcaacctctgcactagacgccaactctcaactccaggttgagcagctcctgtatgagtcccccgaacgctattcccgttcggttctcttgatcacacagcatttgtccctcgtggaacaagccgaccacattctgtttctggagggaggtgccattcgcgagggaggcacccaccagcaactgatggagaaaaaagggtgttactgggcaatggtgcaggccccagcagacgcaccagaatag

SEQ ID NO: 244864 - DNA, 1644 bp, synthetic construct
  misc_feature 1..1644: note = Description of Artificial Sequence: Synthetic coding sequence
  source 1..1644: mol_type = other DNA
atggccattcctttcttcactggccgactgacagactggatcctgcaggacggcagcgcagatactttcacgcgcaacctcacattaatgagtatcctgactatagcaagcgccgtgttagaattcgtgggggatggtatctacaataacaccatgggacatgtccacagccacttgcagggcgaagtgttcggcgcagtcctgaggcaggagactgagttcttccagcaaaatcagacaggcaatattatgagtcgagtaacagaggatacgtctactctgagcgattctctctcagaaaaccttagtctctttctctggtatctagtcagaggcttatgcttactgggcatcatgctgtggggttctgtttctttgactatggtgacactgatcactctgcctctgctgttcctcctgcctaaaaaggtggggaaatggtatcagctcctagaggtccaggtgagggaaagtctggctaagtcgagtcaggtggctatagaggcattaagtgcaatgcccaccgtgcggtctttcgcaaacgaggaaggcgaggcccaaaagtttagagagaagctgcaggagataaagacgttgaatcagaaggaagcagtcgcgtacgccgtcaatagctggacaaccagtattagcggaatgctgctgaaagtgggaattctgtatatcgggggacagttagtcacctccggtgccgtgagctctggcaacttggtgacattcgtgctgtatcagatgcaattcacccaggcagtcgaggtcttgctgtccatatatcctagagtgcagaaggccgtgggctcctccgagaagatatttgagtacctggaccggacccccagatgtccgccatctggcctgttgactccccttcatctggagggcctggttcagttccaggacgtctctttcgcgtacccgaaccggcctgacgtgctggtcttacagggcttgacgtttacgctacgacccggtgaagtgacagctctcgtaggcccaaacgggtcaggaaagagcacagtcgctgcattgctgcagaatctttatcaacccaccgggggacagctcttgttagacggcaagccactcccacagtacgagcaccgctacttacacagacaggtcgccgcagttgggcaggagccacaggttttcgggcgttcattgcaagaaaatattgcatatggtttgactcagaaacctaccatggaagaaatcacagccgctgccgtcaaaagcggcgctcattccttcatatctggcctgccccagggatacgacacagaagtcgacgaggccggaagccagctgagcgggggtcagagacaggccgtggcgctcgcccgagcccttatcaggaagccctgcgttctcatcctggatgatgctacatccgctctggatgctaattctcaactccaggtcgaacagctgctctatgagtctcctgagagatattccagatctgtgctgctcataactcagcatctgtctctggtggagcaggccgatcacatactgtttctggagggaggggctataagagaagggggtacccaccagcagctcatggagaagaagggctgttattgggcaatggtgcaggccccagccgacgcacccgaatag

SEQ ID NO: 244865 - DNA, 1644 bp, synthetic construct
  misc_feature 1..1644: note = Description of Artificial Sequence: Synthetic coding sequence
  source 1..1644: mol_type = other DNA
atggcaatcccattcttcaccggcaggctgaccgactggattctgcaggatggttctgccgacaccttcactcgcaaccttacactgatgagcattttaaccatcgcctccgctgtgctggagttcgtgggcgatggtatctataataacacaatggggcacgtccattcacatcttcaaggggaggtgttcggcgctgtgctacggcaggagacagagttctttcagcagaatcagaccggcaacatcatgagcagggtcaccgaagatactagcaccctgagcgacagcctaagtgagaatctgagtctttttctgtggtatctcgtcagaggcctgtgcctgcttggaatcatgctttggggcagtgtgtccctcaccatggtgactctgatcacactccccctcctcttcctgctccccaaaaaagttggcaagtggtatcaactattggaggtccaggtccgggaatcgctggctaagagcagccaagttgccatagaggcacttagtgcaatgcctactgtgcgctcgtttgccaatgaggagggggaggcccaaaaattcagggaaaaattgcaggagattaagaccctgaatcagaaagaggcagtggcctacgcagtcaattcttggacaaccagtatctccggcatgctgcttaaagtaggcatactgtatatcggagggcagctcgtgacttcaggtgccgtatctagcggtaacctagtgacatttgtgctgtatcaaatgcaatttacacaggctgtggaggtgttgctatccatatacccacgggtccagaaagcagtcgggtccagtgaaaaaatcttcgagtaccttgacaggacaccccgttgccctccaagtggcctgctgacccccttgcacctcgaaggacttgtacagtttcaggacgtgagctttgcctatcctaacagaccagatgtcctggtgctgcaaggactcacattcaccctgcgacctggagaagttactgccctggtgggcccaaacggtagtgggaaatctaccgttgctgctctcttgcagaatctatatcagccgactggtggccagcttctccttgatggcaagcccctgccgcagtacgaacatcgctacctgcaccggcaggtggccgctgtgggtcaggagccccaggtgtttggccgatcgctgcaagagaacatagcttatggtctcacccagaaacctacgatggaagaaattactgccgctgctgtgaagagcggggcacactcattcatctctggattaccccaggggtatgatacggaggtagacgaagctggttctcaactctcggggggacagagacaggcagtggcactggcaagggccttgatcagaaagccgtgtgtgctcatcctcgatgacgcgacctccgcccttgacgccaactctcagcttcaagtggaacagctcttgtatgaatcccccgaaaggtacagcagaagcgtactgttgattacccagcacctgagtcttgtcgagcaggcggatcacatcttgttcttggaagggggagctatccgcgaaggcggaacccatcaacagctgatggagaagaaaggctgttactgggcaatggtgcaggccccagcagatgccccagaatag

SEQ ID NO: 244866 - DNA, 1644 bp, synthetic construct
  misc_feature 1..1644: note = Description of Artificial Sequence: Synthetic coding sequence
  source 1..1644: mol_type = other DNA
atggccattccattttttacagggagactcactgactggatactacaggacggctccgccgacaccttcacgcggaatcttacattaatgtcaattctgactatcgcatccgccgtattggaattcgttggagacgggatttacaataatacaatgggacacgtacatagccacctgcagggcgaggtcttcggtgccgttctgcgacaggagacagagttctttcagcagaatcagacaggaaatatcatgtctagggtgacagaggacacttctacgctgagtgacagcctctctgagaatctcagtctgttcctgtggtaccttgtgagaggtctgtgcttacttggcatcatgctgtggggatccgtgtctctgacaatggtgaccctcatcacactgcctctactttttcttctcccaaaaaaggttggcaagtggtatcagctcctcgaagtccaagtgagagagagtctggctaagtcctcccaggtcgcgatagaggcattgagcgcaatgcccacggttagatccttcgcgaacgaggaaggcgaggcccagaagttccgggagaagctgcaagagataaaaacactgaaccagaaagaagctgtggcctatgcagtgaactcttggacaacttcaatatccgggatgctgctgaaagtggggatcctctacataggagggcagctcgtaacatccggggcagtgagctcaggaaatcttgtcacttttgtcttgtaccagatgcagtttactcaggcagtggaggtgctgctgtctatctaccctcgcgtccagaaggccgttggctcctctgaaaagatttttgaatatcttgaccgcacacccagatgcccaccatcaggcttgcttactcctctgcatctcgaaggcctggtgcaatttcaagacgtgtcgtttgcataccccaaccggcctgatgtgttggtcctccaagggctcactttcaccctgcggcctggggaggtcacagccctggtgggcccaaacggaagtggaaagtctacagtcgcggcactgctccagaatttgtaccaacctacgggaggacagctgctgcttgacgggaaacctctgccccagtacgaacacaggtatctgcaccgacaagtcgccgctgtcgggcaggagccacaagtgtttggacgatctttgcaggagaatatcgcttatgggctcacacaaaaacccaccatggaggagataactgccgcagctgtgaagagtggagcgcattccttcatcagcgggctaccgcagggctacgatacggaagtggatgaagcagggagtcagttgtccggcggtcagagacaggccgtggccttagctcgtgctctcatccgaaaaccatgtgtcttaattttggacgatgctacgtctgctctcgacgccaacagccaattgcaagtcgagcaactgttatacgagagcccggagcgatattccagatccgtccttctgattacccagcatctgtcactagttgagcaggcagatcatatactgttcttggaaggcggagccataagagaagggggtactcaccagcagctaatggagaagaaaggctgctactgggccatggtgcaggccccagccgatgccccagaatag

SEQ ID NO: 244867 - DNA, 1644 bp, synthetic construct
  misc_feature 1..1644: note = Description of Artificial Sequence: Synthetic coding sequence
  source 1..1644: mol_type = other DNA
atggccatccctttctttactggcaggttgactgactggatcctccaggatggctctgctgataccttcacacgaaacttgacccttatgagtatcttgaccattgcgtcagcagtgttggaatttgttggagacggaatctacaataacactatgggccacgtccatagccacttacagggagaagtgttcggggctgtcctgaggcaagaaacagaattctttcagcaaaaccaaactggcaacatcatgtctagagttaccgaagatacatctacactgtccgatagcctgtctgaaaacctgtccttgtttctgtggtacctggtgcgcggtttatgcctgctcggaattatgttgtggggatccgtatctctgactatggtgacactgattacgttgccactcctgtttctgctacctaagaaagtcggaaaatggtaccaattgctcgaggtacaggtgcgggagtccctcgctaaaagcagtcaagtggctatagaggcgttgtctgctatgccaacagtacgttcatttgccaacgaagaaggggaggcacaaaagttcagagaaaagcttcaggagattaaaactctgaaccagaaagaggccgtggcatatgcagtcaattcatggaccaccagcatatccgggatgctgctcaaggttggcatcctgtatatcggtggtcaactggtgacctctggcgcagtatcttccggcaacttagtgacctttgtattgtatcaaatgcagtttacgcaggcagttgaggtcttgttgagcatttatccgagagtgcagaaggcagtaggctccagtgaaaaaattttcgagtatttggatcggaccccccgatgccctccatcagggttattgacccctctgcatctggaaggcctcgtgcagtttcaagatgtttctttcgcctatccaaaccgcccagacgtgcttgtattacaagggcttacctttacattgaggccaggggaggtgacagcgctggttggccctaatggtagcggcaagtccaccgtggctgcactgctgcaaaatctgtaccagcctacggggggtcagctgctcctggatggcaaaccgttgccccagtatgaacaccggtatttgcatcgacaggtcgctgcggtgggccaggagccacaggtctttggccgatcattacaagaaaacattgcctatgggctgacccaaaaacctacaatggaagaaatcaccgctgctgccgtgaagagtggagcccactcgttcatctcaggactgcctcagggatatgatacagaggtggacgaagcaggatcacaactgagcggtggccaaaggcaggccgtggccctcgcccgagcgctcattagaaaaccctgtgtcctgatcttggacgatgccacttcagccttagatgctaacagccagctgcaagtggaacagctgctgtacgagtcgccagagcgctacagccgatccgtgctgctgattacccagcatctgtcccttgtggaacaggctgatcatatactgttccttgagggcggagctatacgggagggtgggacacatcagcagttaatggaaaagaagggttgctattgggctatggttcaggctcccgcagacgccccagaatag

SEQ ID NO: 244868 - DNA, 1644 bp, synthetic construct
  misc_feature 1..1644: note = Description of Artificial Sequence: Synthetic coding sequence
  source 1..1644: mol_type = other DNA
atggctatcccatttttcacgggtcggctcacagactggattcttcaggatggctctgctgacactttcactcgcaacctgacactgatgtcaattctcactatcgcttccgcagttcttgaattcgttggagatggaatttacaataacacgatgggccatgttcacagtcaccttcaaggcgaggtctttggtgccgtcctgcgtcaggaaacggagttctttcaacagaatcagaccggcaatattatgtctagggtgacggaggatacctccacattaagcgacagcctgagcgagaatctgagtttattcttgtggtacttagtgcgcggactctgcctactcgggatcatgctgtggggatctgtttctctgacaatggtaaccctaattactctccctcttctgttcctgctgcctaagaaggtgggcaaatggtatcagttgctggaggtgcaggtgcgcgagagcctagcaaagagttcccaggtcgccatcgaggccctcagcgccatgccaactgtcagatctttcgcaaatgaggagggagaagcacagaaattcagggaaaaacttcaggagatcaaaacactgaaccaaaaggaggctgtggcctacgctgttaatagctggacgacttcaatcagcgggatgttgctaaaagtcgggatcctctatatcggaggacagctcgtgacgtctggagccgtgtcatcaggcaatcttgtgaccttcgtgctctatcaaatgcagttcacacaggccgtggaggtgcttctttctatttacccccgagtacagaaagcagttggatcttctgagaaaatctttgagtaccttgatcggactccacgctgtcctccatcgggccttctcacacccttacaccttgaaggtttagtccaattccaggatgtaagttttgcctaccccaataggccagatgtcctcgttttgcaagggctgacttttaccctgaggccaggtgaagtgactgccttggtcggacctaacggttccggcaaatccacagttgccgcattgctgcaaaatctctatcagcctaccggcggacagctcctactggatggtaaacctctgccccaatacgagcataggtacctgcaccgacaggtggctgccgtgggccaggagcctcaggtttttggccgaagtcttcaggaaaacatcgcatatgggctgacacagaaacccacaatggaggagatcactgcagctgcagtgaagtccggagcccactcttttatcagcggactgcctcagggatatgacactgaagttgacgaggcaggcagccaactctcagggggtcaaagacaggccgtcgccctggcaagagctctgattcgcaagccttgcgtgctcatcctggatgacgccacctccgcacttgacgctaactcccagctgcaagtcgagcaattactctacgaatcccccgagagatattcacggtccgtactcctcatcacacagcacctcagcttagtggagcaggctgatcacatcctgttccttgagggcggagctattagagaaggaggtacccaccagcagcttatggaaaaaaaaggatgctactgggcaatggtgcaggctcccgctgatgccccagaatag

SEQ ID NO: 244869 - DNA, 2061 bp, synthetic construct
  misc_feature 1..2061: note = Description of Artificial Sequence: Synthetic coding sequence
  source 1..2061: mol_type = other DNA
atgagactgccagatctcaggccgtggacaagtctgttgctggtggatgccgctctgctgtggctcctccagggcccactgggaaccctcttaccacagggtttgcctggcctgtggcttgagggaaccctcaggctcgggggactctggggcctgcttaagctcaggggcttactgggtttcgtgggcacactgcttctgcccctctgtctggccacaccactaactgtcagcctaagagccctggttgctggcgcatcccgagcaccgccagctcgagtagcttctgccccatggtcctggttattggtggggtacggggctgccggactctcatggtccctgtgggctgtactttctcctccgggagcccaggagaaggagcaagaccaggtgaacaataaggtgctgatgtggcgcttactcaagcttagtcggccagaccttccccttttagttgcagcattctttttcctggtgcttgcagtattaggcgagacattgatacctcattacagtgggagagtgatcgatatactcggcggtgacttcgatcctcacgcattcgctagcgccatcttctttatgtgcctgttctcattcggctctagcttgtccgccggatgcaggggaggatgttttacttataccatgagtagaatcaacctccgtattagggaacagctgttctctagcctccttagacaggacctggggttctttcaggagaccaaaacaggcgagttaaacagccgcctttcgtccgacactactctgatgagcaattggctgcccctaaacgcaaatgttttattgaggagcctagtcaaggtggtgggcctctatgggtttatgctttctatttcgccgagattaacccttctgagcctcctccacatgccctttactatcgccgcagagaaagtctacaacacccgccaccaggaagtgctccgcgaaattcaggacgccgtggccagggctggccaggtcgtacgtgaagccgttggtgggctgcaaaccgttcgatccttcggcgcagaggagcacgaggtatgccgctataaggaggcattggagcagtgtcggcaactgtattggagaagagatctggaacgcgcactatacctcttagtgaggcgggtcctgcacttaggggtgcaaatgctgatgctcagttgtggactccaacagatgcaggatggggagctgacgcaggggtccttgctgtcttttatgatttaccaggaatctgtcggatcttatgttcagacattggtctatatttacggcgatatgttgagcaatgttggtgcagcggagaaggttttcagctatatggaccgccagccaaacttgcccagtccaggtacgttagccccaacaacgttacagggggtcgtcaaatttcaagacgtcagtttcgcttatcctaataggcccgatagacctgtcctcaaagggctgacgtttactttaagacctggcgaggtaacagccctggtcggacctaatggatcaggaaaatcaacggtggcagctctgttacagaacttgtaccaacccacaggcggacaagttctgttggacgagaaacccatctcacagtatgagcactgctacctgcactctcaggttgtgagtgtgggacaagagccagttcttttttcaggctcagtgaggaacaatatcgcctacggtctgcaatcctgcgaagatgacaaggtcatggctgctgctcaagctgcccacgcagacgatttcatccaggagatggaacacgggatttataccgatgtgggcgagaaaggctcacagctggccgctggacagaagcaacgccttgccatcgcaagggctctagtgcgcgacccaagagtgctgattcttgacgaggctacctcagctttggacgtccagtgcgaacaggcgctgcaggactggaatagtcgcggagatcggactgtgttggtgatcgcccacagactgcagaccgtgcagcgggctcatcagattctggtgcttcaagaaggcaaattgcagaaactggcccagctgtag

SEQ ID NO: 244870 - DNA, 1962 bp, synthetic construct
  misc_feature 1..1962: note = Description of Artificial Sequence: Synthetic coding sequence
  source 1..1962: mol_type = other DNA
atgcgcttaccggacctgaggccttggacatctctgctgcttgtggatgccgctctactctggttactgcaaggacctctgggaaccttgttgccgcaggggctgcccggactgtggttggagggaaccctgaggttgggaggactgtggggtctcctgaaacttaggggattattggggttcgtgggcactctcctgcttcccctgtgtctcgcaacacccttaactgtctctttaagagctttggtcgccggtgccagtcgagcccctccagccagggtcgcgagcgccccatggtcttggttgctcgtcggttacggggcagcagggctgagctggagtctgtgggccgtcctgtcccctcctggtgcccaggaaaaggaacaggatcaggtgaataataaggttctcatgtggcgcttgctcaagctcagccggccagatcttccactgctagtggctgcattttttttcctggtcctggctgttctgggagaaactctgataccgcattacagcggacgcgtaatcgacatattaggcggagactttgaccctcacgcattcgccagcgcgatttttttcatgtgccttttctcattcgggtctagtctgagtgccggatgcaggggcggatgcttcacatacacaatgagtaggatcaacctgcggatccgcgagcagttgttcagctcactcctgcgccaggacctcggcttttttcaggagaccaaaacaggcgagctcaactcgaggctctcatcagatacaactctgatgagcaattggctgccactgaatgctaatgtgctgctgcggagcctcgtaaaggtcgtcggcttatatggatttatgttatcaatttctcccaggcttactctcttaagcctgttacacatgccgtttactatcgccgcagagaaggtctataatactaggcaccaggaggtgctacgggaaatacaagatgctgtcgcccgagctggacaggtcgttagagaggccgtgggtggcctgcaaactgtccgaagctttggcgcagaggagcacgaggtctgtcgctacaaggaagctttggaacaatgcagacagctctattggaggagagatcttgagcgggcactgtacctccttgtgagacgggtgctacaccttggtgttcagatgctgatgttatcttgcggcctgcagcagatgcaggatggcgagcttacgcaaggcagcctcctctccttcatgatatatcaggagagtgttggcagctacgttcaaacactggtgtatatttatggagacatgctatcgaatgttggagccgctgaaaaagtgttttcttatatggaccgacagccgaacctcccctcgcctggtacactcgcccctactacgctgcagggggtggtcaagtttcaagatgtgtcctttgcctatcccaatcgcccagacaggcccgtgttaaaaggcctgacttttaccctgagacctggagaagtgacagcactggttggaccaaacggcagcgggaagtcaacagtcgccgctctattacagaacttgtaccagccaaccgggggacaggtgctcctagatgagaaaccaatcagccagtatgaacactgttaccttcactcccaagttgtgtcagtaggccaggaacctgtcctgtttagtgggtctgtgcgtaacaacatcgcttatggcctccagagctgcgaagacgacaaggtaatggccgcagcacaggcagcacatgcggacgactttatccaggaaatggaacatggaatatatacagatgtgggggagaaagggtctcaactggctgctggacagaagcagcgcttggctatcgcaagggccctcgtgagggatcctcgtgtactgattcttgatgaggcaacatctgccctggatgtccaatgtgagcaggccaaaactctttggaaatttatgatcttttag

SEQ ID NO: 244871 - DNA, 2061 bp, synthetic construct
  misc_feature 1..2061: note = Description of Artificial Sequence: Synthetic coding sequence
  source 1..2061: mol_type = other DNA
atgcgactccctgatttaagaccctggacaagcctcctcttggtagacgcagcactgctgtggcttcttcaagggcctctcggcactctgttgcctcagggactgcctggtctgtggttggagggcactctccggctcggcggactgtggggcctcctaaagctcaggggtctcctaggttttgtgggcacccttcttctccctctgtgcctggctactcccttgacagtgagtcttagggccttggtggccggtgccagtcgggctcctccagcaagagtagccagcgcaccctggagctggctgctggtcgggtacggggcagcgggactaagttggagcctgtgggcagtgcttagtcccccaggagcacaggagaaggagcaagaccaggtgaacaataaagtgctgatgtggcgcctgctcaaactgagtagaccagatttgcccctccttgtggccgcattctttttcctggttttggccgttttgggggagacactcattccacactactcaggtcgcgtcattgacatactgggcggtgatttcgatcctcacgcatttgcttcagctatctttttcatgtgtttattcagctttggctccagcctgtccgccggatgccgtggaggatgcttcacgtacacaatgagtcggattaacttaaggatcagggagcagctttttagctccttactccgtcaagacctcggctttttccaggagaccaaaacgggcgagttaaactcgcggttgtcatctgacaccaccctaatgtctaattggctcccattgaacgctaacgtactcttaagaagtctggttaaggtcgtaggcctgtatggtttcatgctctccatctcccctaggctaacacttcttagcctgctccatatgcccttcaccatagccgctgagaaggtttacaacacccgacaccaagaggtgcttagagaaatccaggacgccgtggctcgcgcaggacaggttgtccgggaggcagtgggcggactgcaaacagtccgatcctttggcgcagaggagcacgaagtgtgcaggtacaaggaagccctcgagcagtgccgccagctatactggcgcagagatctggaacgtgctttgtatttactggtgcggcgagtgctgcacctgggggtgcagatgttgatgctctcctgtggcctgcagcaaatgcaggacggagaactcacccaggggagcctgctgagttttatgatttaccaggagagcgtggggtcttatgtgcagacgttagtctacatctatggggatatgctctccaacgttggagctgccgaaaaagtgttttcctacatggatcgtcagcctaatctgccctccccgggaacactcgccccaactacccttcagggagtagtgaagttccaagacgtttccttcgcctaccctaaccgcccagataggcccgtcctcaaaggcctgacttttaccctccgaccaggcgaggtgaccgctttggtgggtcccaatgggtcaggcaagagtactgtagccgcattactgcagaatctttatcagcccacggggggtcaggttctcttggacgagaagccgatctcacagtacgaacattgttacctgcactcacaggtagtgtcagttggtcaggaacccgtgctgttctctggttccgtgcgcaacaatatagcctacggcctccaatcttgtgaagacgacaaggttatggcggcagcacaggctgcccacgcagacgatttcatccaggaaatggaacatgggatatacaccgatgtgggagaaaaaggaagtcagctcgctgcagggcagaaacagagacttgctatcgcacgggcactcgtgagagatcccagagtactgatccttgatgaagcaacatctgctctcgatgtgcaatgcgaacaagcgttgcaggactggaattctcggggtgacagaaccgtacttgtgattgcacaccgtctgcagacggtccagagagcacaccagattctggtgctgcaggagggaaagcttcagaaactggctcaattgtag

SEQ ID NO: 244872 - DNA, 1962 bp, synthetic construct
  misc_feature 1..1962: note = Description of Artificial Sequence: Synthetic coding sequence
  source 1..1962: mol_type = other DNA
atgcgactgccggatctgcgcccttggacatcgctgttattagtagatgcggctctcctgtggttactccaaggacccttgggaacactgttgccacagggcctgccaggcctgtggcttgaagggacactcaggctggggggactgtggggtcttctgaagctgcgaggcctgctcgggttcgtggggacactgttgctgcccttatgcctggctacacctctgaccgtgtctttgcgggcacttgtggccggtgccagcagggcgcctccagccagggtcgcctctgccccttggtcctggttgctagttggctacggcgctgccggattatcatggtccctctgggccgtcctgtctcccccaggcgctcaggagaaggaacaggatcaggtcaacaacaaagtgctcatgtggaggttacttaagctctcgcggcctgacctgcccctcctcgttgccgcattcttcttcctagtcctggctgtgctgggagaaacccttattcctcattactccgggagggtcattgatattctcggtggggactttgacccacacgcattcgcgagtgctatcttcttcatgtgtctgtttagtttcggctcttctctgtcagccggatgtaggggaggctgctttacctacactatgtcacggataaacttgcgaattcgggagcagcttttcagttcccttctccggcaagatcttggtttcttccaggaaacgaaaaccggtgaacttaactcgcggttaagctccgacactacattgatgtccaactggctgccactgaatgctaatgtcctgctgaggtcactggtcaaagtggtgggcctctatggctttatgctgagtatcagtccacgactgacacttctgagcctgttgcacatgcctttcactatcgccgctgagaaagtctataacacccgacatcaggaggttctacgagagatacaggacgccgtagccagggctgggcaagtggttcgggaagccgtggggggtctgcagacagtgcggtcctttggagccgaagaacacgaggtgtgccgctataaagaagcccttgaacagtgtcggcagctttactggaggcgcgatctggagagagctctgtatctgctagtgagacgggtcttacacctcggcgtgcagatgctaatgcttagctgcgggctgcaacagatgcaggacggcgagttgacacaaggcagcttgcttagtttcatgatttatcaggagagtgtcggcagctatgtgcagacactggtctatatatatggagacatgttatcaaatgttggcgcagctgaaaaagttttttcatacatggaccggcagccaaacctgccatctcccggaacactggcacccacaactctccagggagtggtaaagttccaagacgtgtcctttgcctatccaaatagaccagataggccggtcctgaagggactaacttttactctgcgtcccggtgaggtgaccgcacttgtcggtcccaacgggtctggaaagtctactgtggccgcactgcttcagaacctgtaccaacccacaggagggcaggttctgcttgatgaaaaacccatctctcaatacgaacattgctacctgcacagtcaggtggtgtctgtggggcaggagcccgtcttgttttccggaagcgttcgcaacaatatcgcgtatggcttgcagtcatgcgaggatgacaaagtgatggctgccgctcaagcagcccacgccgatgacttcattcaggagatggaacacggaatttacactgacgtaggcgagaaggggagccaattggcggcaggccagaagcagcgcctggctattgcacgagccctggtaagggatccacgggttctcatcctagatgaggccacatctgctcttgatgtccagtgtgagcaggccaagacactgtggaagttcatgatcttttag

SEQ ID NO: 244873 - DNA, 2061 bp, synthetic construct
  misc_feature 1..2061: note = Description of Artificial Sequence: Synthetic coding sequence
  source 1..2061: mol_type = other DNA
atgagactcccagacctgcgcccttggacgtccctactactggtggatgctgcattactgtggctgctgcaagggcctctgggcacgctgcttccacaaggattgcccggtctttggctcgagggtacactacgcctgggcggactgtggggtcttctgaagttgaggggtcttctgggattcgtggggactctgctgctcccactgtgcctggctactcctctgactgtgtccttacgggctctagttgcgggtgcttcccgggctccgcctgccagggttgctagcgccccatggagctggcttctggttgggtatggagccgcagggctgagctggagcctctgggccgtgctgtctccccctggcgcacaggagaaagagcaggaccaagtgaataacaaagttctgatgtggaggctcctaaagctgtcacgccctgacctccctctcctggtcgctgcttttttcttcctggtgctagcggtactgggagagacattgattccacactacagtggaagagtgatagatatacttggtggtgactttgacccccacgcattcgcttctgcaatatttttcatgtgtctcttcagtttcgggagcagtttaagtgctgggtgccgcggaggatgtttcacctacaccatgtccagaatcaaccttaggatcagggaacagttgtttagtagtctgttgaggcaggatcttggctttttccaagagactaaaactggcgagcttaacagccggctgtcctcagacactaccctgatgtctaattggctgcctctcaacgccaatgtcttgctgcgtagtctagtgaaggtggttggactgtacggcttcatgctttcgattagccctcggctcacactgctcagtttgctgcatatgccattcaccatcgccgctgaaaaagtttataatacaaggcatcaggaggtgctgagggaaattcaggacgccgtggcgagggcaggacaagtggtaagggaagcagtgggcggactccaaacagtgcggtcattcggagcagaagagcatgaggtttgcagatataaagaagccttggagcagtgcagacaactctactggcgcagggatctggagagagctctatatctgttagtccggcgagtgttacacctgggggttcagatgttaatgttgtcctgtgggctccaacagatgcaagacggggagttaacacagggatcccttttatcttttatgatctatcaggagagtgttggcagctatgtccagaccctcgtttacatctatggcgacatgctgtccaatgtaggcgctgccgaaaaggtgttctcctatatggaccggcagcctaacctgccctcccctgggacactggcacccactacgcttcagggagttgttaaatttcaagatgtttcctttgcctacccgaataggccagataggccagtgctgaaaggcctcacgttcacattgcgacctggggaagtcactgcattagtcggtcccaacggtagcggcaagagcactgtagctgctctgctccaaaacctctaccagcctactggtggacaggtgctgttagacgagaaaccaataagtcagtatgagcattgttacctgcatagccaagtggtcagcgtgggacaagaaccggtgctgttcagtggaagcgtcaggaacaacatcgcctatggccttcaatcttgcgaggacgataaggtcatggcggcagcgcaggcagctcacgccgatgactttatccaagaaatggagcacggcatctacacagatgttggcgagaaaggaagccagctggccgctgggcagaaacagcgcctagctatcgctcgcgcattggtccgggacccccgagtactgattctggatgaagccaccagcgccctggacgttcagtgcgaacaggcattacaggactggaatagcagaggcgatcggacagtcttagtgatcgcccaccgcctgcagaccgtgcagagagctcaccagatcctggtcttgcaggaaggcaagttacaaaaacttgcacaactgtag

SEQ ID NO: 244874 - DNA, 1962 bp, synthetic construct
  misc_feature 1..1962: note = Description of Artificial Sequence: Synthetic coding sequence
  source 1..1962: mol_type = other DNA
atgaggttgccagacctcagaccatggacctctcttctactggtggatgcagctctgctgtggttactccaagggcctttaggtacactgctcccccaagggcttcctggcctgtggctcgagggcacactgcgcttaggcggactttgggggttactcaagctgcgcggtctgcttggattcgtgggcacattactactacctctgtgtcttgcaacacccctcacagtgtccctgcgagcactcgtggctggagccagccgcgctccacccgctagagttgcttccgctccatggagctggctcctggttgggtatggagccgctggcctgagttggagcctgtgggcggtgctgtctccaccaggggcacaggaaaaagagcaggaccaggttaataataaggtcctgatgtggcggctgctcaagctcagccggccagatctgccattacttgtggcggcatttttttttctggtgctcgctgtgctgggagaaacgctgattccccattattccggcagggtgattgatattcttggcggagatttcgaccctcacgcttttgcatccgcaattttcttcatgtgtctgttcagtttcggtagttccctttctgcaggctgcaggggcggatgctttacatacacaatgtcaaggataaatctacgaattagagagcagttgtttagctcactcctcagacaagatctggggtttttccaagaaacaaagacaggcgagttgaactcccgtctgtcatcagatacaacacttatgagcaactggctacctctgaacgctaatgtgctgctacggtccctcgtgaaagtggtgggcctttatggatttatgctgtcaatttcacccagactcaccctgctgagtttgctgcacatgccgtttacaattgctgctgaaaaggtttataacacacgccatcaggaggtgctacgagagatccaggacgctgtggcccgagcaggccaggtagtgcgggaggccgtggggggtttgcaaacggtgcgctcattcggggcagaggagcacgaagtctgccgatataaggaagccttggaacaatgccggcagctctactggcgaagggatctggagagggccctctacctgctggtgaggcgagtcctccatttgggcgttcagatgttgatgttgtcatgcggcctgcaacagatgcaggacggtgaactgacccagggttcattgctttccttcatgatctaccaggaatcagtgggatcttacgtccagactctggtctatatctacggggacatgctgtctaatgtgggtgctgcagagaaagttttcagctacatggacagacaacctaatttgccaagccccggtaccttggcccctactaccttgcagggggtggtgaagttccaggacgtctccttcgcttaccctaaccggccagacaggccagtcctgaaaggactgacctttacgctgcggcctggggaggtcaccgccctggtgggccctaacgggagcggaaaaagcaccgtcgctgccctgctgcagaacctttaccaaccaaccggaggacaggtgctgttagacgagaagcccatctctcaatacgagcactgttatttgcactcacaggttgtttccgttggacaggagcctgtgctcttctcgggctctgtccggaacaacatcgcttatggcctgcagtcatgtgaggatgataaggtgatggccgctgcacaggcggcacacgccgacgactttatacaggagatggagcatggaatctatacagatgtgggcgaaaaggggtcacaactggctgcaggacaaaaacaaaggctggccatcgcaagggccctggtcagggatccccgtgtgctgatcctggatgaagccactagtgcactggatgtgcaatgcgagcaggcaaagacactctggaaattcatgatcttttag

SEQ ID NO: 244875 - DNA, 1962 bp, synthetic construct
  misc_feature 1..1962: note = Description of Artificial Sequence: Synthetic coding sequence
  source 1..1962: mol_type = other DNA
atgcgtctgccagacctgcgcccatggacatccctcttgctggtggatgctgccctattatggctgcttcaaggccctttaggcaccctcctccctcagggcctgccaggcctttggttggagggaaccctgaggcttgggggactgtggggcctcttgaagctgagagggcttctgggcttcgtaggcactctgctactgccgttgtgtctggccaccccactcacagtgagtctgagggccctagtggcgggtgcctctagggcccctccagctcgggtagcttctgctccatggagttggctgctcgttggctatggggctgcaggactaagttggagcttgtgggcagtgctcagccccccaggcgcacaagaaaaagagcaggatcaggtcaataataaggtgctgatgtggcgtctgctgaaattgtcccgccctgatttgcctctgctggtcgccgcttttttcttcctggtcctggctgtgctcggcgagaccctcattccgcattactcggggagagtgatcgacatcctggggggtgactttgatccccacgcttttgcgtctgccattttcttcatgtgcttgttttccttcggatccagtctgtctgccggatgtcggggaggatgctttacttacaccatgtccaggataaacctccgcatcagagagcagctcttcagctcgctgctgcggcaagacctcggattcttccaggagacaaaaacaggagagttgaattccagactctccagcgacacgacccttatgtcaaattggctaccactgaatgccaatgtcctcctacgctcactggtcaaggtggtagggttgtatgggttcatgctgtccatctccccacggctcaccctgctttccctgctacacatgccattcaccatcgcagccgagaaagtatacaacacacggcatcaggaggtcctgcgggaaatccaagatgctgtggcccgagctggtcaggtggttagggaggctgttgggggactccagacagtgcgatccttcggtgcagaggaacacgaggtgtgccgctacaaagaagccttagaacaatgccgtcagttatactggcgcagggatttggagcgcgcattgtaccttctggtgcggcgtgtcctccacttgggtgtgcagatgctaatgctctcttgtggtctgcagcagatgcaggacggggagctgacacaggggagcctgctgtctttcatgatctatcaagaatccgtggggtcatacgtccagacactcgtctacatttacggcgacatgctgtcaaatgtgggagctgctgaaaaagttttctcttacatggaccgccagccaaatctgcctagccctggaacactagcacctactacacttcagggtgtggttaaattccaggatgtgagcttcgcatacccaaacagacccgacagaccagtgctgaaaggcctaaccttcaccctgcggccaggagaggtgacagctctggtgggcccaaatgggtctggtaaatcgacagttgctgccttgctccaaaacctatatcagccaaccggcggtcaagtactgttggatgagaagcccataagtcagtatgagcattgttacttacactctcaggtggtgagcgttggacaggagccagttttgtttagtggttctgtcagaaacaacattgcttatggcctccagtcctgtgaagacgataaagtgatggcggcagctcaggcagcccacgccgatgacttcatccaggagatggaacatggaatttatactgatgtcggtgagaagggtagtcagctggcggcaggccagaagcagcgcctggctattgccagggctctggtgagagacccacgcgtgctgattttagatgaggcaacctcagccctcgacgtacagtgtgaacaggctaagaccctctggaaattcatgatattttag

SEQ ID NO: 244876 - DNA, 2061 bp, synthetic construct
  misc_feature 1..2061: note = Description of Artificial Sequence: Synthetic coding sequence
  source 1..2061: mol_type = other DNA
atgcggttgccggatcttcggccatggacctccctattgctggtagacgcagccctcctctggctgcttcagggcccactcgggactctcctgcctcaaggcctgcccggtctatggctggaggggaccctcagactcgggggtctgtggggcctgttgaaacttaggggattgctggggttcgtcggaacactcttgttacctttgtgcctggcgaccccgctgaccgtgtccctacgtgctctcgttgctggagcaagtcgtgccccaccggctcgagtggcatccgcaccctggtcgtggctcctggtagggtacggcgcagccggattgagctggagcctatgggccgtgctcagccccccaggggcacaagagaaggaacaggatcaggttaataacaaggtcctaatgtggcgtctcctgaagcttagtcgacccgatctgcctttgctcgtggccgcttttttttttctggtcctcgcggtcctgggcgagactctgatcccccattatagcggccgagtaatcgacatcctcggtggagactttgatccgcatgcatttgcctcagcaatctttttcatgtgcctatttagcttcggatcatcactgtcagccggttgcagagggggttgttttacctatactatgtcccgcattaatctgaggatccgtgaacagcttttttcgtcactattgagacaggatctggggttctttcaggagactaagacaggcgagctcaactctcgcctgagttctgatactactttgatgtctaattggctcccactgaatgctaacgtgttactgcggagcctagttaaggtagtcgggctgtatggctttatgctctcaatctctcctcggctcacactcttatcgctcctgcatatgcctttcaccattgctgccgagaaagtgtataatactaggcaccaggaagtcctgagagaaatccaggacgccgtagctcgcgctggccaagtggtcagggaggctgtgggcggacttcagaccgtccgcagttttggtgccgaagaacacgaggtgtgccgctataaagaagctctggagcagtgtcgacagctatactggagacgtgatttagagcgtgccctgtacctgctcatcagaagagtgctacacttgggcgtgcagatgctgatgctctcatgtggtttacaacagatgcaggatggggagttaacgcagggtagcctattgtccttcatgatatatcaggaaagcgtcggctcctacgtacagaccctggtgtacatctacggagacatgctgagcaatgtgggggcagcggaaaaagtattcagctacatggaccgacagcctaatcttccttccccaggaacattagccccaacaacattgcagggcgtagtgaaatttcaggacgtgagtttcgcctaccctaatcgacccgatcggcctgtcctgaaggggctgacattcaccctccgaccaggcgaagtaactgcactcgtgggccctaatggttcgggaaagtcaactgtcgccgctctgctgcagaatctgtaccagcccacaggcggacaggtattgctcgacgagaaaccaattagtcagtacgagcactgttacctccacagtcaggttgtgtctgtgggccaagaaccggtgttgtttagtggaagcgtgcggaataatattacatatggactgcagtcatgcgaagacgacaaggtgatggccgctgctcaggcggcacatgctgacgattttattcaggagatggaacatggtatttataccgacgtgggtgaaaagggttcccagctcgccgcaggccagaaacaacgccttgcgattgccagggccctcgtccgggatccccgagtgctcattttagacgaagccacttcagctcttgatgtgcagtgtgaacaggcgttgcaggattggaactctcggggagaccgtaccgtgctggtgatcgcccaccggttgcagaccgttcagcgcgctcaccagatcctggtgctccaggaggggaagttgcaaaaactggctcagctgtag

SEQ ID NO: 244877 - DNA, 1962 bp, synthetic construct
  misc_feature 1..1962: note = Description of Artificial Sequence: Synthetic coding sequence
  source 1..1962: mol_type = other DNA
atgcgcctgcccgatctacggccatggactagcctgttactggtcgacgcggcactgttatggctgctgcaaggacccttgggcacactacttccgcagggattgcctggcctttggctagaaggtactcttaggctgggcggtttgtggggactgctcaaactaagggggctcctcggattcgtgggtacccttctgctgcctctgtgtctcgccacccctctgaccgtttcacttcgcgctttggttgctggcgctagtcgggcaccacctgctagggttgcaagcgctccctggagctggctgctagtcggctacggggctgccggactgagctggtccctttgggccgtgctgtcacccccaggtgcacaggagaaggaacaggatcaagtcaacaacaaggtgttgatgtggagacttttgaaactgagccgcccagatctgcctctcctcgtggccgcattcttcttcctcgtactcgctgtgctcggcgaaaccttgataccgcactacagcggtcgggtcattgacatactgggcggagatttcgacccacatgcatttgcatccgcaatcttttttatgtgcctcttctcttttggatcgtctttgagtgcgggttgcagaggtggctgttttacctacacgatgagcaggatcaacttgaggatcagggagcagctttttagcagcctgctgcgccaggatctgggcttttttcaagagactaagaccggagaattgaactctcgcctttccagcgacacaacactgatgagcaactggcttcctctgaacgcaaacgtgctgctgaggtctcttgtgaaggtcgtcgggctgtatggcttcatgctcagtatcagtcctagattaacgctcctgagtctgttgcatatgccttttactattgcagctgaaaaagtgtacaacacacgccaccaggaggtgctgagagagatccaagatgcagtggcgagggccggacaagtggtcagggaggctgttggagggcttcagacagtacggtcattcggggctgaggagcacgaagtgtgtcgctataaggaggctttggaacagtgtagacagctttattggcgccgagatttggagagggcgttgtatttgttggtaagaagggtgctgcatctcggcgtacagatgttgatgctgtcgtgcggtctgcagcaaatgcaggatggggagctgactcagggttcacttctctcgttcatgatctatcaggaatcagttggtagttatgttcagactttagtatacatatatggggatatgctgtccaacgtcggcgctgcagaaaaggtgttcagttacatggacaggcagccaaatctcccatctcctggcacacttgccccaacaactctgcaaggtgtggtgaagttccaggacgtgtccttcgcatatcccaacagacccgataggcccgtactgaagggcctcacattcacactccgccctggcgaagtgacagcgcttgtgggtccaaacggatccggtaagagtacagtcgctgccctgctccagaacctgtatcaaccgactggtgggcaagtgctgcttgacgagaaaccaatatcccagtatgagcattgttatctgcacagccaagtcgtctccgtaggtcaggaacctgtcttattttctggctccgtccgcaacaatattgcgtacggtcttcagtcctgtgaggacgacaaagtcatggccgctgcgcaggccgcacacgcggacgatttcatacaggagatggagcacgggatttacaccgacgtaggtgagaaagggagccagctcgccgcagggcagaaacaacgcttggcaattgccagggcacttgtccgcgatcctcgcgtgctgattctcgacgaggcaacgtctgctctggacgtgcagtgtgagcaggcgaagaccctgtggaaattcatgatcttttag

SEQ ID NO: 244878 - DNA, 1962 bp, synthetic construct
  misc_feature 1..1962: note = Description of Artificial Sequence: Synthetic coding sequence
  source 1..1962: mol_type = other DNA
atgcgcttgcctgacctacggccttggacctcgctactgttggtggatgcagcactcctttggctgctgcaaggtccactggggactctgctgccccagggtctacctggcctgtggctggagggaacacttaggttaggcggactatggggcctgctgaagctcagaggcctgcttgggttcgtggggacactattgctgccactgtgcctcgccacccccttgaccgtgtccctgcgcgcactcgtcgcaggtgcttctcgagctccacctgctagagtcgcgtctgcaccctggtcttggctgctggtcggctacggagccgctgggctaagctggagcctgtgggcagtgctgtctccccctggggctcaggagaaggagcaggaccaggttaacaacaaggtactgatgtggagactcttaaagctctcacgtccggatctgccacttctggtggcagccttctttttccttgtgctggcagtgctcggggaaacgctgatccctcactacagtggccgagtaatcgacatcctcggtggcgacttcgacccacacgcttttgcctccgccatcttcttcatgtgcctgtttagcttcggttccagcctgagtgcaggatgcagggggggatgctttacctacacaatgtcacgtatcaatttgaggattcgagaacagctcttcagcagtcttctgcgccaggatttgggattcttccaggaaactaagactggcgagctcaactcccgtctgtctagtgacacaacattgatgtccaactggctgcccctaaacgcgaacgtcctgctccgcagcctggtgaaggtggtgggattgtacggtttcatgctctcgataagtcctcgactcactctgctgtccctgctgcatatgccatttaccatcgcagctgagaaagtctataataccagacatcaagaggtcctgcgggaaatacaggatgcggtggcccgagctggacaggttgttagagaggccgtgggcggactccaaaccgtccgttccttcggcgcagaggagcatgaggtctgcagatataaagaagccctggagcagtgtcggcaactgtactggcggagggatctggagagggctctctatctgctggtacgacgtgttctacatctgggcgttcagatgctcatgctttcatgtggacttcagcagatgcaggacggtgaactcacccagggctcccttttaagttttatgatctatcaggaatccgttggatcctatgtgcagaccttggtatatatttacggtgatatgctctccaacgtgggcgctgctgagaaggtgttcagttatatggacaggcaacccaacctcccctcacccggaactctggccccaacaacgttgcagggagtggtcaaattccaggatgtgtcatttgcatatccaaatcgccctgatagacctgtgctgaaagggctgacatttaccctcagacctggcgaggtgacagccctggtcggtccaaacggctccggcaagtcgaccgtggcggctcttctacagaatctgtatcagcccaccgggggacaggttttactggacgagaaaccaatctcccagtatgagcactgttatctgcacagccaagtggtgtctgtcggccaagaaccagttctttttagcgggagcgtccgcaacaacattgcctacggattgcagtcctgcgaggacgataaggtgatggccgcagcccaggctgctcacgcagatgactttatccaggaaatggagcatggaatctacacagacgtcggcgaaaagggctcccagctggctgcagggcaaaaacaacggctcgctattgctcgagctcttgtcagggaccctcgcgtgctgatccttgatgaggccacatcagccctggacgtgcaatgcgagcaggctaaaactctgtggaagttcatgattttctag

SEQ ID NO: 244879 - DNA, 2061 bp, synthetic construct
  misc_feature 1..2061: note = Description of Artificial Sequence: Synthetic coding sequence
  source 1..2061: mol_type = other DNA
atgcggttgcccgatctgcggccttggacctccctgctgctggttgatgcggcactgctttggttactgcagggccctcttggtacacttcttccccagggactacctgggttgtggctcgaagggactctgcgactgggaggcctctgggggcttctgaaactccgtggactgctcggctttgtgggcaccttgctgctccccctctgtctggcaaccccactgactgtttccctgagagctcttgtagctggtgcttcgagagccccacctgctagggtggcatcagcaccatggtcatggctccttgtaggatacggagcggcaggcttgtcctggtctttgtgggccgtgctgtctccgccaggggctcaggaaaaagaacaggaccaggtgaataacaaagttctgatgtggagactgctaaagttatcccgcccagatttgcctctgttagttgccgcttttttttttcttgtccttgccgtgctgggggaaactctcattcctcactattctggacgcgtcatcgatattctggggggagattttgatccacatgccttcgccagtgcgatctttttcatgtgtttgtttagttttggttcgagtctgtccgccggttgccggggtggatgttttacctacaccatgagccggatcaacctgaggatccgcgaacagttgttttcctcattactgaggcaggatctgggcttcttccaggaaacaaagactggtgaactgaactccaggctgagctcagacactacgcttatgtctaactggttgccactgaatgcgaacgtgctcttgcggagtctagtgaaggtggtaggcctgtacgggttcatgctgtcgatcagcccccgactgacactgctgtccctgttacacatgccatttaccattgccgctgagaaggtctataatacaaggcaccaagaagtgctgcgggagatccaggatgccgtggctcgggcaggccaggtagtgcgtgaggcagttggaggtctgcagactgtgaggtcattcggcgcagaggagcatgaggtatgcagatacaaagaagctctggagcagtgtaggcagctatattggagaagggacttagaacgggctttgtatctgctcgtcagacgcgtcctgcacttgggagtgcagatgctgatgctaagttgcggccttcaacagatgcaggacggtgaactgacacagggaagcctgctgagttttatgatttatcaggaatccgttggctcttatgtccagacattagtatatatctatggtgacatgctgagcaatgtgggggctgccgagaaggtcttctcttatatggataggcagcctaatctgccctcccctggaactctggctcccacaacactacagggtgtggtcaagttccaggacgtctcatttgcctatccgaatcgtcccgatcgacccgtattgaagggcctcactttcacacttagaccaggggaagtgacagcattggtgggaccaaacgggagcgggaagtccacggtggcagctctactacaaaacttgtatcagccaaccggcggacaagtgctgctggacgaaaagcccataagccagtacgagcattgctatctgcacagccaggtggtgtctgtgggtcaggagcctgtgctctttagtggatctgtcaggaacaacattgcttacgggttgcagagttgcgaggacgataaggtgatggcagctgcacaagccgctcatgctgacgactttattcaggagatggaacatggcatctatactgacgtgggcgaaaaaggcagccaactggccgcaggtcagaagcagcggctggctatagctcgagcattggtccgagaccctcgtgtccttatccttgacgaggccacctccgccctcgacgtacagtgcgagcaggcccttcaggactggaattcacgcggtgatcgcactgtcttggttattgctcaccgcctgcaaactgtgcagcgtgcacaccagatactggtcctgcaggaaggcaagctgcagaaactcgcgcagctctag

SEQ ID NO: 244880 - DNA, 1962 bp, synthetic construct
  misc_feature 1..1962: note = Description of Artificial Sequence: Synthetic coding sequence
  source 1..1962: mol_type = other DNA
atgcgcttacccgatcttagaccctggacatctcttctcctggtggacgctgcactactgtggctactgcagggcccacttggaactctattaccacaaggtctccccggtttgtggctggaaggcacactgcgcttaggaggactctgggggcttcttaaactgcgaggactgctgggattcgtcgggactctcctgctgcctctgtgcctggccacacctctcaccgtgtcactacgagcgttagtcgcaggtgcttctcgtgcccctccagcccgagtggcctctgcaccgtggtcctggctactagtaggctacggagctgctgggttatcgtggagtctctgggccgtgttaagccccccaggggcacaggaaaaagaacaggatcaggtgaataataaagttttaatgtggaggcttctgaagctctctcggcctgatttacccctgctggttgccgcattcttcttcctcgtgctagccgtcctgggtgagaccctaatcccacattattcaggacgcgtgatcgacattttgggcggagattttgacccccacgcgttcgcttcagctatctttttcatgtgcctgttctcctttggtagcagccttagtgcgggatgtcgcggtggctgttttacgtatactatgagcaggattaatttgagaattcgagagcagctttttagctctctgttgagacaggacctaggcttttttcaggaaactaagacgggcgagctgaattctaggctgagctctgacacgactttaatgagcaactggcttccccttaatgccaacgtcctcttaagaagcctggtgaaagtcgtcggtctctacggcttcatgttgagcattagtccacggttgacactgctgtccctgttgcatatgccttttaccattgctgccgagaaggtatataatactcgtcaccaggaagtgttgcgcgaaatccaagatgccgttgctcgagccggacaggtggttcgcgaggcagtcggaggcttgcaaaccgtacgaagttttggtgctgaggagcacgaggtatgcagatacaaggaggcacttgagcagtgcagacagctgtattggcggcgtgaccttgagcgggctctgtacttgctcattagaagggtgctccacctcggcgtgcaaatgctcatgttatcatgcggtctacagcaaatgcaagatggcgagctgacccagggcagcttactgagctttatgatttatcaagagtcagtgggctcttatgtgcagacacttgtgtatatttatggggacatgttatcaaacgtgggtgccgctgagaaggtcttttcctacatggatcgacaaccaaatctccctagcccaggtacgttggccccaacaactttgcagggtgttgtgaagttccaggatgttagtttcgcgtatcccaaccgtcctgataggcccgtactaaagggcttgacctttacacttagaccaggagaggttaccgcactcgtcgggcctaacggcagtgggaaaagcaccgtggccgctttgctccagaatctgtaccagcccaccggaggacaggtcctgctcgatgagaaacccatctcccagtatgagcactgctatttgcactcacaggtagtgtcagtcggccaagaacccgtattgttcagtgggagcgtgcgaaacaacattacatacggcctgcaatcatgtgaagatgacaaggtgatggctgccgctcaggccgctcatgccgacgactttattcaagagatggaacacggcatctatacagacgttggggaaaaaggcagtcagcttgccgcaggccagaagcagcggctcgctatcgctcgtgctctcgttcgagacccacgtgtcttgatcctggacgaagccacatccgcgctggatgttcagtgtgaacaggctaagacgctgtggaagttcatgattttctag

SEQ ID NO: 244881 - DNA, 1962 bp, synthetic construct
  misc_feature 1..1962: note = Description of Artificial Sequence: Synthetic coding sequence
  source 1..1962: mol_type = other DNA
atgcgactcccagatctgcggccatggacatctctcctgctagttgacgcagctcttctttggctgctacagggtccactcggaacactgctcccccagggccttccaggcttgtggctggaggggaccttgaggcttgggggactgtggggcctgcttaagctccggggactgcttgggtttgtcggcacattgcttctccccctatgtctggctacaccgttgaccgtgagtttgcgagcactggtggccggagcatccagggcgccacctgctcgagtggcctcagccccatggagctggctgctcgttggatacggggcagcgggtctgagttggtcactgtgggctgttttgtccccgccaggcgcacaggaaaaagaacaggaccaggtcaacaacaaagtgctgatgtggagactcctgaaactgagtcgccctgacttgccgcttcttgtcgcagcgttctttttcctcgtgctggccgtgttaggtgaaacactcattcctcattactctggcagggttatcgatatcctggggggtgacttcgatccacacgcctttgccagcgccatcttttttatgtgtttgttttccttcgggagtagtctcagcgccggatgcaggggcggttgctttacgtacactatgagcagaattaatctaaggattcgagagcagctcttctcctccctgctgagacaggacttgggatttttccaggagactaaaactggcgagctgaacagtcgcctcagtagcgataccactttgatgagcaattggctgcccctgaatgctaatgttttgctaagatcacttgtaaaggtggtggggctctatggttttatgctgtccatatccccccgactcaccctactgagcctgctgcacatgccatttaccatagccgctgagaaggtgtacaatactaggcaccaagaggtcctacgcgaaattcaagacgccgtggctcgggctgggcaagtggtgcgtgaagcagtgggaggactgcagaccgtcagaagcttcggagccgaagaacacgaggtgtgccggtacaaagaggccctcgaacaatgtagacagttgtactggaggcgggatctggaacgcgcactctatctcctcgtaagacgagtgctgcatttgggcgtgcagatgctaatgttaagctgtggcctccagcaaatgcaggatggcgagcttactcaggggtcacttctgagttttatgatctatcaagaatccgttggatcctacgtacagaccctagtgtacatctatggagatatgctctcaaacgttggcgctgctgagaaagtgtttagctatatggacagacagccaaacttgccctctccgggaacactcgccccaaccaccttgcagggcgtcgtgaagtttcaggacgtttcattcgcataccctaatcggcctgacagaccagtgctcaaaggcctgactttcactcttaggcccggtgaggttactgccctcgtggggcctaacggttctgggaagtccactgtagctgcactcttgcaaaacctttaccagcccactgggggacaggtactgttggacgaaaagcccatctcccagtacgagcattgttatttgcactcacaggtcgtttcagtcggccaagaacctgttctctttagtggttccgtcagaaacaatatcgcgtacggcttgcagagttgcgaggacgacaaagttatggccgcagctcaggctgcacatgccgatgatttcattcaggaaatggagcatggcatttataccgacgttggggagaaggggtcccagctagcagcaggacagaaacagcgattggcaatcgccagggctctggtgcgagaccctagagtgctaattctcgatgaggctacatctgcgcttgatgtgcagtgcgagcaggctaaaactctctggaaattcatgatattttag

SEQ ID NO: 244882 - DNA, 2112 bp, synthetic construct
  misc_feature 1..2112: note = Description of Artificial Sequence: Synthetic coding sequence
  source 1..2112: mol_type = other DNA
atgcggctgccagatctcagaccctggacgtccctgttactagttgacgccgctctcctgtggctgctgcagggccctctcggcactctcctgcctcaggggctgccaggtctgtggctggaaggaacattaagactgggaggattatggggcctgctgaaactgagaggacttctcggcttcgtcggcacattgctgctgcccttatgtcttgccaccccactgacagtgagcctgcgggctctggtggcgggtgcctcccgggctcctcctgcaagagttgcatccgcgccatggtcatggctcctggtcggctacggcgctgcaggtttgagctggtcactctgggcagtgctctcccctccaggtgctcaggagaaagagcaggaccaggtgaataataaagtcctgatgtggagactactcaaacttagcaggccagacctgcccctgctcgtggcagcctttttcttcttggtactcgctgtgctgggggagaccctgataccccattactctgggcgtgtcatcgatatcctggggggagattttgatccccacgctttcgcaagcgccattttttttatgtgcctgttttcgttcgggagctccttgagtgctggctgtcgcggaggttgttttacatacacaatgtcaagaattaatctgcgcatccgggaacagcttttcagctccctgttgcgccaagacttgggattttttcaagagacaaagacaggtgagctgaattcaagattgtccagcgatactactctcatgagtaactggctcccccttaatgccaacgtgctgctgagatccttggtaaaagtagttgggctctatggattcatgctgagcatttctcctcgactgaccctgcttagtttgcttcacatgccatttactatagcagctgagaaagtgtataacacaaggcatcaggaggtgctgagggagatccaggacgccgttgctcgcgctggacaagttgtgcgagaggcggtgggcggtctgcaaactgtacgctcctttggtgccgaagaacatgaggtgtgtcgatacaaggaggcactcgaacagtgtagacagctgtattggcggcgtgatctggagcgcgcactttacctcctcgtccggagggtcttgcatctgggtgtccagatgcttatgttgtcctgcggcctgcagcagatgcaggacggcgagctgacgcaggggagcttactttctttcatgatttatcaggagagtgtgggatcttacgttcagactctggtctatatttacggcgatatgctatcaaatgtgggcgcagccgagaaggttttcagttacatggaccgtcaacctaatctccccagtcctggtaccttagcacccactacgttgcaaggcgtcgtcaagtttcaggacgtaagtttcgcttacccaaatagacctgatcgcccagtccttaagggcctgactttcactctaaggccgggagaggtgaccgcattggtgggaccaaatggctcaggaaagtccacggtagctgcgctcctgcagaacctttatcagcctactggaggtcaggtgctactcgacgaaaagcctatcagccagtacgaacactgttatcttcacagccaggtggtatccgtggggcaggaaccggtgctcttttccggttccgtgcgcaacaatatcgcttacggcctacagtcttgtgaagacgataaagtcatggcggctgctcaggcggctcatgcagacgactttatccaagagatggagcatgggatctacaccgatgtcggagagaaaggttcacagctggccgcagggcaaaagcagagactggccattgcacgcgctctggttcgggaccctcgggtgctgattctcgatgaggccacatcggcgctggatgtccagtgtgagcaggcgctgcaggattggaacagtagaggagacagaaccgtgctcgtaatcgcccatagactgcaggctgttcagagggcccatcagatcctagtcctgcaggaggggaagctccaaaaactcgcacagcttcaggaaggtcaggatctctatagcaggctcgtgcagcagcgcctgatggattag

SEQ ID NO: 244883 - DNA, 2112 bp, synthetic construct
  misc_feature 1..2112: note = Description of Artificial Sequence: Synthetic coding sequence
  source 1..2112: mol_type = other DNA
atgcgcctcccagatttgagaccatggacctccctgctgctggtggatgcagccttactgtggctcctgcagggtccactcggcactttgttaccacagggtctgcccggactgtggcttgagggcaccctgaggctcggaggcctctggggtcttctgaagctgagggggttgttggggtttgttgggacccttctccttcctctgtgcctggccactcctctcaccgtgtcccttcgggctcttgtcgcaggagcatcaagggccccaccagcacgagtggcatccgccccatggagttggctgttagttggctacggggctgccggtctatcatggtcactgtgggccgtgctcagccctcccggagcacaggaaaaggagcaggaccaagtcaataacaaggtacttatgtggaggctgcttaaactgagcagacccgacctgcccttgctggttgccgctttcttctttctcgttttggcagtgctcggtgagaccttaatccctcattattccggccgtgtcatcgatattctcggcggtgatttcgacccccacgcttttgcaagcgcaatattcttcatgtgcctttttagtttcggttcatctctttcagccggatgtcggggaggctgctttacatatacgatgagccgcattaatcttcgaattcgtgaacagttgttctcctcactactgcggcaggacctaggctttttccaggagaccaagacaggggaactgaatagccggctgtcttcagatacaacgttgatgtccaactggctgcccttaaacgccaacgtgcttctgcgttctctggtgaaggtcgtgggcctgtacggttttatgcttagcataagtcccagattgaccctgctgagcctcctgcacatgcccttcacgatagctgctgagaaagtgtacaacactaggcaccaggaggtgctccgggaaatccaggacgcggtagccagagcaggtcaggtagtgcgggaagcggtcgggggactgcagacggtgcgttcttttggagccgaggagcacgaagtctgccgctacaaagaggctctggagcaatgtaggcaactgtactggcgtcgcgatttagaacgggctctttatctgcttgtgcggagagtgcttcacttgggtgtgcaaatgttgatgctgtcctgtggcttacagcagatgcaggatggagagttgacacaggggagccttctgtcattcatgatatatcaggaaagtgtcggctcctacgttcaaacactagtgtatatctacggcgatatgttgagcaacgtgggcgcagcagaaaaggtctttagctacatggaccgccaacctaacctgcctagtcctggcaccctggctcctaccactctacagggcgtggtgaagtttcaggacgtgtccttcgcctaccccaataggccagaccgaccagtcctgaagggcctgacatttacacttaggccaggcgaagtcaccgccttggtcggccctaacggtagcggcaagtcaactgtggccgctctattgcagaacctgtaccagcctaccggcggacaggtgctcctcgacgaaaaaccaatctcacagtacgagcattgctatctacactctcaggtcgtgtcggtggggcaagagccagtgctgttcagtgggagcgtgagaaataacattgcatacgggctccagtcctgcgaagacgacaaggtgatggcggctgcacaggcagcacatgctgacgattttatacaggaaatggagcatggaatctacactgacgtgggagagaaggggtcccagctcgcggctgggcaaaagcagcggctggctattgctcgcgcactcgtgcgcgatccacgagtgctcatcctcgacgaagcaacttccgccctggacgtgcagtgtgagcaagcactccaggattggaattcacgcggagataggacagtgctcgttattgctcacagactgcaggccgtgcaacgcgcacatcagatccttgtgttgcaagagggcaagctgcagaaactcgcacaactgcaggagggacaggatctttactctagactggtgcagcagcgtctaatggactag

SEQ ID NO: 244884 - DNA, 2112 bp, synthetic construct
  misc_feature 1..2112: note = Description of Artificial Sequence: Synthetic coding sequence
  source 1..2112: mol_type = other DNA
atgagactgcctgatctaagaccttggaccagtctgttgcttgtcgacgcagccctactgtggctactacaggggcctctgggtactctactccctcagggcctgccgggactgtggctggaagggacgctcagactcggtggactgtggggccttctgaagcttagaggattgctcggcttcgtaggcactctcttgctgccactctgtctcgccactccactgacagtctcactcagagcactggtggctggcgcttccagggcaccccctgccagggtagcatccgcgccatggtcatggttgctggtgggttacggagcggcaggtcttagctggtccctgtgggctgtcctaagtccccctggcgctcaggagaaagagcaggatcaggttaataacaaggtgcttatgtggcgtctgctgaaactgagccgaccagacctgcctctgctggttgccgcttttttctttctggtgctggccgtgctgggcgagacccttattccacattattccgggagagttatcgacatcttaggcggtgatttcgacccacacgcttttgcgtctgctattttctttatgtgcctgtttagctttggcagttctctcagcgctggttgcagaggaggctgctttacatataccatgtcacgtatcaacctacgtatccgagagcaactgttctcctcgctcctgcgccaggacctgggcttcttccaggagaccaaaacgggagagttgaacagtagactgtcttcggacaccactctgatgagtaattggctgcctctgaatgcgaacgtgctgctgagatctctggttaaggttgttggtctatacggcttcatgctctctatatctccacggcttactctgctgtctctgctacatatgccgttcactatcgctgctgagaaagtgtataacacgaggcatcaggaggtattaagagaaatacaagacgccgtggcgagggcgggtcaggtggtgagagaagctgtggggggtctacaaactgtgcggtcattcggggctgaggaacacgaagtctgtaggtacaaggaagccctcgagcagtgcagacaactttactggcggagagacctggaacgtgccctgtacctccttgtcagacgcgtcctgcacttgggcgtccagatgctgatgctttcgtgtggcttgcaacaaatgcaggatggcgaactgacacaagggtcacttctgagttttatgatatatcaggaatcagtaggctcgtacgtccagaccttggtgtatatatacggggatatgctgagcaatgtcggagcagctgagaaagttttctcttatatggacaggcagccaaacctacccagtcccggtaccctggctcctacaaccctgcagggagttgtcaagtttcaggacgtctcttttgcataccccaatagaccagatcgtcccgtactgaaggggctcaccttcacgctccgtcccggagaagtgactgccttagttggacctaatggatccgggaagtccaccgtggccgctctgctccaaaatctttaccagccgacgggtggccaggtactgttagatgaaaaacctatttctcagtacgaacactgctatctccacagccaggtggtgagtgtggggcaggagccagtcttgttttcaggatccgtgcggaataatatcgcgtacgggcttcagtcctgcgaggatgataaggtgatggcagcagcccaagccgctcacgccgatgactttatccaggagatggaacacggtatttacaccgatgtaggcgagaagggctcacaactggccgctgggcaaaagcagaggctcgcaatcgctcgggctctcgtgcgtgatcctagagtcctgatattggacgaggccacatcagcgctggacgtgcagtgcgagcaagccctccaggattggaatagccggggtgaccgcaccgtcttggtcatcgcccacaggctccaggccgtgcaacgcgcacatcagatacttgtcctacaggagggcaaactccagaaactggcgcaactgcaagagggccaggatctctattcacggctcgtgcagcaacgactcatggattag

SEQ ID NO: 244885 - DNA, 2310 bp, synthetic construct
  misc_feature 1..2310: note = Description of Artificial Sequence: Synthetic coding sequence
  source 1..2310: mol_type = other DNA
atgagactgcccgacctgcgtccgtggacaagtcttctgttggtggacgcggcattgctgtggctgctacagggacccctggggactctgttaccacagggcctgcccggactatggctggaaggcacacttagactgggcggactttgggggctgctgaaactccggggactgttggggtttgtcggtaccctgttactgcccctgtgcctagctactccactcactgtatcccttcgggctcttgttgccggagcatctagggcaccccctgctcgggtagcctcagcaccttggtcttggttgctggtagggtacggagcggcagggttgagctggagcctttgggccgtcctgtctcccccaggggctcaggaaaaagagcaggatcaagtgaacaataaggtgctgatgtggcgtttgttgaagctatcgcgcccagatttgcctctcctggttgccgcatttttctttctggtactggctgtcctgggggaaactctgatccctcactactccgggagagtcattgatatcttgggtggagactttgatcctcacgccttcgcatcagccatattttttatgtgcctattctcatttggatcgtcactgtctgctggttgcagggggggatgttttacctatactatgtccagaatcaacctgcggatcagagagcagctctttagttccctgctgaggcaagatctcggctttttccaagagaccaaaactggtgagctgaactccagactctcatcagacaccaccctgatgtctaactggctgcccctgaacgccaacgtcctgctgaggtcactggtcaaggtagtcgggctatacgggttcatgttgtccatcagtcctaggctcaccttgctttctctcttgcacatgccttttacaattgccgcagaaaaggtttataacactaggcaccaagaggttctacgcgaaattcaggacgccgttgcaagagcgggacaggttgtgcgggaggccgtcggagggctccagacagtccgaagctttggggctgaagagcatgaagtttgtcgatacaaggaggctctcgagcagtgcagacagctatactggaggcgagatctggagcgcgctctgtatctgttggtccgaagggttctacacctgggtgttcagatgttgatgttatcgtgtggcctccagcagatgcaggatggggagctgacccagggtagtttgttgagctttatgatttaccaagaatctgtcgggtcttacgtgcagaccctagtttatatttacggggacatgctgagcaatgtgggcgctgcagaaaaggtgttttcatatatggacagacagcctaaccttccttcacccggaactctcgccccaacaaccttacaaggggtggtgaaattccaagacgtatcctttgcctatcctaatcgccctgaccggcctgtgttaaagggtctcacctttaccctcaggccaggggaagtcactgcactggtgggaccaaatggaagcggcaaatcaactgttgccgctctgttacagaatctataccagcctaccggtggtcaagttctgctggatgaaaaaccaatctcacaatacgagcattgttatcttcactcccaggtcgtgtcagtgggccaagagcccgtgttgtttagcggatcagtgcgaaacaacatcgcctatggtctccagtcctgtgaggatgataaagtgatggcagccgctcaggccgcacatgcagatgactttatccaggagatggagcacggtatttacacagatgtcggggaaaaaggatcacagctcgccgctggacagaaacagcggctggcaatagccagggctctcgtcagagatcccagagtcctgatcctggacgaagcaacttccgctctcgacgtacagtgcgagcaggcaaacggattttgggtgggcccactcgggggtgggtcggctagcgagtcagacccaactggctttctccatgactctcgtcacagacttagttccgacgtgggaatgtttgtggccctgaccaagcttggccagcccgatgcagagcagtggaattcaagattagatttactggagagatcccgtcaggctgtcgatggtgtgtgccggcacaactataggctcggggctcccttcacagtgggacggaaggtgcagcctgaggtaaccgtctatcccgagcgtaccccccttttgcaccagcataatctcctgcactgcagcgtgactggattttatccaggtgatataaagataaaatggttcctcaatggccaatag

SEQ ID NO: 244886 - DNA, 2310 bp, synthetic construct
  misc_feature 1..2310: note = Description of Artificial Sequence: Synthetic coding sequence
  source 1..2310: mol_type = other DNA
atgcgactgcccgacctgcgcccatggacaagccttcttttagtggatgcggctctgctctggttgctgcagggtcctctcggtaccttgttacctcaggggctgcctggtctctggcttgaagggacgttgcgcctagggggtttatggggcctacttaagctgcgaggacttctagggtttgtagggacgttgctcctgccactgtgcctggcaacccccttaacagtttctctcagggccttggtagcaggggcttcacgggctcccccagctagagtggcctcagcaccctggagttggctgttggtggggtacggagcggcagggctctcatggagcctgtgggcagtattgtcccccccaggcgcacaagagaaggaacaggatcaggtgaacaacaaagtactgatgtggaggctgttaaagttgtctcgcccagacctcccactgctcgtggcggctttcttctttttggtgctggctgtgctgggagagaccctgatacctcactactccggcagggtcatcgacatcctggggggtgacttcgatcctcacgcctttgcctcggccattttctttatgtgcctgttttccttcggctcctccctcagtgctggatgccggggaggttgttttacgtacacaatgtcacgcatcaacctcagaatcagggagcagctgtttagttcactcttgcggcaggatctgggtttttttcaggagactaagaccggagagctgaattccaggctctcaagcgatacgacactgatgtctaattggctgcccctcaacgccaacgtccttttgcgatcactagttaaggtagttggtctatatggatttatgctcagcatcagcccacggctgacattgctgtccctcttacatatgccctttactatagcagccgagaaggtgtacaacacacgccaccaggaggtgctgagggagattcaggacgcagtcgcgagagccggtcaggtagtccgcgaggctgtcggcggtcttcagactgtgcggtccttcggagctgaggaacacgaggtttgtaggtataaggaagccctcgaacagtgcaggcagctctattggcgccgagatttagagagggcactgtacctactggtacgcagagtgctgcacctcggcgtacagatgcttatgctgagttgcggcctgcagcagatgcaggacggagagttgacccagggcagtctgctctcttttatgatttaccaggaaagcgtcggctcttacgtgcagactctcgtgtatatatatggagatatgctcagtaatgtgggcgcagctgaaaaagtgttttcttatatggatcggcagcccaacttgccatccccaggtacactggcgccaactactttgcagggggttgtgaaattccaggacgtttcctttgcttaccctaacagaccggatcgccctgtgctgaaagggcttacctttactctccgaccaggcgaagtgacggctctcgtcgggcctaacggttcggggaagagcactgtggctgcccttttgcaaaacctttaccaacccaccgggggacaagtgctgcttgacgaaaagccaattagccagtacgaacactgttatctccattcacaggttgtatccgtgggccaggaacctgtgctatttagcggatccgtgcgtaacaatattgcgtatggcctacagtcgtgcgaggacgataaggttatggccgcagcccaagccgcacatgccgatgacttcatacaggagatggaacacggaatctatactgacgtgggtgagaagggcagccagcttgcggcagggcagaagcagcgcctggccatagctagggcacttgtgcgggacccaagagtccttatcttggacgaagcaacctcagccctggacgtgcagtgcgagcaagctaatgggttctgggttggccctttaggtgggggatccgccagcgaatccgatcccactggcttcctgcatgactcgcgacaccgactttcttcagatgtgggcatgtttgttgcactcaccaagttagggcagcctgatgctgagcaatggaattcgagactcgacttgcttgaacgaagccgccaggccgttgatggggtctgtcggcacaattacagactgggagcacctttcaccgttggaagaaaagttcagccagaagttacagtctaccctgaacgcactcccttacttcaccagcataacctccttcactgctctgtgaccgggttctaccccggagatatcaagatcaagtggttcctgaacggacaatag

SEQ ID NO: 244887 - DNA, 2310 bp, synthetic construct
  misc_feature 1..2310: note = Description of Artificial Sequence: Synthetic coding sequence
  source 1..2310: mol_type = other DNA
atgcggctgccggatcttagaccttggacaagcctgctgctggttgatgcggctttgctgtggctgctgcaagggcctttagggacgctgctgccgcagggactgcctggcctctggctggagggaactctgaggctgggtggcctatggggtcttttgaagcttagaggtctgttaggatttgttggcacccttttgctgcccctgtgcctcgccaccccgcttaccgtgtctcttagggcgctggttgccggtgctagcagggcaccaccggcacgagtggcgagcgcaccctggagctggctgttagtcggttatggcgctgccggattgtcatggtcactctgggccgtccttagccctccaggtgcacaagaaaaagagcaggatcaagtcaataacaaggtactgatgtggagactgctgaaactttcccgcccagacttgccgctcctggtggcggctttcttcttcctagtactggccgttctgggagaaacactgattcctcactattccggccgtgtgattgatatcctgggaggggattttgatccccatgcttttgcctcagctattttcttcatgtgtctcttttccttcggctcctcgctcagcgccggatgcaggggtggatgtttcacttataccatgagtaggatcaacttaaggatccgggaacaactgttctccagtcttctacgacaggatcttggtttctttcaggagactaagaccggtgagctaaattcacgcctgtcgagtgacacgacgttgatgtccaactggttgcccttgaacgccaatgtcctcctgaggtctttggtgaaagtggttggcctgtacggtttcatgctgtccatttctccacgactcacattgttatcactcctgcatatgccctttacgatcgcagccgaaaaagtttacaacactcggcaccaggaagtgttgagagagatccaggacgccgtggctagagctggccaggtggtacgggaggccgtcggaggattgcaaactgtgagaagttttggcgcagaagagcacgaagtttgtcgctataaggaggctctagagcagtgccggcagctatattggaggagggaccttgagagagctctgtatctgctggtgcgccgagttctgcacctcggagtccagatgctcatgctatcctgcgggctgcagcagatgcaggacggcgagctcacccagggaagccttctgtcctttatgatatatcaggaatcggtggggagctatgtgcagactcttgtgtacatctatggagatatgttgtccaatgttggggctgcagagaaggtatttagctatatggatcgtcagcccaacctcccctctcccggaactttggctcctaccactcttcagggagtggtgaagtttcaagatgtgagttttgcctacccaaatcggccagatcgtcccgtgttgaaggggctaactttcaccttgcgacctggtgaggtgactgcactggtaggacccaacgggtcagggaaatcgacggtggccgcactgctgcagaatctctatcagcctaccggtggccaagtcctgctggacgagaagccaatctctcagtacgagcattgctatctgcacagccaggtggtttccgtcgggcaggagcccgtgctgttctcagggtcagtgcgaaataatatagcgtacggtctccagtcttgtgaagatgacaaggtaatggctgccgctcaggctgctcacgccgatgattttattcaggaaatggagcatggaatctacacagatgttggagaaaagggctcccagctcgccgctggccagaaacagcggctggctattgcgcgagcactggtcagggaccctcgcgttcttatattagacgaagcgacctcagctcttgacgtgcagtgcgaacaggccaacggattttgggtgggccctctgggcggaggctccgcttcagagagcgatccgaccgggtttctgcatgatagccgccatcgtttgagttcggacgtgggtatgttcgtggccctgaccaagcttggccagccggacgccgaacagtggaactcacgactagatctgctggagcgctcccggcaggcagtagacggcgtctgtagacacaactaccggctcggggctcctttcaccgtgggaaggaaagtccagccagaggttaccgtctatccagagagaacccccttacttcaccaacataacttactgcattgctctgtgaccgggttctacccaggcgacattaagattaagtggtttcttaatggtcagtag

SEQ ID NO: 244888 - DNA, 2310 bp, synthetic construct
  misc_feature 1..2310: note = Description of Artificial Sequence: Synthetic coding sequence
  source 1..2310: mol_type = other DNA
atgcggctgccagacctgcgcccttggacatccctgctgttggtagatgcggcactgctttggttgctgcaaggacctctagggacattacttccccagggactccccggtctgtggctcgaggggaccttaagattggggggattatggggacttctgaaactccgaggtttacttggatttgtgggcacactattgctgccactgtgtctcgccacgcctctaaccgtctccctaagggcccttgtagccggtgcgtcccgagcccctcctgcaagggtcgcctctgctccatggagttggctgttggtgggttatggggctgctggcctgagctggtccttgtgggccgttctgtctccacccggtgcgcaggagaaagagcaggatcaagtgaataacaaggtcctaatgtggagattgctgaaactgagccgaccggatctgcctcttttagtggcagcctttttcttccttgtcctcgccgtcctgggggagactctgataccgcactatagcggtagagtgatcgatatcctgggtggggatttcgatcctcatgcctttgcttcagccattttctttatgtgccttttctcctttgggtcatctctctccgcaggctgtagaggtggatgttttacatacacaatgtcccgcatcaatctgcggatccgcgaacagctttttagcagtctgttacgacaggacttgggtttcttccaagaaacaaaaactggggagctgaatagcagattgagctctgacactaccctcatgagcaattggctccctttaaatgctaacgttctccttcgctccctagtgaaggtggtggggctatatggattcatgctgagcataagtccgagactcacacttctgtcacttctgcacatgccctttaccatcgctgcggaaaaggtctacaacactcggcatcaggaggtgctgagggaaattcaggacgccgtagcccgtgcgggacaggtcgtgagggaagctgtggggggtctccaaaccgtccggtcgtttggagctgaagaacatgaagtctgcaggtataaggaggccctggagcagtgccgacagttatactggaggcgcgacctcgaaagagccctttacttactgattcggagggtgctgcacctcggggtacagatgcttatgctcagttgtggtctccagcagatgcaggatggtgagctgacccagggttcactattgagtttcatgatctaccaggaaagcgtgggatcctacgtgcaaaccctggtgtacatatatggggatatgctgtccaatgtcggcgcagccgaaaaggtattttcctacatggataggcagcctaacttaccatcaccaggcacactggcacccacgaccttacaaggcgtggtgaagttccaggacgtcagtttcgcttatccaaatagacctgatcgacccgtgttgaaggggctcaccttcaccctgcggccaggggaagtgaccgcactggtcggaccaaacggcagcggcaagtcaacagtagccgcacttctgcaaaacctgtatcagccaacggggggacaagtgctattggatgaaaaacccatttcccagtatgaacactgctatctgcattcacaggtggtgagcgttggtcaggagccagtgctgttcagcggaagtgtgcgtaataatatcacttatggcctgcagtcttgtgaagatgacaaagttatggcagccgcacaggcagcgcacgctgatgacttcatccaagagatggagcatgggatttacactgatgtaggcgagaagggatcacaactagcggcaggacagaaacagagactcgccatcgcaagagctcttgtcagggatcctagagtgctgatactggatgaagcaaccagtgccctggacgtacagtgcgaacaggctaacggtttttgggtcgggccactgggcggtggttccgcatccgaatccgaccccacaggttttctgcacgattcgaggcatcggctgtcctctgacgtagggatgttcgtggccctcacaaaactcggacaaccagacgcggaacagtggaatagcagattagacttactggagcggtcacgccaagcggtggacggggtctgcagacacaattatagattgggtgcacctttcaccgtgggaagaaaagtgcagcctgaggtgaccgtttaccccgaaagaaccccattactgcatcagcacaacctcctccactgtagcgttaccggtttctatccaggcgatatcaaaatcaagtggttccttaatggtcagtag

SEQ ID NO: 244889 - DNA, 2310 bp, synthetic construct
  misc_feature 1..2310: note = Description of Artificial Sequence: Synthetic coding sequence
  source 1..2310: mol_type = other DNA
atgcggctgcctgaccttaggccctggacaagtttacttctggtagacgctgctctgctgtggctgcttcaaggccctctgggaacgctcctgccccaagggctgccaggcttatggctggaaggcacattacgcttaggaggcttatggggcttgttgaagctgagaggcttacttgggtttgttggcacattgctgctgcctctgtgcttggctactccacttaccgtgtccctgcgggcactggtggcaggggcttcccgagccccacccgctcgcgtcgcttcagccccatggagttggctgctggtgggctatggagctgccggattatcatggagtctgtgggccgtgctaagcccacctggggctcaggaaaaagagcaggatcaggtgaacaacaaagtcctcatgtggcggctgcttaagctgtcaagacctgatttgccactgttggtggcagcctttttttttttagttttggccgtcctaggtgaaaccctaattccacattattccggccgagtgatagacatcctgggcggagatttcgacccccacgctttcgcttctgctattttctttatgtgtctgttctctttcggatctagcttaagtgcgggttgcagaggcggatgctttacgtatacaatgtctcgtatcaacctgcgtatccgtgagcagttatttagcagccttcttcgccaggatctcggcttcttccaggaaaccaagacaggggagctcaattcgaggctgtcatctgatactactctcatgagcaattggcttcctctcaatgctaacgttctgctgcgatctctggttaaggtggtagggctgtacggtttcatgctctccattagccctcgcctcactttgcttagcctcctgcacatgccctttaccattgcagctgagaaagtatataacaccagacaccaggaggtgcttcgggagatccaagacgcagttgctcgcgcaggccaggtggtgagggaggctgtgggaggcctccaaaccgtgagatcattcggtgccgaggaacacgaggtttgtcgttataaggaggctcttgaacagtgcagacagctttactggcggagggatctggaacgtgcactgtatctgctggtgcgtagagtgctgcacctcggtgtccagatgctaatgctcagctgtggactgcagcagatgcaggacggagagctgactcagggcagtctgctcagcttcatgatctatcaggagagcgttggttcatatgtgcagacacttgtctacatctatggagacatgctgtccaacgtcggagccgctgaaaaagtgtttagttatatggatcgccagcccaatctgccctcacccggaaccctggcgcctaccacactccagggtgtcgtgaagttccaagatgtcagcttcgcatatccaaaccgaccggacagacctgtgttaaagggcctcacctttacactgcggccaggcgaggtgacggcactggtcggccctaatggctccgggaaaagtacagttgccgcattactccagaatctgtaccagcccactggaggacaggtgctcctcgacgaaaagcctatctcgcagtatgagcattgctatctgcactcacaggtagtgtctgtcggccaggaaccggtgctgttctcaggatctgtacgaaacaatatcgcatacgggctccaatcctgtgaagacgataaagtaatggcagcagcacaggctgcacatgctgacgacttcatccaggaaatggagcacggtatctataccgatgtaggagagaagggatcccagctggcagccggtcagaagcagcgcttggcaatcgcacgagctctggtgcgcgatcccagagtcttgatcctggacgaggccacaagcgccctagacgttcagtgcgaacaagctaatgggttctgggttggacccctggggggtggctcagcctctgagtctgacccaactgggtttttgcatgattcccggcatcgtttaagttctgacgtgggcatgtttgtagcactgacaaaactggggcagccagacgcggagcagtggaattcgcgcttagacctcctggaaagatctcgccaggcagtagatggggtctgccgccataactacagactcggtgcaccattcacagttggtcgaaaagtgcagcccgaggttactgtgtatcctgaacggaccccattgctacatcagcacaatcttctgcactgttctgtgacaggcttttaccccggtgatattaagatcaagtggttcttgaatgggcagtag

SEQ ID NO: 244890 - DNA, 2310 bp, synthetic construct
  misc_feature 1..2310: note = Description of Artificial Sequence: Synthetic coding sequence
  source 1..2310: mol_type = other DNA
atgaggttacccgaccttcgaccctggacaagtctgctgctcgtggatgcggctctgctgtggctgttacaggggccactgggcacccttttgcctcagggtctacccggtctgtggctggaaggcacactaaggttaggcggtctctggggcctgttaaagctccggggtctcctggggttcgtcggaacccttctgttgcccctctgtctagctactcctctgaccgtgtcccttagagccctggtggccggtgcaagccgcgctcctcctgccagggttgccagcgcgccttggtcctggcttcttgtggggtacggagctgcgggactgtcatggtccctgtgggcggttctcagccccccaggcgcacaagaaaaggagcaggaccaagtcaacaataaagtgctgatgtggcggctgcttaaattaagtagacctgacctgcccctgctagtcgctgcatttttcttcctcgtgttggccgtgctcggcgagactcttatcccccattacagcggaagagttattgacatcctcggcggagattttgatccgcacgcgtttgccagcgccatttttttcatgtgcctgttctcgtttggcagcagcctctctgcaggttgcagagggggttgcttcacctacactatgtcccgtatcaatttgcggatccgggaacaattattctccagcctgctgcgacaggacctgggattctttcaggagacaaagacaggggagctgaacagccggcttagctctgataccacgttgatgtccaattggttgcccctgaatgcaaatgtgctgctgcgttctcttgtaaaggtggttggcctctatggatttatgctgagcatttcacctcgtttgacgttgctctctctgctccacatgcccttcaccattgctgcggagaaagtgtacaacaccaggcatcaggaggtactaagagaaatccaggacgccgtggcccgagctggccaggtggtccgagaggccgtggggggtctgcagacagtccgatcattcggggctgaggaacacgaagtttgtcgttacaaggaggcgttagagcaatgtaggcagctatactggaggcgagatctggagcgggcactctaccttttagtgcgaagggtgttgcacctcggcgttcagatgcttatgttatcatgcggactgcaacaaatgcaggatggagagttaacccagggctccctcctctcgtttatgatttatcaagagtccgtcggatcatacgtgcaaacactggtctacatctatggggatatgttgtctaatgtgggcgctgccgagaaggtgttttcatatatggatcgtcaacctaaccttccctctccagggaccctggcacctactaccctgcaaggcgttgtgaagttccaggatgtgagtttcgcgtaccctaatcggccagatcgacctgttctgaaaggcctgacgtttactctaaggcccggtgaggtgactgctttggtaggacctaatggatccggaaaatctacagtagcagctctcctccagaatttataccagccaaccggaggacaagtgcttctggatgagaagcctattagtcagtatgaacattgttatctgcacagccaagtggtttcggtcggacaggaacctgtgctgttttcaggctccgtgcgcaataatatcgcctacggcctgcagagctgtgaagacgacaaagtgatggctgccgcacaggccgcacacgcagatgactttatccaagagatggaacacggcatttacaccgatgtcggtgaaaagggatcccagctagccgcaggccagaagcagcgattggccatcgcgagagccctggtgagggaccccagggtccttattctggatgaggctacctctgccctggatgtgcagtgtgagcaggcaaatggcttctgggtgggacccctgggaggcggttcggcatctgagagcgacccaactggctttttacatgattccaggcaccgcctgtcctcagacgttggcatgttcgtggcactgacaaagttgggtcagccagacgccgaacaatggaattctcggctggacctcctagagcggagcagacaggccgtggacggggtgtgtcgtcataactatagattgggagcaccatttacagtgggacgaaaggtgcaaccagaggtaacggtgtaccctgaacggacgcctcttctgcaccaacacaatctcctgcactgctctgtgactgggttctatcccggagatatcaagatcaagtggtttctaaatggacagtag

SEQ ID NO: 244891 - DNA, 2697 bp, synthetic construct
  misc_feature 1..2697: note = Description of Artificial Sequence: Synthetic coding sequence
  source 1..2697: mol_type = other DNA
atggtgtgggaccggcaaaccaagatggaatacgagtggaaaccagacgaacagggcctgcagcagattctgcaattgttaaaggagtctcagtctcctgataccaccatccaacggactgtccaacaaaaactggagcagctcaaccagtatcccgatttcaacaactacttaatttttgtgctgaccaaacttaaaagcgaggatgaacctacccgctcgttgagtggactaatcttaaaaaacaatgtcaaagcacacttccagaattttccaaacggcgttacagactttattaagtctgaatgtctgaataacattggtgattcctcacccctaataagagcgactgtgggcatcctgatcactacgatcgcatctaagggagaactccagaactggcctgatttactacccaagctgtgctcattactggacagcgaagattataatacctgcgaaggcgctttcggagcactccagaagatctgcgaggattccgccgaaatcctggatagcgacgtgctcgacagacccctgaatataatgattccaaaattcctgcaattcttcaagcactcttcccccaagattcggagccatgctgtggcatgtgtgaaccaatttattattagccgtacgcaggcactgatgctgcatatcgactcgttcatcgaaaacctcttcgcgctagcgggtgatgaggaacccgaggtacgaaaaaatgtttgccgggcattggtgatgttactagaggtgagaatggataggctgttaccgcacatgcataacattgtcgagtatatgctgcaacggacccaggaccaggatgagaacgttgccctcgaggcttgcgaattctggctcaccctcgcagagcagcccatctgcaaggacgtcctggtgagacatctgccgaaactgattcccgttctggtaaacggaatgaaatatagcgacatcgacataatccttctcaagggagacgtagaagaggacgaaacaatccccgattccgagcaggatatccgacccagattccaccgctctagaaccgtggctcagcaacacgacgaagacgggatcgaagaagaagatgatgacgacgacgagatagacgacgatgataccatctcagattggaacctgaggaagtgctcagccgctgccctggacgtgctggcgaacgtgtatagggatgaactgctgcctcacatcttgcccctgctcaaagagttactgttccatcacgagtgggttgtgaaagagtccggcattctcgtcctgggggctatcgccgaaggatgtatgcagggaatgatcccatacttgcccgaactcatcccccacctaatacagtgtctttctgataagaaagctctggtccggtcaattacttgttggaccctttctcggtacgcgcattgggttgtgagtcaacccccagacacatacttaaagccgctcatgaccgagctacttaaacgaatactggacagcaacaagagggtgcaggaggccgcatgttcggccttcgccaccctggaggaggaggcctgcaccgaactcgtaccctatttggcttacattctggatacccttgtgttcgctttcagtaaataccagcacaagaacctgctcatactgtacgatgccattggcacattagccgattcagtgggtcatcacctgaacaagccggaatatatccagatgctaatgccaccattaattcaaaaatggaacatgcttaaggatgaggacaaggaccttttcccactgctggaatgtctatcttcggtcgcgactgcgttacagtcaggcttcctgccatattgcgaaccagtttatcagagatgcgttaatttggtccagaagacactggcccaggcaatgcttaataatgctcagccagaccaatatgaggctcctgacaaagatttcatgatcgttgccctcgacctcctatctggcctggcagagggattgggcggaaatatagaacagttagtagccagatctaacatattgacgttgatgtaccagtgtatgcaggataaaatgcccgaggttcggcagagttccttcgcactcttaggggacctaaccaaggcctgcttccagcatgtcaaaccatgcatcgcagactttatgccaatcttgggtaccaatctaaatcctgaatttattagtgtctgtaataacgccacctgggccatcggcgaaatttcgattcagatgggaatcgaaatgcagccctacattcccatggtgctgcaccaactagtcgagattatcaacagaccaaacacacctaaaacgcttctagaaaatactgccatcactatagggagactcggttatgtgtgccctcaggaagtggcaccaatgctccagcagttcatcagaccctggtgcacatcacttcgaaacatccgggataatgaagaaaaagatagtgcctttcgtggaatctgtaccatgatttcagtgaacccatcaggtgtgatacaggacttcattttcttctgcgacgcggttgcatcttggatcaatccaaaggatgaccttagggatatgttttgtaagatcctgcacggatttaagaatcaagttggcgacgagaactggcgcagatttagcgatcagttccctcttcctctcaaagaacgtctcgctgccttctatggcgtgtag

SEQ ID NO: 244892 - DNA, 387 bp, synthetic construct
  misc_feature 1..387: note = Description of Artificial Sequence: Synthetic coding sequence
  source 1..387: mol_type = other DNA
atggagtatgagtggaagcctgacgaacagggtcttcagcagatcctacaattgctgaaggaatctcagtctcccgacaccactatccagaggacagtgcagcagaaactggagcaactcaaccagtacccggacttcaataactacctgatctttgttctgactaaactcaagtcagaggacgagcccaccagatctctgtccggtctgatcctgaagaacaatgtcaaggcacactttcagaactttcccaatggcgtgaccgattttatcaagtccgaatgcttaaataatatcggcgatagttctccccttattagggcaacagtgggcctcactctattgcacgtgagtatctctctgtcatctgtcggcttaaaactctag

SEQ ID NO: 244893 - DNA, 2547 bp, synthetic construct
  misc_feature 1..2547: note = Description of Artificial Sequence: Synthetic coding sequence
  source 1..2547: mol_type = other DNA
atggtgtgggataggcagacaaagatggaatacgaatggaagccagatgagcagggattgcagcaaattctgcagctcctgaaggaatcacagtcccctgacaccaccatccagcgcaccgtccagcaaaagctggagcagcttaaccagtatcccgattttaataattatctgatctttgtgctcaccaagctgaagtccgaaggaatcctaattacaactatcgcctcgaagggagagctgcaaaattggccggacctgctgcctaaactttgtagcttactcgactcagaagattataatacgtgcgagggcgcattcggagccctgcagaaaatctgtgaagacagcgctgagattttggattccgacgtactggacagacccctgaacatcatgatcccgaagtttctgcaattcttcaagcattcatcacctaagattagaagtcatgccgtggcttgtgttaaccagtttatcataagcagaacccaggccctgatgctgcacatcgatagctttattgagaacttatttgctctggcaggcgacgaggaacctgaagttcgcaagaacgtgtgtagagctttggtcatgctgttagaggtccgtatggatagactcctgccacatatgcataacatcgtggagtacatgctgcagagaactcaggatcaagacgagaacgtggccctcgaggcttgtgaattttggttaactctcgccgagcagccaatctgcaaagacgttctggtccgccatctgcccaagctgatacctgttctggtgaatggtatgaagtactcagatatcgacattatcctgctgaaaggggatgtggaagaggatgaaacaatccccgattccgagcaagacatccgtccaaggtttcacagaagcaggacagtagcccagcagcacgatgaggatggaatagaggaggaagacgatgacgacgatgagatagacgacgacgataccatatccgactggaacttgagaaagtgctcagccgcagcgcttgatgttttagctaatgtctatagggacgaactactgcctcacatcctcccgcttcttaaagagttactctttcaccatgaatgggttgtaaaagaatccgggatcctggttctaggcgctatcgccgaaggctgcatgcagggaatgataccttacctacccgaattgattcctcatctgattcagtgcctttcggacaaaaaggcactggtcaggtccataacctgctggacactcagcagatacgcgcactgggtggtttcacaacccccagatacatacctcaaacctttgatgaccgagctgctaaagcggatcctggactccaataagcgggtccaagaggcagcgtgttcggcttttgctacactggaggaagaggcttgcactgaactagttccatacttagcttacattttggacaccctggtttttgcattctccaaatatcagcataagaacctgttgattctctacgatgccatcggcaccttagcagactcagtcggacatcatctgaataagcctgagtacattcagatgcttatgcctccgctgattcagaaatggaacatgcttaaggatgaagacaaggacctgttccctttgctggagtgcctatcctcggtcgcaactgccctgcagagtggttttctgccctattgtgagcccgtgtaccaacggtgcgtaaatcttgtgcagaaaacccttgcccaagcaatgcttaataacgctcagccagatcaatacgaagccccagacaaagacttcatgattgttgctctggatctgctttccggactggccgaggggctggggggaaacattgagcagcttgtggccaggtccaatattcttaccctcatgtatcagtgcatgcaagacaaaatgccggaggtgcgccagtcttcttttgcgctgctgggcgatctgaccaaggcctgtttccagcacgttaagccctgcattgccgactttatgccaatcttgggcactaacttgaaccccgagttcatctctgtctgtaataatgcgacatgggccatcggtgagataagtatccaaatgggcattgagatgcagccatacatccctatggtactgcatcagctggtggagattataaaccgaccaaatacaccaaagaccctcctggaaaacacagctatcaccatcgggaggttgggttatgtttgcccgcaagaggtggcgccaatgttgcagcaattcattcggccatggtgcacaagcctcagaaacattagggataatgaagagaaagattctgctttcagaggcatttgcacaatgatttctgttaacccctcaggtgtgattcaggatttcatcttcttttgtgatgccgtggcctcctggatcaatcccaaagatgacctgcgagacatgttttgcaaaatcttacatggctttaagaaccaagtgggcgatgaaaattggcgcaggttcagcgaccaattccctctgcccctcaaggaaaggctggccgctttttatggtgtgtag

SEQ ID NO: 244894 - DNA, 2673 bp, synthetic construct
  misc_feature 1..2673: note = Description of Artificial Sequence: Synthetic coding sequence
  source 1..2673: mol_type = other DNA
atggagtatgaatggaaacctgacgagcagggattgcagcagattctgcagctcctgaaggaatcccagagcccagatacaacaattcagcgcaccgtgcagcagaaactggaacagctcaaccagtatccggatttcaacaattacctcatattcgttctgacaaagctaaagtcggaggatgagccgacgcgaagcctgtctggccttattctcaagaacaatgttaaagcccacttccagaacttccccaacggtgtgacagacttcattaagtcagaatgcctgaataacataggtgatagctcaccattgattagggctaccgtggggatccttatcaccaccattgccagcaagggtgagttgcaaaactggccagacttgctcccaaaattgtgttccctgcttgatagcgaggactacaatacttgtgagggcgctttcggagcgttacagaagatttgcgaagatagcgccgaaatcctagatagcgacgttctcgaccgaccgctgaacatcatgatacctaagtttttacagttcttcaaacacagcagccccaaaattagatcacatgccgtggcttgtgtcaatcaatttattatatctcgaacccaggccctgatgctccatatcgattcctttatagagaatctattcgccttggccggagatgaggaacctgaagtccggaagaatgtctgtcgggcactggtcatgctgctagaggtgcgtatggatcggctgctgccccacatgcacaatattgtcgagtacatgctgcagaggactcaggatcaggacgagaacgtcgcgctggaggcttgcgaattttggctgacactagccgagcaaccaatctgtaaagatgtcctggtacgccacctgcctaagctaattcctgttctggttaacggaatgaagtacagtgatattgacattatcctgttgaagggtgatgtggaggaggatgagaccatccccgactccgagcaggacattcgcccaagatttcaccgtagccggacggtggcccaacagcacgacgaggacggcatagaggaggaagacgacgacgatgacgaaatcgatgacgatgataccatatctgactggaatctgcggaaatgttccgccgctgccctggatgtattggccaatgtgtaccgggacgaattgctaccccacatcctccctttgttgaaagaattgctgtttcaccacgagtgggtagtaaaagaatcaggcattctcgtgctcggggcaatagctgagggttgcatgcaggggatgatcccatacctcccagaactgatcccacatcttattcaatgtttgtccgataaaaaagcactggtacgaagcattacctgctggacactctctcgctacgctcactgggtagtgtcacaaccacccgacacatacttaaagccgcttatgacagaactcctcaagcgcattctggattcaaacaaacgagtccaggaagcggcatgttctgcatttgcgaccttggaggaagaagcctgcacagagctggtgccttatcttgcatacattctagatacgttggtctttgccttctccaaataccagcacaagaacctgctcattctgtacgacgcaataggtacactagctgactcagtggggcaccatctgaacaaacccgagtacatccagatgcttatgcctccgttgattcagaagtggaatatgctgaaggacgaggataaagatttgtttcctctcctggagtgtctgagttccgtggcaacggccttgcagagcggcttcttaccgtactgcgaacctgtgtatcaacggtgcgtcaacttggttcaaaaaactctcgctcaagcaatgctgaacaatgcacagccagaccagtacgaggcgcctgataaagatttcatgatagttgcactcgatctcttgtcaggacttgctgagggtctgggcggaaatatcgaacagctagtagcccgatcaaatattctcaccctaatgtatcagtgcatgcaagacaagatgcctgaggtacggcagagttcgtttgcactcttgggcgatctcaccaaagcctgttttcaacatgtgaaaccttgcattgccgacttcatgcctattctgggtactaatcttaatccggagtttatcagtgtttgcaataatgctacctgggctatcggtgagatcagcattcagatggggatcgagatgcagccctacattccaatggtcctgcaccagctggtcgagattataaatcggcctaataccccgaagaccttgctggaaaacactgcaatcactataggtaggctgggatatgtgtgtccccaagaggtcgccccaatgctccaacagttcattcgaccctggtgcacgtcattgcgcaacatcagagataatgaagaaaaagacagcgcctttcgcggaatctgtacgatgatttctgtgaaccctagtggcgtcatccaggactttatctttttttgcgatgccgtagcctcctggataaaccctaaggacgatctgagggacatgttctgtaaaatcctacatggattcaaaaaccaggtcggcgatgaaaactggcgtcgcttttctgatcagtttcctttgccccttaaagagagactggccgcattctatggagtatag

SEQ ID NO: 244895 - DNA, 2664 bp, synthetic construct
  misc_feature 1..2664: note = Description of Artificial Sequence: Synthetic coding sequence
  source 1..2664: mol_type = other DNA
atggactggcagcccgacgagcagggcctgcagcaggtacttcagctgctaaaagattcacagtctcctaacacagccactcagaggattgtacaggataaactcaagcaacttaaccagttccccgatttcaacaactacttgatatttgtattgactcgattgaagtccgaagacgagccgactagatcactcagtgggctgatacttaagaataacgtgaaagcccactaccagagctttcctccccctgtggccgactttattaagcaagagtgcttgaacaatattggcgatgctagttctttgatcagggccaccatcgggattctgatcacgacaatagcatccaaaggagagttacagatgtggccagagctactgccccagctgtgcaatctgcttaactccgaggattataatacctgcgaaggagccttcggcgctctgcagaaaatttgcgaagactcgagtgagctccttgattcagatgccttgaaccgccctctgaatataatgatccccaagttcctgcagttctttaagcactgttctcctaaaatacgctcccacgcgattgcctgcgtgaatcagtttatcatggatagagcacaggcccttatggataatatcgatacgtttatcgagcatttgtttgctctggcagtggacgatgatccagaggttcgcaaaaatgtgtgccgtgccctggtgatgctgctggaagtcaggatagatagattgatcccacatatgcactcaatcattcagtacatgctgcagcggacacaggatcacgacgagaacgtcgccctggaagcctgcgagttctggctaacactcgcggagcaaccaatctgcaaagaagtgctggcttctcatctggtacagttgataccaattctggtaaatggaatgaagtactccgagattgatattatactgctcaagggagatgtcgaagaggatgaagccgttcctgattcagagcaagacattaaaccacgattccataagtcccgaactgtcaccctgccgcatgaagcagaacgacctgatggtagtgaggatgctgaagacgatgacgatgatgacgctttgtctgattggaacctgcggaaatgcagcgcggctgctctggatgtactcgccaacgtgttcagggaggaactgctcccacaccttctaccacttttaaaagggctgttatttcaccccgagtgggtggtgaaagagagtggcattctcgtgctaggagccattgctgaagggtgtatgcagggaatggttccttatcttcctgagctcattccacacctaattcaatgcctcagcgacaagaaagcactggtacggagtatcgcttgctggacattgtcccggtacgctcactgggtggtcagccagccaccagacatgcatttgaaacccctgatgacagaacttctgaagcgaatattggatggaaacaagagagtgcaagaggccgcatgctctgcctttgctacactggaggaggaagcttgcaccgaactggttccttatttatcttacatccttgacacactcgtgttcgcctttggaaagtaccagcataagaacctgctcattctctatgacgcaatcgggactctagccgactctgtggggcaccacctgaaccagcccgagtacattcaaaaactgatgccaccgctgattcaaaaatggaatgagctaaaggatgaagataaagacctgttcccactgctggagtgcttgtcatctgtggcaacagccctccagtctggattcctcccctactgcgaaccggtttatcaaagatgtgtgacacttgtgcaaaagacattggcccaagccatgatgtacacccagcatcctgagcagtatgaagctcctgacaaggatttcatgatcgtggccttggacttgttgtccggtctcgcagaggggcttggaggccatgttgagcaactcgttgccaggagcaacattatgactttgctgtttcagtgtatgcaagactctatgcccgaagtgcggcagtcttcttttgctctgctgggtgatctcacaaaggcttgcttcatccacgttaagccctgcattgccgagtttatgcccattctaggcactaacctcaaccccgaattcatttcagtgtgcaacaacgctacatgggccattggagagatctgtatgcaaatgggtgccgaaatgcagccttatgtccagatggtcctgaacaacctagtggaaattatcaataggccaaacactccaaaaaccctgctcgagaataccgcaataacaatcggcagactgggctatgtatgtcctcaagaagtagcgcctatgctgcagcaatttattcggccttggtgcacctcgctacggaacatccgagacaatgaggagaaagactctgcgtttcgcggaatctgcatgatgattggcgttaatcctggaggggtcgtgcaggatttcatctttttttgtgacgctgtggcctcatgggtgtcaccaaaggacgatttgcgtgatatgttttataagattctacacgggttcaaggatcaagtcggagaggacaactggcagcagttttccgagcagtttcctcctcttttgaaggaaaggctggccgctttctacggagtatag

SEQ ID NO: 244896 - DNA, 2100 bp, synthetic construct
  misc_feature 1..2100: note = Description of Artificial Sequence: Synthetic coding sequence
  source 1..2100: mol_type = other DNA
atggattggcagccagacgagcagggccttcagcaagtgcttcagctgctgaaggattcgcagagcccaaataccgccacccagcgaatcgtgcaggacaagttgaaacagctgaaccagttcccagattttaacaactacctgatcttcgtcctgacgcgtctgaagagcgaggacgagcccacacgtagtctgtctggccttatattgaaaaacaacgtgaaagcacattaccagtcatttccaccccctgtggcagacttcatcaaacaggaatgcctaaataatatcggagacgctagcagtctgattcgagccacaatcggaatactgattacaacaattgcaagtaaaggagagctccagatgtggcctgaactactaccgcagctgtgtaaccttttaaacagtgaggactacaatacgtgtgaaggggcattcggagccttgcagaaaatatgtgaggattcatctgagttacttgatagcgatgctctgaacaggccccttaacattatgattccgaaattcctccagttttttaagcactgttcaccaaagatccgttcacatgctatcgcatgcgtaaaccagtttattatggatcgcgctcaggcactgatggataacattgacacctttattgagcacctgtttgcactggccgtggatgacgacccagaggtgaggaaaaatgtttgccgcgctttggtgatgcttctggaggtacgaatagatcggctgatccctcacatgcactcgataatccagtatatgcttcagagaacacaagaccacgatgaaaatgtggccttggaagcatgcgagttctggctaactctggccgagcaaccgatttgtaaggaggttttagcttcacatttggtgcaactcattccaattttggtgaatggtatgaaatatagtgagattgacatcattttgttgaagggcgacgtggaggaagacgaggcagtcccggactctgagcaagatataaagcccagatttcataaaagcaggaccgtgaccttaccacacgaggccgaaagacctgacggatccgaggacgctgaagatgacgacgatgatgatgctctgagcgactggaacctgagaaagtgcagtgccgctgccctggacgtcttggcgaatgtatttcgcgaggagctcttaccccaccttttgcccttgctgaaaggcttactttttcatcctgaatgggtggttaaagaatcaggaattctggtgctgggggctattgctgagggctgtatgcaggggatggtgccatacctgcccgaattgatcccacacctgatccagtgtctctctgacaagaaggccttggttaggtccattgcctgttggaccttgagccggtacgctcattgggttgtcagccagcctcctgacatgcatctgaagccattaatgaccgaactgctgaaaaggatacttgatggtaacaagagagtccaagaggctgcgtgttccgctttcgctaccctggaagaagaagcttgcacagagctggttccctatctctcatacatattggataccctcgtatttgcgttcggcaaatatcaacacaagaatttactcattttgtatgatgccataggaacgttggctgacagcgttggccaccatcttaatcagcctgagtacatccagaagctgatgccaccactcatccagaagtggaatgagctgaaagatgaggataaggatttgttccctctgctagaatgtctaagctctgtcgccacagccctccagagcggattcctcccctattgcgagcccgtatatcagaggtgcgtgacccttgttcagaaaacattggcacaggctatgatgtatacacaacaccccgaacaatacgaggctcccgataaagactttatgattgtagccctcgatttacttagcggcctggcggagggcctgggcggacatgtagagcagttggttgctcactccccaagctttcctccccaccctctgcctcccgcaggaagccgagtctgtcccttcgtgactgttctttgttgggggctggcccctagatggcgcgaaatccccctggtgtag

SEQ ID NO: 244897 - DNA, 2694 bp, synthetic construct
  misc_feature 1..2694: note = Description of Artificial Sequence: Synthetic coding sequence
  source 1..2694: mol_type = other DNA
atggactggcaacctgacgaacagggcctccagcaagtgttgcagctgctcaaagatagccagtcccccaacactgccacacagagaattgtgcaggataagttgaagcagctgaaccagttccccgacttcaacaactacctcatctttgtactgacccggctgaagtctgaagacgagcccacgcgaagcctgagtggcttgatcctaaagaataacgtgaaggcccactaccagagtttccccccacccgtagccgattttattaagcaggagtgcctcaataatatcggagacgcctcttcattgatccgcgctacgatcggaatcctcataaccacaatagctagcaaaggggaactgcaaatgtggcctgagttgcttccacagctctgtaatctgttaaatagcgaagattataatacatgtgagggcgcttttggcgctttgcagaaaatttgtgaagactcaagcgagttgctcgattctgatgcactgaaccggcctctgaatataatgatccccaagtttctgcagttcttcaaacactgcagccctaaaattagatctcatgccatagcttgcgtgaaccagtttattatggacagagcgcaggccctgatggataacatagacacttttatcgaacacctgtttgcgttggctgtggatgatgatcctgaggttcggaagaatgtgtgtcgcgcactagtcatgctcctcgaggtcagaatcgacaggctaatcccccacatgcatagcataattcagtatatgctgcagcgcactcaggaccacgatgagaatgtcgctctggaggcttgtgaattctggctgactttagcagagcaacctatctgtaaagaagttctggcttcccacctagtccagttaattcccatcctcgtgaatggcatgaaatatagcgagatagatattattctgcttaaaggggacgtggaagaggatgaggccgtccccgactcagaacaggacatcaagcctcgcttccacaagtcacgcaccgtgacactcccccacgaggcagagagacctgatggttctgaggacgctgaagatgatgatgacgatgacgcactcagcgattggaacctgcgcaaatgttccgctgccgctctggatgtgctggcaaatgtttttagagaagagctgctgccccacctcttgcctcttctgaaggggctgctttttcatcccgagtgggtcgtaaaagagagcggcattctggtcttgggagctattgcagaagggtgtatgcagggtatggtgccctacctgcccgaactcattccgcatctgatccagtgtctgtcagataagaaagcgcttgtgaggagcattgcttgctggacactctcccgctacgcgcattgggtcgtgagccagcctcccgatatgcatttgaaacctttaatgacagagttgctgaagagaatattagacggaaataagcgcgtgcaggaggcagcctgctccgcctttgctactcttgaagaggaggcttgtaccgagcttgtcccttatctgagttacatcctggataccctggtgtttgcatttggaaagtaccagcacaaaaatcttctgatcctgtacgatgcaatcggaaccctggctgactccgtcggacaccacttaaaccagccagaatatattcagaaactgatgcctcctttgatccagaaatggaatgagctgaaggacgaggataaagatcttttccctctgcttgaatgcctcagctcggtcgcaaccgcacttcagtcaggttttctgccttactgcgagcccgtttatcaaagatgtgtgacattagtccagaagacactggctcaggcgatgatgtacactcagcaccccgagcagtacgaggctcctgacaaggacttcatgattgtcgcactggaccttctgtcggggctggctgagggcctagggggacacgtggagcagttggtggcgagatccaacattatgactttactgtttcagtgtatgcaggactctatgcctgaagtgcgtcagagctccttcgcactgttaggagaccttactaaagcatgcttcatccacgtgaaaccgtgcatcgcagagtttatgcccattttaggaactaatctaaacccagaattcatttccgtctgtaacaacgcgacatgggcgataggagaaatctgcatgcagatgggagcagaaatgcaaccatacgtccaaatggttctgaataatctcgtggaaatcattaacaggcccaacacacccaagactttgttagaaaataccgggagacttacgtcaccaagcgcgatccctgccatcacaattggacggctgggatacgtctgtccccaagaggtagccccaatgctccagcagtttattaggccttggtgcacctctctacgaaacattcgcgacaacgaggagaaggacagcgcatttaggggcatctgtatgatgatcggcgtgaatcccggtggtgttgtccaggatttcatattcttctgtgatgcagtcgcctcctgggtcagccccaaggatgatttaagggatatgttctacaaaattcttcacggcttcaaggatcaggtgggggaggacaattggcagcaattcagtgagcagttcccccctctgctaaaggaaagacttgcagctttttatggagtgtag

SEQ ID NO: 244898 - DNA, 2664 bp, synthetic construct
  misc_feature 1..2664: note = Description of Artificial Sequence: Synthetic coding sequence
  source 1..2664: mol_type = other DNA
atggactggcagcctgatgaacaggggctccagcaggtactccagttgctcaaggactcacagtctcccaataccgccacccagcggatcgtgcaggataagttgaagcaattaaaccaattccccgacttcaataactacctgattttcgtgctaaccaggctgaagtctgaggacgaaccgacccgctcacttagtggcctgatcctgaaaaataatgtgaaggctcactatcaaagctttcctccacccgtggccgactttatcaaacaggagtgcctgaacaacattggcgacgcttcaagcctgattcgggctaccattggtatactgatcacaaccatagccagcaaaggggagctccaaatgtggccagaactgctcccacaactgtgtaatctgctgaattccgaggactataatacatgcgaaggcgctttcggagctcttcaaaagatatgcgaggattcaagcgagctactggactcagatgcattaaaccgacccctgaacatcatgatacccaaattcctgcagttttttaagcattgcagccctaaaatcaggagccacgctatcgcgtgtgtgaaccagtttattatggatcgcgcacaagcactcatggacaatatagacactttcattgagcatctgtttgcgttagcggtggacgatgatccagaagtgcgaaagaacgtgtgtcgcgctctggtcatgctgctggaagttaggattgatcggttaatcccccacatgcactcaatcattcagtatatgctgcagcgtactcaggaccatgatgagaatgtggcactcgaagcctgcgagttctggttgactctcgcagagcaaccaatttgtaaagaagtcttggcatcacacctggttcaacttatcccaatacttgtcaatgggatgaaatatagcgaaatcgacatcatcttactgaagggagacgtggaagaggacgaggccgttcctgatagcgagcaggatattaagccgaggtttcacaaatcaaggacagtaaccttacctcatgaggcggagcgcccagacgggtctgaggatgcagaagacgacgatgacgacgacgccctgtcagattggaatctcaggaagtgttcagccgctgctttggacgtgttagcaaatgtttttcgggaggagctgctcccccacctacttccacttctcaaaggcctgctgttccaccccgagtgggtggtgaaagaatcgggaatcctggtgctcggagccatcgccgagggctgcatgcaaggcatggttccttatctccccgagctgatccctcacctgattcagtgcctgagtgacaagaaagccttggtgagaagcatagcttgttggacgttgagccggtatgctcactgggtggtcagtcagccaccggatatgcatttgaagcccttaatgaccgaactgttaaagcggatcctggacggcaacaagcgagttcaggaggcggcttgctcagcatttgccaccctcgaggaggaggcgtgcactgagctggtaccgtatctcagttacattctcgatactctggttttcgccttcggtaagtaccagcataaaaatctgctgatcctttacgacgcaatcggaactttggccgactcagtcggtcaccacttgaaccaacccgagtacatacagaagctgatgccaccactcattcagaagtggaatgaactcaaagatgaggacaaagatctgttcccactgctggaatgtctgagctccgtcgctaccgcattacagtctggatttctcccctactgtgagcccgtgtaccagagatgtgtaacgctggtccagaagaccctagcccaagctatgatgtacacccagcacccagaacagtacgaggccccagataaagactttatgatagtagctcttgacctgctgtccggtctggccgagggcctgggcggacatgtggaacagcttgtggcacggtctaatattatgactctgctgtttcagtgcatgcaggattccatgccagaagtgcgtcagagctcattcgcactactgggcgatctgactaaggcatgcttcatacatgttaagccatgtatagccgagtttatgcccatccttggaacaaacctgaaccccgagtttatcagtgtttgtaataatgccacttgggcgattggcgagatatgcatgcagatgggtgccgagatgcagccttacgtccagatggtgctgaacaatctcgttgaaatcattaacaggcctaacacacctaaaaccctcttggagaacactgctatcaccataggccgattggggtacgtttgtcctcaggaagttgcccctatgttgcagcagttcatcaggccttggtgcacgtccctcagaaatatccgagacaatgaggagaaagacagtgcattcagagggatctgcatgatgatcggagttaatcctggaggggtggtacaggactttatctttttttgcgatgccgtagcctcatgggtgtcgcccaaagacgatttgagagacatgttctacaagatcctgcacggcttcaaagatcaggtcggggaagataattggcagcagttctccgaacagttcccacctctcttgaaggagcgcctcgccgcattttatggcgtgtag

SEQ ID NO: 244899 - DNA, 2694 bp, synthetic construct
  misc_feature 1..2694: note = Description of Artificial Sequence: Synthetic coding sequence
  source 1..2694: mol_type = other DNA
atggattggcagccggacgagcagggcctacaacaggtgctgcagttgctgaaagattcccagagcccgaatacagccacccagagaatagtgcaggataagctgaagcaacttaatcagttcccagatttcaataattatttgatattcgtcctgactcggctgaaaagcgaagacgagcctactaggtccctgtctggcttaatcctgaagaacaatgtcaaggctcactaccagtcgttccccccacccgtcgctgattttatcaagcaggagtgcctgaataatattggggatgcttcctctctcatacgcgctactatcgggattctcatcaccactatcgcctcgaaaggcgagctgcaaatgtggcccgagctactcccccaactgtgcaacctgctcaattccgaggactataatacctgcgagggtgcattcggcgctctccaaaagatctgtgaggactccagcgaactattagacagcgatgccttgaatcggcctttaaatataatgatccctaagttcctgcagttttttaaacactgcagtcctaagattcgatctcacgctattgcgtgcgtcaatcaattcattatggacagggcccaggcacttatggataacatcgacacttttatcgagcacctgttcgcattggccgttgacgatgatccagaggtcaggaaaaatgtgtgccgggcacttgtgatgctcctagaggtgagaattgaccggctgattccacatatgcactcaattatccagtacatgttgcagaggactcaagaccatgacgagaacgtggcgctcgaggcttgcgagttttggctgacgctggccgagcagcccatctgcaaagaggtcctcgcttctcacctggtgcagctgattccaatccttgtcaatggtatgaagtactcggaaatagatatcattttactgaaaggagacgttgaagaggacgaggctgtcccagatagcgaacaagacatcaaacccaggttccacaagtccaggacagttacactgccccatgaggccgaacggcctgacggttctgaggacgccgaggatgatgacgatgatgacgcattgagtgactggaatctgagaaaatgtagtgctgcagccctggacgttctggctaacgtcttcagagaggaactgctgccccacctgctgcctctattgaaaggcttactattccatcccgagtgggtggtcaaggagagcggcattctcgtactcggggctatcgcagaaggctgcatgcaagggatggtgccctacctacccgaacttattccacacctgatccagtgcctgagtgataagaaagcgttggtgagatcgatcgcatgctggaccctgagcaggtacgcccactgggttgtgtctcagcctcccgatatgcacctgaagccgctgatgacagaactgctgaagcgaattctggacggcaacaaacgtgtgcaggaggctgcctgttccgcctttgccacgctggaggaagaggcctgtactgaactcgtgccatacctcagttacatattggacacgcttgtttttgcctttgggaaataccagcataaaaatctcttgatcctgtacgacgccatcggcacattggcagatagcgtcggacaccatttaaatcagccggagtacatccagaaactaatgccacccctgatccaaaaatggaatgaactcaaggacgaggataaggacttgtttcccctgttggagtgtctgagcagtgttgccaccgcactccagagcggctttctgccctactgcgagcctgtttaccagagatgcgttacattggtgcagaagaccctcgcgcaggccatgatgtatactcagcatcctgagcagtatgaggctcctgacaaggattttatgatcgttgccctggacctgctgtcaggcctggctgaagggcttggagggcatgtggaacagctggtggcccgatcaaacattatgactcttctgttccagtgcatgcaggactcaatgcccgaggtgcgccagtcgtcctttgcacttctcggcgatctgactaaggcgtgttttattcacgtgaagccctgcatcgctgaattcatgccaatccttggaaccaacctgaatccagagtttatatcagtgtgcaacaatgcgacttgggctatcggagagatatgtatgcaaatgggagctgagatgcaaccatatgtgcagatggtcctgaataatttagtcgaaattataaatcgaccaaatactcctaagacactcctggaaaacacaggtagacttacctctccttcagctatcccagccatcactattgggaggttggggtatgtatgtccacaagaggtggctcccatgttgcagcagtttatcaggccatggtgtaccagcctgaggaatattagggataatgaggaaaaggactcagcctttcggggtatttgtatgatgatcggtgttaacccaggaggagtagtccaagatttcatctttttttgcgacgctgtggcctcgtgggtgtcaccgaaggacgacttacgcgatatgttttataagattttgcatggattcaaggatcaggtgggggaagataactggcagcagttcagcgagcagttccctccactgctgaaggagagactcgccgcattctatggagtgtag

SEQ ID NO: 244900 - DNA, 3156 bp, synthetic construct
  misc_feature 1..3156: note = Description of Artificial Sequence: Synthetic coding sequence
  source 1..3156: mol_type = other DNA
ggccagagcgtggggggaagggggctttttagagactgcgcatgtatagaagagactacaggtgccggagctctgagcaggtcaggcgcaggcccattggatgtagaggccgcaggtcctagcccaagccggtgtgagggcggagggtctctgcgagcgaggagccggggtcagaggcacggacccccatgggacgaggggtcatctctcgggcctatgcgtatacgtcgagcaccgcctccacccccagtggcgagattccatatcccacctccggcactgccctctcctaggctgcgagggagggggtggaggtcatggcggggaccccgtacttgggccggtgtggaccggcgaccgccacccgtcaggagaggccgttctcgtcgccacgccgcaacagcagctagcggagccccacccggttcacataccgagccgcagcggccatctgcggacccaggcccataccttcgttcgttgccttgcgcaatggactggcagccggacgaacagggcctgcagcaggtgctccagctgcttaaagatagtcaatcacctaatacagccacccagaggatcgtgcaggacaaactgaagcagctcaaccagttcccagattttaataactacctgatttttgtgcttacaagattgaagtccgaggatgaacctacgaggtctctgagtggactgatcctgaagaataatgtcaaggcccactaccagtcattcccaccaccagtcgctgatttcattaagcaggagtgcctcaataatattggagacgcctcttctcttatccgggctactataggaattttgatcacaacaattgcctccaaaggtgaattgcagatgtggcctgaattgttaccccaactgtgcaatctgctgaactctgaggattacaacacttgtgagggcgcttttggcgctctgcagaagatctgcgaggactccagtgaactcctggatagcgacgcactgaatcgaccattgaatataatgattcccaaatttctgcagtttttcaaacactgttctccaaagattcggagccacgcaattgcctgcgtcaatcaatttatcatggaccgggcacaggcactgatggacaatatcgatacttttatcgagcacttgttcgcgctcgcagttgacgatgaccctgaagtgagaaaaaacgtttgccgggcattggtaatgctgttggaggtgcgtatcgacagattaatacctcatatgcacagcattatacaatatatgctccaaagaacgcaagaccacgacgaaaatgtagccttggaagcgtgcgaattttggctgacactcgctgagcaaccaatctgcaaggaggtcttagccagtcacctggttcagctgattcccattttggtgaacggaatgaaatatagcgaaatagacataattttacttaagggcgatgtggaagaggacgaagcagttcccgattccgagcaggatatcaagcctagatttcacaaaagccgcactgttactctgccccatgaagccgagcgacccgacggcagcgaggacgctgaagacgacgacgatgacgacgcactcagcgactggaacctaagaaaatgtagcgctgcagcccttgatgtgcttgctaacgtgttcagagaggagcttcttccacatctgcttccactactgaaaggcttgctcttccacccagagtgggtggttaaggagagtggaattttggttctcggcgctattgctgagggctgcatgcagggcatggtcccctatctgccagagctgatcccgcacctcatccagtgtctctccgacaagaaggctctggtgaggtcaatcgcctgttggaccctcagccgttatgcacactgggtggttagtcagccaccagatatgcatcttaaacccctcatgaccgagctgttgaaaagaatcttggacgggaacaagcgagtgcaggaagcagcctgttctgctttcgctactctggaggaagaagcttgcactgaactggtcccatatctatcatacatcctggacaccctcgtttttgccttcggtaaatatcagcacaagaacctattgatcttatacgacgctatcggcaccctagcagactcagtcggccaccacctgaaccagcctgaatacatacaaaagcttatgccccctttgattcaaaagtggaatgagttgaaagatgaagacaaagatctctttccattacttgagtgtttgagctctgtggccactgcactgcagtcgggcttccttccttactgtgagccagtgtaccagcggtgtgttaccctggtgcagaagactctggcccaagccatgatgtacacacagcaccctgagcagtacgaggctccagacaaggattttatgatagtcgctttagatctgctcagcggactcgcagaaggtctaggaggccacgtcgaacagctggtggcgagaagtaatataatgaccctgttgttccaatgcatgcaggactcaatgccagaagtgaggcagtcaagcttcgctctgctgggcgatttgacaaaggcttgctttattcacgtgaaaccctgcatcgcggagttcatgccaattttgggcacaaacctaaacccggaatttatcagcgtctgtaacaacgctacatgggccattggcgagatatgcatgcaaatgggcgcagaaatgcaaccatacgtgcagatggtgttgaacaacctagtggaaatcatcaacaggcctaataccccgaagaccctgttagaaaatacagcaatcacaataggacgcctcggctacgtgtgtcctcaggaggtcgctccaatgttacagcagtttatccgaccttggtgcacgagtctccgtaacataagagataacgaagagaaagatagcgcatttcggggtatctgtatgatgatcggtgtgaatccagggggtgtggtacaagacttcatatttttttgtgatgccgtggcgtcttgggtgagcccgaaggatgatctgagagatatgttttataaaatcctccacggattcaaggaccaggtgggtgaggataactggcagcaattcagtgagcaattcccacctttgctgaaggaaaggctggctgcattttatggtgtttag

SEQ ID NO: 244901 - DNA, 2316 bp, synthetic construct
  misc_feature 1..2316: note = Description of Artificial Sequence: Synthetic coding sequence
  source 1..2316: mol_type = other DNA
atggactggcagcctgacgaacagggtctgcaacaagtactgcagctcttaaaggacagccagtctcccaataccgccacacaaaggatcgtacaggacaagctcaagcaactaaaccagtttcctgacttcaacaactacctgattttcgttttgacccgcctaaaatccgaggatgagcccacccgcagtctgtcgggcttaatccttaagaacaacgttaaagcacattaccaaagttttcccccacctgttgctgacttcatcaagcaggaatgtctaaataatatcggggacgcctcgtcccttattcgggctacaatcggtattctgatcacaacaatcgcaagcaagggcgaactccagatgtggccggaacttcttcctcagctctgtaatcttctgaacagcgaggattataatacttgcgagggcgctttcggagccctgcagaaaatttgtgaagatagttctgaactgctggatagcgacgcactgaatagacccttgaatattatgatccctaagttcttgcagttttttaagcattgcagccccaaaattcgctcccacgccattgcttgcgttaatcagtttattatggaccgcgcacaggccctcatggacaacattgacacattcatcgagcatttgttcgcactcgccgtggatgatgatcccgaggtaagaaaaaacgtgtgccgtgcccttgtgatgctgctcgaggtgcgtattgaccgcttaatcccgcacatgcactctatcatccagtacatgctccagcgtacccaagatcacgatgagaacgttgcgctcgaagcttgcgaattctggctcactctggcagagcagcccatctgtaaagaagttctagcttctcatctggtccaacttatcccaatcctggtgaacgggatgaagtactctgagattgatatcatactcctcaaaggagacgtggaagaagacgaagcagtgccagattcagagcaggatattaaacccaggttccataagtctaggactgtgaccctgccccacgaggccgagaggcctgacggttctgaggatgcagaggacgatgacgacgacgatgccttatccgactggaacctcaggaaatgttccgccgctgcacttgatgtcctggcaaatgtattcagagaggagctccttccccacctattacctcttctgaagggattacttttccatccagagtgggtcgtaaaggaaagcgggatcttagtgctcggggctattgccgaagggtgtatgcagggaatggtgccatacttgccggagctgatacctcatttgatccagtgtttatccgacaagaaagctctggtgcgctcaatcgcctgttggacacttagccgttacgctcattgggttgtgtcccagccccctgatatgcatctgaagccactcatgacagagcttttaaagagaatcctggacggtaataaaagagtccaggaggcagcctgcagcgcttttgcgacccttgaagaagaggcctgtaccgagctggtcccttacctttcctacattctggacacactggttttcgcttttggtaagtaccaacataaaaacttgttgattctgtatgatgccatcggtacactagcggatagcgttggacaccacttgaaccaaccagagtacatacaaaaacttatgccgcctctcatccaaaaatggaacgaactgaaggacgaggataaagacctctttcctctgctggagtgccttagctctgtcgcgaccgccctgcagtctggcttcctcccttactgcgaaccagtgtaccaacggtgcgtgacactggtccaaaaaactctcgcccaggccatgatgtacacacagcatccagaacaatatgaggccccagataaagattttatgattgtagccctggacctcctgtcagggttagcggaaggactggggggtcacgtagagcaattggtcgcaaggtcaaacataatgactctgctctttcagtgtatgcaggattcgatgccagaggtgagacagtctagtttcgcgcttctgggcgatctaactaaggcctgtttcatccatgtcaagccttgtattgccgagttcatgccaatcctgggaacgaatttaaatccggagttcataagcgtgtgcaacaatgccacctgggccatcggggaaatctgtatgcagatgggagcagagatgcagccttacgtgcagatggtcctcaataacctggtagagattatcaacaggccaacacctagccagaagcagaacaagaccaagaaaaataaatag

SEQ ID NO: 244902 - DNA, 2772 bp, synthetic construct
  misc_feature 1..2772: note = Description of Artificial Sequence: Synthetic coding sequence
  source 1..2772: mol_type = other DNA
atggagggagccaagcctacactccagttggtgtatcaagctgttcaggccctttaccacgatccagatccctcaggaaaggagcgtgcttcattttggcttggcgagctccaaagatctgtccacgcatgggaaatttccgaccagctgctgcagattcggcaggatgtagaatcatgctatttcgctgcgcagactatgaaaatgaaaatccaaacaagtttctacgagcttcctactgactctcacgcgagtctgcgggacagtcttctgacacatattcaaaacctgaaggacctctcaccagtcatagtgacacaattggctctggctattgcagacctcgcccttcaaatgccatcttggaagggctgtgtgcaaacacttgtcgaaaaatacagcaatgatgtgaccagtcttcctttccttctcgagatcctgactgttctccccgaagaggttcactcgcggtctctgaggattggtgctaatcgacgcaccgagattattgaagatctcgccttctactcatctacagttgtcagtttgctgatgacatgcgtggagaaggcaggcactgatgaaaagatgctgatgaaggttttccgatgcctcgggtcctggttcaaccttggagtcttggatagcaacttcatggcaaataataaattgctggcccttctgtttgaggtgttacaacaggataagacgtccagtaatctccatgaagcagcctctgactgtgtctgctctgctctgtacgccatcgagaatgtagagaccaatctgccgcttgctatgcagctgttccagggcgtgctgactcttgagactgcgtatcatatggccgtggctcgcgaggatttagataaggtgcttaattactgtcgcatctttactgagttgtgcgagaccttcctcgaaaaaatagtgtgtacgcctggccaaggtctgggggatctccgcactctggagctcctgctgatctgcgccggacacccccaatatgaagtggtggagattagtttcaacttctggtataggttaggggagcacctgtacaagaccaatgatgaagtgattcacggtatctttaaggcttacattcaacggctgctccatgccttagctcgccactgtcaacttgaacccgatcatgagggtgttcccgaggagaccgacgactttggagagttccgtatgcgcgttagcgacctggttaaggacctgatcttcctgatcggttccatggagtgttttgcccagctgtactcaacactgaaggaagggaatcccccttgggaggtgactgaagccgtgctgtttatcatggcggcaatagctaaatccgtggaccctgagaacaatccaacccttgtggaggtgctcgagggcgtggtccgccttccggagacagtgcacaccgccgttcgctacacatctatcgagcttgtaggcgaaatgtcagaagtcgtggaccggaatccccaattcctggatcctgtgctgggatatctcatgaagggcctttgcgagaaaccattggcatcagctgctgctaaggccattcacaatatctgcagcgtctgcagagatcacatggctcagcacttcaacggtctgctggagatagctcgaagtctcgactcctttcttttatcgcccgaggctgctgttggactcctcaagggaaccgccctggttttagccagattgccactggacaagataactgagtgcctgagcgagctgtgcagtgtgcaggtgatggctctcaagaaattgctgtcccaagaaccctctaacggcatcagtagtgatcccaccgtgtttttagatagacttgccgttatttttcgacacacaaaccccattgtggaaaacggccaaacacacccgtgccaaaaagtgatccaagagatatggcccgtcctttctgagactctgaataagcacagggctgacaacaggatcgtggaacgttgttgtcgctgtttacgctttgcagtgcgctgcgtgggtaaaggatccgcagccctgttgcagccattggtcacgcagatggtaaacgtctaccatgtccaccagcacagttgctttctgtatctgggttcaatcttggtagatgagtacgggatggaagagggctgtcgccagggcctattagacatgctccaggctctttgtataccaactttccagcttctagaacagcagaatggcctgcagaatcacccagacactgtggatgatctcttcaggttggccacacgctttattcaaagatcacccgtgaccctcctgcgttcccaggtagttatccccatcctccagtgggccatagcttccaccactctggatcacagagacgccaattgttccgtgatgcgattcctacgtgatctcattcacacaggggttgctaacgaccatgaagaggatttcgaactgagaaaagagctgatcggccaggtcatgaaccagttgggacagcaactagtgagtcaactcctgcacacctgctgcttttgtctccccccttacaccctgccagacgtagccgaggtactgtgggaaatcatgcaagttgatcgacccacgttttgcaggtggttagagaattcccttaagggccttcctaaggaaaccacagtgggagctgtcaccgtgactcataaacaactgacagattttcataaacaggtgacttcagcagaggaatgtaagcaggtctgctgggcactaagggacttcaccaggttgttcagatag

SEQ ID NO: 244903 - DNA, 2874 bp, synthetic construct
  misc_feature 1..2874: note = Description of Artificial Sequence: Synthetic coding sequence
  source 1..2874: mol_type = other DNA
atggagggagccaagcctaccctccagctggtgtatcaggccgtacaggctctgtatcacgatcctgaccctagcggcaaagagcgtgctagtttttggctgggtgagctgcagcggagtgtgcacgcgtgggaaatttccgaccagcttttacaaatccgccaagacgtggaaagctgttacttcgcggcacagaccatgaaaatgaagatccagacgagtttctacgagctacccaccgactctcacgcctctctgagagacagcctgctcactcatatccaaaacctgaaagacctgtcacctgtgattgtgactcagcttgctctggccatagctgacttggcactgcagatgcccagctggaaaggatgtgtccagacccttgtggagaagtacagcaatgacgttacctcgctaccgtttctgcttgagattctgacagtcctgcctgaggaggtccactctagaagcttaaggattggagctaaccgacggaccgaaatcatcgaggacctcgccttctactcttctacggtggtcagcctccttatgacctgcgtcgaaaaggcgggtacagatgagaagatgttaatgaaagtgttcaggtgcttggggtcatggtttaatctgggggttctcgattccaattttatggcaaataacaaactgctggccctgttgtttgaagttctgcagcaggataaaacgagcagtaatcttcacgaggccgcttcggactgtgtatgcagcgcgctgtatgcaatcgagaatgtggagactaacctgccgttggcaatgcagctgtttcagggagtcctgactctggaaacagcctaccacatggccgtggcccgtgaggacctagataaagtgctgaattactgccggatttttactgagctatgcgagacattcttggagaaaatcgtttgcactcccggtcaaggtctgggcgatctgcgaactttagaattgctgctgatatgcgccggacacccacagtatgaggtggtggaaatcagcttcaacttctggtatcgtctgggcgagcatctgtacaaaactaatgacgaagtaattcacggtattttcaaggcttacattcaacggctcttgcacgccctagctcgccattgccagctggaacccgatcacgagggcgttccagaggagaccgacgactttggtgaatttaggatgagggtgtccgacctggtcaaagatcttatttttcttattggatccatggagtgcttcgcgcaactgtactccacactcaaggaagggaaccctccatgggaggtcacagaggccgtcctgtttatcatggctgctattgccaagtctgtagatcccaaaaagcccttctctaacgcggtctgtcggcacagtttgctgtttggtcagaatatcacgtccgaaatttcaaactgtgaatatctcccccctgttctcagggaaaataacccaaccctagtggaagtgctggagggagtggttcgactgcccgaaacggtgcatacagccgtgagatatacaagcatcgagctcgtgggcgagatgtcagaggttgttgataggaatccacagttcctggatcctgtgctggggtatctcatgaaaggactctgcgagaagccactagcctcagctgctgcaaaggccatacacaatatctgctcagtgtgccgtgaccatatggcacagcacttcaacggccttctggagatcgctagaagcctggattcctttttgctgtccccagaggccgcagttggtttgcttaaggggacagccctggtgttggctcggcttcccctcgacaagattacagaatgcctgagcgaactttgcagcgtgcaagtgatggctttgaaaaagctgctgtctcaggagccttccaacggtattagtagcgacccaacagtatttctggataggctggcagtgatcttccgacacacaaatcccatcgttgagaacggccagacacatccctgccagaaagtgattcaggagatatggcctgtgttgtctgagacactgaacaagcatagagccgacaaccggatcgtcgaacgctgctgtaggtgcctgcgctttgctgtgcgctgtgttggcaaaggctcggccgctctgctacagccgttggtcacacagatggttaacgtgtaccacgtccatcagcacagttgttttctctacctcggatcaatactggtcgacgagtacggtatggaggagggatgccgccaggggctgcttgacatgctgcaggccttgtgcatccctacgttccaactgctggaacagcagaacggcctgcaaaaccatcccgatactgtcgacgacctgttcagacttgctacccggttcattcagcgcagtcctgtcacactgcttcgcagccaggtagtgatccctatcttacagtgggcgattgcctctaccacgttggaccatagggatgccaattgctccgtcatgaggttcctgcgcgatctgatccatacgggagtcgcgaacgatcatgaggaagactttgagctccgaaaagagcttatcggtcaggttatgaaccagcttggccaacaactggtgtctcagctgctccatacatgttgtttttgcctcccaccctacactttacctgacgtcgcggaagtcctctgggagataatgcaggtcgaccgccctacgttctgtagatggttggagaactccctaaagggactgccgaaggagaccactgtgggagctgttactgtcacccacaagcagctgaccgactttcacaagcaagtcacatcagccgaggaatgcaagcaggtgtgctgggcacttagggactttactagactgtttcgatag

SEQ ID NO: 244904 - DNA, 2874 bp, synthetic construct
  misc_feature 1..2874: note = Description of Artificial Sequence: Synthetic coding sequence
  source 1..2874: mol_type = other DNA
atggaaggggcaaaaccaactctgcaattggtttatcaggcagttcaggcactgtatcacgaccccgaccccagtggcaaggagcgcgcatccttttggctaggcgaactgcagcggagtgtgcacgcctgggagattagtgatcagctgctacagattcgtcaggacgtggagtcatgctactttgccgctcagactatgaagatgaaaattcaaacctctttctatgagttgcccactgactctcacgccagcctcagggattcacttttgacccatattcagaatttgaaagatttaagccctgtcatcgtcacgcagttagctctggcaatcgccgatcttgctctgcaaatgccttcttggaagggatgtgtacagaccttggttgagaaatattctaacgatgttactagccttcctttcctgctcgaaatcctgactgtgctgcctgaggaagtccactcacgaagcttgagaatcggtgccaatagacgcaccgagattatagaggacctggcattttacagttccactgtggtgtcacttctgatgacctgtgtagaaaaggcgggaactgatgaaaaaatgctcatgaaagtgttccgttgcttgggaagttggttcaatctaggcgtgttagactctaattttatggcaaataataagcttctggctctgctttttgaggttctgcagcaggacaaaacttcgtcaaatctgcacgaggctgcatccgactgtgtgtgtagcgcactgtacgcaatcgagaacgtcgagacgaatctgcccctggccatgcaactgttccagggagtgctgacactggagacggcctaccacatggcagtggcccgagaagatctggacaaggtgcttaactattgtcgcatctttactgagctgtgtgagacgttcctggaaaagattgtgtgcactcccggacaggggctcggcgatctgaggacactggagctgcttctaatctgcgctggacatccacagtacgaagtagtcgagattagctttaatttctggtataggctgggtgagcacttatataaaaccaacgatgaggtgattcacgggatattcaaggcatatattcagcggctgttacatgctctcgcgagacactgccaactggaacccgaccatgaaggggtgccagaagaaacggatgacttcggagaatttaggatgcgcgtttctgacctagtcaaggatctgattttcctgatcgggtctatggagtgcttcgcccagttgtattccactctcaaggagggtaaccccccatgggaggtgactgaagcagttttatttatcatggctgccattgctaaatccgtcgaccccaagaaaccttttagtaatgctgtgtgtcgccactcccttctgtttggccagaatattactagcgagatttctaactgcgagtacctgcctcctgtactgagagagaacaatccgacccttgtcgaggtgcttgagggcgtggtgcggctccctgaaacagtccacaccgctgttaggtataccagtatcgaactggtaggggaaatgtcagaagttgtggaccgcaatccccagttcctcgaccccgtgcttggatatctgatgaaggggctgtgtgaaaagccattggcctcagccgctgccaaggctattcacaacatctgttcagtctgccgtgatcatatggcccaacacttcaatggcctcttagaaattgcaagatcactcgactccttcttgctcagcccagaggcggctgtgggtcttctaaagggaacagccctggtcctcgctcgattacctctggacaagatcaccgagtgcctgagtgagttgtgttcagtgcaggtcatggccctgaaaaaacttctctctcaagagcctagcaacgggattagtagcgacccaacagtgtttctggacaggttggccgtgatcttccgccatacgaatcctatagttgaaaatgggcagacgcacccatgccagaaggtgatccaggagatttggcctgtccttagcgaaacacttaacaaacaccgggcagacaaccggatcgtggaacgctgctgccgctgtttgagatttgcggtacggtgcgtcggtaaagggagcgcagccctcctccaacctctcgtcacgcaaatggtgaatgtctaccatgtgcaccagcattcctgcttcttatacctgggttcaatccttgtcgacgaatacggtatggaggagggctgcaggcagggtctcctagatatgctgcaggccttatgtatccccacattccagctcctcgaacaacagaacggattacaaaaccacccagatactgtcgacgacctgtttaggctggccacacgttttatccagcggagtcccgtgacattgctcaggtctcaggtggttatacctattttgcagtgggctatcgcctccactaccttggaccatagagacgccaactgctccgtgatgcgtttcctacgcgatctcattcatacaggtgtggccaacgatcatgaagaagacttcgagctgaggaaagagctgatcggccaggttatgaatcagctgggccagcagctcgtgagtcaactgcttcacacatgctgcttctgtctccctccctatactctgcccgacgttgcagaggtgctgtgggagataatgcaggttgatcgcccaacattttgtagatggttggaaaactccctcaagggactgcctaaagagacaacagtcggggctgtgaccgtgactcacaaacagctcacggacttccacaagcaggttacaagtgcagaagagtgtaagcaggtttgttgggcactgcgggactttacaaggctgttccgctag

SEQ ID NO: 244905 - DNA, 2580 bp, synthetic construct
  misc_feature 1..2580: note = Description of Artificial Sequence: Synthetic coding sequence
  source 1..2580: mol_type = other DNA
atggagggcgcaaaaccaaccctacagttggtttaccaggccgtccaagccttgtaccatgatccagacccctccggcaaggagcgcgcatccttctggttaggcgagctgcaacgctcggtgcatgcctgggagatctcggaccagcttcttcaaatccgtcaggatgttgagtcgtgctacttcgccgcacagacgatgaagatgaagattcagaccagcttctacgagctgccgaccgatagccatgcctcactcagggacagcttgttaactcacatccagaatctcaaggacctttcccctgtgatcgtcactcagttagctttagcgatcgctgacctggccctccagatgccatcatggaagggctgtgtccagaccttggtggaaaagtacagtaacgatgtcacttctctgccatttctgctggaaatcctgaccgttctcccagaagaagtccatagtaggtcgctgagaataggtgctaatagacggacagaaatcatcgaggacctcgcgttttacagcagtactgtggtctcgttgctaatgacatgcgtggaaaaagctggtacagatgagaaaatgcttatgaaagtgttccggtgcctgggatcttggttcaacctcggagtgctggactccaacttcatggctaataacaagctcctcgctttgctattcgaggtgctgcagcaagacaaaacttccagcaacctgcatgaggccgcatctgactgtgtctgctccgcgctctatgcaatagagaacgtcgaaactaacctcccactcgccatgcaactgtttcaaggcgttctgacgttagagacagcctatcacatggctgtggctagagaggatttggataaggtgttaaactattgccggatctttaccgaactctgtgagacatttcttgagaaaatcgtttgcacacctggtcaggggttaggcgacctgcgcactttggagctcttgctgatctgcgcaggtcacccccagtacgaagtagttgagataagttttaacttctggtaccgcctgggggagcacttatataagactaatgacgaggtcatacacgggattttcaaggcatatatacagcgcctgctccatgcccttgcacggcactgccagctggagcctgaccatgagggggttcctgaggaaacggatgactttggcgagtttaggatgagagtgtccgacctcgtgaaggatttgatattccttatcggatctatggagtgttttgcccagctttattctactctcaaggagggaaacccaccttgggaggtcacagaggccgttctgtttatcatggctgcaattgccaaatccgttgaccccgagaataatccaacactggtggaggttctggagggggtcgttcggctgcctgaaacagtgcatacggccgtgaggtacacaagtatagagctcgtgggtgagatgtccgaggtggtagaccgcaacccccagttcttagggacagcactggtcctggctagactgccccttgataaaattaccgagtgtctgagtgaactctgtagcgtccaagtaatggcccttaagaaactgctgagccaggaaccctctaacggcatttcaagcgatccgacagttttccttgatcgcttggcagtgatctttcggcatacaaacccgattgttgaaaatggccagacccacccgtgccaaaaagtcatccaagagatttggccagtgctgtctgagacactgaataagcatcgggctgacaatagaatcgttgaacgctgctgcagatgtctgcgctttgcagtgcgctgcgtgggcaaggggagtgccgcattgctgcaacctcttgtgacgcagatggtgaacgtctaccacgtgcatcaacactcgtgtttcctttacttgggttcaattcttgtcgacgagtacggaatggaggaggggtgcagacagggccttctcgacatgcttcaggccctctgtattcccaccttccaactcctggagcaacaaaatggtctgcagaaccatccagacactgtggatgaccttttcaggctagccacgaggtttatccagaggtcccctgtaacactactgcggagccaggtcgtcatacccatcctccagtgggccattgccagtactaccctcgaccaccgtgatgcgaattgctccgtgatgagattcctgcgcgatcttattcacaccggcgtggcaaacgatcacgaggaagattttgaactccggaaggagcttattggtcaggtcatgaaccaactgggtcagcagttggttagtcaactcctgcacacatgttgcttttgtcttcccccttacactttgccagatgtggccgaggtgctttgggagatcatgcaggtggaccgaccaacattttgccgctggttggagaacagtttgaagggcctgcccaaagaaacgactgtgggggctgtcaccgtcacacataaacagttgaccgatttccacaagcaggtgacttccgccgaagagtgcaaacaggtctgctgggcccttagagacttcactaggctgttccggtag

SEQ ID NO: 244906 - DNA, 4236 bp, synthetic construct
  misc_feature 1..4236: note = Description of Artificial Sequence: Synthetic coding sequence
  source 1..4236: mol_type = other DNA
atggcagaagccaggaagaggagggagctcctccctctgatctaccatcatcttctgagagctgggtatgtgcgggctgctcgcgaagtcaaagaacaaagtggccaaaagtgcttcctggcccagcccgtcacccttctggacatatatacccactggcaacagacctccgagctcggccgtaagaggaaggccgaggaggatgctgcactccaggcaaagaagaccagggtttccgaccccatatccacctccgagtcatcggaggaggaggaagaggctgaggcagaaacagcaaaggctaccccacgactcgcaagcactaatagctccgttttgggcgctgacttgccaagctctatgaaggaaaaagccaaggccgagaccgaaaaggccggtaagaccggaaactctatgccccaccctgcaacaggaaaaaccgtggccaaccttctgagtggaaagtcccccaggaagtcggcggagcctagcgctaacaccactctcgtgtccgagaccgaggaggagggctctgtgcccgcatttggtgccgctgcaaagccaggaatggtgtccgccggacaagccgactccagttccgaggacactagctctagcagcgatgagacggacgtggaggttaaagccagcgagaagatactccaggtccgggctgcaagcgctccagccaaggggacccctgggaagggcgcaacaccagctccacccggtaaagccggtgctgtagcatctcagaccaaggctggaaagccagaggaggactccgaatccagtagcgaggagtccagcgacagtgaggaagaaacgcccgcagccaaggccttactgcaggctaaggccagtggaaaaacatctcaggtgggtgccgcaagcgccccagctaaagaatccccacgaaaaggcgcagctcctgccccaccaggaaaaactggaccggcagtcgccaaagctcaggccggaaaacgcgaggaagattcccaaagcagcagcgaagagagtgactccgaagaagaggccccagcacaagctaaaccttccggcaaggcccctcaggtgcgggcagcctcagcacccgctaaggaaagtcccaggaaaggagccgctccagcacctccccgaaagactggccctgctgctgcccaggtccaagtcggcaagcaggaagaggattcccggagttccagcgaggagtctgactctgatcgagaggcgctggccgctatgaatgcggctcaggtcaagcccttggggaagtccccacaggtcaagcccgcttccactatggggatgggacccctcggaaaaggtgcaggccctgttccacccggtaaggtggggccagccacgcccagcgcacaggtgggaaaatgggaggaggacagcgaatcgagcagcgaggaatctagcgacagttccgacggggaggtgccaacagcggtggcgccagcccaagagaaatcactgggaaacattctacaggctaaacctacatcgtccccagccaaggggcctccccagaaagctggcccagtggccgtgcaggtgaaggctgagaagccaatggacaactccgagtcgtcggaagagtcgtccgacagcgcggactcagaggaggcgcctgcggctatgaccgctgcccaggccaaaccagctctcaaaatcccacagacgaaagcctgtcccaagaaaaccaatactaccgccagcgctaaagttgctccggtgagggtgggaacacaggctccaagaaaggctgggactgcgacttctcctgcgggatcttcgccagctgttgccggtggtacccagcgcccagccgaagacagctcctctagcgaggaaagtgacagtgaagaggagaaaactgggctggccgtcacagttggccaggcgaagagtgtggggaagggcctgcaagtgaaggcagcatcggtccctgtcaaggggtccttggggcagggaacagcccctgtgctacctggcaaaacaggccctaccgtgacacaggtgaaggcagaaaagcaggaggactccgagtccagcgaagaggagagcgacagcgaggaggccgctgctagcccagctcaggtgaagacctctgtgaagaaaactcaggccaaagccaacccagcagctgcaagggccccatccgcgaaaggcacgattagcgctcctggcaaagtagtgactgcggctgcacaggcgaaacagcgctctccttctaaagttaagccccctgtgaggaatccccagaactcaactgttctggcaagagggccagcttccgttccctccgtcggcaaagccgtggcaacagcagcacaggcccagaccggcccagaggaagactctggctcatccgaagaagaatcagattccgaggaagaggccgaaactctcgcgcaggtgaagcccagcggaaaaactcaccaaatccgcgcagcattagcgcctgccaaggagagcccaaggaagggagcagctcccacacctccagggaaaaccggcccttccgctgcccaggctgggaaacaagatgactcaggctcctcaagtgaagagagtgacagtgacggcgaggctcccgctgcagtcacttccgcgcaggttatcaagccccctcttatcttcgtggatcccaaccggagccctgccggtccagccgcaacccctgcacaggcacaggccgcaagcacaccaaggaaggctagagcgagcgagagcaccgccaggtcgtcgtcttccgaaagcgaggatgaagacgtgatccctgcaactcagtgtttaacccccggtatcaggactaatgtggtaactatgcccacagcccatccgcgtattgcacctaaggcctcaatggccggagccagctccagcaaggagtccagccgcattagtgatggcaaaaaacaggagggacctgcgacacaggtgagcaagaaaaaccctgcatctctcccgttgacccaagccgctcttaaggttctggcacagaaagcaagcgaagctcagccccctgtggcacgtacccagccaagctccggggtggacagcgccgtcggcacactgccagccacatcgccccaatctacaagcgttcaggccaaggggactaataaactccggaaacctaaactgcccgaggtgcagcaggcaacgaaggctccagagtcttccgatgacagcgaggactccagcgatagttcaagtggtagcgaggaagatggagaggggccacagggtgccaagtcagcacataccctggggcctacgccgagcaggaccgaaacgctggtcgaagaaactgctgccgaatcttctgaggacgacgtcgtagcccctagccagagcctgcttagcggatacatgacaccagggctgacacccgcaaatagccaggcctctaaggctacaccaaagctggatagctccccaagtgtgtctagtacgctggccgctaaggacgatcccgatgggaaacaggaagctaagccgcagcaggccgcaggaatgttatcacccaaaaccggcggtaaggaggcagctagcgggactacaccccagaagtctagaaagccaaagaagggggcaggtaatccccaagcctccactctggcgctgcagagtaacataactcagtgcctgctcgggcagccatggcccctgaacgaagcccaggtgcaggcatcggtggtgaaggtgttgacagagctgctggaacaggagagaaagaaggtggtcgatactaccaaggagagctctcgaaagggctgggagtcacgcaagcgtaaactctctggcgaccaacccgctgctcggactcctcggtctaaaaagaagaagaagttgggcgcaggggaaggcggtgaggcttctgtgtccccggagaagacaagcaccaccagcaaaggaaaggcaaagcgggataaggcgtcaggcgatgtgaaggaaaagaagggcaagggctctctgggtagccaaggtgcaaaggacgagcccgaagaggagctgcagaagggcatggggaccgtggagggaggcgaccagtctaatccaaagagtaaaaaagagaaaaagaaatccgataagaggaaaaaggataaggaaaaaaaagaaaagaagaagaaagctaaaaaggcctccaccaaagattcggaatcccctagccagaaaaaaaagaaaaaaaagaagaaaacagccgagcagactgtgtag

SEQ ID NO: 244907 - DNA, 4470 bp, synthetic construct
  misc_feature 1..4470: note = Description of Artificial Sequence: Synthetic coding sequence
  source 1..4470: mol_type = other DNA
atggcagaggcgaggaaacggagagagctgctgcctctaatttaccaccaccttctccgcgctggctacgtacgtgccgcaagagaggttaaggagcagtctggacagaaatgcttccttgcgcaacccgtgactctgctggatatttatactcactggcagcaaacttctgaattgggcagaaagagaaaagcagaagaggacgcagccctccaggcaaagaagactcgcgtatcagacccaatctccacatcagaatcaagcgaagaggaggaagaggctgaagcagagacagcaaaggccacccctcgcctggcctctacgaattcttcagtgcttggagcagacctgccttcctccatgaaggaaaaggccaaagccgagactgagaaagctggcaaaacgggaaacagcatgccacaccccgctaccgggaagacagttgccaatctgctgagcggaaagagcccccgaaaatctgcagaaccatcggccaacaccacactagtgagcgaaacggaagaggagggatccgtcccagctttcggcgctgctgccaaaccagggatggtttccgccggacaagctgattcttccagtgaagacacaagctcctcctccgacgaaactgacgtcgaaggtaagcctagcgttaaaccggctcaggtcaaggcttcctctgtcagtaccaaagagagtcccgcacgcaaagccgctccggcaccagggaaggtcggtgacgtcacccctcaggttaagggcggagcccttccccctgcaaagcgcgctaaaaaacccgaggaagaaagcgagagttccgaggaaggaagcgaaagtgaggaggaggcacccgctggtacacggtcacaggtgaaggctagcgaaaaaatccttcaagtgcgagcggctagtgcccctgctaaagggacacctggcaaaggcgcaactcctgccccaccaggcaaagccggtgctgtcgccagccagactaaagctgggaagcccgaagaagactccgaaagctcttcggaagaaagcagtgatagcgaggaagagacccccgctgcaaaagccctgttgcaggctaaggccagcggaaagactagccaggtgggggctgccagcgccccagctaaagaatccccacggaaaggggctgcacccgcacccccagggaaaaccggcccagctgtggcgaaggcccaggccggtaaacgggaggaggacagtcagtcatcctccgaagagtccgactcagaagaagaagcccctgcccaggcgaagccaagtggcaaggcccctcaagtgagagctgcatccgcccctgccaaagaatccccgagaaagggcgctgcccctgcacctcccagaaaaacgggtcccgcagccgcacaggtccaggtggggaagcaggaagaagactccaggagcagctccgaggaaagcgatagtgatcgggaagcactagctgcaatgaacgctgctcaggtgaaacctctgggcaagtcaccccaggtcaaacctgcttctactatgggtatgggtccactgggtaaaggtgcaggacccgtacccccagggaaagtcggacctgcaaccccctccgcccaggtgggcaaatgggaggaggactcagagtcatcgtcggaggagtcctccgattcttcggacggagaggtgcctacggccgtagccccagcgcaggaaaagtcattgggcaacatcctgcaagcgaagcctacctcatcccctgccaagggccctccccaaaaagctggccctgtcgctgtgcaagtgaaggctgaaaaacccatggacaattcagaatcttctgaagagtcctccgatagtgcagattcggaagaagccccagccgcaatgactgctgcgcaggcgaaacctgctctcaaaataccccaaaccaaggcttgccccaaaaagacgaatacaactgcctccgctaaggtggcccctgtgcgggtcggaacccaggctccccgaaaggctggcaccgccaccagtcctgctggttcttctcctgcagtcgctggaggcacacaacggcctgcggaagatagctcaagcagcgaagagagtgactccgaagaggagaaaacagggcttgctgtcaccgtggggcaagccaagagtgtcggaaagggcctccaagtcaaggcagcttccgtccccgttaagggcagtcttgggcaggggacagcgcctgttctgccaggaaagactggcccaaccgtaacacaggtaaaggccgagaagcaagaggattccgagagctctgaagaggaatcagattccgaggaggctgccgcatctcctgctcaggtcaaaacttccgtgaagaagacacaggcaaaagcaaatcctgctgccgcacgagcgccttccgcaaagggcactatttcagcccctggcaaggtggttacagctgccgcacaggccaagcagaggtctccatccaaggtgaaaccccctgtgaggaaccctcaaaattcaacagtgctcgcaagaggtcccgcttctgttcctagcgtgggaaaagccgtagccactgccgcacaggcccagaccggaccagaggaggacagtggcagctcagaggaggagtccgactccgaggaagaagcagagacgctggcccaggtgaagcctagcggcaagacacatcagattcgcgcagccctggctccagctaaagagtccccgaggaagggggcagctcctacgccccctggaaagactggcccaagtgccgctcaggcaggaaaacaggatgattctgggtccagctccgaagaatccgactctgatggggaagcccctgccgctgtaacaagcgcccaagtgattaaaccacctttgatttttgtggatcccaatagatcccctgctggaccggctgccacccctgctcaggcgcaagcagcatccacgcctaggaaggccagagcctcagagtcaacagctagaagctctagcagtgagtctgaagacgaagacgtgatcccggcaacccagtgcctgactcccggtatcaggacaaatgtggttaccatgccaaccgcccaccctagaatcgcacctaaggcatcaatggccggtgccagtagttccaaggaatctagcaggatcagtgacggcaagaagcaggaagggcctgcgacccaggtctcgaaaaagaacccggcttctctccctcttacccaggctgctctgaaagtgctggcgcagaaggcttccgaagcccaaccgcctgttgcaaggacccagccatcttccggagttgacagcgcggtcggcacactgcccgcaacatctccccaaagcaccagcgtgcaggcaaagggaaccaataagcttcgcaagccgaagttaccggaggtgcagcaggctacaaaggctccagagtcatccgacgactccgaagatagttctgatagcagctccggcagcgaagaggacggggaaggccctcagggtgctaagtcggcccacaccttggtggggccaactccttcacggaccgagactctggtggaggaaactgctgccgagtcctccgaagatgatgtcgttgccccatctcaaagcttgctttctggctacatgactcccggtctcacaccggctaattctcaggccagtaaggctacacccaagctggacagtagcccctccgtgtcatccacattagccgctaaggacgacccagatggaaaacaggaggctaaaccccagcaggcggcaggtatgctaagtcccaaaacaggtgggaaggaagctgcttcaggcactactcctcagaagtcacgcaaaccaaagaagggcgctggcaatccacaggcttccacgttggcactccaaagtaatattacacaatgcttactgggccaaccctggcctctcaatgaggcccaagttcaggctagcgtggtgaaagtgctcaccgagttactggagcaggagcgcaagaaagtggtcgacacaaccaaggagtcctctcggaagggttgggaatcccggaagcggaaactgtcgggtgatcaacccgctgctcggactccgcgatcaaaaaaaaagaagaaactgggcgctggtgaaggtggagaagcttcggtgagcccggagaaaactagcacaaccagcaaggggaaagctaaaagagataaggctagtggggacgtgaaagagaagaaaggcaaaggcagtctgggcagtcaaggagctaaggacgaacctgaggaggaactgcagaagggtatgggcacagtggagggtggagaccagtcaaaccctaagagcaaaaaggagaagaagaagagcgataagaggaagaaagacaaagagaaaaaagagaaaaaaaagaaagcgaagaaagcatcaactaaggactccgaaagtcctagccagaagaagaaaaaaaaaaaaaagaaaactgctgagcaaaccgtgtag

SEQ ID NO: 244908 - DNA, 2877 bp, synthetic construct
  misc_feature 1..2877: note = Description of Artificial Sequence: Synthetic coding sequence
  source 1..2877: mol_type = other DNA
atggccgaagccaggaagaggagggagctcttgcctctgatataccaccatctacttagagccggatatgtcagggcggctcgggaggtcaaggaacaaagcggacagaaatgctttctcgctcaacctgttactcttctggatatttacacccattggcagcagacttctgaactcggaagaaagcggaaggcagaagaggacgcagcactacaggccaagaaaacgagggtctctgatccaatcagtacatccgagtccagtgaagaggaagaagaggcagaggccgaaacagcaaaggccacgccaaggctcgcttcaactaactcaagcgttctgggagcagatctcccatcctcaatgaaagagaaggcgaaagctgagacggaaaaggccggaaaaactggtaattccatgccacatccagcgacagggaaaactgttgccaatttactgtccggcaaaagcccgagaaagagcgctgaaccttcagctaacaccaccttagtaagtgagacagaagaggaaggctccgtgcccgcattcggcgctgccgcaaaaccaggcatggtgtctgccggacaggccgatagctcttccgaagatactagctctagctctgatgaaaccgacgtggagggaaagccctcagttaaacccgctcaagttaaggcttcgtccgtcagtaccaaagagtcccccgctcgtaaggctgcccctgcccctgggaaggtgggtgatgtgacccctcaagtgaaaggtggggcactccccccagctaagagagctaaaaagcccgaggaggagtcagagagcagcgaagaagggtcagagagcgaagaggaagctccagccggaactagatcccaggttaaggctagtgagaagattctgcaggttcgcgctgcgagtgctcccgcaaaaggaactcccggaaagggggctactccagccccacccggtaaggcgggagctgtggcttcccagactaaagccggaaaaccggaggaagactccgaatctagtagtgaagagtcttccgatagcgaagaggagacgcccgcagctaaagctctgttacaagccaaggcatccgggaaaacttctcaggtcggtgctgcctcagcccctgccaaggagagtccaaggaagggcgcagctcctgctcctcccggtaaaacaggcccagctgtcgctaaagcacaagccggaaaacgggaagaagatagtcagtcctcatccgaagagagtgacagcgaagaggaggcgcctgctcaggctaagccatcaggtaaagctccacaggtccgggctgcctctgctcccgctaaggaatcccccaggaaaggtgccgcacctgcaccccctaggaaaacgggaccagctgcagcacaggttcaggtgggaaagcaggaggaggattctagatcctcatccgaagagtccgattcagatcgtgaagccttggccgctatgaatgcagcacaggtgaaaccgctggggaagagtcctcaagttaagcccgctagtaccatgggcatggggccacttggcaagggggcaggacctgtgccccctggtaaagtgggacccgcaacccccagcgcccaggtgggcaaatgggaagaggactctgaaagcagtagcgaagagtcttcagatagcagcgacggggaggtaccgacagctgtggcccctgctcaggagaaaagcctgggaaacattctgcaggccaagcctaccagcagccctgcgaaagggcctccacagaaggccggtcccgtggccgtccaagtaaaagctgaaaaaccaatggacaatagcgaaagctctgaggagagtagcgacagtgccgactctgaagaggcacctgccgcaatgaccgcagctcaggcgaaacctgcactgaaaatcccacagactaaagcttgcccaaagaaaaccaacacaaccgcctctgctaaggtggctcccgtgagagtaggaacccaggcccctagaaaagccggaaccgcaacatctcccgctggtagctctcccgctgttgcgggtggaacacagcgccctgccgaggattccagcagttctgaagaaagcgactcagaggaagagaaaactggcctcgcagtcaccgtaggtcaggcaaagtccgtgggcaaaggcttgcaggtcaaagcggctagcgtcccagtgaaaggctcattaggccagggtacagctccggttctgccgggaaaaaccgggcctaccgtgacacaggtcaaagccgagaaacaggaagacagcgaatcaagtgaggaagaatcagacagtgaggaagcagccgcttctcctgcccaggtgaagacctccgttaagaagacccaggccaaggccaatcctgctgcagccagggcaccctccgcgaaaggcaccatttcagctccaggaaaggtggttacagccgctgcacaggccaagcagcggagtcccagcaaagtgaaaccaccagtgagaaacccccagaactccacggtgctcgccagggggcctgcgagtgttccttccgtggggaaggcagtggccacggccgcacaggcgcagactgggccagaggaggatagcggcagcagcgaggaggagtctgattcagaggaggaggcggagaccctggcccaagtaaaaccatccggtaagacccaccagatccgggctgcgctcgccccagctaaggagagccctagaaaaggcgcagcccctactccaccagggaagaccgggccatctgcagcccaagccggaaaacaagatgatagcggaagctcttctgaggagtccgacagtgatggagaggctccagctgcagttactagcgcccaggaccaagagtcaagttag

SEQ ID NO: 244909 - DNA, 4245 bp, synthetic construct
  misc_feature 1..4245: note = Description of Artificial Sequence: Synthetic coding sequence
  source 1..4245: mol_type = other DNA
atggctgaagcgagaaagcgcagagagttacttccattaatctaccaccacttactgcgcgcagggtatgtccgggctgcccgtgaagttaaggagcagagtggtcagaaatgctttcttgcccagcccgtgactctactcgacatctatacacactggcaacagacctctgagttgggtagaaaacgcaaggccgaggaggatgccgcactacaagctaaaaagacaagagtcagtgaccctatctctacctccgaaagtagcgaggaagaggaggaggcggaggcggagactgcaaaggcgactccaagactggccagcaccaattcttcggttctcggcgctgacctgccatcttcgatgaaggagaaggcaaaggctgagactgagaaggccggaaagacagggaactccatgccacacccagctacagggaaaaccgtggccaatttgttgtcggggaaatcgccccgaaaatccgcggaaccatccgcaaacactaccctggtgagcgaaaccgaagaggaaggctccgtccccgcttttggggcagccgcaaagccaggaatggtttccgccggtcaggctgactcaagttccgaagacacatcctcctcttcagatgaaacagacgtcgaaggcaagccttccgtgaaaccagcacaagtaaaagccagttccgtcagcaccaaggagtccccagcacgtaaggctgcacccgcaccagggaaagtgggggatgttaccccgcaggtaaagggcggagctctgcctcccgcaaaacgggcaaagaagccggaggaggaaagtgaatcgtcagaggaaggtagcgagagtgaggaggaagcacctgcgggaactcgctctcaggtgaaggcgagtgagaaaatcctgcaggtcagggctgcatcagccccagcaaaagggacgccaggaaaaggggcaactccagcacctcccggaaaggccggagccgttgcatctcagacgaaagccggaaagcccgaagaagactcagaatctagctctgaagaatcttcagattctgaggaggaaacacctgcagccaaagctctgctccaggccaaagctagtggtaagacatctcaggttggcgcagcttcagctcccgctaaagagagcccccgtaaaggcgcagctcccgcaccccctggaaagaccggccctgcagttgcaaaagctcaggcagggaagagggaggaggactctcagtcatcaagcgaagagtctgacagcgaagaggaggcgcctgcgcaggctaagccttcaggcaaagcgccacaggtacgagccgcttctgccccagcaaaagagagccctcgtaagggagctgctccagcgccaccacgtaagactggccctgccgctgctcaagtccaggtcggcaagcaggaagaagactcccggtctagttcggaggagtcagattccgatcgcgaggccctagcagcaatgaacgccgcacaggtgaagcccctggggaaatcccctcaagtgaaacccgcaagtacaatggggatggggcctctgggcaagggagccggaccagttccacccggtaaagttgggcctgcaacgcctagcgcgcaggtagggaaatgggaagaggacagcgagtcatctagcgaagagtctagtgactcttccgatggtgaggtgcccacagccgtggcccctgcgcaggaaaaatcccttggaaacattctacaggcaaaacctacttcatcaccggcaaagggtcccccacaaaaggcaggccctgtggcggttcaggttaaagctgagaaacccatggataactcagagagctccgaggagtccagcgactctgctgactccgaagaggcgcctgctgccatgactgcagctcaagccaagcctgctctcaagatccctcagaccaaggcgtgccccaagaagaccaacacaacggcaagcgcaaaggtggccccagtgagggtaggtacccaggcgccaaggaaggctggtactgctacatcccccgcaggcagtagccctgccgtagctggaggaacacagagacccgctgaggatagctcaagctcggaggaatccgactccgaagaggaaaagaccggtctcgctgtaacagtcgggcaggccaaaagtgtgggcaaagggcttcaggtgaaggcagccagtgtaccggttaaaggaagcctggggcagggaactgccccagtcttgcctgggaagactggaccaacagtcactcaggtcaaagccgaaaagcaagaggactccgaatcgagtgaggaggagtcggacagcgaagaagctgcagccagcccagcccaggtcaagacctcagtgaagaaaacccaagctaaagccaacccagcagcagccagggctccaagcgcaaagggtacaatcagtgccccaggcaaggttgtgacggcagccgcacaggccaagcagcggtcacctagtaaggtcaaacccccagtccggaatccacagaactccaccgtattagccaggggcccagcgagtgtgcctagcgtcgggaaagcagttgcaactgctgcccaggcccagacagggccagaagaggattctggaagcagtgaagaggaatctgactcagaagaagaggctgaaactctggcacaggtcaagcccagcgggaagacacaccagattcgtgccgctctcgctccagcaaaagaatccccccgaaagggcgctgccccaaccccgccaggcaagacaggccctagcgcagcccaggctggtaaacaggacgattcgggcagctcatcggaagagtctgactctgatggtgaggccccagctgctgtcacatcagcgcaggtcataaagccacccctgatttttgtggaccctaaccgcagtcccgcagggcctgccgcaacccccgctcaggcccaggccgctagtacaccacgaaaagcacgcgcttccgagtccactgctcgatcctcctcttccgaaagcgaggatgaggatgttatcccagctacgcagtgcctaacgcctgggatccggaccaacgtggtgaccatgcctactgcccatccccgtatcgccccaaaggcgagtatggctggcgcaagcagtagcaaggaaagttcccgcatctcagacggaaagaagcaggaaggtccagccacccaggtagattccgctgtcggcacactcccggctacctccccacagtccaccagtgtacaagctaagggaaccaacaagttaaggaagccgaagcttccagaggtccagcaagcgacaaaggccccagagtctagcgacgattctgaagactcgtccgactccagcagcgggtcagaagaggacggcgagggaccccaaggagcaaagagcgcacacaccttgggcccaacccctagcaggacagagactttggtcgaagaaactgctgccgagagctctgaggacgacgtggtggccccaagccaaagcctgctgtccgggtatatgacgccaggactcactcctgcaaactcccaggcctctaaagccacaccaaagctggattcctcccctagtgtttccagcacactcgcggcaaaagatgatcctgacggcaagcaggaagcaaaaccacagcaggcagccggtatgctctcgccgaaaaccggcggtaaggaagccgcttctggaacaacaccccaaaagtctcgaaaacccaaaaagggtgcaggcaaccctcaggccagtactctagctctgcaatctaacataactcagtgtttgctggggcaaccatggcctttaaacgaagcacaagttcaagctagcgtggtgaaagtgctgacggagctgctcgaacaggaaagaaagaaggtggtcgatactacaaaggaatcctccaggaagggctgggagagccggaaaagaaagttgtccggcgaccagcccgctgccagaactccgagatccaagaaaaagaaaaaactgggtgccggtgaaggtggagaggctagcgttagcccagagaagacctctactacgtctaaaggcaaggcaaaaagggacaaggctagcggtgatgttaaggaaaagaaaggcaagggttccctcggtagccagggggcaaaagacgaacccgaagaggagcttcagaaaggtatgggcaccgtagaggggggagatcaaagcaatcccaaatccaagaaggagaagaagaaatcagacaaacgcaagaaggataaatag

SEQ ID NO: 244910 - DNA, 4356 bp, synthetic construct
  misc_feature 1..4356: note = Description of Artificial Sequence: Synthetic coding sequence
  source 1..4356: mol_type = other DNA
atggccgaagctcgcaagaggcgcgaactcttgcctctgatttaccaccatctgttgagggctgggtatgtgcgcgctgcgcgagaggtgaaggaacaatccggccagaagtgcttcctcgcccaaccggtgacacttttagacatatacacacactggcagcagaccagtgagcttgggagaaagaggaaggctgaagaggacgcagccttgcaggctaaaaagacgcgagtctccgacccaataagtaccagcgaaagcagcgaggaggaagaagaggcagaagccgagacagccaaagccaccccccgactcgcttcaactaactcaagtgtgctcggagccgacctgccctctagcatgaaagagaaagcgaaggccgagactgagaaggcaggaaaaaccggcaactccatgccacacccagccaccgggaagactgtggcgaacctcctgtctggaaagagcccaagaaaatccgcggaaccatcggcaaacacaacacttgtgtctgaaactgaggaagagggaagcgtccccgcttttggcgctgccgcaaaaccagggatggtcagcgcgggtcaggccgatagctccagcgaggatacttcctctagcagtgacgagacagacgtcgagggcaaaccttctgtcaagccagcccaggtgaaggcttctagcgtaagcactaaagagtctcctgctcggaaagcagccccagcgcctggtaaagtgggagacgtaacaccccaggttaaggggggagcactgccacccgctaagcgcgctaagaaaccagaggaagaaagcgagtcctccgaggaaggctcggaatctgaggaagaagcgcctgccggaactcggtcacaagttaaggcaagcgagaaaatcctgcaggtgcgggcagcatctgccccagccaaggggacccctggtaaaggtgccactcctgccccaccgggaaaggccggagcagtggcgtcacagaccaaagcaggcaagccagaggaagattccgagtcctccagcgaagagagcagtgactccgaggaggaaacaccagccgctaaggcccttttacaggcaaaggcgtccgggaaaacatcccaggttggagcagcttccgctccggctaaggaatccccacgtaaaggggctgctcccgcacccccaggcaagactggacccgctgtcgccaaggcgcaagcaggcaaaagagaagaggacagccagtcaagctccgaggagagcgattccgaggaggaagctccagcccaggccaagccatcaggtaaggcgccacaggtgagggctgcgtcagctcccgctaaggaatccccccgaaagggagcagctcccgcacctcctcgaaaaaccggccctgcggcagcccaggtccaagtagggaagcaagaagaagactctcggtcgtcaagtgaagaatctgattctgatcgcgaggcactggctgccatgaatgcagcccaggtaaaaccactgggaaagagtcctcaggtcaagccggctagcactatgggcatgggtcctctcggaaaaggtgccggtccagtgcctcccggaaaagttggacccgctaccccctccgcccaagtcggaaagtgggaagaagactccgagtccagttctgaggaatcatccgatagttccgacggtgaagtccccaccgccgtggctcccgctcaggagaagtcactcgggaacatcctccaggccaaacccacgtcaagtcctgcgaagggccctcctcagaaggcaggacctgtggccgttcaggtcaaggctgaaaagcctatggataattcagaaagcagtgaggagtcttcagattctgccgacagtgaggaagcccctgctgccatgacagcggctcaggcaaaacccgctcttaaaattcctcaaacgaaggcttgtcccaaaaaaaccaacacaaccgcgtctgcaaaggtggctcccgtgcgcgttggcacgcaggctccgagaaaagccggaactgctactagccccgctggttccagtcctgccgtggctgggggtactcagaggcctgccgaagattccagctcatccgaagagtcggactctgaagaggagaaaacaggcctggccgttacggtcggccaggctaagagtgtgggtaaaggtttacaagtgaaggccgcatccgtgccagtgaaggggtctcttggccaaggtaccgcacccgtactgcctggtaagaccggacctaccgttactcaggtgaaggccgaaaaacaggaagacagcgaaagctctgaggaggagagtgacagcgaggaggctgctgcttccccagcacaggtgaagacctctgtgaagaaaacacaagccaaggccaatcctgctgcagcacgcgcaccttcagccaagggtactatatccgcaccagggaaagtcgttacagctgccgctcaggctaaacagcgaagcccaagcaaagtgaagccccctgtcaggaatccccagaattcaaccgtattggccaggggacccgcatctgtcccctctgtcggcaaagccgtcgctactgctgcgcaggcccagacaggaccagaggaagatagtgggtcctccgaggaggagtccgactcagaagaagaggctgagacactcgcccaggtgaaacctagcgggaagacgcatcagattcgggctgctctcgcccctgcgaaagagtctcctaggaagggtgccgctccgacccccccaggaaagaccgggccatctgctgcccaagcaggaaagcaagacgatagtggttccagttctgaggaaagcgactcagacggcgaagctcctgctgctgtgactagcgcccaggtgataaaaccgccattaatatttgtggatcccaataggagcccagccggacctgcagccacccctgcacaggcgcaagctgcctcgactccacgcaaggcccgagcctccgagagcaccgctaggtcttcttcatctgaatcagaagatgaggatgttatcccagccactcagtgcttgacaccaggcatccgcactaatgtggtcactatgccaacagcccaccccagaatcgccccaaaagcctctatggccggagcttcgtcttctaaggaaagttctcgcattagtgatggaaaaaaacaagaaggtccagcaactcaagtggacagtgccgtgggtacactgcccgcaaccagtccgcagtctaccagcgtgcaggctaaaggcaccaataagctgcggaagcctaagttgcctgaggtgcaacaagccactaaagcacccgagtcaagtgacgactccgaggacagttctgacagttccagtggatccgaagaagatggagagggtccccagggggcaaaatctgctcatactctggtcggaccgaccccttcacggaccgaaaccctggttgaagaaacagccgctgaaagctcagaggacgatgtcgtagccccttcccagagcttgctcagcgggtatatgaccccagggctgaccccagctaattcccaagctagcaaggccaccccgaagctagattcctcacccagcgtctccagtactttggccgctaaagatgacccagatggcaagcaggaagcaaaaccccaacaggctgcgggaatgctgtccccgaagacggggggtaaggaagctgccagcggtaccactccccagaaaagcagaaagcctaaaaaaggggctgggaacccacaagcaagcaccctcgcattacagagtaatattacccagtgcctgctgggccaaccttggcccctgaacgaagctcaagtacaggcctctgtcgtgaaagttctgacagagctcttagagcaggagagaaaaaaagtcgttgataccaccaaagagtcgagcaggaagggctgggagtccaggaagagaaagctgtctggcgatcagccagccgcaagaacgccacgcagtaaaaaaaaaaagaaactgggagccggagaggggggtgaagcctcagtgtccccagagaagactagtaccacgtctaaaggaaaggcgaaacgcgataaagcctcaggagacgtgaaggaaaagaaaggcaagggatccctgggtagtcaaggggcaaaggacgaaccggaagaggaactgcagaagggtatggggactgtggagggcggtgaccagtctaatcccaaatctaagaaagagaagaagaaatccgacaaacgtaagaaggacaaggagaagaaagaaaaaaaaaagaaagccaagaaggcatccacaaaagattctgaatcgccctcacagaaaaagaagaaaaagaagaagaagacggccgagcaaactgtctag

SEQ ID NO: 244911 - DNA, 4239 bp, synthetic construct
  misc_feature 1..4239: note = Description of Artificial Sequence: Synthetic coding sequence
  source 1..4239: mol_type = other DNA
atggctgaagccagaaagagacgcgagctcctgcccctcatttaccaccacctgctaagggcaggctacgtaagagctgcccgagaagtaaaagagcagagcggccagaaatgcttcctggctcagcctgttactttactggacatttacactcattggcagcagaccagtgagctggggcgaaagaggaaagctgaggaggatgccgcacttcaggctaaaaaaacaagggtgagtgatcccatatccaccagcgagagctctgaggaggaagaggaggccgaggctgagacagctaaggccacccctcgcttggcgtcaacaaattccagtgtgttgggagccgatctcccctcctctatgaaggaaaaagctaaagcggagactgaaaaggctggaaagacgggaaactctatgccacatcccgctaccggcaagacagttgccaacctcctttcagggaagtcgccaagaaagtccgccgagccctcagcaaacactactctagtaagtgagaccgaggaggaaggttcagttccagccttcggggcagccgcaaaacccggtatggtgtccgctggtcaggcggatagctcctcagaggatacctccagctcatccgatgaaaccgatgttgaagtcaaagcatctgagaagattctgcaggtgcgagcggcatctgctccggctaaggggactcccggaaagggtgcgacgcccgctccgccaggaaaagccggagcagtcgcaagccaaaccaaggcgggtaagccagaagaagatagtgagtcttcctcagaagagtcatctgactcggaggaggaaacccctgccgcaaaggctctgctgcaagcaaaagccagtggcaagacctctcaggtcggggctgcatcagctccggcaaaggaatcacctcggaaaggggctgctccagctcctccgggaaagaccggcccagcagttgccaaggcccaggccggtaagcgcgaggaggactcccagtcgtcctcagaggagagcgactctgaggaggaggcgccagctcaagctaagccaagtggaaaagcccctcaggtgagagctgcctctgccccagccaaagagtcacctcggaagggagctgcgccagcacctcctaggaaaactggcccagcggcagcgcaggtccaggtgggcaaacaagaggaagattcgaggtcttccagtgaagaaagcgatagcgaccgggaagcattagcagccatgaatgccgctcaggtcaagcccctcggaaaaagcccccaggtgaagcccgcatccactatggggatgggacccctggggaaaggcgcaggtcccgtgccccctggtaaggtcgggcctgcaaccccctcagcccaggttgggaagtgggaggaagatagcgaatctagtagtgaggaatcctccgattcctcagatggcgaagttcccactgcagtcgctcccgctcaagaaaaaagcttgggtaacatcctacaggcaaagccaacatcaagcccggctaaggggccaccgcagaaggctggtcccgtcgcagtgcaggttaaggctgagaaacccatggacaactccgaatcttcagaagagtcttccgattccgcagactctgaggaagctcccgcagctatgacagctgcccaagctaagccagctttaaaaatcccgcagaccaaagcttgcccaaagaagaccaataccaccgcttcagctaaagtcgcacctgtgcgggttggcacccaagcacctaggaaagcaggcaccgctacaagtcccgcagggagtagccccgcagtggctggcggaacgcagagacctgcagaggattccagttcttcggaggaatccgattcggaggaggagaaaaccggactggcggtcaccgtgggacaggccaaaagtgtgggaaaagggttgcaagtcaaagctgcttcagtacccgttaaaggtagtttagggcaggggaccgcgcctgtgctgccagggaagacaggccctacagtcacccaagtaaaggctgagaagcaggaggactcagagagcagcgaagaggagagcgatagtgaagaggccgcagcctcgcctgcccaggtgaagacatcagtgaaaaaaacccaggctaaagccaatcccgctgcagctagagcaccaagcgctaaagggacaatcagtgcccctggcaaggtggtcactgccgctgctcaggcgaaacagcgcagccctagcaaggtgaagcctcctgtgcgcaacccacagaattccactgttctcgccagaggccctgcatctgtgcccagtgttggtaaggcagttgccaccgccgctcaggcccagaccgggccagaggaggactccggtagctctgaggaagaatctgatagcgaagaagaggcagagacgttggcccaggtgaaaccttccggaaagacacaccagattcgcgctgcactggctcccgcaaaagaatcacctcgcaagggagctgccccaacacctcctggcaagacggggccatctgccgctcaggctggtaagcaggacgacagcggctcatcatccgaagagagtgactcagacggagaagccccagcggcagtaacatccgcacaggttattaaacctccattaatttttgttgaccccaatagatcacctgctggaccagcagcaacaccagcacaggcacaggctgctagtactccaaggaaggccagggcctcggaaagtactgcgcgatcctcatcttcagagtccgaggatgaggatgtgataccggcaactcagtgcctgacccctgggatccgcactaacgtggtcactatgcccaccgcccaccctcggatcgccccaaaggcctccatggccggtgccagttcctccaaagagtcaagcaggatttctgatgggaagaagcaagaagggcctgcgacacaggtgtctaaaaaaaatcccgcaagcctgccactgactcaggcagcgctcaaggtcctggcacagaaagcttccgaagcccaaccaccagtggccaggacccagccctcctcgggagtggatagcgctgtcggcacattacctgccacttctccacagagcacgtctgtgcaggctaagggcacaaacaagctgaggaagcccaaactgccagaagtgcagcaggcgacaaaagcgccagagtcatctgatgatagcgaagactcatcagactcgagttcaggctctgaggaagatggtgaggggcctcaaggggcaaagtccgcccacacgctggtgggtccaactccttctcgtaccgagactctggtagaagaaacagccgctgagtcatctgaggacgatgttgtcgccccttctcagagcctcctgtccggctacatgactcctgggctgactcccgcaaacagccaggcgtctaaggcgacgcccaagcttgactcctccccttccgtcagcagtaccctggctgcaaaggacgatccggacgggaagcaggaagccaaacctcaacaggccgctggaatgttgtcaccgaaaacgggaggcaaggaggcagcctcaggaacgacgccccagaaaagtaggaaaccaaagaaaggcgctggcaatcctcaagctagcaccctcgctctccaaagtaatatcacacagtgtcttctgggtcaaccttggcccttgaatgaggctcaggtccaggcctctgtagttaaagtcctaacagagctgttagaacaggagcggaaaaaggtggtagacaccactaaggaatcctcgcggaaaggctgggagtccaggaagcgaaagctgtcgggggatcagcccgctgccaggaccccgcgatcaaaaaaaaaaaagaagctgggtgccggagagggcggagaggcgtccgtctcacccgaaaagacgtccaccacttcaaaaggcaaagccaaacgggacaaagcgagcggcgatgttaaagagaagaaaggtaaggggtctctgggtagccagggcgctaaagacgagccagaagaggagctgcagaaggggatgggaactgtggagggcggagaccagtccaatccaaagtctaaaaaggaaaagaaaaaatccgataaacggaagaaagacaaggaaaagaaggaaaagaaaaagaaggctaaaaaggcatctacaaaggatagcgagtccccctcgcagaaaaaaaaaaaaaagaaaaaaaagaccgccgaacagaccgtgtag

SEQ ID NO: 244912 - DNA, 4578 bp, synthetic construct
  misc_feature 1..4578: note = Description of Artificial Sequence: Synthetic coding sequence
  source 1..4578: mol_type = other DNA
atggcagaagctagaaagcgcagggagctgttgccgctgatctaccaccacctgctgcgtgcagggtacgttagagctgccagagaagtcaaggaacagagcggacaaaaatgtttcctggctcaacccgtgacccttctggatatatacacccattggcagcagacaagcgagcttggacgcaagcgaaaggccgaggaggacgctgccctgcaggctaaaaagaccagagtgagtgacccaatctcaactagcgaaagtagtgaagaggaagaggaggcagaagctgaaaccgcgaaagcaactccacgactagcgagcacaaactcgtccgtgctaggcgcagacctgccttcttcaatgaaggagaaagctaaagcagagacggaaaaggccggtaaaaccggaaactctatgccccaccccgcaaccggcaaaaccgtggccaacttactgagcgggaagagcccaaggaaaagcgccgagcccagcgcaaacacaaccctcgttagtgagaccgaggaagagggatctgtgcctgcctttggcgcagccgctaaacccggaatggtgtcagcgggacaggccgactcgtctagcgaagataccagcagctcttctgatgagaccgacgtggagggtaagccctctgtgaaacctgcacaggtgaaagcctcctccgtctctaccaaggagagcccagccagaaaagcagctcccgcaccaggaaaagtcggcgatgtcacaccccaggtgaagggtggtgctcttccccctgcaaaaagggcgaaaaagcctgaagaggagagtgagtcgtctgaggagggatcagagagtgaagaagaggcgccagcgggtacacgaagccaggttaaagcatcggaaaaaatcctgcaggtgcgcgctgcctccgcccctgcaaaggggacccccggaaaaggggctacgcccgctccccctggcaaggccggagcagtggcatctcagaccaaggctggaaagccagaagaagactctgagtcaagcagtgaggagtcctcagactctgaggaagagacccctgccgctaaggcgctgcttcaagctaaagcttcaggaaagacttcccaggtgggggctgcttccgcccctgccaaagagagtccacgaaagggcgctgcacctgcacctccaggtaagacaggacctgccgtggcaaaggctcaggccggaaaacgtgaagaggactctcagtcgtcaagtgaagaaagtgatagtgaagaagaggcacctgcccaggcgaagcccagtggcaaggctccacaagtccgcgcagcctccgccccagccaaggagagtccacgcaaaggtgctgctccagcaccgccacggaaaacgggacccgcagcagctcaggtgcaggtgggaaagcaggaagaagactcaaggtccagttctgaagagagcgactcagatcgcgaagcgctcgcagccatgaatgctgctcaggtgaagcctctcggaaaatctccccaagtcaagcctgcctccactatgggcatgggaccattggggaagggggcaggtccagtccctccgggaaaagtcgggccagccacccccagcgcccaggtaggcaagtgggaggaagatagtgagtcgtcctcagaggagtcttccgacagtagcgacggggaagtgcctactgccgttgcacccgctcaggagaagagtttgggcaatatcctgcaagccaaacccacgagtagccccgctaaaggccctcctcagaaggcaggtcccgtggcagtccaggtgaaagctgagaaacccatggataattctgagtcttctgaagagtcatcagatagtgctgattccgaagaagcaccagccgcaatgactgcagcgcaggctaagccggctctgaaaatacctcagacaaaggcctgccctaagaaaactaatactacagcatccgcgaaagtcgcgccagtgcgtgtcggaacccaggccccacggaaggccggtacagcaacctcccccgcaggctcatcacctgctgtagctggtggaacacaacgacctgcggaggattccagcagtagcgaagaatccgattctgaggaggaaaaaacggggctggccgttaccgtggggcaagcgaagtccgtgggcaaggggctgcaggtgaaagccgctagcgtccccgtgaagggaagtctggggcagggcaccgcccctgtcctgccaggaaagacaggacctaccgtcacacaagtaaaagcggagaaacaggaagacagcgaatcaagtgaagaagagagcgactccgaagaagccgctgcgagtcccgcacaggtcaagacgagcgttaagaagacgcaagccaaggcaaaccccgcagcagcgagagctccgagcgcaaaaggcactatatccgcgccaggaaaggtggtcaccgctgctgcgcaggcaaaacagagatcccctagtaaagtcaaacctccagtgcgaaatccacaaaacagtaccgtgctggcgaggggtccagcaagcgtgccaagcgtgggaaaggctgtggccaccgctgctcaagctcagaccggcccagaggaggattcaggctcctccgaggaagagtctgattctgaggaagaagccgaaacattagcacaggtgaagccctcaggcaaaacacaccagatccgtgcagccctcgcgcctgctaaagaatcaccccgtaaaggcgctgcccctactccccctggaaagacaggcccttcagcagcacaggcaggtaagcaggatgattcgggaagttcttccgaggagagtgattcagacggtgaggcccctgcagccgttacaagcgcacaaaaagatagcaacagcaagccggctagatcaaaaacactagcaccagcccctccggaacggaatactgaggggtccagtgaaagctccgaggaggaactcccactaacacaggtcatcaaacctccgctcattttcgtggaccctaatagatctcccgctggacccgcagccaccccagcccaggcccaggcggcatccactccacgtaaggcgcgtgccagcgagagtactgctagatcctcaagcagcgagtcggaggatgaggacgtcatcccagctacacaatgccttaccccagggatccgtaccaatgtcgtgaccatgcccacagcccatccgaggatcgcccctaaagcaagcatggctggagcaagtagcagcaaggagtccagtagaatctctgacggtaaaaagcaagaagggccagctacccaagtttctaaaaaaaatcctgcttctttacctttaactcaggctgctctgaaagttctggcgcagaaggcttccgaggcccaacccccagtggcccgaacacagccctcaagtggggtggattctgcagtgggaaccctgccggcaacctccccccagagcacttcagtccaggcaaagggtacaaacaagttaaggaaaccaaaattgccagaggtgcagcaggccactaaggcacccgagagttcagacgacagcgaagactctagcgactcatcatcaggaagcgaggaagacggggaaggtcctcaaggagcaaagagcgcacatacactggggcctactccttctcgcactgaaaccctagttgaagagacagctgctgagagctcagaggatgacgtggttgccccttctcagagcctcctgagcggatacatgaccccagggctcacgcccgctaactcccaggcttctaaagccacgccaaaactcgacagcagcccgtcagtgtccagcacactggctgccaaggacgatccggacggaaagcaggaggcaaagcctcaacaggccgctggtatgctgtcccccaaaaccggtgggaaagaggctgcttccgggacgaccccacagaaaagccgtaaacctaaaaagggagccggaaatcctcaggcttctactttggcccttcagtctaacataacacaatgtcttctggggcagccctggccattgaatgaggctcaggtccaggcttccgtggtcaaggtcctgacagaactgctggagcaggagagaaaaaaggtagtggacacaacaaaagagagctcgcgcaagggttgggagagtaggaaaagaaaactttccggtgaccagccagcagccaggacaccaaggtctaagaaaaaaaagaagttgggtgctggcgaggggggagaagcttccgtctcaccggagaagactagcaccacttccaaaggcaaggccaagagagacaaagcctccggcgatgttaaagagaagaagggaaaaggcagtttgggcagccaaggcgcaaaggacgagcccgaggaggagctgcagaaaggcatgggtactgtggaaggcggagaccagagtaatccgaagtctaagaaggagaagaaaaagagcgacaagcgaaaaaaagataaagagaaaaaggaaaagaaaaaaaaggccaagaaagccagtaccaaggattctgagtcaccctcacagaaaaagaagaagaagaagaaaaagactgctgaacagaccgtgtag

SEQ ID NO: 244913 - DNA, 4467 bp, synthetic construct
  misc_feature 1..4467: note = Description of Artificial Sequence: Synthetic coding sequence
  source 1..4467: mol_type = other DNA
atggctgaggccaggaaacgcagggagctgttacccctcatctatcaccaccttctgcgcgcaggctatgtgcgcgctgccagagaggtcaaggaacagagcggccaaaaatgcttcctggcccagcccgtgaccctgcttgacatctacacacactggcagcagacatctgaactgggcagaaaaagaaaagccgaagaagatgcggctctgcaggcgaagaaaactagggtgtccgacccaatttcaacctccgagtcctcagaggaagaagaggaagcggaggccgaaacagccaaagctacccccaggctggcgagtacaaattcaagtgtcctgggcgcagacctgccatccagtatgaaggagaaagcaaaggctgaaacagaaaaggcaggaaagacaggcaacagtatgcctcatccagccacaggcaagacagtggcgaacctcctgtcaggaaaatcaccgagaaagtccgccgaaccgagcgccaacacaactttagtctccgagacagaggaggaaggatcagtaccagctttcggagccgcagctaagccaggcatggtttcagctggacaagctgacagttcttccgaagatactagttcatcaagtgatgagaccgacgtcgagggaaaaccctccgtgaaacctgctcaagtcaaggcatcgagcgtgtctactaaagaatcccctgctagaaaggccgcacctgcacctggaaaggtgggagacgtcactccccaggtcaaaggaggggctctgccccctgccaaacgcgcaaaaaagcccgaagaggagagcgagtccagcgaggaaggatctgagtcagaggaggaagcccctgccggaacacgctcacaagtgaaggcctccgagaagattttacaagtcagagccgcatccgcgccagccaagggcactccagggaagggggcaacacctgccccacccggtaaagcgggtgcggtggcgtcccagactaaggctggcaagcctgaggaagacagcgagtccagtagtgaggaatctagtgactccgaagaggaaactcctgcggctaaagccctgctccaagcaaaagcaagtggtaagaccagccaggtgggagctgcttccgcaccagcgaaagagtcccccagaaaaggggctgcacctgcacctccgggaaagaccggacccgcagttgccaaggcccaggcaggaaaacgggaagaggactcacaaagctcatccgaagaatcggacagcgaagaggaagcgccagcacaggccaagccctccggaaaagccccacaagtgcgtgccgcaagtgcccctgccaaggaatctcccagaaagggagctgcccctgcgcctcctcgtaagacaggccctgctgccgcacaggtgcaggtaggtaagcaagaggaggactcccggtcttcatctgaagagagcgactcagacagagaagcactggccgctatgaatgctgcccaggtaaaaccgctagggaagtcgccgcaggtgaaaccagctagtaccatgggcatgggtcccttgggaaagggggctggcccagtgccaccagggaaagtgggcccagcaactccgagcgcacaggttggcaagtgggaggaagactccgagtcttcctccgaggaaagctctgacagctcagatggggaggtgccaacagcagtggcacccgcacaggagaaatcgctggggaatattctgcaagcaaaaccaacaagctctcctgccaagggaccaccccaaaaagccggacctgtagcagtgcaggttaaagccgagaaacctatggataattccgagtccagtgaagaatcttcggacagcgccgactccgaagaagcacccgcagctatgaccgctgcacaggcaaaaccagccctcaagatcccacagacgaaggcatgcccaaaaaaaactaatactacagcctctgccaaagtggccccagtccgggtgggaactcaggcgccaagaaaagctggcacggcgacctctcctgcgggatctagccctgctgtggccggtggcactcagaggccagctgaagactcctcctcgtctgaagaaagcgacagcgaggaggaaaaaaccggcctcgccgtcacagtggggcaagctaagtccgtcggcaagggcctgcaagtgaaggcggcatccgtgcccgtgaaaggcagcctcggacagggcactgcacctgtcctccccggaaagaccggccctacagtgacccaggtaaaggccgagaagcaagaggactcagagtcatcagaggaggaaagtgacagcgaggaggcagcggcttcgccggctcaggtgaaaacaagcgttaaaaagacccaagctaaagctaatcctgcagccgcaagagcgccaagcgcaaagggcactatatcggctccaggcaaggtggtgacagctgctgctcaggcaaaacaacggagcccgtccaaagtgaaacctcccgtgaggaatccacagaacagcactgtattagccagggggccagcttcggtcccatccgtcggcaaggctgttgccactgccgctcaggcacaaacaggacccgaggaggactctggcagctccgaagaggagagcgattccgaggaggaggccgagacactggcgcaggtgaaaccaagcggaaagactcatcagattcgagctgctttagccccagccaaggaaagcccaagaaagggcgcagcccctacgccgcctggtaagactgggccttcagccgcacaggccggaaaacaagatgattccggatcatcctctgaggagagcgatagtgacggcgaagctcctgccgcagttacatccgcccaggtcattaagcctccgctgatctttgtggaccctaatagatctcccgcaggcccagcagcaactccagcgcaggctcaggccgcatcgaccccgaggaaagctcgggcatccgaaagtaccgccaggtcgagctctagcgaatctgaagatgaggacgtgattcctgcaactcaatgcctgacccccggaattcggactaatgtggtgactatgcccaccgcacaccctcgcatcgccccaaaggcttctatggctggcgcttcaagctcaaaagagtccagtcggatcagtgatggcaagaaacaggagggaccagccacacaggtgagtaagaaaaatccagcttctctgcccctgacccaggccgctcttaaagtgctggctcagaaggctagcgaggcccagccgcctgtcgctcgcacacaaccatcatccggcgtcgactccgccgtgggaaccctgcccgctacctcacctcagtccaccagcgttcaggctaagggcactaacaagttgcgcaaaccgaaattgccggaagtacagcaggcgaccaaagctccagaatcctcagacgacagcgaagacagtagcgatagctcgagcggtagcgaggaggacggagaggggcctcagggggctaaaagtgcacacaccttaggaccaacaccttctcgtacagagactctggtggaagagactgcagcagagtcttcagaagacgatgtcgtggctccctcccagtcactacttagtggctatatgacgcccggactcacccctgctaatagtcaagcttccaaagccacgcccaagctggactcgtctccctcagtttccagcactctcgctgctaaagacgatccagacgggaagcaagaagccaagccccagcaggctgcgggaatgttgagtccaaagaccggcggaaaagaagcggcttccggcacgacacctcaaaagtctaggaagccaaagaaaggagctggaaatcctcaggcctctactttggcccttcagtctaacatcacccaatgtcttcttggccaaccctggcctcttaatgaggcacaggttcaggcatcggtggtaaaggtgttgaccgaacttcttgaacaggaacgcaagaaagtggtggacactacgaaggagagttctcgcaaggggtgggagagtaggaaacggaaactctctggtgatcagcccgctgcacgcacacctcggagcaaaaaaaagaagaaattgggtgccggagagggcggagaggcatcagtctcaccagagaaaaccagcacgacaagtaaagggaaggctaagagggataaagcatctggtgatgtcaaagaaaagaagggcaaaggatcccttggatctcagggggctaaagatgaacccgaggaagaactgcagaaaggcatgggtaccgttgagggaggcgaccagtccaacccaaagagcaagaaggaaaagaagaagagcgacaaaagaaaaaaggataaagagaagaaggagaagaaaaagaaggctaagaaagcctccactaaagatagtgaatctccttctcagaaaaaaaagaagaagaagaagaaaaccgcggagcagacagtctag

SEQ ID NO: 244914 - DNA, 255 bp, synthetic construct
  misc_feature 1..255: note = Description of Artificial Sequence: Synthetic coding sequence
  source 1..255: mol_type = other DNA
atggctaccatggagaataaggttatctgcgctctcgttctggtgagtatgcttgcgctgggaactctggctgaggctcagacagagacctgcactgttgcgcctcgggaacgccaaaactgtggtttccccggtgtgaccccctcccagtgtgcaaataaaggttgttgttttgacgacacagtacgcggagtgccttggtgcttctatccgaatactattgatgtgccgccagaagaggagtgcgagttttag

SEQ ID NO: 244915 - DNA, 390 bp, synthetic construct
  misc_feature 1..390: note = Description of Artificial Sequence: Synthetic coding sequence
  source 1..390: mol_type = other DNA
atggggaggcgggacgctcagctgttggctgctcttcttgtgttaggcctttgcgctctcgcaggctcagagaaaccatcgccctgtcagtgctcccggttgagcccgcataacaggaccaattgcggttttccaggtatcacaagtgatcagtgctttgacaacgggtgttgcttcgacagttccgttactggtgtcccatggtgttttcaccctctgccaaaacaggagtcggatcagtgtgtgatggaggtaagtgatcgacgcaactgcggttatccaggaatcagcccagaagagtgcgcgtcacgaaagtgctgtttttctaatttcatcttcgaagtgccctggtgttttttccccaaatctgtggaggactgccactattag

SEQ ID NO: 244916 - DNA, 1749 bp, synthetic construct
  misc_feature 1..1749: note = Description of Artificial Sequence: Synthetic coding sequence
  source 1..1749: mol_type = other DNA
atgccagggagaacttgggagttgtgtctgctgttgctgttgggcctgggcttgggaagccaagaggcgctcccacccccttgcgagagcgagatctactgccacggggagctcctaaaccaagtacagatggccaaactctaccaggacgataaacagtttgttgatatgcccctgagcattgcccctgaacaggttctgcagacgtttaccgaactgtcgcgagaccacaatcactccattccacgcgaacagctccaggcctttgtgcacgagcatttccaggcgaaagggcaagaattgcagccgtggaccccagccgattggaaggattccccccaattcctgcaaaagattagtgatgcaaagctcagggcgtgggccggtcaattgcaccaactgtggaaaaaactcggaaaaaagatgaaacctgaagtcctgtcgcacccagagaggttcagcctgatttactcagagcatcctttcattgttccgggagggagattcgtggaattttactactgggacagctattgggtaatggaaggactgttactgagtgagatggcggagacagtcaaagggatgctgcagaactttcttgatctcgtcaaaacttacggccacgttccgaatggaggacgcgtgtactacttacagcgcagccagccaccactcctgacattaatgatggattgctacctgacacatactaacgataccgcctttctgcaggagaacattgaaaccctcgcgctcgaactggacttttggacaaaaaatcgaactgttagcgtcagtctggaagggaaaaattacttgttaaatcgctactacgtgccatatggagggcctagaccagagagctactctaaagatgttgagctggcagatacactcccggagggcgatagggaggccctgtgggcggagctcaaggcaggcgctgaatctggctgggatttttcaagcaggtggctgattggcggaccgaatcccaattccctgtccggcatccgaactagcaagcttgtgccagtagacctgaatgcgtttctgtgccaagccgaggagttaatgagtaatttctattcacggctcggaaacgactcacaggccaccaagtacagaatcctacgcagccaaagactcgctgccctgaataccgtactgtgggatgaacagactggagcctggtttgactacgacctggaaaaaaaaaaaaagaaccgcgaattctatcccagcaatctgacgccgctgtgggccggatgcttttccgacccaggggtcgccgacaaggctctgaagtacctggaggataatagaattctcacttaccagtacggcattcccaccagtctgcaaaaaactgggcagcagtgggatttcccaaatgcctgggctccccttcaggatctggtgatccggggtttggccaaagccccactccgccgagcgcaagaagtagcattccagctcgcacagaattggatcaggacaaactttgacgtatattcccagaaatctgcaatgtacgaaaaatatgatgtgtctaatggcggacagccaggagggggtggggagtatgaagtgcaggagggatttggctggacgaatggagtggtgctcatgctacttgatcggtacggcgaccggctgacctccgggccaaagctgccctttctggagccacactgcttggccacattactgccatccttgctgcttagcctcctcccttggtag

SEQ ID NO: 244917 - DNA, 1656 bp, synthetic construct
  misc_feature 1..1656: note = Description of Artificial Sequence: Synthetic coding sequence
  source 1..1656: mol_type = other DNA
atgcccggaaggacatgggagttgtgcctacttttgctgctggggctgggactagggtcccaggaagccttgccccctccatgcgagtccgagatctactgtcatggtgagctgctgaaccaagtccaaatggccaaattgtaccaggacgacaaacaattcgtggacatgcccctgagcattgcccctgaacaggttttgcaaactttcactgagctgtcaagagaccacaatcacagtattccgagggagcagttacaggccttcgtgcacgagcacttccaggccaaagggcaggagctgcagccttggacccctgctgattggaaggattctccgcaattcctccagaagatctctgatgctaagctacgcgcatgggccggacaactccaccagctctggaaaaagctgggcaagaagatgaaacccgaggtgctgtctcatcctgaaaggttctcccttatttactccgagcaccccttcattgtgcccggaggcagattcgtggaattctactactgttatggccacgtgccaaacggaggaagggtctattacctgcagagatcacagccacctcttctgacccttatgatggactgttacttgactcacaccaacgacactgctttcctccaggaaaatatcgagacattggcacttgagctggatttctggaccaagaatcgcacggtatctgtgagtctcgaggggaagaactatctgttgaatcgctattatgtgccatacggcggtcctcgacctgagtcctattcaaaagatgtagagctagcagacaccctgccagagggagatcgggaagcactgtgggccgagctcaaagccggagccgagtccgggtgggatttctcatctcgatggcttatcggtggcccaaatccgaatagtcttagcggaataagaacctccaagctggtgccagtggacttgaatgctttcctttgtcaggccgaggaactgatgtccaacttttattctcgcctgggaaacgatagtcaggctaccaaataccgaatacttcggtcccaaaggctagccgcactgaacactgtcttgtgggacgagcaaactggcgcatggttcgattacgacttggagaaaaagaaaaagaaccgggaattttatcctagcaatctgactccgctttgggctggctgttttagtgatccgggtgttgctgataaagctctaaaatacctcgaagacaacaggattctgacttatcaatatggcatcccgacatcactccagaagaccgggcagcaatgggacttcccgaacgcctgggcccctcttcaggacttggtcatcagaggtttggcgaaagcgcctctccggcgtgcgcaggaagtggctttccaactcgctcaaaattggattagaacaaattttgacgtttattcccagaagtctgctatgtatgagaagtacgatgtgtctaacggcggacagccaggcggtggcggtgagtacgaggtccaagaagggtttggctggactaacggcgtggtcctgatgctcctcgaccgttacggtgaccgtctcacttctggccctaaattaccattcttggagccccactgcttggctacactgctgccgtcactccttctgtccctcctcccatggtag

SEQ ID NO: 244918 - DNA, 1380 bp, synthetic construct
  misc_feature 1..1380: note = Description of Artificial Sequence: Synthetic coding sequence
  source 1..1380: mol_type = other DNA
atgccaaattgtgtgccagggcaaggttcttgcatctcgtctggacggtcctggggccgacgctaccagagaccaggacccgcacagggcctgactaaaggtaccgaagagcgcaatgtgccaggagcccactccgtgtttggagcccagatacgcgacagctattgggtgatggagggcttacttctctcagaaatggcagagacggtgaaggggatgctgcagaactttcttgatctcgttaaaacttatggccatgtccccaacggtggaagagtttactacctgcagcggtcccagccccctctactgaccttgatgatggactgctaccttacgcataccaacgacacagctttcctccaggaaaacatagaaaccctggctctagaactcgatttttggacaaagaatagaaccgtctctgtctcattagaggggaaaaattacctcttaaaccgatactacgtgccctacggcggaccccgacctgagtcctattcaaaagatgtcgagctcgccgacacgctccccgagggggatagagaagccttatgggccgaactgaaagccggtgccgaatctggttgggacttttccagccgatggctgatcggtggtcctaatcccaacagcctatccggcatacggacctctaaactcgttcccgtggatttgaatgccttcctatgtcaggcagaagagttgatgtctaacttctacagccggctgggcaatgattcacaggcaacaaagtacagaatactaagaagtcagagattggcagcccttaacaccgtgctttgggacgaacagacaggcgcatggttcgattatgatctggagaagaagaagaaaaatcgggagttttacccctcaaatctcacacccctctgggcgggatgttttagcgatccgggagtcgccgacaaggcactgaagtacctggaggataaccgcattttgacctaccaatacggaattccgactagccttcagaaaaccggacagcagtgggattttccaaatgcatgggcccctcttcaggatctggtgatccgaggacttgccaaagcccctcttagacgagcacaggaggtggcatttcagctggcccaaaactggatccgcaccaattttgatgtttacagccagaagtccgccatgtatgagaagtatgacgtttcgaacggcggtcagcctggagggggaggcgagtacgaagtgcaggagggctttggctggactaatggagtagtgctcatgcttttggatagatatggcgatcggctgacgagtggtcccaagcttccatttctggaaccccattgccttgcaacgttgctgcctagtctgctcctcagtctactgccctggtag

SEQ ID NO: 244919 - DNA, 1641 bp, synthetic construct
  misc_feature 1..1641: note = Description of Artificial Sequence: Synthetic coding sequence
  source 1..1641: mol_type = other DNA
atgccgggtcggacctgggaactatgcctgctgcttctgctggggttgggcctgggatctcaggaggcattgcctcctccttgcgagtctgagatttattgccatggagagctgttgaaccaggtacagatggcaaaactatatcaggacgataaacaatttgtcgacatgcccctttcaattgcccctgaacaagtgttgcaaacgtttaccgagctatctcgcgaccataaccactctattccaagagaacagctgcaggcatttgtgcatgagcacttccaagccaagggacaggagctgcagccatggacacccgctgattggaaagactccccccagtttctccagaagatctctgatgccaagctacgggcatgggctggccagctccaccaattatggaagaaacttggtaaaaaaatgaaacccgaagtgctctcccatccagaacggtttagcctaatttattctgaacatccttttatagttcccggtgggcgtttcgtcgaattttactattgctacggacacgtaccaaatgggggtcgcgtttactacctgcagaggtctcagccgccactgctgacactgatgatggactgctacctcacccatacaaacgataccgcatttcttcaggaaaacatcgaaaccctggctttggagctagacttctggacaaagaaccgtaccgtgtccgtctccctagaggggaaaaactacttgctgaatcgatattacgtcccatacggaggacctagaccggagtcgtacagcaaagacgtagaactggccgatactttacctgaaggagatagggaagcgctttgggccgaactgaaggccggagctgaaagtgggtgggacttttcttctaggtggctgatcggcggacctaaccctaacagcctctctggcatacggacgtcaaaattggtgcccgtggatctcaatgcgttcctgtgccaggcagaagaactcatgtctaatttttactcccgcctggggaacgattcccaggccacgaaatatcgcattctgagatctcagagactcgctgcccttaacacagtgctctgggatgagcagaccggtgcctggttcgactatgacctggagaagaaaaaaaagaaccgcgagttttacccaagcaaccttacccccctctgggccggttgttttagtgatccgggtgtcgccgataaagccttgaagtacctcgaggacaacaggattcttacttaccaatatggcatacccactagcctgcagaagaccggccagcagtgggattttcccaacgcatgggctcccctgcaggatttggtcatcagaggactggcaaaggcgccactcagacgagctcaggaagttgctttccagctcgcccaaaattggattaggacaaattttgatgtttatagtcagaagtccgccatgtacgagaagtacgatgtgagcaatggaggccagccgggaggaggtggggagtatgaagtgcaagaggggttcggatggactaacggtgtcgtactaatgctgctcgatcggtacggcgatcgacttactagcggcccaaagctcccctttctagaacctcattgtcttggcccacccttctgcccggcttcttgttag

SEQ ID NO: 244920 - DNA, 1734 bp, synthetic construct
  misc_feature 1..1734: note = Description of Artificial Sequence: Synthetic coding sequence
  source 1..1734: mol_type = other DNA
atgcctgggcgtacttgggagttgtgtctcctgctacttttggggctcggtctcggtagtcaggaggctctgcccccaccgtgcgagtctgagatttattgccacggggaacttctcaaccaggtacaaatggccaagctctatcaggatgacaagcagtttgtggatatgccactttcaatagctcccgagcaggtccttcagacattcaccgaacttagccgcgaccacaatcacagtatcccgcgtgaacaattgcaggctttcgtgcatgagcactttcaagcaaagggccaggagctccagccttggacaccagctgattggaaagacagcccccagttcctgcagaagatctcagacgcgaagcttagagcttgggccggacaactgcatcagctttggaagaaattagggaagaaaatgaagcccgaggtcctatcccacccagaacgtttttcactcatatactccgagcatccttttatcgtgcctgggggtcgcttcgtggaattctattactgggattcatattgggtgatggaaggattattgctgagcgaaatggctgagacagtgaaaggcatgctccagaacttcctggatcttgtaaagacctacggccacgtgcccaatgggggaagggtttattacctgcagagatcacaacctcccctcctgacactgatgatggactgctatctgacacacactaacgataccgcctttttacaggagaacatcgagaccttggccctcgagctggacttttggacaaagaacagaactgtatcggtgagcttggaaggtaaaaattatctcctgaataggtactacgtaccatatggcggtccaagacccgagagctattccaaagatgtcgaactggcagacacccttccagagggagacagagaggccctatgggccgagttgaaggcaggagcggagtcaggatgggatttcagctcccgttggctcataggtggacctaatcccaatagcctttcaggaatcagaacatctaagctggttcccgtggacctcaacgcattcctgtgtcaggctgaggaacttatgagcaacttctactctcgactagggaacgattctcaagcaactaaatatcggattctacgcagccagagactggcggcactcaatacagttctgtgggacgagcagaccggcgcatggtttgattacgacctagaaaagaagaagaagaacagggagttctatcccagtaacttgacccccctgtgggccggatgtttctccgatcccggagttgctgataaagctctcaagtacctggaagataataggattctcacttaccagtacggaatccccacctcccttcagaaaactggtcagcaatgggactttcccaacgcatgggctcccttacaagatctggtgattaggggtctggccaaggcccctctgagacgggctcaggaggtggcttttcagcttgctcagaattggattcgaaccaacttcgatgtgtatagtcaaaagtcggctatgtacgagaagtatgatgtgtctaacggcggacaaccaggaggcggaggagagtatgaggtccaagaaggcttcggttggacaaatggcgtggtgctgatgctactagaccggtacggggatcggctgacttctggacctaagctgcctttcctggagcctcactgcctcggtcccccattttgtcccgcatcttgctag

SEQ ID NO: 244921 - DNA, 273 bp, synthetic construct
  misc_feature 1..273: note = Description of Artificial Sequence: Synthetic coding sequence
  source 1..273: mol_type = other DNA
atggaagagaccactgactggatttatggtttcttttcccttctctcagatattatcagctcggaagacgaagaagatgatgatggagacgaggatacagataagggggagatcgatgaaccacccttgcgaaagaaggagatccataaagacaagacggagaagcaagagaagcccgagcggaagatccaaaccaaagattggtcggctaactcctctactatccgaacactcaagttgacccagctgaagcccatatacatttgtacttag

SEQ ID NO: 244922 - DNA, 654 bp, synthetic construct
  misc_feature 1..654: note = Description of Artificial Sequence: Synthetic coding sequence
  source 1..654: mol_type = other DNA
atggaagaaacaactgattggatctatggattcttctcgctgctcagcgacataatttcctccgaagatgaagaggacgatgacggggatgaagatactgataaaggcgaaatagacgagccgcctctccgtaaaaaagaaatccataaggacaagacagagaagcaggagaagcccgagcggaagattcagacgaaggtcacacacaaggaaaaggaaaaaggtaaagagaaggtccgcgagaaagaaaagcctgaaaaaaaagctacgcacaaggagaaaattgaaaagaaagagaagcctgagacgaagaccctcgccaaggagcagaagaaggccaagacagccgaaaaaagtgaggagaagacaaagaaggaggtcaaggggggaaaacaggagaaggttaaacaaaccgcagcgaaggtgaaggaagttcagaaaacacccagcaaaccgaaagagaaggaggataaggaaaaggccgctgtgagtaaacacgagcaaaaaggattcccaggaccaggaatcaggaatagcagctattactgtcagtatattaaaggccagatcaatgcctggaacgacctgcgtacttcactgctgccaataccatacctgagctgcgggaagatgtgctccaatttcaacaactag

SEQ ID NO: 244923 - DNA, 2166 bp, synthetic construct
  misc_feature 1..2166: note = Description of Artificial Sequence: Synthetic coding sequence
  source 1..2166: mol_type = other DNA
atgaccgagattactgccgagggaaatgcatctacaacaacaacagtgatcgatagcaaaaatggctctgtcccgaagtcgccgggtaaggtcctcaaacgcaccgtgaccgaagacattgttaccaccttctcttcaccagccgcatggcttctggtgatcgcactgatcataacctggagcgcggtggcgattgtgatgttcgatctggtagactacaaaaactttagtgctagttcaattgcaaagattggctcagaccctctgaagttggtgcgcgacgccatggaggagaccacagactggatttacggcttcttcagcctgctgagcgacattatctcttccgaggacgaagaggacgatgacggtgatgaagacacagacaaaggagaaatcgatgaaccacctctgaggaagaaggagatccataaagacaagaccgagaaacaggagaaacctgaaaggaagattcagacaaaggtgacacacaaagaaaaggaaaagggcaaggagaaagtaagagagaaagagaaacccgagaaaaaggccacccacaaggagaagatcgagaagaaagagaaacctgagaccaagaccctggcaaaggagcaaaagaaggccaaaaccgctgagaaaagcgaggagaaaaccaaaaaagaggtgaaggggggaaagcaagagaaagtgaaacagactgctgctaaggtgaaggaggttcagaaaactccttccaagcctaaagaaaaggaagacaaggaaaaagctgccgtttccaagcatgagcagaaagatcaatatgcattttgtagatacatgattgatatctttgtgcacggcgatctaaagccaggacagagccccgcaatccctccacctctgcccacggagcaggccagccgacccactcctgctagcccagcccttgaagagaaggaaggagagaaaaagaaggctgagaagaaagtaacctcagagacaaaaaagaaagaaaaggaggacataaagaagaagagtgaaaaagagaccgcaattgatgtggagaagaaagagccaggcaaggcatcagaaaccaagcaggggaccgtgaagattgctgcacaagctgcagcaaagaaggatgagaaaaaggaagactccaaaaaaaccaaaaagccagccgaagtggaacagcccaaagggaaaaagcaagaaaagaaggaaaagcacgtggaacccgctaagtcacctaagaaagaacactctgtgccctcagataagcaagtcaaagcgaagaccgagcgcgcaaaagaagagatcggcgctgtgagcatcaagaaggctgtaccagggaaaaaggaagagaaaactactaagacggtagaacaagagattaggaaagagaaaagcggcaagacgtctagtatactgaaggacaaagaacccattaaggggaaggaagaaaaagtccccgcatcactcaaggaaaaggagcccgaaaccaagaaggatgaaaaaatgagcaaggcagggaaggaggtgaagcccaagccccctcagttacagggtaagaaggaggagaagccggaacctcagataaaaaaggaggccaagcccgcaatcagcgaaaaggtgcagatccataagcaagatatcgtgaagcctgaaaagaccgttagccacggaaagcctgaggaaaaggttcttaaacaggtgaaggctgttacaatcgagaagaccgctaagccgaagccaactaaaaaggcagagcaccgcgagcgagagccaccgagcattaagacagataaacctaaacctacacccaagggcacttccgaggtgactgaaagcggcaagaagaagaccgaaatatccgagaaagagagcaaggaaaaggctgatatgaaacatttgagggaagagaaggtgtccacacgtaaggagtcccttcagcttcacaacgtgactaaggaggacgtagaagatgttcccgctagcaagaaggctaaggaaggtacagaggacgtgtcccccactaagcagaagtcacctatttcatttttccagtgcgtctacctcgatggctacaacggatacggatttcaattcccctttaccccagccgaccgaccgggtgaatccagcggccaggcaaactccccagggcagaaacagcagggccaatag

SEQ ID NO: 244924 - DNA, 81 bp, synthetic construct
  misc_feature 1..81: note = Description of Artificial Sequence: Synthetic coding sequence
  source 1..81: mol_type = other DNA
tgaatccataaagataaaaccgagaaacaagagaagccagagcgcaaaattcagactaaggaagtgggtcactcctcctag

SEQ ID NO: 244925 - DNA, 456 bp, synthetic construct
  misc_feature 1..456: note = Description of Artificial Sequence: Synthetic coding sequence
  source 1..456: mol_type = other DNA
tgaacacataaggaaaaagagaaagggaaggagaaagtaagggaaaaggagaaacctgaaaaaaaagcgacgcacaaggagaagattgagaaaaaagagaagcccgaaactaaaacactggctaaagagcaaaagaaggctaagacggctgaaaagtctgaagaaaagaccaagaaagaggtaaaaggcggtaagcaagaaaaggtgaagcagaccgcagcaaaggtgaaggaggtacagaaaaccccatctaaacccaaggagaaagaagacaaggaaaaggcagctgtgagcaagcatgagcagaaaggctttccaggtccagggattcggaatagttcctactactgtcaatatatcaagggccagatcaacgcctggaacgacctgcggacatccctgttgcctattccttacctatcctgtggcaagatgtgctctaacttcaacaactag

SEQ ID NO: 244926 - DNA, 2196 bp, synthetic construct
  misc_feature 1..2196: note = Description of Artificial Sequence: Synthetic coding sequence
  source 1..2196: mol_type = other DNA
atcgtcgagatctatcctcagggcaacgcttctacaaccaccactgttatcgacagcaagaatggttccgtccctaaatctcccggaaaggtgttaaagcgtactgtgaccgaggacatcgtcaccaccttttccagcccggctgcctggctgctggtgattgctttaattataacctggtccgctgtggccattgtcatgtttgatctagtcgactacaagaacttctctgcttctagtatcgccaagattgggagcgacccactgaagctcgtccgcgatgctatggaagaaacaaccgactggatttatggatttttttcactgctctctgacattatctcttccgaggacgaggaagacgacgatggggacgaggatacagataagggtgagatcgacgagcctccccttcggaaaaaagagattcataaggataaaacagagaaacaggagaagccagagagaaaaatccagactaaagtcactcacaaagaaaaagagaagggaaaagagaaagtgcgcgaaaaagagaaacctgagaaaaaagccacccacaaagagaagatcgaaaaaaaagagaaacctgagaccaagaccctagcaaaagaacagaagaaggctaaaaccgcggagaagagcgaagagaagaccaagaaggaggttaagggaggcaaacaggagaaggtgaaacagacagccgctaaagtaaaagaggtacagaaaactccttccaaacctaaagagaaagaagataaagaaaaggccgctgtcagtaagcacgagcagaaggatcaatacgcattttgcaggtatatgatcgacatctttgtccacggcgatctcaaaccgggtcaaagcccagccattcctcccccactccccacagagcaggccagcagaccgactccagcaagccccgctctcgaggagaaggaaggggaaaaaaaaaaggccgagaaaaaggtcacttccgagactaagaagaaggagaaggaagacatcaaaaagaaaagcgagaaggaaactgctatcgacgtcgaaaaaaaggtgcaggagcctggtaaagcctccgaaacgaagcagggtacagtaaaaattgcagcacaggcggctgccaaaaaggacgagaagaaagaggactccaagaagaccaagaagccggcagaggttgaacagcctaagggcaaaaagcaggagaaaaaagaaaaacacgtagaacccgctaaatcacctaagaaggaacacagcgttccctccgataagcaggtgaaagcaaagaccgaacgtgcaaaggaagagatcggcgctgttagtatcaaaaaggccgtccctggtaagaaggaggaaaagacaacaaaaaccgtagagcaggagatacgtaaagaaaagagtggaaagacatcaagcatactcaaagacaaggagccaatcaaaggcaaagaggagaaagtgcctgctagcttaaaagagaaagagccggagaccaagaaggacgaaaagatgtctaaagccggaaaagaagtgaagccgaagccaccacagctgcagggcaaaaaggaagagaagcccgagcctcagatcaaaaaggaggccaaaccagccatatctgagaaagtacagatccataaacaggacatcgtgaaacccgagaaaactgttagccacggaaaacctgaggagaaggttctgaagcaggtgaaagcagtaactatagagaaaaccgctaagccaaaaccgaccaagaaagcagagcaccgcgaaagagagccaccaagcatcaaaactgataagccaaagcccacacccaaaggcacaagcgaggttacggagagcggtaagaaaaagactgaaatttccgaaaaggagtctaaggaaaaggcggatatgaagcacctgcgggaagaaaaagtgtccactcgcaaagaatctctgcagctccacaatgtgaccaaggcagaggaagtcgattcgaccttggaggacgtggaggacgtcccggcaagtaaaaaggccaaagaagggaccgaagatgtgtccccaacaaaacagaagagcccaatctctttcttccagtgcgtgtatctggatggatacaatgggtatggcttccagttcccctttacacctgcggacaggcccggtgagagttcaggccaggccaactcaccaggacaaaaacagcaaggacagtag

SEQ ID NO: 244927 - DNA, 2190 bp, synthetic construct
  misc_feature 1..2190: note = Description of Artificial Sequence: Synthetic coding sequence
  source 1..2190: mol_type = other DNA
atgactgagatcactgcagaggggaacgcctctacaacaaccaccgtgatcgattccaagaacggcagcgtgcctaagtctcccggaaaggtcctcaaaagaacagtgacagaggacattgtcaccaccttctcatctccagcagcgtggctgcttgtgatcgccctaataataacatggtctgcagtcgccattgtcatgtttgacctcgtcgattacaaaaatttttcagcaagtagtatagcaaaaatcgggtcagacccgctaaagctcgtgagagatgcaatggaagagaccactgattggatttacggcttcttttcactgctgtccgacatcattagttccgaggatgaggaggacgatgatggggatgaagacaccgacaagggggaaatcgatgaacccccactccgtaagaaggaaatccacaaagacaagaccgagaaacaagagaagcctgagcggaagatccagaccaaggtgacgcacaaggagaaagagaaaggcaaagagaaggttcgggagaaagaaaaaccagagaaaaaagccacgcacaaagagaagatagaaaagaaagagaagccagagaccaagaccttggctaaagagcagaagaaggctaagaccgctgaaaaaagcgaagagaaaaccaaaaaggaggttaagggagggaagcaggagaaggtaaagcagacggctgcgaaggtgaaggaagtgcagaaaactccatctaaacctaaagagaaggaagacaaggagaaagccgctgtttccaaacacgaacagaaagaccagtacgcgttctgcagatacatgatcgatattttcgtccacggcgatttgaaaccaggtcagagcccagccattccacctccactcccgacggagcaggcctcccgcccaacccctgctagccctgccctggaagaaaaggagggagaaaagaaaaaggccgagaagaaggtcacctcagagaccaagaaaaaagaaaaagaggatatcaaaaaaaagtccgaaaaggaaaccgcaatcgatgtcgagaagaaagaacccggaaaggcatctgaaaccaagcagggcacagtcaagattgcggcacaggccgctgccaagaaagacgagaaaaaggaggactccaaaaagactaagaaaccggctgaggttgagcagcctaagggcaaaaaacaggaaaaaaaggagaagcacgtcgaacctgctaagtctccaaagaaagaacacagtgtgccgtctgataaacaggttaaggcaaagaccgagcgggcaaaggaggaaattggagcagtaagtatcaaaaaggccgtccccggaaaaaaagaggaaaaaaccactaagactgtggaacaagagattcgaaaagagaagtctggtaagacctcgtccatcttgaaggacaaagagccaattaaaggcaaggaggagaaggtcccggcaagtctcaaagagaaagaacccgaaactaagaaagacgaaaaaatgtccaaagccggaaaggaggtgaaacccaaacctcctcagctgcagggaaaaaaggaggagaagcccgagcctcagattaagaaggaagctaaaccagccatatccgagaaggttcagatccacaaacaggatattgtgaaacccgagaaaaccgtttcacacggtaaaccggaggagaaagtgctaaagcaggttaaagccgtgacgatcgagaaaaccgctaagcccaaaccaaccaaaaaagccgaacatagagaacgagagccccctagcatcaaaaccgacaaacccaaaccaacgcccaagggcactagcgaagtgacagaatccgggaagaagaaaactgaaatttcggagaaagagagcaaagaaaaagccgacatgaaacacctgcgggaagagaaagtgtcaactcgcaaggaaagcctgcagttgcacaatgttaccaaggctgagaaaccggctcgcgtctcgaaggacgttgaggacgtgcctgctagtaagaaagcaaaggaggggactgaagacgtgtccccaacaaagcagaagagccccattagcttttttcagtgtgtatacctcgatggatacaatggatatggcttccaattcccattcactcctgctgaccgaccaggggaatcctctggccaggctaactcccctggtcagaaacaacaagggcagtag

SEQ ID NO: 244928 - DNA, 135 bp, synthetic construct
  misc_feature 1..135: note = Description of Artificial Sequence: Synthetic coding sequence
  source 1..135: mol_type = other DNA
tgaatccataaggataaaaccgagaaacaagagaagccagagcggaaaattcagacaaaagactggtccgccaactcatccaccattcgcaccttgaaacttactcagctgaaaccgatttatatatgtacatag

SEQ ID NO: 244929 - DNA, 1038 bp, synthetic construct
  misc_feature 1..1038: note = Description of Artificial Sequence: Synthetic coding sequence
  source 1..1038: mol_type = other DNA
attgtagagatatatccacagggtaacgcctcaactaccactaccgtgatcgattccaaaaatggatctgtgcccaagtcccctggaaaagtgctgaagcggaccgtgactgaagatatagtcaccacattcagctcacccgcagcctggcttttggttatagcactcattataacctggtccgccgtcgctattgtgatgttcgacctggtggattataagaatttcagtgcgagctcgattgccaagattggatctgacccactgaaattggtcagagacgctatggaggaaacaaccgactggatatacggctttttctcgctcctaagcgatataataagctcagaggatgaggaagacgatgatggcgatgaggacacagacaagggagaaatcgacgagcccccactgaggaagaaggaaattcacaaggataaaacggaaaaacaggagaaaccggagaggaaaattcaaaccaaagtgacgcacaaggagaaagagaaaggaaaggaaaaggtgcgggagaaagaaaagcccgaaaaaaaagctacacataaagaaaagatcgagaaaaaagagaagcctgagacaaaaaccctggcgaaagaacaaaagaaagccaaaacagccgaaaagtcagaagaaaaaaccaaaaaggaggtgaagggcggtaagcaggagaaagtcaaacaaaccgccgctaaagtgaaggaagtacagaaaacccctagtaagcccaaggaaaaagaggataaggagaaggctgcagttagtaaacacgaacagaaagatcagtatgctttctgccgttatatgatcgacatctttgttcatggcgatctcaagcctgggcagtctccagcaatacctccacccctgccgacggagcaggcttccagaccaactccggcatctcccgctctcgaggagaaggaaggcgagaagaagaaagccgaaaagaaggttaccagtgaaacaaagaaaaaggaaaaggaggatataaagaagaaaaaaaagaaaaagaagaagaagtag

SEQ ID NO: 244930 - DNA, 504 bp, synthetic construct
  misc_feature 1..504: note = Description of Artificial Sequence: Synthetic coding sequence
  source 1..504: mol_type = other DNA
atgacagagattactgccgagggaaacgcttccactaccacgactgtgatcgactctaagaacggttccgttcccaaaagcccaggcaaagttctcaaacgcaccgtgaccgaggatatagtcacgacctttagcagccccgctgcttggctgttggttatcgcccttataattacgtggtctgccgttgctatcgtcatgtttgacctggtggattacaagaacttttccgctagttctatagccaaaataggaagcgatcctctgaaacttgtccgggacgcaatggaagagactacagactggatttacggatttttctctctcctgagcgatattatttcttccgaggacgaggaagatgacgacggtgatgaggatacggacaagggcgagatcgatgagccgcctctcagaaagaaggaaatacacaaagataagacggaaaaacaggagaaacctgaaaggaagatacagaccaaggaggttggacacagctcctag

SEQ ID NO: 244931 - DNA, 987 bp, synthetic construct
  misc_feature 1..987: note = Description of Artificial Sequence: Synthetic coding sequence
  source 1..987: mol_type = other DNA
atgaccgagattacagcggagggaaatgcttctaccacaaccacagttatcgatagtaagaacgggagcgtgcctaaaagtcccggtaaggtgcttaagcgaactgttactgaagacatagtgacaaccttttcgtccccagctgcttggctcctggtaattgccctcatcatcacttggagcgctgtggcaatcgtgatgtttgacttggtggactataaaaatttttctgcatcatctattgccaagattggttccgaccccctaaaactggtcagggacgctatggaagagaccacggattggatttacggatttttttctttgctgagtgatatcatctcatcggaggatgaggaagatgatgacggcgacgaagatacagataaaggcgagatcgacgaacccccattacgcaagaaggaaattcataaggataaaactgaaaaacaggagaaaccagaacggaagatccagacaaaggtcactcacaaagagaaagagaagggcaaggaaaaagtgcgagaaaaagaaaaacccgaaaagaaagctacccacaaggaaaagatagaaaagaaagaaaagccagagaccaaaacgctggctaaggagcaaaagaaggctaagaccgcagaaaaaagcgaggagaagaccaaaaaagaggttaaggggggtaaacaagagaaggtcaaacagaccgcggctaaggtgaaggaggtacaaaagaccccttctaagccaaaagaaaaagaggacaaggagaaggctgccgtgtccaaacatgaacagaaggaccagtacgcattttgccggtatatgatcgatatattcgtgcatggggacctgaaacctggccaatcacctgctatccctcctcctctccctacagaacaggcatctagacccacccccgctagtcccgctctcgagggggacaaggcctccaaagaaaagaaacgtaaaatgaaacgtatgagtgaaaaatag

SEQ ID NO: 244932 - DNA, 894 bp, synthetic construct
  misc_feature 1..894: note = Description of Artificial Sequence: Synthetic coding sequence
  source 1..894: mol_type = other DNA
atgaccgagattactgcagagggaaacgcttccaccaccaccactgtgattgacagcaagaacggaagcgtacccaagagccctgggaaagttttgaagcgtacagtaaccgaggatatagtgaccacctttagttcacccgctgcatggcttctcgttattgctctcatcattacatggagcgccgtggccatcgttatgttcgatctcgtcgattataaaaacttctcggcttcaagcatcgcgaagatcggaagtgatcctcttaagctcgtgcgcgacgccatggaagagacaactgattggatttacgggtttttttcgctcctgtcagatatcatatcaagcgaggacgaggaggacgacgatggcgacgaagatactgataaaggggaaatcgatgagcctcctctgcggaagaaagaaatccacaaggataaaacggagaagcaagaaaaacctgaacgaaagattcagacaaaggtgacacacaaggaaaaagaaaaaggcaaggagaaggtgagagagaaagaaaaacccgaaaagaaggcaacccacaaagaaaagattgaaaagaaagaaaaaccagagacaaagactctcgcaaaggaacagaaaaaggcgaagactgcagagaagtccgaagaaaaaaccaaaaaagaagtgaaggggggtaaacaagaaaaggtcaaacagacagcagctaaggtgaaagaagtccagaagacaccttctaagcctaaagaaaaggaggataaagagaaggccgcagtgagcaagcacgagcagaaaggacagagtcccgcaatccctccacctcttcctactgagcaggcttctagacccacacccgcatctccagccctcgagggaaaatatttttttttctcttag

SEQ ID NO: 244933 - DNA, 5831 bp, synthetic construct
  misc_feature 1..5831: note = Description of Artificial Sequence: Synthetic coding sequence
  source 1..5831: mol_type = other DNA
atgtctcctcttttacgaagcatctgcgacattaccgagatcttcaatcagtatgtgtcacacgactgcgatggggcagcgctcacaaagaaagacctgaaaaacttgttagagcgcgagtttggggctgtgctgagaagacctcacgacccaaaaactgttgacctcattctggagctgctcgacttggacagcaacggccgagtcgacttcaatgaattcctgctgttcatattcaaggtcgctcaggcatgctattatgccctgggccaggccactggccttgacgaagagaaacgcgcaaggtgtgacgggaaagagtctctgctacaggatcgcaggcaggaggaagaccagcgtcgattcgagccacgagaccggcagctggaggaggagccaggccagcggcgtagacagaagaggcaagagcaggaacgcgagctggcagagggggaggagcagagtgagaaacaggaaaggctcgagcaaagagatagacagcgcagagatgaggaattgtggaggcagcgacaggaatggcaggagagagaagagaggcgcgctgaggaagaacagctgcaaagctgtaagggacacgagactgaagagtttcccgatgaagagcaattgcggaggcgggaactgcttgaattgcggaggaaaggccgtgaagaaaaacagcagcagagaagagaacgacaggaccgcgtttttcaggaggaagaggagaaagagtggcgtaagagggagactgtcctccgtaaagaggaggaaaaactgcaggaagaagagccacagagacagcgagagctacaggaggaggaggaacagcttcgcaagcttgagcgacaggagctcaggcgcgagcggcaagaagaagagcagcaacaacaacgtcttagacgcgagcagcaactccggcgaaagcaggaagaggagaggcgtgagcagcaagaggagaggcgagagcaacaggagcgtcgggaacagcaggaggagcgcagggagcagcagctgcgccgagaacaggaggaacggagggagcaacagcttcggcgagagcaggaagaagagcgcagagagcagcagttgaggcgcgagcaagaggaggagcgacgggagcagcagctgcgccgagagcaacaactcaggcgcgaacaacagctgcggagggaacaacagctgagacgtgagcagcagctccgcagggagcagcagctgagacgggagcagcagctgaggcgcgaacaacaactacgaagggaacagcagctgaggcgcgaacaggaggaggagcgccatgagcagaaacatgaacaggagagacgcgaacagcgcctaaagcgtgaacaggaagagcggcgagactggctcaaaagagaagaggagaccgagagacatgaacaggagcggaggaagcaacagctaaagagggatcaggaagaagagcgcagggagagatggctaaaattagaagaggaagaacggcgtgagcagcaggaaaggagggagcagcagctgaggagagagcaagaagagcggagggagcaaaggctcaagaggcaggaagaggaagagcgactgcaacagaggctccgaagcgaacaacagctgaggcgggaacaggaagaaaggagggaacagctcttgaagagggaagaggagaagcgtctggaacaggagagaagagagcaacgcctgaagcgagagcaggaggagaggcgcgaccagctccttaagcgtgaggaggaacgcaggcagcaacggctgaaacgcgagcaggaggagcggctagaacaaagactgaaacgagaagaggttgaaaggctcgagcaggaagagagaagagagcagagactcaagcgggaggagcctgaagaggagagacggcagcagctgcttaagagcgaagagcaggaggagagaaggcagcaacaattaagacgggagcagcaggagaggcgcgagcagagattgaaacgcgaggaagaggaggagaggctggaacagcgactaaaacgggagcacgaggaagagcgacgcgagcaggagttagccgaagaggagcaggagcaagcaagagaacgtattaagagccgcatccctaaatggcagtggcagctcgaatctgaagcagacgctaggcagtccaaggtttattcacggccacgcaaacaggagggacaaagacgccgacaggaacaggaggaaaaaagaagacgtagagaatctgaactccagtggcaggaagaggagcgcgctcatcgacagcagcaggaggaggaacaaaggcgtgacttcacatggcagtggcaggctgaggaaaagagcgagcgtggccgtcagaggctgtcagcaagacctcctctgcgagagcagagggagcggcagctccgcgcagaagagcgacagcagagagagcagcgcttcttacctgaagaagaagaaaaagaacaaaggcgcaggcagcggcgagagagggagaaagaattacagtttctggaggaggaagaacagctccagaggagggagagggcccagcagttgcaggaagaggaagatggcttgcaggaagaccaagagcggaggcgctcgcaggagcagcgcagagaccagaaatggcggtggcagctggaggaggagagaaaacgacggagacataccctgtatgccaaacccgctttgcaggaacagctcaggaaagaacaacaacttctgcaagaagaggaagaagagcttcagagagaggagcgggagaaaagaagaaggcaggagcaggagagacaatacagggaggaggagcagctgcagcaagaggaagaacagttactccgcgaggaacgcgaaaaacgtcgtagacaagaacgggaacggcagtatagaaaagacaagaaactgcagcagaaggaggagcagctgctgggcgaagagcctgagaagcggagacgtcaagagagagaaaaaaaatatagagaagaggaagagctgcagcaggaagaggagcaactcctccgcgaggaacgagaaaagcggagacgacaagagtgggagcgccagtacaggaagaaggacgaactgcagcaggaggaggagcagcttctaagagaggaaagagagaagaggcgattgcaggaacgggaacggcagtatcgcgaggaagaagagctgcaacaggaggaggagcaattgctgggcgaggaacgtgagaccaggcgacggcaggaactggagaggcagtataggaaagaggaggaattgcaacaggaggaggaacagctgctgcgggaggagccggagaagcggagaagacaggaacgggaacgtcagtgtcgcgaagaggaagagctgcagcaggaagaagaacagctgctcagggaggaaagagagaaaaggagaagacaggagcttgaacggcagtacagagaagaggaagaggttcaacaggaagaggagcagcttctgcgcgaggagcccgaaaagcggagaaggcaagagctggaaagacagtatagggaggaagaagagctgcagcaggaagaggagcagctccttagagaggagcaagaaaaacgtcgtcaagagagggagcggcagtatcgagaagaggaagaattacagcgccagaagaggaagcagaggtaccgggatgaagaccaacgttccgatctgaagtggcaatgggaacctgagaaggagaatgcggttcgggacaataaggtatactgcaaaggcagagagaatgagcagttcaggcagctggaggattcacagcttagagaccgtcagtctcagcaggacctgcaacatctgcttggggagcagcaagaacgagaccgagaacaagagaggcgacgatggcagcagcgcgatcgccacttcccagaagaagaacagctggagagagaggaacagaaggaagctaaaaggcgggaccgaaagagtcaggaagaaaaacagctcctacgtgaggagcgggaggaaaagaggaggagacaggagaccgatcgtaagtttagagaggaagaacagcttctccaggagagagaggagcagccgttgaggcgacaggagcgcgaccgaaagttcagggaagaagagctgcgccaccaggagcaagggcgtaaatttttagaggaagagcagcggcttaggaggcaggagcgcgaaagaaaattcctcaaggaagagcagcagctgcgctgccaggagcgcgagcagcaactccggcaggacagagatcggaagtttcgtgaggaggaacagcaattaagtagacaagaaagggacaggaaatttagagaagaagagcagcaggtcagacggcaggagagggagcgaaaattcctggaagaggagcagcaactccgccaggagcggcacaggaaattccgcgaggaggaacagctcctacaggaacgggaggagcaacagctccaccggcaggagagagaccgcaagttcttggaggaagaacagcagctgagaagacaggaaagagatcgcaagtttcgagagcaggaattaaggtcacaggaacctgagagaaaatttctcgaagaagagcagcagctccaccgccagcagagacagaggaagttcctacaagaggagcagcaactgcgccgacaggagagggggcagcaacgtaggcaagatagggaccggaagttccgggaagaggagcagctgcgtcaggagagggaagagcagcaattgtcaaggcaggagcgcgatcgcaaattccggctggaagagcagaaggtccgcaggcaagaacaggagaggaagttcatggaggacgaacagcaactccgcagacaggaggggcaacaacagctgaggcaggagcgcgataggaaattcagggaagatgaacaactactgcaggagcgcgaagagcaacagctacataggcaagagagagaccgcaagtttctggaagaagagccccagttgcgtaggcaggaacgagagcaacagctcagacatgaccgcgatagaaagtttagagaggaggagcagctactgcaggaaggagaggaacagcaactgcgccgacaggagcgggataggaagtttcgggaagaggagcagcagcttcggcgacaggagagagaaagaaaatttctgcaagaggaacaacagttaaggcggcaggagctggaaaggaagttccgtgaggaagaacaactgaggcaggagacggaacaagaacaactaagaagacaagagagatacagaaaaattctggaggaagagcagctgcgacccgagcgtgaggagcagcagctgcgccgacaagagcgtgatcgtaagtttcgcgaggaagagcaattaaggcaggagagagaggaacagcaactgaggtctcaggaatccgatcgcaaatttagggaagaggaacagctccggcaggagagggaagagcagcagctgcgtccccagcagagagatgggaagtataggtgggaagaggagcaactgcagttggaggagcaggagcagaggctccggcaggagcgcgacagacagtacagggccgaggagcagttcgccacacaagaaaagagccgtcgggaggaacaggagttgtggcaagaagaggaacagaaacggagacaagaaagggagcggaagttacgggaagaacatatcagaagacaacaaaaggaggagcagcgccaccggcaagtgggagagataaagtcccaggaggggaaaggacatggcaggctgctcgaacctggaacccaccaattcgcatccgtacccgtgagatctagccctttgtatgaatatattcaagaacagagatctcagtacagaccata

SEQ ID NO: 244934 - DNA, 540 bp, synthetic construct
  misc_feature 1..540: note = Description of Artificial Sequence: Synthetic coding sequence
  source 1..540: mol_type = other DNA
atggcgaagaccgccatggcttacaaagaaaagatgaaggaattatccatgcttagtctgatctgttcttgcttttaccccgagcccaggaacattaacatttacacctacgatgacatggaggtcaagcagattaacaagagggcttctgggcaggcgttcgaactgattttaaagccaccctcacccatcagtgaggctccgaggacattagcatctcccaagaaaaaagatctttcgctcgaagaaattcagaagaaactggaagcagccgaggaacggagaaagagccaggaggcacaagtgttaaagcagctcgccgagaaaagagagcacgaaagagaggtactgcagaaggcactggaggagaataataacttctcaaagatggccgaggagaagctaatcctgaagatggaacagatcaaggaaaatcgcgaggctaacctggcagctataatagagcggctgcaagaaaaggagagacacgccgcagaggtccggagaaataaagagctgcaggtcgagctttccggatag

SEQ ID NO: 244935 - DNA, 3885 bp, synthetic construct
  misc_feature 1..3885: note = Description of Artificial Sequence: Synthetic coding sequence
  source 1..3885: mol_type = other DNA
atgccttatgaagtgaacgccggttatgactttaccaacatggtgcgcaaaaagaatcctcccctccgtaatgtggctagcgagggagaaggccaaattctcgaacccatcggtacggagagtaaggtttccgggaaaaacaaggaatttagcgctgatcagatgtcagagaacaccgaccagagcgatgctgctgagctgaatcacaaggaagagcattcactgcatgttcaggacccttcgtcctccagtaagaaagacctgaagagcgccgtgttaagtgaaaaggctggattcaactacgagtcaccctccaagggcggaaatttcccaagtttcccccacgacgaagtgactgacagaaacatgctggccttctcttctccggctgcgggaggcgtgtgcgaaccactaaagtcacctcagcgggctgaggccgacgacccccaagacatggcttgcactccatctggagatagtctggaaactaaagaagatcagaaaatgagccctaaggccactgaagaaaccggccaggcccagagcggacaggcaaactgccagggactgagccctgtgagcgtggcctccaagaatcctcaagtgccatcagacggtggagtccgtttgaacaagtctaagacagacctcttggtaaacgataatcctgatccagcacccttatctcctgaactccaggacttcaagtgcaacatttgcggttacggttactatggaaacgaccctacagatctgatcaagcactttcggaagtaccatctgggtttacataacagaacccggcaggacgccgaactggatagcaaaatacttgctttgcataatatggtgcaattcagccactcaaaggacttccagaaggttaaccgcagtgtattttcaggtgttctccaagatataaactcctcccggccagtactcctcaacggtacatatgacgtccaggttacaagcggcggaactttcattgggattggcaggaaaacgcctgattgtcagggcaacaccaaatattttcggtgcaagttttgtaactttacatatatgggtaacagctccactgaactcgaacaacactttctccagacccatccaaataagatcaaggccagtcttccttcctcggaggttgcaaaacccagtgagaagaactctaataaatctatcccagctcttcaatccagtgacagcggagacctcggcaagtggcaggataagattacagtgaaggctggggatgatacccctgtcgggtacagcgtgcccattaaaccactggactcgtccaggcagaacggaacagaggccacctcatactattggtgcaaattctgcagtttcagctgcgagtcttctagctcattaaagcttctggagcactacggaaaacagcacggggcagtacaatcaggtgggctcaatcctgaactaaatgacaaattgtcacggggatcggttataaatcagaatgacctcgctaaaagctcagagggcgaaactatgaccaagactgacaagagttctagcggcgctaaaaaaaaagatttttcttccaaaggtgctgaagacaatatggtgacatcctacaattgccagttttgtgactttcggtatagcaagtcccatggcccagatgtcattgtggtgggccctctgctcagacactatcagcagctccacaatattcacaagtgtaccattaaacactgcccattttgccctcgcggactctgttcccccgagaaacatctgggcgagatcacatatccatttgcctgtagaaaaagcaattgtagtcattgtgctctgcttttactgcatctctctccaggagcagctggttcttccagggtgaagcatcagtgccaccagtgttcatttactactccggacgtggacgtcctgctttttcactatgaatccgtgcacgaatcccaagcttccgacgtcaaacaggaggctaaccacctccaaggcagcgacggccaacagtctgtcaaagagagtaaggaacactcctgtacaaaatgtgactttattacccaagtagaagaggaaatctctaggcactaccgacgggctcactcatgctacaagtgcaggcagtgtagttttactgcggctgatacccagagtcttctggagcattttaatacagtacattgccaggaacaagatattactacagccaatggtgaagaagacggtcacgcgatcagcaccattaaggaggagcccaagatagacttcagagtttataatctcttgacaccagatagcaaaatgggcgaacccgtgagcgaaagcgtggttaaacgggagaagcttgaagagaaggatggcttgaaagaaaaggtctggacagagtcaagttccgacgatctgcgaaacgtaacttggcgaggagctgatattttaaggggatcccccagctacacacaggcctccctcggcctgttaacaccagtgagcgggactcaggagcagacaaaaacacttcgggacagcccaaacgttgaggccgcacacctagcaaggccgatctacggcctcgccgtggagacgaagggcttcctgcagggagctcccgctggcggagaaaagagcggggctcttccccaacagtaccccgcttctggcgagaacaaatccaaggatgagagtcagagtctgctgcgccgtcgcagagggtccggcgtcttttgtgccaattgcctgacaactaaaacgtccctgtggaggaagaacgcgaacgggggttatgtgtgtaacgcctgtggactctaccaaaagctgcactcgacccccagacccctcaacatcatcaagcagaacaacggcgagcagattatcaggcgcaggactagaaagcgcttgaaccccgaggcattgcaggccgaacaattgaataagcaacaacgtggaagtaatgaagagcaagtgaacggttccccactagagagaagaagtgaggatcatctgacagaaagccaccaaagggaaattccccttccctcattgagcaagtatgaagcacaggggtcgctgacaaaaagccacagcgcgcagcagcccgttctggtgtcacagacccttgatatccataagcgcatgcagcccctgcacatccaaataaagtctccccaggagagcacgggggatcctggtaacagcagtagcgtctccgaagggaagggctcctcagaaaggggttctcctatcgaaaaatacatgagacctgccaagcatcccaactactctccacccggtagcccgattgaaaaataccaatacccactgtttggcttgcctttcgtgcataatgattttcagtctgaggccgactggctgaggttctggagcaagtacaagctcagcgtacccggtaacccccactacttgtcccatgtgccagggctcccaaacccgtgtcagaactacgttccgtacccgaccttcaatttgccgcctcacttttcggccgttggatcagataacgatatacccctagatctggcgatcaagcactctcgccctgggcctaccgctaacggcgcttctaaggaaaaaacaaaggccccaccgaacgtcaaaaacgaaggtcccctcaacgtggtgaaaaccgagaaggtcgaccgatcaacccaggacgaactctcgacaaaatgtgtccactgcggcattgtattccttgacgaggtcatgtatgcgctgcatatgtcctgtcacggagattcaggcccattccagtgttctatatgtcaacacttgtgtaccgacaaatatgattttaccacccatatccagcgaggtttgcaccgcaataacgcccaggtggagaagaatggaaagcccaaggagtag

SEQ ID NO: 244936 - DNA, 3858 bp, synthetic construct
  misc_feature 1..3858: note = Description of Artificial Sequence: Synthetic coding sequence
  source 1..3858: mol_type = other DNA
atgcagagtaatatggtgcggaagaagaaccctccgctgcgcaatgtcgcttcggaaggcgagggtcagatattagaaccgattggtactgaatctaaggtgagcggcaagaataaagagttctccgccgatcaaatgtccgagaacactgatcagtctgatgctgcagagcttaatcacaaggaggagcactcactgcacgtgcaggaccccagctcatctagcaaaaaggatctgaaaagcgctgtcctctccgagaaagcagggttcaattacgagtccccgtctaagggtggcaattttccatccttcccgcatgacgaggtgaccgatagaaatatgctggcctttagctctcctgccgcaggtggagtttgtgagccgttaaagtccccccaacgcgcagaggcagatgatccccaggatatggcatgtacaccctctggggacagcctcgagactaaggaagaccaaaaaatgagcccaaaagcaacagaggagacagggcaggctcagtccgggcaggcgaactgccaggggctctccccggtatctgtcgctagtaaaaatcctcaggtcccttctgatgggggtgtccgtctaaataaatctaagacggacctacttgtcaatgataaccccgatcctgcccctctgtcccccgagctgcaggacttcaagtgtaacatctgcggatacggttactatggcaacgaccctactgacctgatcaagcactttcgaaagtatcacctaggactgcataaccggacccggcaagatgcagaactcgatagtaaaatactggctctccacaatatggtacagttctctcacagtaaagattttcagaaagtgaaccggagtgtgttctcaggtgtactgcaggatattaactccagcagacctgtccttctaaacggaacctatgatgttcaggtgacctccggaggcacatttattggcattgggaggaagacccccgattgccagggaaatactaaatattttcgttgtaagttctgcaacttcacctacatgggaaactcaagtactgaactggaacagcactttctgcaaacccatccgaataagataaaagcttccctgccatcttcagaagtggcaaaaccttcagaaaagaactctaacaagagcataccagctctgcagtcgagtgacagcggtgatctcgggaagtggcaggacaagatcaccgtgaaagcaggagacgacaccccggtagggtatagcgttccaatcaaacctctggacagttcaaggcagaatggtaccgaggcaacttcttactattggtgcaaattctgctcctttagctgcgaaagtagcagcagcctgaaactgctagagcattacggcaaacagcacggggctgtccagtccgggggactgaaccccgagctgaacgataaactgagccgagggtcggttattaatcagaacgacctcgctaagtccagcgaaggagaaactatgacgaagactgacaagtcctccagtggtgccaaaaagaaggactttagctccaagggcgcagaagacaacatggtaaccagctataactgccagttctgtgacttccggtatagtaagtcccatggcccagatgtcattgtggtggggccattgcttcgccactatcaacagttacataacatccacaaatgcaccattaagcactgccctttctgccctcgcggattatgctcacctgaaaagcacctgggcgagatcacctacccgttcgcttgcaggaagagcaattgcagccattgcgcccttctgctcttgcacctttcccccggtgcggcagggagtagtagagtaaagcaccagtgccaccagtgctcctttactacacctgatgtggatgtgcttctattccattacgagtcggtccacgagagccaggcaagcgacgtgaaacaggaggccaatcacctccagggaagcgacggtcagcagagtgtgaaggagtccaaggagcattcatgcaccaagtgcgacttcatcactcaggtggaggaagaaatctcccgtcactatagaagagcccattcatgctataagtgccgccagtgtagcttcaccgccgctgatacacagagtctcctagaacattttaataccgtgcactgtcaggaacaggacataactacagccaacggtgaggaggacggccacgctattagcactatcaaagaagaacctaagatcgattttcgcgtgtataacctccttacccctgattctaagatgggtgagccagtgagcgagtcagtggtgaagcgcgagaagttggaggaaaaagacgggttaaaagagaaggtgtggacagagtcttcctcggacgacctccggaatgtcacttggaggggagccgacatcttaagaggtagccccagctacacgcaggcatcactgggcctgctcaccccagtttccggcacccaggagcagacaaagactttgagggattcccctaacgtggaagccgctcacctggccaggccaatttacggactggcggttgagacaaaaggcttcctgcagggcgctccagccggtggggagaaaagcggggctttgcctcagcaataccccgcttcgggtgagaacaaaagcaaggatgagtcacaaagcttgctccggaggcgccgaggtagtggcgtgttttgcgcaaactgtctgaccacaaaaacctcattatggaggaagaacgcaaatgggggttatgtgtgcaatgcatgcgggctctatcaaaaactgcacagcacacccagacccctgaacatcattaaacagaataacggcgagcagatcatcagacgcagaacaaggaaacgccttaatccagaggctctgcaggccgagcagcttaataaacagcagaggggctccaatgaggagcaggtgaatggttcccccctggagcgcagaagcgaagatcatttgaccgaaagtcaccagcgtgagatacccttgccatcactctctaaatatgaggcacaagggagtctcactaagtcccactctgcacaacagccggttcttgtctctcagacccttgacatccacaagagaatgcaaccgctccatatacagatcaaatctcctcaggagtccaccggggatcctggaaactcctcttctgtgtccgaggggaagggatcttcggaaagaggttctcccattgagaaatacatgcggccagcaaagcatcccaactactctcccccaggctctcctatcgaaaaatatcagtacccactatttgggctcccctttgtgcataatgacttccaatcagaagctgactggttgcggttttggtccaagtacaagctttctgtgcccggaaacccccattatctcagccatgtgcctgggctcccaaacccctgtcaaaactacgtcccttatccgacttttaatctcccacctcactttagcgctgtaggtagtgacaatgacattcccctggaccttgcaattaaacattcccgcccaggaccgaccgccaatggcgcaagcaaagagaaaaccaaggcccctccaaacgttaagaacgagggtcctcttaatgttgtaaaaactgagaaggtggaccgaagtacacaggacgagctgagcacaaagtgcgtgcactgtgggatagtctttctggatgaggtaatgtacgccctgcacatgtcctgccacggagactcaggccctttccagtgttccatctgtcagcatctgtgtactgataagtacgatttcacaacgcatatccaacgcggactgcacagaaataacgctcaggttgaaaaaaatggcaaaccaaaagaatag

SEQ ID NO: 244937 - DNA, 705 bp, synthetic construct
  misc_feature 1..705: note = Description of Artificial Sequence: Synthetic coding sequence
  source 1..705: mol_type = other DNA
atgcggaagacgcgactttggggtctgttatggatgctgttcgtctctgagctgagagccgcaacgaagctgaccgaggaaaagtatgagctgaaggagggccaaaccttggacgtaaaatgcgattacacattagaaaagttcgcgtcttcccaaaaggcatggcaaattatccgtgatggagagatgcccaaaacattggcatgtactgagcggccttccaaaaactctcaccccgtgcaggtgggcagaattatcctggaagattatcacgaccacgggctgctacgtgtgcgtatggtgaatctccaggtcgaagattccggactgtatcagtgcgtcatttaccagccaccaaaggagccccacatgttgtttgatagaatcagactggttgtgactaaggggtttagcgggacgcccggatcaaacgaaaactcaacgcagaatgtgtacaagattccaccgacaacaacgaaggccctttgtcccctttatacctctcccagaacagttacccaagcgcctcccaagtcaactgctgacgtttccacacccgacagtgagatcaacctaaccaacgtcacggatatcatccgagtccccgtcttcaatatcgtgatcctgctcgccggagggtttttgagcaaatccttggtgtttagcgttctctttgcagtgacattgcgctctttcgtcccctag

SEQ ID NO: 244938 - DNA, 453 bp, synthetic construct
  misc_feature 1..453: note = Description of Artificial Sequence: Synthetic coding sequence
  source 1..453: mol_type = other DNA
atgcggaaaacaaggctatggggactactgtggatgctgttcgtaagcgagcttcgggcagccactaagttaaccgaagagaaatatgaactcaaagaagggcagactttggatgtaaaatgtgactacactctggagaaatttgcttcttctcagaaggcttggcagattataagagacggcgagatgcctaaaactctggcttgcacagagcgaccttccaagaatagtcaccccgtgcaggtgggccgtattatacttgaggactaccatgatcacggcctactgagagtccgtatggtgaatctgcaggtggaggattctgggctctaccagtgtgtgatttaccagcctcccaaagaaccccacatgctctttgaccggatccgcctcgtcgttacaaaggggtttcggtgcagcacactaagcttctcctggctcgtggatagttag

SEQ ID NO: 244939 - DNA, 678 bp, synthetic construct
  misc_feature 1..678: note = Description of Artificial Sequence: Synthetic coding sequence
  source 1..678: mol_type = other DNA
atgagaaaaaccaggttgtggggcctcctctggatgctgtttgtctctgaactgagggctgccaccaaactgactgaagaaaagtacgagctgaaggaaggacagaccttggatgtaaagtgtgattacacacttgaaaaatttgcgagcagccagaaggcgtggcagattatccgcgacggcgagatgcctaaaacattggcctgtacagaacgaccctcgaagaatagtcaccctgtccaagtaggtcgtataatccttgaggactaccatgaccacggtttactgagggtccgcatggttaacttgcaggtagaggattcaggcctctaccagtgcgtgatttaccagccgccaaaagaaccccacatgctgttcgatcgaattcgcttagtggtcaccaaaggcttctcaggaacaccgggatcgaacgaaaactcaacccagaacgtttataagattccacccacaaccacgaaggcactgtgcccactatacacctctccgaggacagttactcaagcccctccgaagtcaactgcagatgtctcaactcccgatagcgagataaatctgactaatgtcacagatatcatacgatacagctttcaggtgcccggacctctcgtatggaccttaagtcccctatttccctccctgtgcgccgagcgcatgtag

SEQ ID NO: 244940 - DNA, 501 bp, synthetic construct
  misc_feature 1..501: note = Description of Artificial Sequence: Synthetic coding sequence
  source 1..501: mol_type = other DNA
atggagccgctgaggctactgattctgctatttgtgacagaactttctggagcccacaatactaccgtttttcaaggcgtagccggtcagtcgctgcaagtgtcctgcccatatgacagcatgaaacactggggcaggaggaaggcctggtgtcggcagctcggcgaaaaaggaccatgtcagagagtggtatctacgcataacctgtggctactgagcttcctgcgtaggtggaacggttccacagctatcactgacgatactctgggcggtacacttacgatcactctgcgcaacttacagccacatgacgctggcctctaccagtgccagtcgctgcatggctccgaagccgatacactcagaaaggtccttgtggaagtcctagccgacccactggaccacagggatgcgggagacctgtggtttccaggcgaaagtgagagcttcgaggacgcacacgtcgagcatagtatttctagagctgaaagacacgtgtag

SEQ ID NO: 244941 - DNA, 693 bp, synthetic construct
  misc_feature 1..693: note = Description of Artificial Sequence: Synthetic coding sequence
  source 1..693: mol_type = other DNA
atggagccgctgcgcctcctgatactcctgttcgtgacagaactgtctggggctcataacactacggtgttccagggagtagccggacaatcgctgcaggtgtcatgcccttacgactcaatgaagcactggggcagacggaaggcgtggtgccggcagctcggagagaagggaccttgtcaacgagtggtctcaacgcacaatctgtggctgctaagcttcctgcggaggtggaatggttccactgccataacagatgacactttagggggaacactgaccatcacgctaaggaatcttcagcctcatgatgcgggattataccagtgtcagagtttgcacggctctgaagccgataccctgagaaaagtcctagtggaggtactggcggatcccctcgaccacagagacgctggagatctgtggttcccaggcgagtccgaatccttcgaggatgctcatgtggagcacagcatcagtaggtcactccttgagggcgaaattccattccccccaaccagcattctcttactccttgcgtgtatctttcttattaagatcctggctgctagcgctctgtgggcagccgcttggcacggccagaaacccggaacccaccccccaagcgagcttgactgtggtcacgaccccggataccagctgcagacgctgcccggactgcgcgatacctag

SEQ ID NO: 244942 - DNA, 660 bp, synthetic construct
  misc_feature 1..660: note = Description of Artificial Sequence: Synthetic coding sequence
  source 1..660: mol_type = other DNA
atggaacctttaagactgctgatcttattattcgtcacggagttgagcggagcacacaacaccaccgtgtttcagggtgtggctggccagagccttcaagtgtcctgtccttacgactccatgaagcattgggggagaaggaaagcctggtgcaggcaactcggcgaaaaagggccttgtcagagagtggtgtcgacgcataatctttggttactttctttcctacggagatggaacgggtctacagccatcactgacgacactttgggcggtaccctgacaatcacactccggaaccttcaaccacatgacgcgggtctgtatcagtgtcagtctctgcatgggtccgaggccgataccttaagaaaagttctggttgaagtgcttgccgatcctctcgaccatcgagacgcaggtgatctgtggtttcctggcgaatcagagagctttgaagatgcccacgtcgagcattcaattagcagagccgagcgtcatgtaaaggaggacgatggcagaaaaagtcccggtgaagtacccccaggaacgtcaccagcttgcattctggctacgtggccaccaggactgctcgtgctgctttggcaggaaaccacactgcccgagcactgtttcagctggacacttgaagccggaaccggctag

SEQ ID NO: 244943 - DNA, 936 bp, synthetic construct
  misc_feature 1..936: note = Description of Artificial Sequence: Synthetic coding sequence
  source 1..936: mol_type = other DNA
atgggtttgaccctcttactactcctgttactcggactcgagggccagggcatagtcgggagtctgcccgaggtcctgcaggctcccgttggctcatctatcctcgtgcagtgccactatcgactgcaagacgttaaggcccagaaggtgtggtgccgctttcttccagaaggctgccagccacttgtctcaagcgccgtcgatagacgggcaccagcaggcaggcgcacatttctgacagatctcgggggaggtcttctgcaggtggagatggtcaccctccaggaagaagacgcaggagagtatggatgtatggtagacggcgcacggggacctcagattctacaccgcgtgtctctgaatattctccctccagaggaggaagaagaaacacataagattggaagcctggctgagaacgccttcagcgacccggctggatccgcaaatcccttggagccttcacaggatgagaaatcgatacccctgatttggggcgctgtgctcctagtcggtttgctagtggcagcggtggtgttgtttgctgtcatggctaaacgaaaacaggggaacagactgggcgtctgcggcaggttcctgagtagccgggttagtggcatgaacccaagtagtgtggttcatcacgtctctgactctggtcctgctgcagaactgcccctagacgtgccccacattagactggattctcccccttctttcgataatacgacctacacctcactacctctggattccccttccggcaagccatcactgccagcgccttcctctctcccacctctccctcctaaagtgctagtgtgtagcaagcccgtaacatacgccacagtgatattccctggaggaaacaagggcggtggcactagttgcgggccagcccagaatccccctaacaatcagacaccttcaagctag

SEQ ID NO: 244944 - DNA, 600 bp, synthetic construct
  misc_feature 1..600: note = Description of Artificial Sequence: Synthetic coding sequence
  source 1..600: mol_type = other DNA
atgggactgacacttctgctcctgctcctgttgggcttagaagggcaaggcatagtaggaagcctgcctgaagtactgcaggcacctgtgggttcctctatcttggtgcagtgtcactaccgcctacaggacgtcaaggctcaaaaagtctggtgccgattccttcctgaagggtgtcagcccttagtgagcagtgccgtggatcgcagggcacctgccggacggaggacatttcttaccgatctcggcggtggccttctgcaggtggagatggtgactctgcaggaggaggacgcaggcgagtatggttgtatggtcgatggcgctcgcggaccacaaatactgcaccgcgtgagtctgaatatcttgcctcctgaggaagaggaggagacccacaaaatcggctcactggccgagaatgctttcagcgatcccgcaggctctgcaaatcctctggagcctagccaagatgagaaaagcatacctcttatctggggtgccgtgctgctagtgggtttgctcgtggccgcagtcgtcttgttcgcagtaatggctaagagaaagcaggagagcctgctctcagggccacccagacagtag

SEQ ID NO: 244945 - DNA, 603 bp, synthetic construct
  misc_feature 1..603: note = Description of Artificial Sequence: Synthetic coding sequence
  source 1..603: mol_type = other DNA
atggggcttacattgctactgttgctcttgctggggctcgaagaggaagaggaagagactcataagattggatccttggctgagaatgctttcagcgaccctgcgggaagtgccaaccctctggagccaagtcaggacgagaaatcaatcccactgatctggggagccgtgctgttggttggattgctggttgccgctgtggtgctgttcgccgtgatggctaagagaaagcagggcaaccggctgggagtgtgcggcagattcctctcttctagggtgagcggcatgaatccaagctctgtcgtccaccacgtgtctgattctgggccagccgctgaactccctctcgatgtgccccacatccgtttggattcgcctccttctttcgataatacaacgtacacgagcttgccgctagacagcccgagcggcaagcctagcctgccagcgccatcaagcttaccaccactgccccctaaagtacttgtttgtagtaagccagtgacttacgccactgtcatatttcctggcggaaataagggagggggaacctcatgtgggccagcgcaaaacccacctaacaaccaaacgccctcttcatag

SEQ ID NO: 244946 - DNA, 966 bp, synthetic construct
  misc_feature 1..966: note = Description of Artificial Sequence: Synthetic coding sequence
  source 1..966: mol_type = other DNA
atggcccctgcattcttattgctgcttctactctggccccagggttgcgtgagtgggccttctgccgattctgtctataccaaggttagactgcttgaaggggaaactctctctgtccagtgctcctacaaaggctataaaaacagggtggaaggcaaggtgtggtgtaagatcagaaaaaagaagtgcgagcctggctttgctcgagtgtgggtgaaagggcctagatacctgttgcaggacgacgctcaagccaaagtggtgaacatcaccatggtggcactcaaattacaagactcaggtcgctactggtgcatgcggaacaccagtggcatcctgtatcctcttatgggtttccagctggatgtctctcccgctccacaaactgagagaaatattcctttcacccatctggataatatattaaagtccggaacggtgacgacaggacaggcaccaaccagtgggccagatgccccattcacgactggtgtgatggtgttcactcccggactcattacccttccaaggctgctcgcaagtaccagacctgcttctaagaccggctattcatttacagccaccagcacgacatcacaaggtccaagacgtaccatgggcagccagacagtaaccgccagcccttccaacgctcgcgatagttctgcagggccagaaagcatcagtaccaagagcggtgacctgagcacacgatcacccacaaccggcctgtgcttgacctcccggtctctgttaaatcgactcccctctatgcctagcatcaggcaccaggacgtgtactcaacagtactgggggtggtgttgacgctgttagttctgatgctcatcatggtctatggtttttggaagaagaggcacatggccagctatagcatgtgctcagatccctctacgagagatcctcccggtagaccagagccatacgtggaggtttatttaatttag

SEQ ID NO: 244947 - DNA, 2562 bp, synthetic construct
  misc_feature 1..2562: note = Description of Artificial Sequence: Synthetic coding sequence
  source 1..2562: mol_type = other DNA
atgtgttgcgagaagtggtccagggtcgctgagatgtttctttttatcgaggaacgcgaagattgtaagattctgtgcttgtgttcccgggcatttgtagaagacaggaagctgtacaacttgggccttaaaggatactacattagggattcaggtaacaattcaggagaccaggccaccgaagaagaagagggcggatactcttgcggaactgcagagagtcacgactctaagggtattggattggatgagagcgaactggattctgaggctgagttaatgaggagtatgggcctgccactccagtttggacgaattaccgcacataaggactttgaagttagcatgaacactagaaacaaggtgaagattaagaagaagaagcaccaaaagaaatacctggacgaaattgtccaagagagttggaggaaagaatatgaggaagacgatattctagcctctgatgacccctcgtccattgagcagtatgaaaatacccgaacttacgagctgcagagtaagaaggataccgagactgagaaccctccagtcgagaatacattatccccgaagctggagattaccgaaaaatgggagaagtactggaatgagtacggaggcggactgctgtggcagtcttggcaggaaaaacaccccggacaggctctgtcttctgagccatggaactttccagacactaaggaagagtgggagcagcattacagccaactgtattggtattacctcgaacaattccagtactgggaagcccagggatggacgtttgatgcttctcagagttgcgacacggatacctataccagcaagaccgaggcagacgataaaaatgacgaaaagtgcatgaaagtggacctcgtttcctttccatccagtccaattatggtggataatgactcttccggtacctctgacaaagaccattccgagattctggacgggatttctaatatcaagcttaactctgaagaggtcacccaatctcaactggacagttgtacgagtcacgacgggcaccagcagctgtctgaggtttcgagtaaaagggagtgtcctgctagcggtcaatctgagcctcgtaatggtgggacaaacgaggagtcaaactcttctgggaataccaatacagatccaccagccgaagattcccagaagtcttccggtgcaaatacctcaaaggaccggccacacgcatccggtacagatggcgacgagtctgaggaggacccccctgagcacaagccttcaaaactgaaaaggagtcatgaactggacattgacgagaaccctgcatcagattttgacgacagtggctcactgctgggcttcaaatatggttccggccagaagtacggaggaatccccaacttcagtcataggcaggttcggtacctggaaaagaatgttaaactcaaatccaagtacttggatatgcggagacagatcaaaatgaagaataagcatatttttttcacaaaagagagtgaaaagcctttctttaagaaatctaaaatcttgagtaaagtagagaagtttctcacctgggtaaataagccaatggatgaagaggcttctcaggagtcctcatcccacgacaacgtgcacgacgcctccacctcatctgatagcgaggaacaagatatgtccgttaagaaaggcgacgatctcctggaaaccaacaatcccgaaccggaaaagtgccagagcgtctctagcgcgggagagttggaaaccgaaaattatgaaagagactcactcctggctaccgtgccggatgaacaggattgtgtgactcaagaggtccctgacagcaggcaggcagagaccgaggctgaagtcaaaaagaagaaaaataaaaagaaaaacaaaaaagtaaacggcctgcctccagagatagctgccgtgccagagctggcgaagtactgggcacagagatatcgactcttttccaggtttgacgacgggattaaattagatcgcgagggttggttttccgtgacaccggaaaagatcgctgagcacattgcaggcagggtgagtcagtcctttaagtgtgacgttgtagtggacgctttctgcggagtgggcggaaacaccatccagtttgctctgaccggaatgcgggttatcgcaattgacatcgaccctgtgaagattgcattggccagaaacaacgctgaggtgtacgggatcgctgacaagattgagtttatctgcggtgatttcttgctcttggcaagctttcttaaggcagatgtggtgtttctatcccctccttggggaggcccagattatgccaccgcagaaacattcgatattaggaccatgatgtctccagacggattcgagatcttccgcctgtcaaagaaaatcacaaataacatcgtctatttccttccgaggaacgcagatattgaccaggttgcttcactggccggtcccggaggccaggtagagattgagcagaattttctcaataataagttgaagaccatcactgcctatttcggggatctgatcaggcgacctgctagcgaaacctag

SEQ ID NO: 244948 - DNA, 1266 bp, synthetic construct
  misc_feature 1..1266: note = Description of Artificial Sequence: Synthetic coding sequence
  source 1..1266: mol_type = other DNA
atgtggtatcaccgactctcccacctccacagcaggctgcaggatctgcttaaggggggtgtgatctaccctgcccttcctcaacccaatttcaaaagcctcttaccactggccgttcactggcaccacaccgcttcaaaatcacttacatgtgcctggcagcagcatgaagatcactttgaactgaagtacgcaaacactgtgatgcgctttgattacgtgtggctgcgcgatcactgtcggtcagcttcctgctataacagcaagacgcaccagcgctccctggacaccgccagtgtagatctttgtatcaagccaaaaaccattagactggacgaaactactctattctttacgtggcccgacggacacgtaacaaaatacgacctgaattggctagtgaaaaactcgtacgaagggcaaaaacagaaagtgatccagcctcggattctctggaatgccgagatttaccagcaagcgcaggttccttcagtcgactgccaaagctttttagagactaatgaaggtctgaagaagtttctgcagaacttcctcctgtacggaatcgcattcgtcgaaaacgtaccacccacacaggagcacaccgagaagttagccgagaggattagtctgatcagagagacaatttacggaagaatgtggtattttactagtgacttcagccggggagacacagcctacaccaagctggccctggatcggcatacggataccacctacttccaggagccttgtggcatacaagttttccactgtctgaagcacgagggtacaggcggtaggaccttgctggtcgatgggttctacgctgccgagcaggtactacaaaaagctccggaggaattcgaattgctctcaaaagtccccctgaaacacgaatatattgaagatgtgggggagtgccataatcacatgattggcatcgggccagtgttaaacatctatccatggaacaaggagctataccttatacggtacaacaattatgatagggccgttattaacacagtgccttatgacgtcgtgcatcgctggtacactgcccataggacgctgacaattgaactccgacgaccggagaatgagttctgggttaagctgaaaccaggcagagtgctgttcattgacaattggcgggtgctgcacggcagggagtgtttcaccgggtatcgccagctgtgcggttgctacctgacccgggacgacgtcctgaataccgctcggttgctggggttgcaggcctag

SEQ ID NO: 244949 - DNA, 1131 bp, synthetic construct
  misc_feature 1..1131: note = Description of Artificial Sequence: Synthetic coding sequence
  source 1..1131: mol_type = other DNA
atgtggtaccacagactttcccacctccattcaaggctgcaggacctgctgaagggcggtgtaatttacccagctctcccacagcccaacttcaagagtcttcttcccctagcggtgcactggcaccatacggctagcaaaagtctgacttgcgcttggcaacaacacgaggaccacttcgaactgaagtacgcaaacactgtgatgcggtttgattacgtctggctgcgcgaccactgccgctctgctagctgttataactccaaaactcatcagaggtcattagatacagccagtgtggatctttgcatcaaacccaagactatcaggttggacgagactaccctgttctttacatggcctgatggtcacgtcaccaagtacgaccttaattggttagtcaaaaattcatatgaagggcaaaagcagaaggtgatccaacctcgaatcctttggaacgctgaaatttatcagcaggcccaggtgccctcagtggactgccagtcttttcttgaaaccaatgaaggcctcaagaagttcctccaaaattttctcctgtacggcatagcatttgttgaaaatgtgccccctacccaagagcatacagagaagctcgcggagcgcatcagcttaatccgcgaaaccatttatggtcgcatgtggtactttacatccgacttctcacgtggggacaccgcctacaccaaactcgcactggacagacatacggacacaacatactttcaggagccctgcggcattcaggtcttccactgcctgaaacatgaggggacaggaggaaggacgttgctcgtggacgggttttacgccgcagagcaggtgctccagaaggcgcctgaggaatttgagttgctttcaaaggttccgttaaagcacgagtacatcgaggatgtcggggagtgccacaaccatatgattggcataggccctgtgttaaacatctacccttggaataaagagttgtatctgatccgtctcttcaaggaaaagcagaatacagtaaatcgtcagtggaactcctcattacaatgtgacatacctgagagaatcctgacctatcgccactttgtgagtgggacatccattgagcatcgcggttcgttaatctag

SEQ ID NO: 244950 - DNA, 5889 bp, synthetic construct
  misc_feature 1..5889: note = Description of Artificial Sequence: Synthetic coding sequence
  source 1..5889: mol_type = other DNA
atgagagaactagaagcaaaggcaaccaaggacgttgagaggaatctcagccgagatctggtgcaggaagaagagcagttgatggaggagaagaagaagaagaaggacgataaaaagaaaaaggaggccgctcagaaaaaggctactgaacaaaaaattaaggttcccgagcagattaagccctcagtgagtcagccccagcccgcaaattccaataacggtacctccaccgccacctccacaaataacaatgcgaagcgggcaaccgctaataaccagcagccccagcaacaacagcagcagcagcagccccagcaacagcagccccagcagcaaccccaaccacaaccacagcagcaacaaccccagcagcagcctcaagctctgcctaggtatccaagagaggtcccacccagatttagacatcaggagcataagcagttgctgaaaagaggtcagcacttccctgtgatcgccgctaatctggggtccgccgttaaagtgctgaactctcaaagcgagtcaagtgcattaaccaatcagcagcctcagaacaacggcgaggtgcagaatagtaaaaatcagagtgatattaaccatagtactagtggatctcattatgagaactcgcagcgaggtcccgtgtcttctacctccgattctagtaccaattgcaagaatgcggtcgtttctgatttgtctgagaaagaggcttggcccagtgcgccaggttccgatccggaactggcttccgagtgcatggatgcagacagtgctagtagctctgagtctgaaaggaacattacaatcatggcctcgggcaacactggcggtgaaaaggacggtctacgtaactcaacggggcttggaagccaaaacaagttcgtggtaggaagtagtagcaacaatgtcggccacgggagtagtacaggaccatggggattctctcacggcgcaatcatctcaacttgccaggtgtccgtagatgcaccagagagcaagtccgagtccagcaataataggatgaacgcgtgggggaccgtgagttcaagtagcaatgggggacttaatcctagcactctgaatagtgcatccaatcacggagcgtggccggttttggagaataacggcctcgcactgaagggcccagttggcagcgggtcatcaggaatcaacatacagtgctccacaatcggacaaatgcccaataaccagagcattaattccaaagtctccggcggtagcacccatgggacctgggggtctctgcaggagacctgtgagtctgaggtcagcgggacgcagaaggtgtctttctccggccagccccagaacataacgaccgaaatgacagggcctaataacaccactaatttcatgactagttctctccccaacagtggaagtgtacaaaataatgagctgccgtcgtccaacaccggagcctggcgagtatccactatgaatcacccccaaatgcaggcgccatccgggatgaacggcacgtcactgtcccacctcagtaacggcgagagcaagagtggaggaagctatggcacaacatggggagcctacggcagcaattactctggagataagtgctctggaccaaatgggcaggcaaatggtgacactgtgaatgccactttgatgcagcccggagtgaacggtccaatgggaacaaatttccaggttaacacaaataagggcggaggcgtctgggagtccggggctgcaaacagccaatcaacaagctgggggagtggcaacggagccaactctggaggcagtaggcggggttggggcacgcccgctcagaacacaggaacaaatctgccaagcgttgagtggaacaaattgccctcgaaccagcatagcaacgactctgctaacgggaacgggaagaccttcactaatgggtggaaatctaccgaggaggaggaccaagggagtgccacgtcgcagacaaatgagcagtccagcgtatgggccaagactggcggaacagtggaaagcgacggttccactgagagtaccggtcgcctggaagagaagggtactggggagagccagagccgtgaccgtcggaaaatagaccagcacaccctgttgcagtcaattgtaaatcggactgacttggatcctagggtgttatctaatagcggctggggacagacacccattaaacagaacaccgcttgggacactgagacttcccctagaggtgagcggaaaaccgataacggaaccgaggcctggggcagcagcgccacacaaaccttcaactcaggggcttgcatagacaaaactagcccaaacggcaatgatacttcatccgtgtctggctggggcgacccaaaaccagcgttacgctggggggacagcaaaggctccaactgccagggaggatgggaggatgactccgccgcaaccggcatggtgaagagtaaccagtggggcaattgcaaagaagaaaaggctgcctggaatgatagccaaaaaaataagcaggggtggggggacggccaaaaaagcagccagggctggagtgtatctgctagtgacaactggggagaaacaagccgcaacaaccattggggggaagctaacaagaaaagctcatctggtggctcagactctgatcgcagcgtaagcggctggaatgagcttggaaagacctccagctttacatgggggaataatataaaccccaacaacagcagcggatgggacgagtcttctaaacctactccaagtcagggatggggggaccccccaaaaagcaatcagtctttgggttggggggatagctccaaacccgtgtcttcacctgactggaacaaacagcaagacatcgtcggatcttgggggatccctcctgccacaggcaaaccgcctggcactggatggttggggggacctattcctgccccagcaaaagaagaagaaccaactggctgggaagaaccatctccagaatccattcgacgtaagatggaaatcgatgatggtacctccgcctggggcgatccctccaaatacaactacaagaatgtgaatatgtggaataagaacgtacctaacggaaactctaggtcagatcagcaggcacaagtgcatcaactgctgaccccagcaagtgctatatcaaataaggaagcatcttccggctcgggatggggggaaccttggggtgaaccgagcaccccagccacaacagtcgacaatggaacctccgcgtggggtaaacctatcgactcgggcccaagctggggcgaacctatcgcagcagcttcttccacaagtacctggggttcctccagcgtcggtcctcaggcactttccaagtcaggacctaagagcatgcaggacggatggtgcggcgacgatatgccattgcctggcaacaggcctacaggatgggaagaggaagaggatgtggagattgggatgtggaattccaattccagccaggaattgaactcaagccttaattggcccccttacacgaagaaaatgtcaagcaaggggctatcagggaaaaaacggcgacgcgagagaggaatgatgaaggggggaaacaagcaagaggaggcttggattaacccatttgtcaaacaatttagcaatatcagcttttcccgggatagccccgaggagaacgtgcagtcaaataaaatggatctttctggcggaatgctgcaggataaacggatggagattgataagcacagcctgaacattggggattataaccggaccgtcggaaaggggcctgggagtagacctcaaataagcaaagagtcctctatggagagaaatccatacttcgacaaagatggtattgttgccgacgagtctcaaaatatgcagttcatgagctctcagagtatgaaactgcccccttccaattccgccctgcctaatcaggcattaggttctatagcaggcttgggcatgcagaacctcaactcggtccgtcagaatggcaacccgagtatgttcggggtgggaaatacagctgcccaacccagaggcatgcaacagcccccagcacagcccttaagctcttcccagcccaatctgcgagcccaggtgcctccccctttgctgtcccctcaggtgccggtctcactcctgaagtatgctcctaataacgggggactgaacccactgtttgggcctcagcaggttgcgatgttgaatcagctttcccagctcaatcagctgagccagatttctcaattacagaggctgttggcccaacagcaaagggcacagtcacagcgctctgtgccaagtggaaaccggccacagcaggatcaacaggggaggccactgtcagtgcaacagcagatgatgcaacagtcccgtcagttggaccccaacctgctggtgaaacagcaaacaccacccagccaacaacagccattgcatcagcccgcaatgaagtcgttcctggacaatgtaatgcctcacactaccccagagctacagaagggcccttccccaatcaacgcattcagtaactttccaattggcttgaatagcaatctcaacgtaaatatggatatgaacagtataaaagagccgcagtcacggctgcgtaaatggaccacagtcgacagcatttcagtcaacacctccttggatcaaaacagcagtaagcacggagctatcagttccggcttcagactcgaagaaagtcccttcgtgccttatgactttatgaattcaagcacgtctccggcttctccccctggtagtatcggggacggttggcccagagccaaaagcccaaatggatctagttcagttaattggccaccggagttccgtcctggagagccctggaaaggctacccgaacattgatcctgagacagacccctacgtgacacctgggagtgtaataaataacctatctatcaatactgtccgggaagtggatcacctacgggacaggaatagtgggagtagcagctcactaaatacaaccctgccgtctaccagcgcttggtcaagcattcgggctagcaactacaacgtccctctgagcagcacagcgcaatctacttcagccagaaactcagattcaaagctgacctggtcaccgggatcagtgaccaacacatcgttggcgcatgagctgtggaaggtccctctgcccccaaagaacattaccgccccatcccggcctccgcctggcttgacggggcaaaagccccctcttagcacttgggacaatagtcccctgcggatcggcggaggttggggcaatagtgatgccaggtacactcccggtagttcatggggagagagttcttccggcaggatcacaaactggctcgtgttaaaaaacctgactcctcagatcgacggcagcacgttgagaacgttatgcatgcagcatggaccactcatcaccttccacttaaacctgcctcacgggaatgcgctggtgagatattcctccaaggaggaggtcgtgaaagcgcaaaaatcccttcacatgtgcgtgctgggtaacacaaccatcctcgctgaatttgcaagtgaagaggaaataagcagattttttgcacagagtcaatcgttaacaccctctcccggatggcagtccctcggctccagccagtcccgcttggggagcctagactgttcccacagtttttcctctaggacggatctgaaccactggaacggagcgggattatccggaaccaattgcggagacttgcacggcacttcattatggggaaccccacactattccacttcactctggggcccacccagtagcagcgaccccaggggaatcagctcacctagcccgatcaatgcctttctgagtgttgatcacttaggagggggaggggagtctatgtac

SEQ ID NO: 244951 - DNA, 1323 bp, synthetic construct
  misc_feature 1..1323: note = Description of Artificial Sequence: Synthetic coding sequence
  source 1..1323: mol_type = other DNA
atggatatgaattccattaaggaacctcagagcaggctgcggaaatggaccactgtcgacagcataagcgtcaacacaagcctcgaccagaattcctctaagcacggcgctatctcatctgggttccggcttgaagagtcaccattcgtgccctatgatttcatgaattcaagtacttcccctgccagtccgccagggtccattggagatggatggccaagagctaagtcccccaacggatcatcatcagtaaactggcccccagaattcagaccaggggagccgtggaagggttaccccaatattgatccagaaaccgacccttatgtcacccctgggagcgtgattaacaacctgtctattaatacggtcagagaagtagatcacctgcgtgataggaatagcgggagcagcagcagtctaaataccacactgccatcaacatctgcttggtcctcaatccgggctagcaactacaacgtaccccttagtagtacagcccaatccacatcagccagaaatagtgacagtaagttaacttggagcccaggtagtgtgacgaatacttcgctggcacacgagctgtggaaggtccccctgccaccaaaaaacattaccgccccaagtcgccctcctccaggacttactgggcaaaaacccccactgtcgacatgggacaattccccactgcgaatcgggggaggatggggaaatagtgacgccagatacacccccggttctagttggggggaatctagctctggaagaattaccaattggctggtgttgaaaaatcttactccccagattgacggaagcactctgagaacactttgtatgcagcatggcccattgatcaccttccacttgaatctgccgcatgggaatgccctggtgcgatattcctcgaaagaggaggtcgtgaaggcccagaagtcactgcatatgtgcgtgctaggtaatactacaattttagccgaattcgcctctgaggaggagatcagtaggtttttcgcccagagccagtcacttaccccttcacccggttggcagtcattgggaagcagccagtccaggctggggtcactcgactgtagccatagtttcagctctagaacagacctcaatcattggaacggagcaggtttgtctggaacaaattgtggtgacctccacgggacctctctatggggaacgccccactatagcacttccttatggggtcctccatcctcttccgatccgagaggcatttcttcaccaagtccaattaatgctttcctatccgtagatcacctcgggggagggggtgagagcatgtag

SEQ ID NO: 244952 - DNA, 5072 bp, synthetic construct
  misc_feature 1..5072: note = Description of Artificial Sequence: Synthetic coding sequence
  source 1..5072: mol_type = other DNA
atggctaccggcagtgcacagggcaacttcactggtcatactaaaaagacaaacgggaataacggcacaaacggcgcactggtccagtccccatctaaccaaagcgctctgggcgctggcggtgccaacagcaatgggtccgctgctagagtgtggggtgtggccaccggaagctcaagcggtctggcccattgctctgtcagcggaggggacgggaaaatggatactatgataggggacggtagaagccaaaattgctggggagcatctaactccaacgcagggatcaatcttaacttaaatcccaacgctaatccagccgcttggcccgttctgggacacgaagggaccgtggctacaggtaatccgtctagcatatgcagccccgttagcgcaattgggcaaaacatgggtaatcagaacggcaatccaactggtacgttgggcgcatggggcaacctcctcccacaagaatccacggagccacagacttccacctctcagaatgtttcattttcggcacagccacagaacctaaacacagacggccctaacaataccaaccctatgaactcctcgcctaatcctatcaacgccatgcaaacaaacggtctacctaactggggaatggctgtcgggatgggggctatcatcccacctcacctgcagggattgcccggtgcaaacggctcaagcgtgtcacaggtgagtggtggatcggccgaagggatttctaattcagtgtgggggctgagtcctggtaaccctgctaccggtaattcaaactcaggcttctcccaagggaatggggatactgtgaattctgctttgtccgccaagcagaacgggtcttcttctgccgtgcagaaggaagggtcaggaggaaacgcatgggattctggaccacccgctggccctggcatcttagcatggggcagaggcagtggaaacaatggggttggcaatatccattcaggtgcctggggtcatcccagccggtcgaccagcaacggggtgaatggggagtggggaaaacccccaaaccagcacagcaactcagacatcaacggaaagggctcaacaggatgggagagcccttcagtgacaagtcaaaacccaacagttcagcccggaggggagcatatgaactcgtgggctaaggccgcaagttctggcacaacagcttcagagggcagttccgacggcagcggaaaccataacgaggggagcacaggcagggagggcaccggcgaggggaggcggcgagataaaggaataatcgatcaggggcacatccagctaccacgcaatgacttagaccccagagtgctgagcaataccggatggggacaaactcccgttaagcagaataccgcttgggagtttgaggagagccccagatcagagaggaagaatgacaacgggaccgaagcctggggctgtgccgctacccaagcctccaactccggcggaaagaatgatgggtccataatgaatagcaccaacacaagctccgtgtcaggctgggtgaacgctcccccagctgccgtaccggctaatacagggtggggtgattctaataacaaagctccatcagggccaggcgtctggggcgactccatttcctccactgcagtgtctacagcagctgcagccaaaagcggccacgcctggtccggcgctgctaaccaggaggacaaaagtccaacgtggggcgagcctccaaagcccaaatcacaacactggggggatggccagaggtccaacccagcctggagcgccggaggaggcgactgggccgatagttcttctgtactcgggcatctgggtgacgggaagaaaaacggatcaggctgggacgccgattcaaaccggtcaggttctgggtggaacgatacaacacgcagcggaaactctggttggggtaatagtacaaatacaaaagcaaatcctggcactaattggggcgagacattgaagccgggaccacagcagaactgggcctctaagccccaggacaataacgtgagtaattgggggggagctgcctctgttaagcaaactgggaccggctggattggcggtccagtccctgtgaaacaaaaagatagctcagaagccacagggtgggaagagccaagccccccttccattagaaggaagatggagatagacgacggcacgagtgcttggggagatcctagcaattataataacaagactgttaatatgtgggacagaaataacccagtgatacagtcatccacgaccacaaataccacgaccacaaccacaaccacgacttccaacactactcacagggttgagaccccacctcctcatcaagccggaactcagctgaatcgcagtcctctgttgggtccgggtaggaaggtgtcgtcaggttggggggaaatgccgaacgtacactctaaaacagagaattcatggggggaaccaagcagtccatcaaccctagtagacaatggcacagccgcttggggaaagccacccagttctggatccgggtggggagatcatcctgctgaaccccctgtggcatttggtcgggcaggtgctcctgttgcagcgtctgcactgtgtaaacctgctagtaagtctatgcaggaaggctggggttcaggcggagacgaaatgaatctcagcaccagccaatgggaggacgaggagggagatgtgtggaataatgccgcatctcaggagtcaacatctagctgcagttcatggggcaacgctcctaagaagggtctgcagaagggcatgaagacgtccgggaaacaggacgaggcatggataatgtcacggctcatcaaacagttaacggacatgggcttcccgagagagcctgccgaggaggccctgaagtctaataatatgaaccttgatcaggccatgagcgccctgctggagaagaaagtagacgtagataaacggggacttggggtcactgaccataatggaatggccgctaaacctctgggatgtcggccacccattagcaaggaatcgtctgtcgacagacccaccttccttgacaaggacggcggactggtcgaagagccaaccccatcccccttcctaccaagcccatctctaaaactgccgctatcccactccgctcttccatcccaagccctggggggtattgcttccgggttaggcatgcagaatttgaacagctcgcggcagattcctagtggcaacctcgggatgtttggtaactccggtgctgctcaagccaggacaatgcaacaacccccacagccacccgtccagccgcttaattcctcccaaccctcactccgggcacaggtcccacagttccttagcccgcaagtacaagcacagctcttgcaatttgcagccaaaaatattggcctgaaccctgcgctcctgacctcgccaataaacccccagcacatgactatgctcaatcagttgtatcaactccaactcgcctaccaaaggctccaaatccagcagcaaatgttgcaggcccagcggaatgtgtccggtagcatgaggcagcaggagcagcaagtggcaaggacaatcacgaacctgcaacagcagattcaacaacaccaaagacagttggcccaggcactcttggtgaagcagcctcctccaccacccccaccccctcacctatccttgcatccctctgccggaaagagtgcaatggattctttcccatcccatccccagactcctggtcttccagacctgcagacaaaagaacagcagtcatctccgaatacatttgccccttatcccttagccggtttgaacccgaacatgaacgtcaacagcatggacatgacaggtggcttgtcagtgaaggatccttcacagagtcagtcacgactcccacagtggacacaccccaattccatggacaatctgccatccgctgcctctcctctggaacagaatccctccaagcacggggctatccccggtggtctgagcataggccctcccggtaagagctccatcgatgattcctacggcagatacgacctcattcagaatagcgagtctcctgcttctcccccagtcgctgtgcctcattcttggagccgcgctaaatctgattccgacaagatctctaacggctcatccatcaattggccacccgaattccatcccggagtgccctggaagggattgcagaatatcgatccagaaaatgatcctgatgtcaccccgggttccgtgcctactggaccaactatcaataccacaatccaagatgtcaatagatacttactcaaatcaggcggtaagttatccgacattaagtccacatggtcctctggtcccacctcccacacccaggctagcctgtcacacgaactgtggaaggttcccagaaacagcactgcaccaacacgcccacccccaggccttacaaacccaaagccaagctccacctggggggcttcccctctggggtggaccagtagctattcttctggatccgcctggtcaaccgacacaagcggccgaacttcttcttggttagttcttcgcaatctcactcctcagattgacgggtcgacactgagaactctgtgtctgcagcacggaccccttattacgttccatctgaatcttacgcaggggaatgcagttgtaagatacagctcaaaggaggaggctgccaaggcccagaaatcactacatatgtgtgtgttgggtaatacgactatactggccgagtttgccggagaagaagaggtcaatcggttcctcgcccaagggcaagccctcccccctacttcctcctggcaatcatctagcgcttcatcacagccgaggcttagcgccgctggatcgtcgcatggcctggtgagatctgacgcaggccattggaatgcaccttgtctgggcggaaaaggcagctcggagctgctatgggggggagtcccccagtatagctcttcactatgggggccaccatccgccgacgatagtcgcgtgattggaagtcctacccccctgacaacactcttgccaggagatttgctgtctggggaatctctgta

SEQ ID NO: 244953 - DNA, 5180 bp, synthetic construct
  misc_feature 1..5180: note = Description of Artificial Sequence: Synthetic coding sequence
  source 1..5180: mol_type = other DNA
atggcaactggcagcgcccagggaaacttcaccggtcacacaaaaaagaccaatgggaacaatggaaccaatggtgctctggtccagtctccttccaatcagagcgccttgggagctggaggagcaaattctaacggtagcgcagcaagagtttggggagtcgccactgggtcctccagtggcctggcccactgtagcgtgtcgggcggagatggaaagatggacactatgatcggagacgggcgaagtcagaattgttggggggcatctaactcgaatgcaggaattaacctgaacttaaatcccaacgcgaaccctgctgcttggcccgtcctggggcatgaaggaactgtcgccaccggtaacccatcgtctatctgtagtccagtatcggcgataggccaaaacatgggcaatcaaaatgggaatccaacaggcactcttggtgcgtggggtaacctgctgcctcaggagagcactgagccccaaacttcaacatcacagaacgtcagtttttcagcccagcctcagaacctgaacaccgatgggcctaacaacaccaaccccatgaattcttcaccaaatccaattaacgcgatgcagacaaatggcctgccaaactggggcatggcggttggcatgggtgccataatccctcctcatctgcaagggctgcccggagccaatggaagcagcgtaagccaggtctctggcggtagcgccgaaggcattagcaactccgtgtggggactgtcccctggcaatcccgctactggaaacagtaatagtggcttctcacagggtaacggggatacagtcaactccgccctctcagccaaacaaaacgggtccagtagtgcagttcagaaggaagggtctggtggcaatgcctgggatagcggtccacctgccggacccggtatcttagcctggggcagaggcagcggcaacaatggggtgggaaacatacacagcggcgcatggggacaccccagcagatccacatctaacggcgtgaacggggagtggggtaaacccccaaatcaacattctaatagcgacattaacggaaaagggtctactgggtgggaatccccgtccgtgactagccaaaaccccactgtgcagcccggaggtgagcacatgaactcatgggccaaggccgcaagctccggcacaactgcctcagagggctcctcagatggcagtgggaatcacaacgaaggaagcacagggagggagggcactggcgagggcagacggagagacaagggaatcatcgatcagggccacatacagttaccaagaaatgatctggaccccagagtcctgtctaacaccggatgggggcagacacccgttaaacagaatacggcctgggagtttgaggagagtccgagatccgagaggaagaacgataacggaacggaggcttggggttgcgcagctactcaggctagcaatagcggcggaaagaacgacggctcaatcatgaactccacgaacactagctcagtatcaggatgggtcaacgctccccctgccgctgtgccagcgaacactgggtggggcgactctaacaataaagccccatcaggacccggagtttggggcgacagcatctcttcaactgccgtctctacggcagcagccgctaagtccggacacgcttggagtggagcagcgaatcaagaggacaagagcccaacttggggcgaacctccaaagccgaagagtcaacattggggggatgggcaacggtcaaatcccgcatggtccgccggagggggtgactgggccgattcctcgagtgtgctcggccatctgggagacggtaaaaagaacggttcagggtgggacgcggactctaaccgatcaggcagtggctggaacgatactacccgaagcggaaatagtggatggggaaatagtaccaataccaaagccaatccagggaccaactggggggaaactctcaagcccggtccgcagcagaactgggcgagcaagccccaggacaataacgtgagtaattggggcggtgcagcctcagtgaagcagactgggactggatggattgggggtccagtgcctgttaagcagaaggacagctcagaagctaccggctgggaggagccgagcccacctagtatccgcaggaaaatggaaattgacgacggtactagtgcatggggtgatccttccaactataacaataagactgtaaatatgtgggacaggaacaatcctgtgattcaatcctccactaccaccaatacgacaacgactactacgacaacaacatccaacactactcatcgggtcgagacccctccccctcatcaggctggtacccagctcaatcgcagtccactgctgggccctgtgagctcaggatggggcgagatgccaaacgtgcacagcaaaacagagaattcatggggcgaacccagttcacctagcactctggtcgacaacggcacagcagcctggggcaagcctccgtctagtggctctggatggggggaccatccagcagagccccctgtcgcctttggacgggctggtgcaccagtggcagcgagcgcgttgtgcaagcccgcatcaaagagtatgcaggagggctgggggtcaggcggagatgagatgaacctgtcaacatctcagtgggaggatgaggaaggcgacgtctggaataacgcagcctcccaagaatccacttctagttgtagctcctggggcaacgctcctaaaaagggcttacagaagggcatgaagacatcagggaaacaggatgaggcctggatcatgagccgccttattaaacagctgaccgacatggggtttcctcgagagccagcagaagaggcccttaaatccaataacatgaatctagatcaggccatgagcgcactcctggaaaagaaagtcgacgtggataagaggggcctgggagtgacagaccacaacggaatggccgctaagccactgggatgtcggcctccaatctccaaggagtcctctgtggaccggcctaccttcctcgacaaggacggcggactcgttgaggaaccaacccctagcccattcttgcctagtccaagtctcaagctgcccttaagccactccgcactgccatcccaggcattaggtggcatagccagcggccttgggatgcaaaatcttaattcctctcggcagatcccatcagggaatctgggcatgttcggcaatagtggggcagcccaggccaggactatgcagcagcctccgcagcctccggtgcaaccacttaacagcagtcagcccagcctgcgggctcaggttccacagttcttgtcgcctcaggtccaggcacaactgctgcagttcgcagcaaaaaacattggtctgaacccagcacttcttaccagtcctatcaatccacagcatatgacaatgctgaaccagctctaccagctccaattggcgtaccaaaggttacaaatccagcagcagatgctgcaggctcagcgtaacgtctcaggttctatgaggcagcaggagcagcaagttgccaggaccattacgaatcttcagcagcaaatccaacagcaccaaagacagctcgctcaggccctccttgtgaagcagcccccacctcctccaccccctccgcacctgagtttacatcctagcgcgggaaaatcggcaatggactccttcccctcccacccacagacccccggtctcccagacttacagaccaaggagcaacagagcagcccaaatactttcgctccttaccccctggccggattaaatccaaatatgaatgttaatagcatggatatgactgggggtctctctgtcaaagaccctagccaatcccagtcccggctgccccagtggactcatcctaacagcatggataaccttccctctgccgcttcccccttagagcagaatccatccaagcatggagccattccagggggtttgtcgattggacctcccggtaaaagctctatcgatgacagctacggcagatatgatctaattcagaatagcgaaagccccgcaagtcctcccgtggcggtgccccacagctggtcaagagccaagagtgattcagataagatttcgaatggtagttccatcaactggccaccagagtttcacccaggcgtaccttggaagggcctgcagaatattgaccctgagaatgacccagacgttactcccggtagcgtacccacaggaccaacaataaacacaacaatccaagacgttaaccgctatttgctcaaatccggtggctcctctccacctagctcacagaatgcaactctcccaagttcatctgcctggcctctgagcgcctcagggtacagcagctctttttcctctatcgcatctgcaccctcagtggctggaaagctcagtgacattaagtccacctggagctcggggccaacctcacacacacaagcgtcattgagtcacgaactttggaaggttccgcgaaattccactgctcccacaagacctcccccaggcttaaccaaccctaaaccttcttccacttggggcgctagtccactggggtggacctcttcctactcgtccgggagcgcctggagtaccgacacaagtgggaggacctcctcttggctagtcctgaggaacttaacacctcagatcgatggatctactctgagaacattgtgcttacagcacgggcctctgatcacattccatctcaacttgacccagggcaatgctgtcgtgagatacagctctaaggaggaggccgcaaaagcacagaagagcctacatatgtgcgtcttaggaaacactacaattctggccgaatttgccggtgaggaggaggtaaacagatttctggcccagggccaggctttaccccctacaagcagctggcagtcatcatctgccagcagccagcctaggttatccgccgctggctcctcacatggtctggtgaggagtgacgcgggacattggaacgctccctgcctgggtgggaagggatcttcagaactgctgtggggaggagtcccacagtactctagctctctgtggggaccgccatcagccgacgactcaagagttatcggttcgccaaccccactcaccactctgcttccaggtgacctgctctcaggagaatcattgta

SEQ ID NO: 244954 - DNA, 5180 bp, synthetic construct
  misc_feature 1..5180: note = Description of Artificial Sequence: Synthetic coding sequence
  source 1..5180: mol_type = other DNA
atggccactggctccgcccaagggaactttacaggacataccaaaaaaactaatggtaataacggaacaaatggggctttagtccagtcgccctctaatcagtccgccctgggagcaggaggcgcaaactctaacggaagcgcagccagagtgtggggcgttgcgaccggaagctcctccgggttggcacactgttcagtctctggcggagacggaaaaatggacactatgatcggggatggaagaagccagaactgctggggcgcaagtaattctaacgcaggcatcaatctgaacttgaacccaaacgccaacccagctgcctggcccgttctagggcatgaaggtacagtggctacgggaaacccgagtagtatctgctcccccgtgtctgcaatcggacaaaatatgggaaaccagaatggaaaccccacaggaacattgggagcttggggcaacctgctccctcaggagtctacagaacctcagacatcaaccagtcagaatgtgtcatttagtgcccaaccccagaacttaaatactgatggccctaacaatacaaatccaatgaactcaagcccgaacccgattaatgcaatgcagaccaacggcctgcctaattggggcatggctgtcggcatgggcgcaatcattcctccacacctgcagggtctgcccggagccaacgggtcatcggtgtcacaagtaagcggcggaagcgctgaaggcataagcaacagcgtgtggggactgtctcccggtaacccagctactggcaattccaacagcgggttttctcagggtaatggagatacagtaaatagcgctttaagtgccaagcagaatggcagctccagtgccgtacagaaggaaggttccgggggaaacgcctgggacagtgggccaccagctggtcctgggatcctcgcctggggaaggggctccggtaataacggagtcggtaatatacattctggcgcttggggccatccttcacgttccacctcgaacggagtgaacggcgagtggggaaagcccccaaaccaacactccaactcagatatcaatggcaagggctctaccggttgggaatcccccagtgtcacaagccagaacccgaccgtccagccgggaggtgagcatatgaacagctgggccaaggcagcttcttcaggcacaacagcctctgaggggtcctcagacggcagtggcaatcataatgagggcagtaccggtagggaggggaccggcgagggtcggaggagggacaaaggtataatcgatcaaggccatatccagttaccgcgaaatgacctcgacccccgtgtcctctctaatacagggtggggacagaccccggtcaaacaaaatactgcgtgggaatttgaagagtctcccagatccgagcggaagaacgataacggcacagaggcctggggctgtgcggcaacccaggccagcaactctgggggtaaaaacgacgggagcattatgaatagcacgaacaccagctccgtgtcaggctgggttaacgcgcctcctgccgctgtacctgcaaacaccgggtggggcgactccaacaacaaagctccgtctggcccaggtgtgtggggagactctattagctctactgctgtcagcacagccgctgctgccaaaagcggccacgcttggtccggcgcagcaaatcaggaggataaatcaccaacctggggggagccaccaaagcctaagtctcagcactggggcgatggtcagcgaagcaaccccgcttggtcagctggcggtggagactgggctgatagctcgtccgtcttagggcacctgggagatggtaaaaagaacgggtctggctgggatgccgatagtaaccgctccgggagtggttggaacgacaccacacgctctggtaatagtggctgggggaatagcactaacacaaaggccaatcccggtacgaattggggggaaacattaaaacctggcccacaacagaactgggcttcgaagcctcaagacaataacgtttcaaactggggaggagctgcctcggtgaagcagaccggaacagggtggatcgggggacccgtgccagtgaaacagaaagacagcagcgaagcaacaggatgggaagaaccaagccctcccagcattaggcggaaaatggagatcgacgatggaacttctgcctggggcgacccaagtaattacaataacaagacagtcaacatgtgggatcggaataatccagttattcagagcagtactactaccaacacaaccactaccaccacaactaccacttccaacacaacccacagggtggaaacaccaccccctcatcaggccggaactcagctgaacagatctcctcttctggggcctgtcagtagcggctggggtgagatgccaaacgtccacagcaaaactgaaaactcctggggtgagccatctagtccttcgactctggtggacaatggcactgccgcttggggcaagcccccaagttcaggaagtggatggggagatcatcctgcagagccacccgtggcattcggccgagcgggagctcctgtcgcggcatccgccctctgcaagcccgcaagtaaatccatgcaggagggctggggctcaggcggtgacgaaatgaatctctctacatcgcagtgggaggacgaggaaggagatgtatggaacaacgccgcttctcaggaaagcacttcttcttgttcttcatgggggaacgccccaaaaaaggggttgcagaagggaatgaaaaccagcggcaagcaggatgaggcctggatcatgagccgactgataaagcaattgacagacatgggatttcctagagagcccgcagaagaggctctgaagtccaacaatatgaatctggatcaggccatgtcagctctgctagagaagaaagtggacgtggataagcgcggactcggagtgacggaccataacggtatggccgctaaaccactgggctgtcgaccacccatttccaaggagagcagcgtggatcgcccaacgttcctggataaggacggaggacttgtggaggagcctacaccctcaccattcttaccctcaccctcgctcaaactacctctcagccacagtgctctgcctagtcaggccttaggcggaatcgcctccggactcgggatgcagaatctgaatagcagccgtcagatcccctcaggcaatctcggcatgttcggcaactccggtgcagcccaggcaagaaccatgcagcaaccaccacagcccccagtccagcccctcaacagctcccagccaagcctgagggcccaagtgccacagtttctaagcccccaggttcaggcccagttactacaattcgccgctaagaatatcggcttgaatcctgctcttcttaccagcccaatcaatcctcagcatatgacaatgctcaatcagctctatcagctccagctggcctatcagcgactccagattcagcagcagatgctgcaggctcaacgcaacgtgtccggcagcatgaggcagcaagaacagcaagttgccagaacaattaccaatctgcagcagcagatccagcagcaccagcggcagctcgctcaggcactcctggtgaaacagcccccaccacctccacctcctccacatctctcactacatcctagcgctggaaaatccgccatggactccttcccatctcatcctcagaccccaggcctgcccgatctacagacaaaagagcagcaatcatctcccaataccttcgctccctaccccctggccggattgaaccccaacatgaatgtcaacagtatggatatgaccggtggcctgtccgttaaagatccttcccagagccagagtcggctgcctcagtggactcaccctaattccatggacaatttaccctccgccgcatccccactggagcagaacccctcaaagcacggtgcaatccccggaggattatccattggtcctcctggaaagagtagcattgacgattcttacggcagatacgacctgattcagaacagcgagagcccagcttcaccccctgtagctgtgccccactcttggagccgagccaagtctgactcagataagatctccaatggatcatctatcaattggcccccagaatttcatcccggtgttccttggaaaggcctgcaaaatatcgacccagaaaacgatcccgatgtcactccagggagcgtcccaactggcccaaccatcaacacgacaatccaggacgtgaaccggtatctcttgaaatctggaggatcttcaccaccgtcctcgcagaacgctacgctgccatcatccagtgcctggccactgagtgcttctggttatagcagctcattctcttcgatcgcctcagctccttccgtagctgggaagctgtcggacataaagagtacctggtcctccggccctacatctcatactcaagcttcactgagtcatgagctgtggaaggtaccaagaaactctactgcacctactcggcctcctcccggtctcactaacccaaagccgagcagtacatggggcgcttcacccctcggatggacctcttcttactctagcggttcagcctggtcgaccgatacctctggcagaacttcaagctggctcgtccttagaaacctgacaccccagatcgatggatcgactctgagaactctatgccttcagcacggcccattaataaccttccaccttaaccttactcaggggaacgctgtggtgcgttattcttctaaagaggaggctgctaaggctcagaagtctctgcacatgtgtgttctaggcaacacaactatcctggccgagtttgccggtgaagaagaggtgaatagatttctcgcacagggacaagccctcccaccgaccagttcctggcagtcttcttcggcctcatcccagccacggcttagcgctgcaggcagctcccacggactcgtgaggtccgacgcgggacactggaatgcaccctgcctcggaggcaaggggagctctgagctattgtggggaggcgtccctcaatacagtagctcactatggggccctccgtctgcagacgactcccgcgtcatcggctccccaacacctcttacaactctgctgccgggtgacctgctctccggcgagagcctcta

SEQ ID NO: 244955 - DNA, 5073 bp, synthetic construct
  misc_feature 1..5073: note = Description of Artificial Sequence: Synthetic coding sequence
  source 1..5073: mol_type = other DNA
atggccacgggaagcgcccaaggaaacttcacaggtcacacaaaaaaaacaaatggcaacaatgggaccaacggcgcactagtccagagcccatcgaatcagagtgcattaggcgctggcggagccaactcaaatgggtctgctgccagagtctggggcgtggcaacagggtccagcagtggccttgcccactgcagcgtgtctggtggggacgggaaaatggataccatgattggcgatgggagaagtcagaattgctggggcgcttctaacagcaatgcgggtataaacttgaatctgaatcccaatgccaaccctgctgcctggcccgttcttggacacgagggaactgttgccactggtaatccctcatccatctgcagcccggtgtctgccatcggccaaaatatggggaaccagaacggcaaccccactggtacccttggggcttggggcaacctcttgccacaggagagcaccgagccccagactagcactagccagaacgtgtcgttcagcgcccaaccacagaacctgaacaccgatgggccaaacaacacaaacccaatgaattcttctccaaatccaatcaatgccatgcagactaatggattacccaactggggtatggcagttggtatgggtgcgattattccccctcatttgcagggcttgcctggggcaaacgggagttctgtgtcccaggtctctggtggatccgccgagggcatcagtaactccgtgtggggtctgtctcctggtaaccctgcaactggtaattcgaatagtggcttctcccagggtaacggggacacagtgaactcagcgttaagcgcgaagcagaatggaagctcttctgccgttcagaaggagggctccgggggtaatgcttgggattcaggccctcctgcgggtcccggtattctcgcgtggggtcggggttccgggaataatggcgtggggaacattcactctggcgcttggggacatcccagccgaagtacatcaaacggtgtgaacggtgagtggggaaagccccctaaccagcatagtaattctgacatcaatggtaaaggtagtaccggttgggagagccctagcgttacaagtcaaaatcccacagtgcagcctggaggagagcacatgaatagttgggccaaggccgctagttccggtacgacggcgtccgaaggctcctcggacggcagcggaaaccacaacgaggggagtacaggtcgcgagggaacaggagaaggtcggcgacgcgacaagggcatcatcgaccaaggccacatccagctccctagaaatgacctggatcccagggtccttagtaatactggctggggccaaacacccgttaagcagaacacagcctgggaatttgaagaaagccccaggtcagagcgaaaaaacgacaatgggaccgaggcatggggctgcgccgctacccaggcctcgaactctgggggaaagaacgatggtagcatcatgaattccaccaacacctcgagcgttagcggttgggtgaatgcgcctccagccgcagtgcccgctaacactggctggggcgactccaacaacaaggcgccaagcggaccgggagtttggggcgattctatctcatccacggcggtctcaaccgctgcggctgccaagagtggccacgcttggtcaggcgctgccaaccaggaagacaagagtcccacgtggggggagccgccaaagccaaagtctcagcactggggcgacgggcaaagatctaacccagcatggtcagccggaggaggggattgggctgattcctcttcagtgcttggtcacctaggcgacggcaaaaaaaacggttccggatgggacgccgatagcaataggtcgggttctgggtggaacgatactacccggtcaggtaattccggctggggtaactccaccaacactaaggcaaatccgggaacaaattggggggagacactgaaaccaggccctcagcagaattgggcctcgaagcctcaggataacaacgtcagtaattggggtggcgcagcatccgttaagcaaacaggaactgggtggattggcggaccagttcctgtgaagcaaaaagatagttccgaagcgactggctgggaagaaccctcccctccaagtatcaggaggaagatggaaattgatgacgggacctcggcttggggggatccctccaactataataataagacagtcaacatgtgggaccgcaataaccccgtgatacagagctctaccactaccaataccactactaccaccacaaccaccactagcaacaccacccatcgagtcgaaacccccccaccccaccaagctgggacccaattgaaccgatctcccttgctgggacctgggaggaaagtaagctctggatggggcgaaatgcctaacgttcactcgaaaaccgagaattcctggggggagccctcctccccttctacgctggtggataacgggactgccgcttgggggaagcccccaagctctggaagcggctggggtgaccaccctgccgagcccccagttgccttcggtagagcgggtgcaccggtagccgcttctgccctgtgcaagcccgcttcaaagtccatgcaggagggatgggggtctgggggagacgaaatgaacctcagtactagccagtgggaagacgaagagggcgatgtgtggaacaacgccgcttctcaagagagcacatcttcatgctctagttggggaaatgcccctaagaagggtctgcagaaaggcatgaagacaagcggcaaacaggatgaagcatggatcatgtcccgcctcatcaagcagctcaccgatatgggattcccgcgtgagccggctgaagaagcactaaagtcaaataacatgaatctggaccaggcaatgtctgcactcttggaaaaaaaagttgatgtcgacaaaaggggtttgggagtgactgatcacaacgggatggccgctaagcccctaggctgccggccaccgattagcaaggagagctcggtggaccgccctaccttcttagacaaggatggaggcctcgttgaagagcccacaccatcccccttcctgccttcgccatccttgaagctgcctctctctcacagcgcacttccatcacaggctctaggtggcattgcgagcggactcggaatgcagaacctcaattcatccagacaaattccaagtggaaacctcggcatgttcgggaactcaggagctgcccaagctagaacaatgcaacagcctcctcagccccctgtgcaaccacttaattcctctcagccctcactgcgcgctcaggttccccagtttctgagtccccaggtccaggcacagctgctgcagttcgccgcaaagaacatcggcctgaaccctgcccttctgacttctccaattaacccccagcatatgactatgctgaatcagctctatcagcttcagcttgcttaccaacggctgcagattcaacaacaaatgctgcaagcccagagaaacgtgagtggctccatgaggcaacaggagcagcaggtggctcggacgatcactaatctgcagcaacagattcagcagcatcagcgtcaactggcccaagcactgctggttaagcagcctcctcctccgccaccaccccctcacctaagtctacacccgtcagcgggaaaaagcgccatggattcctttccgtctcacccccagacccctggactccctgatctccagaccaaggaacagcaatcaagccctaacactttcgccccttaccctctggctggacttaatcctaacatgaacgtgaattccatggacatgaccggcggtctatctgtaaaggacccatcgcagtctcagtctaggctcccgcaatggacgcacccaaactctatggataacctgccgagcgctgcttctcccctggaacagaaccctagcaaacacggggctattcccggaggcctgtccattggcccaccaggtaaaagcagcatcgacgattcatacggtcgatacgatctcatccagaactccgagtcccctgctagtccacctgtggcagtgccacactcctggagtagggccaaatcagactccgacaaaatttccaatggcagttctatcaactggcctcctgaattccatcctggagtaccttggaaaggactccagaatattgatcccgaaaacgacccggacgtgacccctggatccgtgccgacagggcctacaattaatactaccatacaggacgtgaacaggtatctgctcaaaagcggtggcaaactctctgacatcaagtccacttggtccagtggtcccacatctcatactcaggcctcgctctctcacgagctgtggaaagtacctaggaactcgaccgcacctacccgtcccccacccggactcacaaaccccaaaccatcttctacctggggggctagcccactgggctggacgagttcctacagctccggttccgcctggagtacagacacttccggacgtacgtccagctggctggttctgcgtaaccttactccccaaattgacggctccaccctccgaaccctgtgtctgcaacacgggccactgattactttccaccttaaccttacacagggaaacgcagtagtgagatattccagcaaggaggaggccgcaaaggcccagaagagtctgcatatgtgtgtacttggaaacactacgatattagccgagtttgccggtgaggaagaagttaaccggttcttagcacagggacaagccttacccccaacaagctcctggcagagcagcagcgccagcagtcaaccacggttgagcgcggcaggaagcagccatggtttagtgcggagcgatgcaggccattggaatgccccttgcttgggcggtaaaggaagttctgaattgctgtggggcggtgtaccgcagtattcctccagcctctggggacctccatctgcagatgactccagagttatcggatccccaactccactcacgacactgcttccaggcgatcttctctcgggtgagtccctgtac

SEQ ID NO: 244956 - DNA, 5073 bp, synthetic construct
  misc_feature 1..5073: note = Description of Artificial Sequence: Synthetic coding sequence
  source 1..5073: mol_type = other DNA
atggctacaggaagcgcccagggcaatttcaccggtcataccaagaagactaatgggaataacggtaccaatggcgctctggtccagtctccttcaaatcagtcagccttaggagcaggtggtgccaactcaaacggcagcgcagctcgggtttggggggtggccaccggctccagttctggccttgcccattgctcagtgtctggcggagacggcaagatggataccatgattggcgatgggagatcccaaaattgttggggagcaagcaactcaaacgccggaattaacctcaatcttaaccccaatgcaaatccagcagcctggcccgttctcgggcacgagggcactgttgccactggaaatccctcatctatctgcagcccagtatctgccattgggcagaacatggggaaccagaacggcaatcctacgggaaccctcggcgcatgggggaatctgctcccccaggaatctactgagcctcagactagcacctcccagaatgtgtcgttctctgcacagcctcagaatttgaacacagacggacccaataatacaaaccctatgaactcctcacccaatcctatcaacgcaatgcagacaaatggtttacctaattgggggatggctgtgggtatgggggctattatcccaccccacctgcagggccttcctggcgctaatggtagctcagtctcacaagtctccggtgggagtgctgaggggattagtaatagcgtttgggggctgagtccaggaaatcccgctacaggtaacagcaactccggtttttctcagggtaatggagataccgttaattctgccctttctgctaagcagaatgggtctagttccgccgtgcagaaggagggctcaggcggaaacgcctgggattctggccctcccgcaggtcctgggatactcgcttggggacggggttccggcaataacggcgttggtaacattcatagtggcgcttggggtcatccttcccggtcaacttcaaatggggtgaacggcgagtggggcaagccgcctaaccaacactccaatagcgatatcaacggaaagggaagtaccggctgggagtccccatccgtgacaagtcagaacccgactgtgcagcccggaggtgagcatatgaactcatgggctaaggccgcttcctccggtaccaccgcctctgaggggtcatcggacgggtctggaaaccacaacgaaggtagcacgggccgtgaagggacaggcgaaggcagaaggagggataagggcattattgaccaggggcatatccagctgcctagaaatgacctggatccccgagtgctgagtaatacagggtggggccaaacacctgtcaaacagaatactgcatgggaattcgaagaaagtcccaggtctgagcgcaaaaacgataatggtactgaggcatggggctgcgctgctacacaggcctctaactcaggcggtaagaacgacggtagcatcatgaactcaacaaatacttccagcgtgtccggatgggtgaacgcccctccggcagctgttccagctaacactggttggggagattccaataacaaagccccatccgggcctggggtttggggagattccattagcagcaccgccgtgtctacagccgctgccgctaaaagcggtcatgcatggtccggcgctgccaatcaggaggacaaaagcccaacttggggggagccccctaaacccaaaagtcagcattggggagacggccagaggtcaaatccagcatggagtgcaggaggcggtgactgggcagattcatcatctgtgctggggcaccttggggatggcaaaaagaatggatcggggtgggacgccgattcgaatagaagtggctcaggctggaatgatacaacaagaagcggaaattcagggtggggtaatagtacaaataccaaggctaacccgggtaccaactggggggagacactgaagccgggacctcagcaaaactgggcatccaaacctcaggataacaacgtgtcaaactgggggggagccgcaagcgttaagcagaccggaaccggctggattggtggccctgtgcccgtaaagcagaaagacagttctgaagctaccggatgggaggagccgagtcctccttctattagacgcaagatggaaatcgacgacggcacctccgcctggggagacccctccaactacaacaacaaaactgtgaatatgtgggataggaataacccagtaattcagtcctctactacaacgaatactactaccacaaccacaacaacaacttctaataccacacaccgggtcgaaaccccaccccctcatcaggcagggacccaactcaatagatctcccttactgggcccaggcagaaaagtctccagcgggtggggagaaatgccaaacgtccattcgaaaaccgagaactcctggggagaaccatcgtccccttctacattggtagataatggcactgcagcttggggcaaacccccaagttccggttctgggtggggagaccaccctgccgaaccgcctgtcgctttcggcagggctggtgcccctgtcgccgcatcagccctgtgcaaaccagccagcaagtccatgcaggaagggtggggaagcggcggtgatgagatgaacttgtctaccagccaatgggaggacgaagagggagacgtgtggaataacgcagcgtcccaggagagcactagctcttgctcttcctggggaaacgctcccaagaagggactgcagaagggaatgaagacatcaggcaaacaggacgaggcctggatcatgtctcggctcataaaacagctaaccgatatggggttccctagggaacccgcagaagaggccctgaagtcgaacaatatgaatctcgaccaggctatgtccgctctcctggagaagaaagtcgatgtggacaaaagaggtctgggagtgaccgatcataatggcatggctgcaaagcctctggggtgtagaccacccatcagcaaagaatcgtctgtcgaccgcccaacctttttggataaagacggcggactcgttgaagagcccactccctcacccttcctcccttccccaagcctcaaactgccactatcccatagcgccctcccgagccaggccctgggagggatcgcttcaggattaggtatgcaaaaccttaacagcagccggcagattccatcggggaacctgggcatgttcggcaactcaggcgcagcacaggctcggaccatgcagcagcctccccagccgccagtccagccactcaactcttcacagccatctctgagagcccaggttccacaatttttaagccctcaagtccaagcccagctgttacagttcgccgctaagaacattggtcttaatcccgctctgctcacttctccgatcaacccgcagcacatgacgatgctgaatcagttataccagctgcagcttgcctatcagcgcctccagattcagcagcagatgctccaagcccagcgaaacgtaagtggaagtatgcgccagcaggagcagcaggtagccaggaccatcacaaacctgcagcagcagatccagcagcaccagcgccaacttgcacaagccctactcgtgaagcagccgccaccgccacccccacccccacacttgagcttacatccctctgctggaaagtccgcaatggatagctttccatcccacccacaaactccgggactgccggaccttcagactaaggaacagcagtccagtcccaataccttcgccccataccctcttgccggattgaatcctaacatgaacgtcaactcaatggatatgacagggggactctccgtgaaggatcctagccagtcccagtctagactcccacagtggacacatcctaactctatggataatctgccatccgccgctagtccgttagagcagaaccccagcaaacatggagcaatacccggaggactctcgatcgggcctcccggaaaaagttcgatcgacgactcctatggtcgatacgatcttattcagaattctgaaagccccgcaagtcccccagtggctgtcccacattcttggtcacgagctaaaagcgattcagataagataagtaacggcagctccataaattggccgccagagttccatccaggcgtgccctggaaaggtctgcaaaatatcgaccctgaaaacgatcccgacgttacccccggttctgtgcccactggccctacaatcaatacgaccatacaagacgtgaacaggtatttacttaagtctggcggaaaactgagcgacatcaaatctacttggtcctccggccctaccagccacacgcaggcgagcctgagccacgaattgtggaaggtgcccagaaatagtactgccccaacccgccctcccccaggcctgaccaatcctaagccaagttcaacatggggggcatccccgctgggctggacgagcagttattcgtcagggagtgcttggtcaaccgatactagtggccgtaccagcagctggctagtgctccgcaatctgaccccccagatagacggatctaccctgaggaccctgtgtctgcagcatggaccacttatcaccttccatttaaatcttactcagggcaacgcagtggtgcggtattcctcaaaagaagaggcggctaaggcccagaagagccttcatatgtgcgtgctaggcaataccaccatcctggcagagtttgctggggaagaagaggttaatagatttctggcgcagggccaggctctccctccaacctccagttggcagtctagctcggccagtagtcagcctcggctgtccgctgccggaagctctcatgggttggtgagaagcgacgctggacattggaacgcaccctgcctaggcggtaagggctctagcgaactcctgtgggggggagtcccccaatatagctcctctctctggggccctccaagcgccgatgattcccgggtcatcggtagtcctacccctttaaccacgctgttaccaggagatctgctcagcggcgagagcctctag

SEQ ID NO: 244957 - DNA, 5180 bp, synthetic construct
  misc_feature 1..5180: note = Description of Artificial Sequence: Synthetic coding sequence
  source 1..5180: mol_type = other DNA
atggctaccggctctgcccagggaaacttcaccggacacacaaagaagacgaatgggaacaacggcacaaatggcgcactcgttcagtcaccgtcaaaccagtcagccctgggagcgggtggcgcaaattcaaacggaagcgccgctcgagtttggggagtggctacgggttcctcttctggacttgcccactgctctgtaagcggcggagacgggaaaatggacacaatgattggcgacggtcgatcacagaattgttggggagcctcaaactctaatgcaggcataaacctgaatctgaacccaaatgccaatcccgctgcatggcccgtgctcggacacgagggtacagttgccaccggcaacccatcatcaatttgctcccctgtttcagcgattgggcagaacatgggaaatcagaatggcaacccaacaggaacactgggtgcatggggcaatttgttgccgcaggagtctacagagcctcagactagcacaagccagaatgtgtcattctctgcccagccgcagaatcttaataccgatggcccaaacaacaccaatcctatgaattcctcccccaatcccatcaatgctatgcagacaaacggcctccctaactggggaatggccgtgggcatgggggctattattccacctcatctgcagggcctgcccggtgccaacggatcctcagtctcccaagtaagcggaggcagtgcagagggtatttccaactcagtgtggggcctgagtccaggaaaccccgctaccgggaactctaattcaggattcagccagggtaacggagacacggtgaacagtgctctttccgctaaacagaatgggtcctctagcgcagtgcaaaaagaggggtcaggtgggaacgcttgggattccggccctccagccggacccggtatccttgcctggggcagagggtctggaaacaacggcgtggggaatatacacagcggcgcttgggggcacccctctaggtctacatccaatggtgtgaatggcgagtgggggaaaccacctaaccagcatagcaactcagacattaatggcaagggttccaccgggtgggagtctcctagtgttacaagtcaaaatccaacagtgcagccaggtggcgaacatatgaactcatgggcgaaggcggcatcatcagggactacagcgagtgaggggagctctgatggctccggaaaccataacgaggggtccactggtcgggaaggaacaggggagggcagaagacgcgataaagggatcatcgaccagggccacatccaactgcctcggaatgacttggaccctagggtcctgagcaacacaggatggggtcaaactcccgttaagcagaacaccgcatgggagtttgaggagagccccagaagcgagcgtaagaatgataatggcactgaggcatggggatgtgctgcaactcaagctagcaactcaggtggtaagaacgacggtagcatcatgaattccacaaacaccagttctgtgtctgggtgggtcaatgcccctccagccgctgtccctgcaaacacaggctggggcgacagtaacaataaggctccctccggaccaggagtctggggtgatagcatttcttctaccgcggtgagcaccgcagctgcggcaaaatctggccatgcatggagcggtgccgcaaaccaggaggataagtcccctacttggggcgaaccccctaagcctaaaagccagcactggggcgacggacagcgaagcaatcccgcatggtctgccggagggggtgattgggccgattccagcagcgttctgggtcatcttggagacggcaaaaagaacggctctggttgggatgccgactctaatcggagtgggtcaggctggaacgacaccacacgttctggtaattctggctggggcaattctaccaacaccaaagcaaatccaggaaccaactggggtgaaaccctgaaaccaggtcctcaacaaaactgggcctcgaagccccaggacaacaacgtgtccaactggggtggcgctgcttccgtgaaacagaccggtaccgggtggattggcggtccagtgcctgtcaagcagaaggatagctctgaagccaccgggtgggaggagccttcccccccttccatccgccgaaagatggagattgatgatggtacttcagcttggggggacccttctaactacaacaataaaactgttaatatgtgggacagaaacaaccctgtcattcagtcatccaccactaccaatacaactaccacaactactacgactaccagcaacaccacgcaccgcgtcgagactccgcctccccaccaagctgggacccagctcaatcgatcccctttactggggccagtatcctccggttggggcgaaatgcccaatgttcactctaagaccgagaattcctggggcgagccctcttccccctcgactctcgtcgataacggtaccgcagcttggggcaaacctccttcttctggaagcggatggggcgaccacccagccgagccaccagtggcttttggaagggccggagcccctgttgccgctagtgccttgtgtaagcctgctagcaaatccatgcaagagggttggggtagcggcggtgacgagatgaatctcagcacatcccagtgggaagacgaagaaggcgacgtgtggaacaacgccgcaagtcaggagtccacatccagttgctcttcgtggggtaacgccccaaagaaaggcttacagaagggcatgaagacgtccgggaagcaggatgaagcatggatcatgtctagactgatcaagcagttgaccgacatgggttttcccagagaacctgctgaagaggccctcaaatccaacaatatgaaccttgatcaggccatgtccgctctgctcgaaaaaaaggtggatgttgacaagcggggattgggtgtgaccgaccataatggtatggcagccaaacccctcggctgtaggccccctatctcaaaggagagcagtgtcgacagacctacatttttggataaggatggcggtcttgtagaggaaccaaccccaagtccatttctgccatcaccgtccctgaaactgccgctgtcccattcagcgcttccgtcccaggctttgggtggcatagccagtggactggggatgcaaaatttaaacagctctcggcagataccctcaggcaatcttgggatgtttgggaattccggcgctgctcaggcaagaactatgcagcagcctccacagccacccgtacagccacttaattcttcccagccttccctgcgagcccaggtgccgcagttcctgtcgccccaggttcaagcgcagttgttgcagtttgccgctaaaaatatcggtcttaatcccgctctgctgacttcccccatcaacccccaacacatgaccatgctcaaccaactgtatcagctgcagttagcctaccagcggctgcagatccagcagcaaatgctccaggcccagcgcaacgtctctggttccatgcgccaacaggaacagcaagtggcccgtacgatcactaatcttcagcaacagatccagcagcaccaacgacagctggcgcaggcattactggtgaagcagccacctccccctccacccccaccgcacctgagtctgcacccatcggccggaaaatctgccatggacagctttccttcccatcctcagaccccaggacttcctgacctgcaaaccaaagaacaacagtccagccctaataccttcgcaccctacccccttgccggactcaaccccaacatgaacgttaatagcatggacatgaccggcggtctatccgtcaaagacccttcccaaagccaatctagactccctcaatggactcatcccaattctatggacaacctcccatccgctgccagcccgctagagcagaacccgtccaaacacggcgctatccctgggggtctctcaatcggccctcccggaaagagtagcatcgacgacagttacggcaggtatgatctcattcaaaacagtgaaagcccagcgagcccccctgtggccgtgccacattcatggtccagggccaagagtgactccgataagatctctaacggaagtagcatcaactggcctccggaatttcaccccggagttccctggaaaggactgcagaacattgatcctgagaacgatcccgatgtcacacctgggtccgttcctactggcccaacgattaatactaccatacaagacgtgaacagatatctgctgaagagtggcggaagctctcctccttcatcccagaatgctaccctgcctagttcatctgcatggcccttatccgcgtctggctatagcagctccttttcgtccatcgcgtccgcgcctagtgtcgccggaaaattgagcgatattaagagcacctggtcatcaggacctacgtcccacactcaggcatccctgtcacatgaactgtggaaagttcccagaaattccacagccccaactaggcccccacctggactgaccaaccccaagccgtcaagcacgtggggtgcctctccgcttgggtggacgtcaagctactcctccgggagcgcctggtcgaccgatacttcggggagaacttctagctggctggtcctgagaaatctaacaccacaaatagacggcagcacgcttaggaccctgtgtctgcaacacgggcctctcatcaccttccacttgaatctcacgcaaggcaatgcggtggtgaggtatagcagcaaggaggaggccgctaaggctcagaagtccttgcacatgtgcgtcctgggaaacaccactatattggccgaatttgccggagaggaagaggtgaatagatttctggcgcaggggcaggcgttgcccccaacttcctcatggcaaagttcttcagcctcaagccagcctagactctctgcagcaggaagtagtcatggtctggtgaggagcgatgctggccattggaacgccccttgccttgggggaaaaggctcatcagagctgctgtgggggggagttcctcagtacagcagctctctatgggggcctcccagcgccgacgattctcgggtcatcgggtctccaaccccgcttaccacactactgcctggcgatctgctgtctggggaatctttata

SEQ ID NO: 244958 - DNA, 1959 bp, synthetic construct
  misc_feature 1..1959: note = Description of Artificial Sequence: Synthetic coding sequence
  source 1..1959: mol_type = other DNA
atgggcggatggaagggcccaggccagcgacgcggtaaggagggcccagaggcacggagaagggctgcggaacgtgggggaggcggaggtggaggaggtgttcctgcgcctaggagccctgctcgcgaacccaggcctaggagctgtctgcttctcccaccgccttggggtgccgctatgactcccgacctgttgaatttcaaaaaagggtggatgtccatccttgacgagcctggcgaaccacccagccctagcctgaccaccacgagcacttcacagtggaagaaacactggttcgtgctcacagattctagtctaaagtactaccgcgactcgaccgcagaagaggccgacgagttggacggcgaaatcgacctgcgttcttgtacggatgtcacggagtacgctgttcaaagaaattatgggttccagattcacaccaaggatgccgtttacaccctctccgcaatgactagtggtataaggcggaattggatagaagcgttacgtaaaactgtccggcctacatctgcacccgacgtaacgaagctgtctgattccaacaaagaaaacgcgttacattcctactcaacccaaaaaggccctctgaaagccggtgaacagagagccggatctgaggtgatttcacggggtgggccacgcaaggctgatggccaacgccaggccctggattatgtggagctgtctcccctcacccaagcaagtcctcagcgggctcggaccccggctaggacacctgaccggctcgcaaaacaggaggagctagaacgagacctcgcacagcggtcagaagagaggagaaagtggtttgaggcaacagattctagaactccagaggttccagccggtgaggggcctaggcgtgggcttggagcaccccttacagaggaccagcaaaaccgactgtccgaggaaatcgagaaaaagtggcaggaactcgagaagttgcccctccgagaaaataaaagggttcccctgacagctctgctgaaccagtctaggggggaaagaaggggtcctccatccgacggacacgaggcgctggagaaggaagtccaggcactcagggcccaactggaagcatggcgactccagggggaagctcctcagtcggccttgcgttcacaggaggacggccatataccccctggatacatttcacaggaggcttgcgagaggagtctggccgaaatggaatctagccaccagcaggttatggaggagctgcaacgccaccatgagagagaacttcagcgactacagcaggaaaaagagtggttgctggcagaggagacggccgctactgcgtctgccatcgaagcgatgaaaaaggcgtatcaggaggagctgtcccgagagctcagcaaaaccaggagcctgcagcagggcccagatggtctcaggaaacaacatcagtctgatgtggaagcactcaagcgcgagctgcaagtgctaagcgagcagtactcacagaagtgccttgagatcggagctctgatgaggcaagctgaggagcgggagcacactctccgaagatgtcagcaggagggacaggagttacttagacacaaccaagaactccacgggaggctgtcggaggagatagaccagttgagaggtttcattgcgtcccaggggatggggaatggatgcggcagatctaatgaacggtcctcctgcgaattggaggttcttctgagggtgaaagagaacgaactccaatatctcaagaaagaggttcagtgtctcagagacgagttgcagatgatgcagaaagataagaggttcacaagcggcaaatatcaggacgtctacgtagaattgtcccatatcaaaacccgttcagaaagggagattgagcagttgaaagagcatttgcgcctggcgatggcggctctgcaagaaaaagaatctatgcgaaattccctggcggagtag

SEQ ID NO: 244959 - DNA, 7097 bp, synthetic construct
  misc_feature 1..7097: note = Description of Artificial Sequence: Synthetic coding sequence
  source 1..7097: mol_type = other DNA
atggaagaggtgccaggcgatgcactttgcgagcacttcgaagctaatatacttactcagaatcgatgccagaactgctttcaccctgaagaggctcacggggctcgctaccaagagctgcgttcaccgagtggtgctgaggtgccctactgcgatcttccgcgatgcccgcctgcacccgaggatcctctctccgcttccacctcaggatgccagtccgtggtagacccaggtctgagacccggacctaagcgcggaccttcacccagcgcaggtctccctgaggagggcccaaccgctgctccaaggtctaggagtcgggaactggaggccgtaccctacttagaagggttgaccacaagtctgtgtgggtcatgcaatgaggacccgggaagcgacccaacgtcttctcccgactccgctacccccgatgacacatctaatagctccagtgtcgattgggacactgtggagagacaggaggaggaagcaccctcctgggacgaactggccgtcatgattcctagaagacctcgggaaggcccaagagccgatagctctcaaagagccccttctctgctcacccgctccccagtcggcggagacgcagcgggtcagaagaaggaagacaccggcggtggcggtagatccgcagggcagcactgggccagacttagaggggagagcggcctgagcctggagcgacacagatcaacactgacacaggcctcttcgatgaccccgcactctgggccacggtcaactacctctcaggcttcccctgcgcagcgcgacactgcccaggcagctagcaccagagaaataccacgcgcaagctccccgcacagaataacccagagagacacgagtagggcatcctctacgcagcaggaaatatccagagcaagcagcactcaacaggaaacttcccgcgcatcctccactcaggaggacacacctagggcctcatctacgcaagaggacacaccacgcgcatcatccactcagtggaatacacctagggcctctagcccctcacgctccacccaactcgataacccaagaaccagcagcacacagcaggacaatccacagaccagtttcccaacgtgcacgccccagcgtgagaaccctcggacaccatgcgtgcagcaagatgaccccagggcctctagtcccaacaggactactcagagagagaactctcgcaccagctgcgctcagagggataacccgaaagctagccggacgtcttcccctaatagagctactcgtgacaacccgaggacctcttgcgcgcagagggacaacccgcgtgcaagctctccctcacgcgcaacacgggataaccctaccacatcttgcgcccagcgagacaaccccagagctagcagaacctcgagccccaaccgcgcaacccgggataatccaagaaccagttgcgctcagcgggacaaccctcgagcctcgagcccctcacgcgcaaccagagataatcccacgactagctgtgcacagcgcgataacccgagagccagcagaactagtagtcccaacagagctacacgcgataacccacgcacgtcctgtgctcagagagataatcctcgagctagctctcctaatagggctgccagagataatccgactacatcctgcgctcagcgtgacaaccctcgggcaagccggacgtcttcccctaacagagcaacgagggacaatccccgaaccagctgtgctcagcgtgataacccgcgagccagttcacctaaccgagcaacaagggataaccctaccacgagttgtgcccaaagggataacccacgggcatccagaacatcaagcccaaacagagcaaccagagataatcccagaacctcctgtgctcagcgggacaacccccgagcttccagccctaaccgcaccactcagcaggactctcctagaacatcttgcgctcgccgtgacgacccgcgagcctcatctccgaacaggacgatacagcaggagaatcctcgtacttcctgcgctctcagagataaccccagggcttccagtccatccagaacgatccagcaagaaaatcctaggacgtcctgtgcccagagagacgatcctagagcctcatccccaaacagaacgacacagcaggagaatcccagaacctcttgcgcccgtcgcgataatccgagggcctcttcacggaatcgcaccatccaacgagataatccgcgtacctcttgcgcacagagagataacccaagggctagttcccctaaccggacaatccagcaggaaaatcttaggactagttgcacacgtcaagataatcccaggacatccagcccaaacagagcaactcgcgacaaccctcgaacgtcatgtgcccaaagagacaacctgagggcatcctcacccattagagcaacccagcaggataaccctcgcacatgtatccagcagaatatcccccgttcctctagcacccagcaagataaccctaaaacaagttgtaccaaacgggataatctgcggccaacgtgcactcaacgtgatcgaactcagagctttagctttcagagagacaatcctggaacctcttcctcacagtgctgcacacaaaaggaaaatctccgtccttcctctcctcaccgcagcacccagtggaataatccacgaaacagtagtccacacaggactaacaaggacataccatgggcatcatttccattgagacctacacagagcgatggcccacggaccagttccccatcacgcagtaagcagagcgaagttccatgggcatcaattgcactgaggccaacgcagggagaccgaccgcagacttcctctccatctagacccgcacagcacgatccaccacagagctcctttgggccaacccagtacaacctcccttccagggcgactagctcttcccataatcctgggcaccagagcacctcccggaccagctctccggtctaccctgccgcttatggcgctccactgactagcccggaacctagccagcccccttgtgccgtctgtattggacacagggatgctccacgggcatcctcaccaccgagatacctgcaacacgatcccttcccctttttccctgaacctcgagcccctgaaagtgagccacctcaccacgaacctccttacatcccacccgctgtgtgcattggccacagggatgctccaagagcatcttcccctcctaggcatactcagttcgacccattcccctttctgcctgatacctctgatgccgaacatcagtgccagtctccccagcacgagccactgcagctgccggctcctgtttgcattggttacagggatgccccacgggcatcgtcacctccccgtcaggcaccggagccatcactgctgtttcaagacctcccacgagccagcacagaaagtcttgtgccgtctatggatagcctccacgagtgccctcacataccaactccagtttgcatcggccatagagacgcacccagtttttcatccccccctaggcaggcccctgaaccgtcattatttttccaggaccctcccggaacatccatggaatctctggccccaagtaccgacagcctgcacgggtctcccgtgttaatcccacaggtatgcattggccaccgagatgcccctagggcctcgtccccacccaggcatcccccttctgatttggctttcctcgcaccgagtcccagtcccggatccagcggcggaagtaggggctccgcccctcccggtgaaaccaggcacaacctggaacgtgaggagtacaccgtgttagcagatctgccgccacccagacgacttgcccagcggcaacctggaccgcaggcccagtgcagctctggcggtagaactcattcccctggaagagcggaggtcgaaaggctgttcggacaagaaagacgcaaatccgaggctgccggagccttccaggcccaggatgaggggagaagtcagcagccgtcccaaggacagtcacagcttctgaggcgccaatcctcacccgctccttcccgccaagtcactatgctcccagccaaacaagcagaattgacgcgcaggtctcaagccgagcccccacatccctggagcccggaaaaaagacccgaaggggacaggcagctacagggctctccgttgcccccaaggacttccgcaaggactcctgaacgggaactgcggacacagcgtcctctggagtctggccaggctggacccagacagccacttggagtgtggcagtcccaagaggagccacccggatctcagggaccccatagacacctagagagatcttggagcagccaggagggcggactggggccagggggttggtgggggtgtggggagccaagtctcggagcagctaaagctcctgagggagcctggggcggaacttctagagaatacaaggagtcatggggccagcccgaggcctgggaagaaaaacccacccacgagttacctagagaactgggcaagcgcagcccgctgacgagtcctcctgagaattgggggggaccagccgaatcttcacagagttggcactcaggaacaccgactgcggtgggctggggcgctgagggcgcatgcccctaccctcggggatccgagcggcgtcccgaattggactggagggacctcttaggcctgttaagggcgcctggagagggagtttgggctcgggttccaagtcttgactgggaaggcctgttagagcttctgcaagctcggttgccaagaaaagatcctgccggacacagggatgatctggccagggcgctggggcctgaactcgggcctcccggaactaatgatgtccccgagcaagaaagccactctcagcctgaggggtgggctgaagcaacccccgtcaacggccatagtcctgccctacagtctcagtccccagtgcaactgccatcccccgcttgtacatccactcagtggccaaagattaaagtcacccgcggacctgccaccgccacactggccggactggaacagacaggccctctcgggagcaggtccaccgctaaaggcccatctctgccagagctgcagtttcagcccgaagaacccgaagagtccgaaccgagcaggggacaggatcctctcacagaccagaagcaggccgattctgccgataagaggcccgctgaaggcaaagccggatccccccttaagggtcggctggtgacctcatggcggatgcctggggaccggcctactttgtttaatcctttcttgctttccctgggggtgctgagatggagacgcccagatttgctcaacttcaagaaaggatggatgtcaatcctcgacgaacccggagagccgccaagcccttcactcacaactacatccacttcccagtggaaaaagcattggttcgtcctcactgactcatcccttaagtattaccgagatagcaccgcagaagaagccgacgaacttgatggcgagatcgacttgaggtcttgtacagatgttactgaatacgcagtgcagcggaattacggcttccagattcatacgaaggacgctgtttacacactgtctgccatgaccagtgggattcggaggaattggattgaagcgctgaggaagacagtccgaccaacctctgcaccagatgtgaccaagctgtccgattcgaataaggagaacgccctgcacagttacagtactcaaaaaggcccactgaaggcaggtgaacagcgggctggcagtgaggtcatctcaaggggaggcccacggaaggcggatggccagcggcaggctctggactatgtggagctgagtcctctgactcaggccagtccccaacgcgctaggactcctgcgcgaacacccgatcgcctagcgaagcaggaagaactcgaacgcgacctggctcagcgttcagaggagcggagaaaatggttcgaggcaacagacagcagaactcccgaggtgccggctggagaggggccaagacgaggacttggagctccactcaccgaagatcagcagaaccgcctgagcgaggagatagagaagaaatggcaagaactggagaagctgccactgagagagaataaacgtgtgcccctcactgctctcctgaatcagtcacggggagaacgcagagggccaccttcggatgggcacgaagcactcgagaaggaagtacaggcccttagagcccagctagaggcatggcggctgcagggggaggctccacagtccgccctgaggtcacaggaggacggtcatattccgccagggtatattagccaggaggcgtgcgaaaggtcccttgccgagatggaatctagccaccagcaggtgatggaagagttgcagcgccaccatgagcgcgaactgcaaagattgcagcaggaaaaagaatggctcctcgccgaagaaactgccgcaaccgccagcgctattgaagctatgaagaaggcgtatcaggaggagctgtctcgagaactgagtaagaccaggtcacttcagcagggccctgatggactccggaaacagcaccagtccgatgtcgaggctctgaaaagagagctgcaggttctgagcgaacagtatagtcagaagtgtctggagatcggcgcactcatgcgacaggcggaggagcgggagcacaccctgcggagatgccagcaggaaggccaggaactgctcagacataaccaagagctacacggccgactgtcagaagagatcgaccagctccgcggtttcatagcctcccagggcatgggaaacggatgcggaaggtccaatgagcggtcatcttgtgagctggaggtgttactcagggtcaaggagaatgagctccagtacctgaaaaaggaagtgcagtgtcttagagatgagctgcaaatgatgcagaaggacaagcgtttcacatccggcaaatatcaggatgtctatgtggagctgtctcatatcaagacccgctccgagcgtgagattgaacagctcaaagagcatctgcgtctcgcaatggccgctcttcaagaaaaagaaagcatgcggaactccctcgcagagta

SEQ ID NO: 244960 - DNA, 1296 bp, synthetic construct
  misc_feature 1..1296: note = Description of Artificial Sequence: Synthetic coding sequence
  source 1..1296: mol_type = other DNA
atgggtggctggaaagggcctggacaacggcgaggtaaagaaggacccgaggctcgccgacgggcagcggagcgcggtggcggtggcggaggtggtggagtgccagccccaagatctcccgcaagggagcctaggccgcgaagctgtcttctgctcccgcctccttggggtgcagctatgacacccgacctgctgaactttaaaaaaggatggatgtcgattctggacgaaccaggggagcctccctctccgagtctgacaacgacctccacatcccagtggaagaaacactggtttgtgctcaccgattcctcactgaagtactatagggactccacagctgaggaggcagacgagctagatggggagatcgatctgaggtcatgcacagacgtgactgaatatgctgttcagcgcaattacgggttccagattcacacaaaggatgcggtctacactctgtccgcgatgacttcggggattagacgcaactggattgaagctcttcggaaaacagtccggcctacctcggcaccggatgtcacgaagctctcagacagcaacaaggagaatgccttgcactcatactccacacaaaaaggaccactcaaagcaggggagcagagagccggatcagaggtgatatccaggggaggaccaaggaaggctgatggacaaagacaagccctggactatgtcgaactctccccgcttacacaggcctccccccagagggccaggacacccgcacggactcctgatcggcttgcgaagcaggaggagctggagcgggacctagctcaaagaagcgaggaacgtcgcaaatggtttgaggccacagactcccgaacccctgaagtgcccgctggcgaaggacccagaagagggctcggcgctccgctgacggaagaccaacagaataggctgagtgaagagatcgaaaaaaagtggcaagaactcgaaaagttgccccttagagaaaacaaaagagtaccactgacagccctgttgaaccagtcacggggagagagaagggggccacctagcgatggacacgaggcactggagaaagaggttcaagctctgcgggcacaactggaagcatggcgattacagggcgaggcccctcagagcgctctaagaagccaagaggacgggcatattccacccggatatattagccagctggtgggcgtgatcacagttccagtcctccagacgagacctttatcatccgagcgattatgtgacttgcctaaggttaccccccctgccggactgaaggggggaatctag

SEQ ID NO: 244961 - DNA, 5070 bp, synthetic construct
  misc_feature 1..5070: note = Description of Artificial Sequence: Synthetic coding sequence
  source 1..5070: mol_type = other DNA
atggaagaggtaccaggcgatgccctgtgcgagcatttcgaagcgaacatacttacccaaaatcgctgtcaaaattgctttcacccggaagaagcgcacggagctcggtatcaggagctgcgtagcccctctggggctgaggtgccttactgtgacttgccacgatgtccccctgctcctgaggacccgcttagtgccagcacaagcggctgtcagtccgttgtcgacccgggactcagacccggtccaaagagaggcccaagtccaagcgctgggttgcctgaggagggtcctaccgccgcacctcgatcccgcagcagggagcttgaagctgtcccctatctggaaggactgactacgtctctgtgcggatcatgcaacgaagaccccggttctgatcccaccagctcccccgatagtgccacccctgacgatacctctaattcatccagtgtggactgggacaccgtggagcgccaagaggaggaggccccaagctgggacgagctcgctgtcatgatacccagaagaccacgggaggggccaagggccgacagtagccagcgcgcaccgtccctcctcactcgctccccagtaggcggtgacgccgctggacagaaaaaagaagataccggcggagggggtcgatcggcaggccaacattgggcaaggctcagaggcgagtcgggcctttcactagagaggcacaggagtaccctgacacaggcaagttcaatgacaccccactctggccctcgctctactacctcccaggcctcgccggctcagagggacactgcgcaagctgcttccactcgggaaatacctagggccagcagcccccacaggataactcagcgggacacttcgcgagcttcttctactcagcaggagatatctcgcgcttctagcactcagcaggagacaagtagggcctcctcaactcaagaggacactccccgagcctccagtacacaagaggatacccccagggcctcctcaactcaatggaatacaccacgcgcatcgtcacccagcagatctacccagctggataatccacggacatcttccactcaacaggacaacccccagacttcattcccgacctgtaccccgcaacgggagaaccctcgcaccccctgtgttcagcaggacgaccctcgcgcttcctcacccaatcgcacaacccagcgggagaacagccggacgtcatgtgcacagcgagataacccgaaggcgagccggacctctagtcccaatcgggcaacacgggacaatcctcggactagctgcgcccagcgtgacaatcccagggctagctctccaagcagggccacaagagacaaccctaccacaagttgtgcccaaagagacaatccacgagcttctaggacgagctcccccaacagggctacacgcgataatcccaggacatcgtgcgcgcagagagacaatccccgtgccagtagcccttccagggcgacacgcgacaacccgaccaccagctgtgcccagagagacaaccccagagcctctagaacaagttcgcctaaccgagccacccgggacaaccctagaactagttgcgcccagcgagataatccacgagcttcatcacccaacagggccgctagagacaatccaacaacttcatgcgcacaacgggacaaccctcgcgctagccgaactagctcgccaaaccgcgcaaccagggacaacccacggactagctgcgcacagagagacaacccacgagcttcttccccaaatcgagctacacgagacaaccccacaacctcctgcgcccagcgtgataacccccgtgcaagtcggacatcatcaccaaaccgggctacccgggacaacccaaggacgagctgcgcacagagagacaacccgagggccagcagcccaaacagaacaacccaacaagattccccgcgtactagttgcgccaggagggacgaccctcgcgctagttctcccaacaggactatacaacaggagaaccctagaacctcttgtgcgctgagagacaaccccagagcatcatcccccagccgaaccattcagcaggaaaatcctaggaccagctgcgcccaaagggacgatccacgggctagctcccctaacagaacgacgcagcaggagaatcccaggacatcatgtgctaggagggataatcctagagcctccagcagaaatagaacaattcaacgcgacaatcctcgaacgtcttgtgcccaacgtgacaatccaagagcgtcctcacctaatcgcacaatccagcaggagaaccttcgcactagctgcactaggcaagataatccgcgtacctcatcacccaacagggctacccgcgataacccacgcacaagttgcgcacaaagggacaacctcagagcaagttcgccaattcgagctacgcagcaggataaccctagaacctgtatccagcagaacattccaaggagcagtagcactcagcaggacaatcctaaaactagttgcacaaagcgagataacctgaggccaacatgcactcagagagatcgcacgcagtctttctcatttcagcgcgataatccgggaacctcttcaagccagtgttgtactcagaaagagaatcttcgtccatcctcgcctcaccggtcaacacagtggaacaaccccagaaattcttcaccccaccgtacaaacaaagatatcccgtgggcgtcctttcctcttcgccctactcagtcagatggtcctcgaaccagttcaccatctcgatccaagcagagcgaagtcccttgggcgtcaatcgccctccgtcccactcagggcgacaggccccagacatctagcccttctagaccagcccagcacgatccccctcagtcttctttcggaccaactcagtataacctaccttcacgagcaacttccagctcccacaatcccggtcatcagagcacgagtcgtacctcgagccctgtgtacccagctgcctatggcgcacccctgaccagcccagaaccctcccagcctccttgcgccgtctgtattggacaccgggatgcccctcgcgcatcgtcacctccaaggtacctccaacacgaccctttcccatttttccccgaacccagagcccctgagagtgagccaccccaccacgagcctccctacattccccctgccgtgtgcatcggtcaccgcgatgctcctagagcatcttcaccccctcgccacacgcaattcgacccgtttccgttcctgcccgacacaagcgacgccgaacaccagtgccaaagtccccagcacgagcccctgcagctccctgcaccagtgtgcattggctaccgcgatgctcctagggctagctcaccccctaggcaggccccagagcccagcctgctcttccaagacctgccaagagctagcactgagtccctggtcccgagcatggattccctacacgaatgtccccacattccgacgcccgtgtgcattgggcacagagacgcaccttccttctcctctccacctcgccaggcccctgaacctagcctctttttccaggatccccctggtacaagcatggagagtctggctccttcgaccgatagccttcacggctctcccgtgttaattcctcaggtgtgtattggacaccgggacgcacccagagcgtctagtcctccacgacatcccccttccgatttagccttcttagcccctagtccgtctcctgggtcaagcggcggaagcagagggtcagctcctcctggtgaaacccgacacaatctcgaacgggaggagtatactgtgctcgcggatcttccaccacctcgtcgattggcccagcgccaacccggtcctcaggcccagtgtagcagcggtggaagaacacatagcccaggacgtgccgaagtcgaacgactatttggacaggagagaaggaccatgctgcccgctaagcaggctgagctcacacggcgatcgcaagccgaaccgcctcatccctggagccccgaaaaaagaccagagggagatcggcagctgcaggggagcccattgcctccccgaacctctgccagaactcctgagcgagagctgcggacccagcgtccactcgagagcggtcaggcaggccctcgccaacctcttggagtctggcagtcacaggaagaacccccaggatctcaggggccacatcgccacctggagagatcttggtcctcccaagaaggtggcttggggccaggtgggtggtggggctgtggcgaaccaagtctgggtgctgccaaagcccctgaaggcgcatggggaggcacaagccgggagtacaaggagtcgtggggccaacctgaggcctgggaggagaagccgacacacgagcttccaagagagcttggtaaacgatcccccttaaccagcccacccgaaaactgggggggaccagctgagtcctctcagagctggcactcaggtacccctacagcagtgggatggggtgcagaaggcgcatgcccatacccacgtggatcggaaaggcgccctgagctcgattggagggatctcttaggactcctgcgggcaccaggcgaaggagtgtgggcaagggtgcctagtctcgactgggagggcctgttagaacttctgcaggctcggctccccaggaaggatccagcaggacacagagatgatcttgcacgcgctttggggcctgagctgggacccccaggcacaaacgacgtgcctgaacaagagtcccacagtcagccagagggatgggccgaggcaactcccgtaaacggacacagccctgctctccagtctcagagccccgtgcagctgcccagcccagcatgcacatccacccagtggcccaagataaaggtgactagaggaccggctaccgccacgctggctggactcgagcagactgggcctttgggaagtcgatctactgccaaaggaccctctttacctgagttgcagtttcagcctgaggagcccgaggagagcgaacctagcaggggccaggaccccctgaccgaccagaagcaagcagactcctag

SEQ ID NO: 244962 - DNA, 771 bp, synthetic construct
  misc_feature 1..771: note = Description of Artificial Sequence: Synthetic coding sequence
  source 1..771: mol_type = other DNA
atgtccatactcgatgagcccggagagcctccgagccccagcctcacaactacatcaactagtcagtggaagaagcattggtttgtactcactgacagttctcttaagtactaccgcgactctaccgctgaggaggcagacgagctggacggcgagatcgatctaaggtcctgcacagatgttaccgagtatgcagtccagaggaattacggcttccagatccacacgaaagacgccgtatacaccctgagtgctatgacttctgggatccgtcgaaattggattgaggccctacgaaagaccgtccgtccgacctcagccccagatgtcactaagctgagtgatagcaacaaggagaatgctctccattcatattcgacccagaagggcccactaaaggccggagagcagcgcgcaggttccgaagtgatttcccgtggcggtccacgaaaagcagatggccaacgacaagcactcgattatgtagagctgagtcccctgacacaggctagtccccagagggcacgtacgcctgctaggacacccgatcggttagctaaacaggaggagctcgaacgcgatctggcacagaggtccgaggagagaaggaaatggtttgaggccaccgacagtcgaacacctgaagttccagcgggagaggggccacggagagggctgggcgcaccacttactgaggaccaacagaatcgtctatctgaagagatagaaaaaaaatggcaagaactggagaagctcccactgagagagtag

SEQ ID NO: 244963 - DNA, 252 bp, synthetic construct
  misc_feature 1..252: note = Description of Artificial Sequence: Synthetic coding sequence
  source 1..252: mol_type = other DNA
atgtcaatcctggacgagccgggagagcccccttctccttctctgactacaacgtctacctcccagtggaagaaacactggttcgtcctaaccgacagtagtctcaagtactatcgcgatagtactgccgaggaggcggacgaattagacggtgagatcgaccttaggtcctgtacagacgtaacggaatatgccgtgcaaaggaactacggcttccagatccacaccaaagacgcagtatataccttgtag

SEQ ID NO: 244964 - DNA, 2577 bp, synthetic construct
  misc_feature 1..2577: note = Description of Artificial Sequence: Synthetic coding sequence
  source 1..2577: mol_type = other DNA
atggctgaactgagcgaagaagcactgcttagcgttctccccacaatccgggtacctaaggctggcgatagggtgcacaaagatgagtgtgctttttcgttcgatacacctgagtctgaaggcggtctgtatatctgcatgaacacgttcctcgggttcggcaagcagtacgtcgaaaggcactttaataaaaccgggcaaagggtctacttgcacctgcgccgaaccaggagacccaaagaggaggaccctgcaacgggcacaggggatcctcccagaaagaagcctacaaggctggcaataggagtggagggcggttttgacctgagtgaggaaaaattcgaactcgacgaagatgtcaagatcgtaattctcccagactatcttgagatcgctagagacgggctcggcggactcccggatatcgtccgcgatagagtcaccagcgctgttgaagctctgctgtccgcggactcagcgtccagaaagcaagaggtccaggcgtgggacggcgaagtgaggcaagtgtccaaacacgccttctccctgaaacagcttgataacccggcacgaatacccccatgtggctggaagtgctccaagtgcgacatgagagaaaatctgtggctgaatctgactgatggctcaatcctctgcggcaggagatacttcgatggctccggcggaaacaatcatgcggtggagcactaccgagaaacggggtatcctctggccgtgaagctgggcacaattacgcctgatggcgctgatgtctactcctatgacgaggacgacatggttcttgatcccagcctcgcagagcatctaagccactttggcatcgatatgctcaagatgcaaaagaccgataagaccatgaccgaattagaaattgacatgaatcagcgcatcggggaatgggagctcatccaggagtccggtgtcccccttaagcctctcttcgggcctggatatactgggattcggaacctcgggaattcctgttaccttaactctgttgtccaggttcttttctccatccccgactttcagcgaaaatatgtggataagctagaaaagatctttcagaatgctcccacagaccctacacaggactttagcacacaagtcgcgaagcttggccacgggttgctctcaggcgaatattcaaagcccgtgccagagtctggagatggcgagcgggtgcctgagcaaaaagaggttcaggacggcatagcacctagaatgttcaaagctcttatcggcaaagggcatcctgagttctctacaaaccgccagcaggacgcacaggagttctttttgcacctgatcaatatggtcgagcgaaattgcaggtcaagcgagaatccaaacgaagtattccggtttctggtggaagaaaagattaagtgcctggccaccgaaaaggtgaaatacacccagcgggtcgattatataatgcagctgccagtgccgatggatgctgccctcaacaaggaggaacttctcgaatacgaggagaaaaaacggcaggcagaggaggaaaaaatggcccttcccgagctggtgcgcgcacaggtaccgttctccagttgtctggaggcttatggcgcacctgagcaggtggacgatttctggtctaccgcattgcaggcaaaaagtgttgccgtgaaaacaacaaggtttgcctcattccccgactacctagtgatccaaattaagaaatttacctttggcctcgactgggtgcccaaaaagttggacgtttccatcgagatgccggaagaattggacatctcccagctgcgtggaaccggactgcaaccgggtgaggaggagctgcccgatatcgccccacctctagtcacccccgacgaacccaaaggctcattaggattttacgggaacgaagacgaggatagtttttgcagccctcattttagttctccaacctctcccatgcttgacgaaagtgtgataatccagcttgtagagatgggattcccgatggatgcttgcaggaaggctgtttactatacaggcaactcaggggcagaagccgctatgaattgggtaatgagccacatggacgatcccgatttcgccaatccattgatcctcccaggaagttcaggtcccggaagtacgagcgcagccgctgacccccctcctgaggactgcgtcaccaccatcgtttctatgggtttcagtagagaccaggcgctaaaggctctgagggccacaaacaacagtctagagcgtgcggtggactggattttcagccacattgacgatttggatgctgaagcagcaatggacatctccgaggggaggagcgccgctgacagcatcagtgagagtgtgcctgtcggacctaaagttcgtgatggacccggaaaatatcaactgtttgcttttatttcgcatatgggaacttcaacaatgtgcggccactatgtctgccatatcaaaaaggagggccgatgggtgatctacaacgatcaaaaggtctgcgccagcgagaagccccctaaggacctgggttatatttatttttatcagcgggtggcctcgtag

SEQ ID NO: 244965 - DNA, 750 bp, synthetic construct
  misc_feature 1..750: note = Description of Artificial Sequence: Synthetic coding sequence
  source 1..750: mol_type = other DNA
atggcaccgagcagaaagttttttgtagggggaaactggaagatgaatgggagaaagcagtctctaggtgaactgattggcactttaaacgcagctaaggtccccgcagacaccgaagtggtgtgcgcccctcctacagcctacatcgacttcgctcgtcagaaactagaccccaaaattgctgtcgctgcacagaactgctacaaagttaccaatggggcttttaccggagaaattagccctggaatgatcaaagattgtggcgctacctgggtcgtcttggggcattcagaaaggcgacacgtgttcggggagtccgacgagctcattggacagaaagtcgctcatgcactcgctgagggactcggcgtcatcgcctgtatcggagaaaagctcgacgagcgcgaggccggtataaccgagaaagtggtctttgaacagacgaaggtcatcgccgataacgtgaaagattggagtaaagtggtgttggcctacgagccggtgtgggccatcggaacgggtaagaccgccacacctcagcaggctcaagaggtgcacgagaagctcagaggctggctgaagtctaacgtgagcgatgctgttgctcaatcaacgcggatcatctacggcggatcagtgactggagcaacttgcaaggaactcgccagccagcctgacgtggacggctttctggtgggcggtgccagtcttaaacctgaattcgtagacattattaatgccaagcagtag

SEQ ID NO: 244966 - DNA, 504 bp, synthetic construct
  misc_feature 1..504: note = Description of Artificial Sequence: Synthetic coding sequence
  source 1..504: mol_type = other DNA
atgatcaaagactgcggtgcaacctgggtggtcttgggacattcagagcgccgacatgtgttcggcgagtccgatgaactcattggacagaaggtcgcccacgcactggctgaggggctaggagtgattgcatgtattggcgagaaacttgacgaacgtgaggccggaattacagagaaagttgtgttcgagcagaccaaagtcatcgcagacaacgttaaagattggagcaaggtggttctggcctacgagcctgtgtgggccattggaacaggcaaaaccgcaaccccccagcaagcccaggaggtccacgaaaagcttcgaggctggttaaaatcaaacgtgtccgatgctgtcgcccaaagcaccaggatcatttatggtggttcggtgaccggtgctacatgtaaggaacttgcctcccaacccgatgtcgacggcttccttgtcgggggtgcgtctttaaagccggagttcgtggacataataaatgctaaacagtag

SEQ ID NO: 244967 - DNA, 1233 bp, synthetic construct
  misc_feature 1..1233: note = Description of Artificial Sequence: Synthetic coding sequence
  source 1..1233: mol_type = other DNA
atggatgtgatggaactgttggaggaggatttaacgtgtcccatatgctgctctctgttcgatgatcccagagtcctaccgtgctcccacaacttttgtaaaaaatgccttgaaggtattttagaaggctctgtgcggaatagcctgtggaggccggctcctttcaagtgcccgacttgcagaaaggagaccagtgccacagggattaacagcctccaagttaactattccctcaagggcatcgtggaaaagtacaacaagatcaagatctctcccaagatgcccgtatgcaagggacacttaggccagcctttgaatatcttctgtttaactgatatgcagctgatttgcggcatctgtgccacgaggggagaacatactaaacatgtcttctgctcgatcgaggacgcgtatgcccaggaacgggatgcattcgaaagtctttttcagtctttcgagacctggaggcgaggcgatgccctgtcacgactcgacaccctggaaacaagtaagagaaagtcactacagcttctgactaaagattctgacaaagtgaaagagttcttcgagaaactccagcataccctcgaccagaagaagaacgagatcttgtctgactttgagacgatgaaactcgctgtaatgcaggcctatgacccggagattaataaactcaatactatcctgcaggaacagaggatggccttcaatattgccgaagcctttaaagatgtctcagagcccattgtgtttctccaacagatgcaggagttccgagagaagataaaagtcatcaaggagacaccgttgccaccaagcaaccttcccgcttccccgctgatgaaaaatttcgatacttctcagtgggaagacattaaactggttgatgtggataaattatccctgccacaagataccggtacctttatttccaagattccttggtctttctataaactgtttctgctgattttactcctcgggctggtgatcgtgttcgggccaacaatgtttcttgagtggtcgctcttcgatgaccttgccacctggaaggggtgcctgagtaatttttcttcttacctcacgaagactgctgacttcattgagcagtcagtcttttattgggaacaggttactgatggtttcttcattttcaatgagcgatttaagaactttacgcttgtagtgttaaacaacgttgccgagttcgtttgtaagtacaaactcctgtag

SEQ ID NO: 244968 - DNA, 1233 bp, synthetic construct
  misc_feature 1..1233: note = Description of Artificial Sequence: Synthetic coding sequence
  source 1..1233: mol_type = other DNA
atggacgtaatggaattactcgaggaggatctcacatgtccaatctgctgctctctcttcgacgaccctcgggtgctgccttgttcccacaacttctgtaaaaaatgtcttgagggaatcttagaggggtcagtccgcaattctctgtggagacccgctccattcaagtgccctacctgccgaaaagagacatcagccacagggatcaattcactgcaagtcaattacagcttgaagggaattgtggaaaagtacaataagattaaaatcagtcctaaaatgccggtctgtaagggtcatctgggccaaccacttaatatcttttgtctgaccgatatgcagttgatatgtggaatctgcgccacccgaggggagcacaccaaacatgtgttctgcagtatcgaggacgcctatgctcaggagcgcgacgcatttgagagtttgttccagtcgttcgagacttggaggaggggcgatgcattgagccgactcgacacattagagaccagcaagcgaaagagcctgcaacttctgactaaagattctgataaagtcaaggaattctttgagaaactgcagcacaccctggaccagaaaaagaacgaaatattatccgattttgaaactatgaaactagcagttatgcaagcatatgatcctgagatcaataagctgaacacaattctccaggaacagagaatggcatttaacattgctgaggcctttaaagatgtgtcagagcccattgtgttcttgcagcagatgcaagagttcagggagaagataaaagtgattaaagaaactcccctaccgccatcaaacctgcctgcatcaccactgatgaagaactttgacacaagccagtgggaggacatcaagctcgtcgacgtagacaaattgtcccttccccaggacaccgggacattcatatccaagatcccttggtcattttacaaactgttcctcttgatccttttacttgggctagtcatcgtcttcggtcccaccatgtttctcgaatggagtctgttcgatgatttagccacatggaagggctgtctctccaatttcagctcctatctgaccaagactgccgattttattgagcaatctgtcttttattgggaacaagtgactgatgggttcttcatcttcaatgagcgattcaagaatttcacactagtggtgctgaataatgtcgccgagtttgtgtgtaaatacaagctgttgtag

SEQ ID NO: 244969 - DNA, 1224 bp, synthetic construct
  misc_feature 1..1224: note = Description of Artificial Sequence: Synthetic coding sequence
  source 1..1224: mol_type = other DNA
atggaacttcttgaggaagatttaacatgcccaatttgttgctccctgttcgacgaccccagagtcctgccctgcagtcataatttttgcaagaaatgtttagagggcattttagaggggtctgtgcggaactccctctggcgcccagctccctttaaatgccccacttgccgtaaggagacttccgcaacgggtattaacagcctccaagttaactattcgctgaaggggatcgtcgagaaatacaataaaatcaaaatttccccgaaaatgcccgtctgcaagggccatttaggccaacccctgaatatcttttgtctgacagatatgcagctaatctgtggcatatgtgccacaagaggcgaacatacaaaacacgtattctgtagtattgaggacgcctacgctcaggagcgggacgcatttgaatcgttattccagtcattcgagacttggcgacgaggcgatgcgctttcccgtcttgatactttagaaacctctaagaggaagtccctgcagttgctcacgaaggacagtgacaaagtaaaggagttctttgagaagctacagcacacccttgatcagaaaaagaacgaaatacttagtgatttcgagacaatgaagttggccgtgatgcaggcttacgatcccgaaattaacaaactgaatacaatcctgcaggaacaaaggatggcctttaatatcgcagaagcttttaaagatgtcagcgagccaattgtttttctgcaacaaatgcaggagtttcgcgagaagatcaaagtcatcaaagaaactccccttcccccatccaatttgccagcgtcaccgctgatgaaaaattttgatacaagtcagtgggaggatattaaattggtcgatgtcgacaaactgtcactccctcaggataccggtacatttattagtaaaataccgtggtctttttacaagttatttcttctcatcctccttcttggcttggtgatagttttcggtcccactatgttcctcgaatggagcttattcgatgacctggctacctggaaggggtgcctgagtaacttcagttcttatctgaccaagactgcagacttcattgagcagtctgttttctactgggagcaggtaaccgatggcttttttatcttcaatgaacggttcaagaacttcacgttggtggtgttgaacaatgtggcggagttcgtgtgcaagtataagctcttgtag

SEQ ID NO: 244970 - DNA, 801 bp, synthetic construct
  misc_feature 1..801: note = Description of Artificial Sequence: Synthetic coding sequence
  source 1..801: mol_type = other DNA
atggagcttctggaggaggatctaacctgccccatttgttgtagcctcttcgatgaccctagagttctcccctgttctcacaatttctgtaagaaatgtttagagggtattttggaaggaagcgtgagaaatagtctttggaggcctgcaccgttcaagtgtcccacctgcaggaaagagacctctgccacgggcatcaacagcctgcaggtgaattacagcctgaaagggatcgtcgaaaagtacaataagatcaagatatcccccaagatgcccgtttgtaaggggcatctcgggcagccccttaatatcttttgcttaactgacatgcagttaatttgcggcatctgtgccactcgcggagagcacactaaacacgtgttttgctcaatcgaggacgcatacgcgcaggaacgagacgcattcgagagcctgtttcagagctttgagacctggcggagaggggatgctcttagtcgactcgacacgctggagactagtaagagaaagagcctacagttgctgaccaaggatagtgacaaggtgaaagagttttttgagaaacttcagcacacactggatcagaagaagaacgagattttgagcgacttcgagaccatgaaacttgccgtcatgcaggcatatgatcccgaaatcaataagttaaacacaatattacaggaacagaggatggcattcaatatcgcggaagcatttaaagatgtgagtgagccgatcgtgttcctgcagcagatgcaggagtttagggaaaagattaaagtgataaaggagaccccctag

SEQ ID NO: 244971 - DNA, 1224 bp, synthetic construct
  misc_feature 1..1224: note = Description of Artificial Sequence: Synthetic coding sequence
  source 1..1224: mol_type = other DNA
atggagttgctggaggaggatctgacctgccccatttgttgcagcctctttgacgatcccagggtactgccctgctctcacaacttttgcaaaaagtgcctggaaggtatcctggaaggttccgtgcgcaatagcctgtggcggcctgccccattcaagtgccccacctgccgcaaagagaccagcgccacgggtatcaacagcctgcaagtgaactactctttaaaaggaatcgtggaaaaatacaacaagattaagatctccccaaagatgcctgtgtgtaagggccatttgggccagcccttaaatatattttgcctcacggacatgcagcttatatgcggcatctgcgccacccgaggcgagcacaccaaacatgttttttgctccatagaggatgcttatgcccaggaacgggacgcgttcgagagtctattccagtcatttgagacttggagacggggagacgccctgtcacgcctggataccctcgagacctctaagaggaagtccctgcagctccttactaaggactccgataaggttaaagagttttttgagaagctgcaacatacactcgaccagaaaaaaaacgagattctgagcgattttgaaaccatgaaactggcagtcatgcaggcatatgatccggagattaataagctgaataccattttacaggagcagcgcatggcctttaacatcgccgaggcgtttaaagatgtgagtgaacccattgtgtttttacagcagatgcaggaatttcgtgagaagataaaggtgatcaaagaaactcccctgcctcctagcaacctcccggcttcaccccttatgaaaaactttgacacatctcagtgggaagacattaaacttgtggatgttgataaattaagccttccccaggacaccggcacgtttatctcaaagatcccctggtccttttacaaactgtttctactcattctgctgctgggactagtgatagtatttggtccaacaatgttcctggaatggtccctgtttgacgacctagccacatggaaagggtgtctttctaactttagctcttatctgacaaagaccgctgacttcattgagcagtccgtattctattgggagcaggttactgatggctttttcatatttaatgaacgctttaaaaacttcacacttgtcgtcctcaacaatgtggctgagtttgtatgtaagtacaagctgctgtag

SEQ ID NO: 244972 - DNA, 390 bp, synthetic construct
  misc_feature 1..390: note = Description of Artificial Sequence: Synthetic coding sequence
  source 1..390: mol_type = other DNA
atggagctgctggaagaggacctgacgtgccccatatgttgctcactgttcgacgatccaagggtcctgccgtgttcacataacttctgtaaaaaatgcctggaaggaatcctcgagggctcagtgagaaattctctctggcggccagcaccttttaagtgccctacttgccgaaaggagacttcagcaacaggtattaattctttgcaggtgaattactctctgaagggcattgttgaaaagtataacaagatcaagataagtccaaagatgcctgtgtgcaaaggtcacctgggacagcccctaaacatattttgccttaccgacatgcaacttatctgtggcatatgcgccactcgaggcgagcataccaagcatgtgttttgctag

SEQ ID NO: 244973 - DNA, 1224 bp, synthetic construct
  misc_feature 1..1224: note = Description of Artificial Sequence: Synthetic coding sequence
  source 1..1224: mol_type = other DNA
atggaactgttagaggaagatctcacgtgcccgatctgttgctccctgttcgatgaccctcgcgtgttgccctgcagtcataatttctgcaagaaatgtctcgagggtatcctcgagggaagcgtgcggaattcattgtggagacctgccccattcaagtgcccgacctgccgcaaggaaactagtgccaccgggattaacagcttgcaggtgaactatagcctgaaagggatcgtagaaaaatataataagatcaaaatatctcctaagatgccagtgtgtaaaggacatctgggacaacctctgaacattttctgtttgaccgacatgcaactgatttgcggcatttgtgcaacaaggggggaacacaccaagcatgtgttctgctcaattgaagacgcctatgcccaagagagggacgcttttgaatctctgttccagtccttcgaaacgtggaggcggggagacgcccttagtcggctggatactcttgagacttctaaacggaaaagcctccagctccttacaaaggattcggacaaggttaaggaattcttcgaaaaactgcaacacactttggatcagaagaagaatgagattctgtccgattttgaaacaatgaaactcgctgtgatgcaggcttatgaccctgagatcaataaacttaacaccattctgcaggaacaaagaatggcattcaacattgctgaggcatttaaggacgtgtcagagccgattgtcttcctgcagcaaatgcaggagtttcgagaaaagattaaggtcatcaaagaaacccccttacctccgtcaaatctgccagcaagtcccctcatgaagaactttgataccagccagtgggaggatatcaaactggtggatgtggataagttaagcttgccccaagacacgggtactttcatatctaagatcccatggagcttttacaagctatttctcttgatcctcttgttaggcttggtgatcgtctttggaccaacaatgttcctcgaatggtcactgttcgatgatcttgccacctggaagggctgccttagcaatttcagcagctatctcacgaaaacagccgacttcattgagcagtcagttttttattgggaacaggtcacagacgggttctttattttcaacgaaaggttcaagaacttcacactggtggtccttaataatgtcgctgagttcgtctgcaaatacaaactgctctag

SEQ ID NO: 244974 - DNA, 669 bp, synthetic construct
  misc_feature 1..669: note = Description of Artificial Sequence: Synthetic coding sequence
  source 1..669: mol_type = other DNA
atgaatgacttgtctaaccgcgtttggtcgatcagccaggagccagatccggtccagagactccaagcctacactgccaccgagcaagagatgcagcagcagatgagcctgggggaactatgtcaccctgtgccgctttctttcgaaccagtgaagagcttttttaagggcctcgtggaagcagtggaatctacactacagactcctctggatattcgattgaaggaatctatcaactgccaacttagcgatccttcctccacaaaacctggcaccttactgaaaacctccccaagcccggagcgatcactgctactgaagagttgctgggccgcatggggcccatgtccctgttgtgggagtacacgaagcggcaagtgttggctggttacagctagcccacccgctgccaccacgggcaggcttacctgtcgccgacgcgctcccgcaggaggatgggcacgcccaacacccccattcggtgccgctgggccaaggccaccacctgcttgggccgctacggcctccccaggagcctcttccgctacaactttgagcactggcccttctacgacagcctccgcagctgcctgtgggccagccacaaccagcactggctctgccagttcctggacaacacggcctgctagctccccaagcaccacttag

SEQ ID NO: 244975 - DNA, 1329 bp, synthetic construct
  misc_feature 1..1329: note = Description of Artificial Sequence: Synthetic coding sequence
  source 1..1329: mol_type = other DNA
atggcaggggctgccacagggtcacgaaccccgggtcgctctgagctcgtggaggggtgtggatggcgttgtcccgaacacggtgaccgcgtggctgagctgttttgccggaggtgccgtcgatgtgtctgcgccttgtgccccgtgctcggagctcatcgcggacatcccgtcgggttggcgcttgaagcggcagttcatgtgcagaaattgtctcaagagtgtctgaagcagctcgccatcaagaaacagcagcatatcgacaatatcacccagattgaggatgccaccgagaaacttaaagccaacgcagaaagctccaagacatggctgaaagggaagtttaccgagttgcgcttgctgcttgacgaagaggaggctctcgccaagaagttcattgacaaaaatacacagctgacattgcaggtttatagggagcaggccgactcttgtcgagagcagctcgacatcatgaacgacctgtcaaacagggtgtggtccatctcacaggaacctgaccccgtgcagagactgcaggcttataccgccaccgaacaggagatgcagcagcagatgagcctgggggagctttgtcatccagtcccgctctcttttgaacctgtgaagagcttcttcaaaggcctggtagaagccgtggaaagcactctgcagacccctcttgacattaggctcaaggaaagtatcaactgtcagctgtccgacccaagtagcaccaagccaggaaccctgctaaagacctcccccagcccagaacgctcactcctgttgaagtatgccaggacacctaccctggacccagatactatgcacgcaagacttcggctcagcgccgatcgacttaccgtccgctgcgggctattagggtcgctgggcccagtgcccgttctgcgctttgatgcgctctggcaggtcctcgccagggactgtttcgcaactggacgccattattgggaggtcgacgtccaagaggctggggcaggttggtgggtcggcgcagcgtatgcaagtcttcgtaggcgcggtgctagtgctgccgctcgcctcggttgcaatcggcagtcctggtgcctgaagagatacgacctcgagtactgggcattccacgatgggcaaaggtcccggttacggccacgagatgaccttgatcgccttggcgtctttctggactatgaggcaggcgtgctcgcgttctatgacgtcactggcggtatgagccaccttcatacctttagggccacctttcaagagcctctttaccctgctcttagattgtgggaaggagcgatttccatcccaagactgccatag

SEQ ID NO: 244976 - DNA, 1329 bp, synthetic construct
  misc_feature 1..1329: note = Description of Artificial Sequence: Synthetic coding sequence
  source 1..1329: mol_type = other DNA
atggcaggagctgctacgggaagccggacacccggtcgttcagaactggtggagggatgtggctggcgatgcccagaacatggagatagagtcgcagagcttttctgtagacgctgtaggcggtgcgtctgtgccttgtgccctgtgctgggggctcatagaggtcatcccgtagggctggcactggaggccgcagtccacgtccagaaactgagtcaggagtgtctgaagcagttggccatcaagaagcagcagcatatcgataatataactcagatagaggacgccaccgaaaagctgaaagctaatgccgagagctccaagacttggctgaagggcaagtttactgaacttcgattgctgctcgatgaagaagaggcgctggctaaaaaatttattgataaaaacacacagctgacgttacaagtgtatagggaacaggcggattcctgtcgagagcagcttgatattatgaatgacctttctaatcgtgtttggtccattagccaggagcccgatcccgtgcaaaggctacaggcatacacagccactgagcaagagatgcagcagcagatgtcactcggcgagctgtgccatccggttcctctttcgtttgagccagtgaaatcatttttcaaaggacttgtggaggccgtagaatcgactctacagacacctttagatattaggcttaaggaatctatcaactgccaactgagtgacccttcctccactaagcccggaacattgctaaaaacttccccaagtcccgaacgcagcctgctgctaaaatatgcacggactccaacacttgatccggataccatgcacgccagactgcggttaagcgcggacagacttaccgtccgttgcggactcttgggaagcttggggccagtgcctgtactgagattcgatgccctgtggcaggtgctcgccagggactgcttcgccacaggcagacactattgggaagttgatgtacaggaagccggtgctggctggtgggtcggtgccgcatacgcaagcctacgaagaaggggcgcatcagccgcagccaggctggggtgtaataggcagtcctggtgtctcaagcgctatgatcttgagtattgggccttccacgacgggcaacggagccgtttgagaccacgggatgatctggatagattaggggttttcctggactacgaggctggagtcctcgccttttatgatgtgacagggggaatgtctcacctgcatactttccgcgcaacattccaggaacccctgtacccagctctgcgcctgtgggagggcgctatatctatccccaggctgccatag

SEQ ID NO: 244977 - DNA, 1221 bp, synthetic construct
  misc_feature 1..1221: note = Description of Artificial Sequence: Synthetic coding sequence
  source 1..1221: mol_type = other DNA
atggctggcgcagcgacaggttctcggactccagggcgtagcgaacttgtcgaaggctgtggatggcgctgccccgaacatggggacagagttgcggagctgttctgtcggaggtgtcggaggtgcgtctgtgcactgtgtccagtactcggagcacatcgcggacaccctgtcgggctcgcactggaagccgcagttcacgtgcaaaagctgtcccaggagtgcctgaaacagctcgcaattaagaagcagcagcatatcgataatataacccagatcgaggatgccactgaaaagctgaaagcgaacgccgagagttctaagacctggctgaagggcaagtttactgagcttcggctcctgctggacgaggaggaggctctggcaaaaaagttcatagacaaaaacacccagttaacactgcaggtgtaccgcgaacaagctgacagctgtcgcgagcaactggacatcatgaatgatttgtcaaatcgggtgtggtcgatcagtcaggagcccgaccccgtgcagcgcttgcaggcgtacacagctaccgagcaggagatgcagcaacaaatgagcctcggagaactctgtcaccccgttcctctctcctttgagcccgtgaagagcttctttaaagggctggtcgaggctgttgagagtaccctccagacaccgttagacattcggctgaaagaatcgataaattgccagctgagcgatcccagctccactaagccagggaccctccttaagacctcaccaagtcctgaaaggtcccttctgctgaagtacgccaggacacccactctggaccctgacactatgcacgctcgcttgcgcctctccgctgatcgactgaccgtccgctgtgggttgctcggttccttaggtccagtgcctgtgttgcgtttcgatgcactgtggcaagtcctcgccagggattgcttcgccactggaagacactactgggaggtggatgtgcaagaggcgggagcgggatggtgggtgggggctgcatatgcctctttgcgtcgtaggggggcatccgccgcagccagactggggtgcaacagacaatcttggtgtctcaaacgctacgatctcgaatattgggcttttcacgacggccaacggtccgcctgcggaccggcaacaactagtacaggttctgcttcctcgtggacaacaagacccgcttcaagtcccagtacaacctag

SEQ ID NO: 244978 - DNA, 762 bp, synthetic construct
  misc_feature 1..762: note = Description of Artificial Sequence: Synthetic coding sequence
  source 1..762: mol_type = other DNA
atggcaggagctgctacgggatcaaggacccctggtagatccgaactcgtggagggttgcggctggcggtgccccgaacatggcgaccgagttgccgaattattttgcagacgctgtagacgctgcgtgtgtgctctctgtccagtcctgggggcacatcggggacatcccgtgggcctcgctctggaggcagccgtgcatgtccagaaactgagccaagaatgcctgaaacagctggccatcaaaaaacaacagcacatagacaacatcactcagatcgaggatgccacagaaaagctaaaagccaatgccgagagtagcaaaacctggttgaagggtaagttcaccgaattgcgcctgctcctagacgaggaggaggcacttgctaaaaagtttattgacaagaacacccaactaacccttcaggtctacagagaacaggcagattcctgccgcgagcagctggatataatgaacgatctctccaacagagtgtggtctatttcacaagagccagatccagttcagcgcctccaggcctacaccgccactgaacaggagatgcagcagcaaatgtcactgggagaactttgccaccctgtcccactttccttcgagccagtgaagagcttctttaaaggcctggtggaggccgtcgagtcgactctacaaacaccactggatatccggcttagtcccacgaatcatgcctacagcgcccttaaggtcagctccccgaggctggtttccaatcgcccttag

SEQ ID NO: 244979 - DNA, 1329 bp, synthetic construct
  misc_feature 1..1329: note = Description of Artificial Sequence: Synthetic coding sequence
  source 1..1329: mol_type = other DNA
atggccggagctgcaacaggatctcggactcccggaaggagcgagctggtggagggatgcgggtggcgttgtcccgagcacggagatagggtcgccgagctgttctgtaggagatgtaggcggtgcgtgtgcgcactgtgtccagtcctcggcgctcatagggggcaccctgtcggcctggcattagaagcagcagtgcacgtgcagaaactgagccaggagtgcctaaagcaactcgcaattaaaaagcagcaacacatcgacaacatcacccaaattgaagacgctacggaaaagctgaaggcaaacgcagaatctagcaaaacatggctgaagggcaagtttaccgaactcagattgttactggacgaagaagaggccctcgcaaagaagtttatagacaaaaatacgcagttaaccctgcaagtctatcgagagcaggccgattcttgccgggagcagttggatatcatgaacgatctttctaacagagtgtggagcatcagccaggagcctgatcccgtgcagcggctccaagcctacacagcgaccgaacaagagatgcaacagcagatgtctctgggcgagctctgtcacccggtgcccttgtcatttgaacccgtcaaatccttttttaaggggctcgtggaggcagtcgagagcacattacaaaccccactggatatccgcttgaaagagagcattaattgtcagctgagtgacccatcttcgacaaagccaggcactcttctgaagacgagtccttctcctgagcgatccctgctgctaaagtatgccagaacaccaaccttggatcccgacacaatgcacgcccgtctgcgactgagcgctgatcggctgaccgtgcgttgcggtctcctgggctccctgggcccagtgccagtattgagattcgatgcgctttggcaagtgctggctcgagactgcttcgcgacggggaggcattactgggaggtcgatgtccaggaggctggggcaggctggtgggtgggagccgcttacgccagtctgcgcagacggggagcgtccgcagcagcaaggctgggttgtaataggcagtcctggtgtctgaagcggtacgatttagaatactgggccttccacgatgggcagagatctagattgaggcctcgcgacgatctggacaggctaggtgtgttcctcgactacgaggccggagtgcttgccttctatgatgtaaccggcggaatgtctcacttgcatacttttagagctacctttcaggagccgctgtacccggctcttcggctgtgggagggtgccataagcattcccagacttccctag

SEQ ID NO: 244980 - DNA, 672 bp, synthetic construct
  misc_feature 1..672: note = Description of Artificial Sequence: Synthetic coding sequence
  source 1..672: mol_type = other DNA
atgtcagccggatcagatggcggtggccgtcatttttgcgggggtattaactgtcagctgagcgatccatcctcgacaaagcctggaactctgttaaagacatcgcccagtcctgaacggagtctgcttctgaagtacgcgaggactcccaccctagatcctgacacaatgcacgcgcgattgagattatccgctgaccgcctgactgtgaggtgtggcctcctaggctcactgggccctgtccctgttcttcgcttcgacgctctctggcaggtgttggcacgtgactgttttgcaaccggaaggcactattgggaggtggatgtgcaggaggcaggcgctgggtggtgggtgggtgctgcctacgcctccctcagacgaaggggggcttcagccgctgcgagattgggctgcaacagacagagctggtgtttgaagaggtacgacttagaatattgggccttccatgacggccagcggtctagactgcggccaagagatgatcttgaccgcctaggggttttcttggactatgaagccggagtcctggctttttacgacgtgaccggagggatgagccacctgcatacctttcgcgcaacgtttcaggagcctctgtatcccgctctcagactgtgggagggtgccataagtataccaagactgccttag

SEQ ID NO: 244981 - DNA, 2316 bp, synthetic construct
  misc_feature 1..2316: note = Description of Artificial Sequence: Synthetic coding sequence
  source 1..2316: mol_type = other DNA
atgcaccgaagtggaaggtacggtacccagcagcagagggcaggtagcaagactgctggccctccctgccagtggtcccgaatggcgtcagaaggcacaaacattcctagtcccgtagtccgacagattgacaaacaatttctgatctgcagcatttgtttagaacgctataagaacccaaaggtgcttccttgtcttcatacgttctgtgagcgctgcctgcaaaactacatccctgcccactcgctaactctgtcctgtccggtatgtcgccaaacctctatcctgccggaaaaaggcgtcgctgccttacaaaacaatttctttatcactaacctgatggacgtactgcagcgcactccgggttcaaacgccgaagagagcagtatccttgagacagtcacagctgttgcagccggtaagccattatcttgtcctaatcatgacgggaatgtgatggagttctactgtcagagttgcgaaactgccatgtgtagagagtgcactgagggggaacatgccgagcatccaactgttccactcaaggacgtggtggaacagcataaggcgtcgctccaagtgcagctagatgctgtgaacaaacgcctgccagagattgactcagcactacaatttatttccgagattatccatcaactgactaatcagaaggccagcatcgttgacgacatccactcaacattcgatgagttgcaaaaaactctaaatgtgcggaagtcagtcttactgatggaactggaggtgaattacggcctcaagcacaaagttctgcagagtcagcttgacaccctgcttcaagggcaagagagtattaagagttgctcaaattttactgctcaggccctgaatcatggaactgaaaccgaggtgctcctagtgaagaagcaaatgtccgaaaagctcaacgaactcgctgaccaagattttccactccatcctagagagaatgaccagctagatttcatcgtggagactgaaggactgaagaagtctattcacaacttgggaactattttaacgacaaacgccgtcgcaagcgaaaccgtcgcgaccggcgaaggactgaggcagacgataattgggcagcccatgtctgtgaccatcaccacaaaggataaggacggcgagctgtgcaaaactggaaacgcttacctgaccgctgaactgtccacccctgacgggtccgtggcagatggagagatattagacaacaaaaatgggacatatgaattcctatatacggttcaaaaggagggtgacttcacactgtctttgcggctctatgatcaacatattagggggtctccgttcaagttgaaagtcattagatctgccgacgttagtcctaccaccgagggcgtgaaaaggcgagtgaagagcccgggaagtggtcacgtgaaacagaaggcagtaaaacgtccagctagcatgtattccactggaaaacggaaagaaaaccccatagaagatgacctgatattccgtgttgggactaaaggacggaataagggggaattcaccaatctgcaaggagtggctgctagcacgaatggaaaaatcttgattgcagatagtaacaatcaatgtgtccagattttttcaaacgacgggcagttcaaaagccgctttggaattcggggtcggagcccgggacagctgcagcgacctaccggggtggcagtccacccatcaggggatatcatcatcgctgattacgacaacaaatgggtgagcatattttcttctgatggcaaattcaaaaccaaaatcggatctggtaagctcatgggtccaaagggtgtaagtgtagatcgaaatggacatatcattgtcgtggacaacaaggcctgctgtgtctttatcttccaacccaatggaaaaatcgtcacccgctttggatctcggggtaacggggacagacagtttgccggtccacactttgccgcagtgaacagcaacaacgagatcattattactgattttcataatcacagcgtgaaagttttcaatcaggagggcgaatttatgcttaaattcggcagtaatggagaaggaaatggccaatttaacgctccaaccggagttgccgtggactctaatgggaacattattgtcgccgattgggggaactctaggattcaggtgttcgatggatcgggaagcttcctgtcttacattaataccagtgcagatccattatacggcccacaggggctggctcttacatctgatggccatgtcgtcgtcgccgactctggaaaccattgcttcaaagtttatcgatatctccagtag

SEQ ID NO: 244982 - DNA, 2235 bp, synthetic construct
  misc_feature 1..2235: note = Description of Artificial Sequence: Synthetic coding sequence
  source 1..2235: mol_type = other DNA
atggcttccgagggcacaaacatccctagtcccgtagtcaggcagatagacaagcagttcctcatctgttcaatttgccttgaaaggtataagaatcctaaagttctgccatgtttgcataccttctgtgagcgctgccttcagaattacatccccgctcattcactcactttgtcttgcccagtatgtcgacagaccagcatactaccagagaaaggggtggctgcactgcaaaacaatttctttatcacaaacttgatggacgtgctgcagaggacccctgggagcaacgctgaagaaagcagcatactcgagaccgtcacagccgtggctgcaggcaaacctctgagttgccccaaccatgacggcaatgtcatggagttctactgccaatcctgtgaaactgctatgtgtcgcgagtgcaccgagggggaacatgctgagcaccctacggtgccactgaaagacgtggtcgaacaacacaaggcctctttgcaagtacagctagacgccgtcaacaaacggctgccagaaatagacagcgcactgcagtttattagcgagatcatccaccaactcaccaaccaaaaagccagtattgttgatgatatccatagcactttcgacgagctgcagaagacccttaacgtgaggaagtctgtgctcttgatggaactggaggtcaattacggactaaaacataaagtgctgcaatcacagctggacaccctcctgcagggacaggaatctattaagtcctgttcaaatttcacagcccaggcactcaatcacgggacagagaccgaagtcctgctggtaaagaaacagatgagtgaaaagctcaatgagctggcagaccaggattttcctctgcatccaagagagaacgaccaactggattttatcgttgaaacagaaggtctgaagaagagcatccacaatctcgggaccatcctaaccaccaatgctgtggcctccgaaacagtggcgactggggaagggctcagacagactatcatcggacagccgatgagtgttaccatcactaccaaagacaaggatggagaactttgcaaaaccggaaatgcctatctcacagcggagctgtccactcctgacggaagtgtcgctgatggtgaaatcctagacaataagaatggtacctacgagtttctgtacaccgttcaaaaggagggggacttcaccttgagcctccgactttacgaccaacacatccggggaagtccctttaagttaaaagtaattcggtctgccgacgtttcaccgacgactgaaggcgtgaagcgccgagtcaagagccctggcagtggacatgtaaagcagaaggcggtgaagcgtcccgcatcgatgtattctacaggaaaacgaaaagagaacccgatcgaggatgacctgattttccgcgtcggcactaaggggaggaataaaggagagttcacaaatcttcagggagtagctgcaagcactaacggcaaaatcctgatcgccgactctaataaccaatgtgtgcagatctttagcaacgatggtcaattcaaatccagattcggtataaggggcaggtcccccggacagctgcaaaggcctactggcgtggccgtacacccctcaggtgacattattatagcggactacgacaacaaatgggtgagcattttctctagcgatggcaagtttaagaccaagataggaagtggcaaacttatgggccctaaaggggtgagcgtggatcgtaacggccatattatcgttgtagacaataaggcttgctgcgtgttcatcttccagcccaacggaaaaatcgtcactcggtttggctccagaggtaacggcgataggcagttcgcgggaccacattttgcagccgtgaattcaaataatgagataataatcaccgacttccacaatcacagtgtcaaagttttcaaccaggaaggggaattcatgctgaaatttggatctaacggcgaggggaacgggcaatttaacgctccaacgggggtcgcagtcgacagtaacggcaacattatcgtggcagattggggtaactctcggatccaggtgttcgacggcagcggctcattcctgtcctatataaacacaagcgccgaccccctctacgggcctcaggggctcgccttgacgagcgacggacacgtggtagttgccgactctggaaatcattgcttcaaagtataccgctacctgcagtag

SEQ ID NO: 244983 - DNA, 1428 bp, synthetic construct
  misc_feature 1..1428: note = Description of Artificial Sequence: Synthetic coding sequence
  source 1..1428: mol_type = other DNA
atggcctctgcggctaggctgactatgatgtgggaagaggtaacatgtcccatttgcttggatcctttcgttgagccagttagcattgagtgcggccactcgttttgccaggaatgtatatctcaagttggcaaaggaggcggtagtgtgtgtcctgtatgcaggcaacggttcctgctaaaaaacctgagacccaatcgacagctggcaaatatggtcaacaatttaaaggaaatctcacaggaggccagagaaggtactcagggggaacggtgcgctgtgcatggagaacggttacatttgttctgcgagaaggatggtaaggctctgtgctgggtgtgcgcccagtcgaggaagcaccgcgatcacgctatggtcccacttgaagaagcggctcaggagtaccaggagaagctccaggtggccttaggagagctgcggaggaagcaggaacttgctgagaaacttgaagtcgagattgcgattaagcgggcagactggaagaaaaccgtggaaacacagaagagcagaatccatgcagaatttgtccaacaaaagaatttccttgtcgaggaggagcagagacagctgcaggaactggagaaggatgaaagggagcaactcagaatactcggggaaaaggaggcaaagctggctcagcagtctcaggccctgcaggaattgatctcagagttggatcgacgctgccactccagtgccttagaactgttgcaggaggtgataatcgtgctggagcggtccgagtcgtggaacctgaaggaccttgatatcacgagcccagaactcaggtctgtatgtcacgtgccaggactgaaaaagatgcttagaacgtgtgctgtacacattacgctggatcccgataccgctaatccctggctgatcctgagtgaggacagacggcaggttagactgggagacacccagcaaagtatcccgggaaacgaggagaggttcgactcataccccatggtactcggtgcccagcactttcactcgggcaagcactactgggaggtcgatgtcacgggaaaggaggcctgggatctcggagtgtgccgcgattctgtccgacggaagggccatttcctcctgtctagcaagagcggcttttggaccatttggttgtggaacaaacagaagtacgaggcaggtacatatccacagacccctctgcatctgcaggtacctccatgccaggtggggatctttctggattacgaagcgggaatggtgagtttctataacattacagaccacggtagtctcatctactctttctctgagtgtgcttttacaggccctctccggccattttttagccccggatttaacgatggaggcaaaaacaccgctccattgaccttatgcccactgaacatagggtcgcagggaagtaccgactactag

SEQ ID NO: 244984 - DNA, 1428 bp, synthetic construct
  misc_feature 1..1428: note = Description of Artificial Sequence: Synthetic coding sequence
  source 1..1428: mol_type = other DNA
atggcctcagccgctcgtctgacaatgatgtgggaggaagtgacttgtccaatttgccttgatcctttcgtagaacccgtatcaatcgaatgcggtcatagcttctgtcaggagtgtatcagtcaggtcggaaaaggcggtgggtctgtatgcccagtatgtcgccaacgcttcctactgaaaaatctcaggcccaaccgccagcttgccaatatggtgaataatctgaaggagatatctcaggaagccagggaggggactcagggggaaagatgtgcagttcacggggagcgtctacatttattctgcgaaaaagacggcaaagctctatgttgggtttgtgctcagtctcgcaagcacagagatcacgccatggttcccctggaggaggctgcgcaggagtaccaggagaagttgcaggtcgccctgggggagctcaggcggaagcaggagctggccgagaagctggaagtagagatcgccatcaaacgcgctgactggaaaaaaactgtagagacccagaagtctagaatccacgcggagttcgtgcagcaaaaaaacttcctggtggaagaagagcagcgccaattgcaggagctggagaaggacgagcgggaacagctccgaattctgggggagaaggaagctaaactcgcacagcaatcacaggccctgcaggaactcattagcgagctagataggcggtgccattcatccgcactagagttattacaggaggtaatagtgctgggcccaaggtccgagagctggaacctgaaggacctggacattacttcacccgaacttaggtcggtgtgccacgtccccggtcttaagaaaatgctgagaacgtgcgctgtccatattacactggaccccgatacagctaacccatggctgattcttagcgaagacagacgacaggtgaggctgggggacactcagcagtcaattcccggtaatgaggaaaggttcgattcctacccaatggttctgggtgctcagcacttccactctgggaagcactattgggaggttgacgtgacaggtaaagaagcttgggatttgggcgtgtgtcgcgattccgtccggagaaagggacacttcctgttgagcagcaagagtgggttctggacaatctggctgtggaacaaacaaaagtatgaggctggcacatacccccagacacctctccatcttcaggtgcccccttgtcaagttgggatcttcctagattatgaggccggaatggtgtccttttataacatcacggaccacggcagtctgatctattcctttagcgaatgtgcattcactggcccactgcgacccttcttctctcccggattcaacgatggaggaaaaaacactgctccactcacactgtgccctcttaacatcggctcccagggcagtacggactattag

SEQ ID NO: 244985 - DNA, 1497 bp, synthetic construct
  misc_feature 1..1497: note = Description of Artificial Sequence: Synthetic coding sequence
  source 1..1497: mol_type = other DNA
atggacttttcagtcaaagttgacatcgaaaaggaagttacttgccctatctgcttagagctgcttacagagcctctgtctttggactgtgggcactccttctgccaggcctgcatcacagctaaaatcaaggaatctgttatcattagtcggggagaatcgtcttgccccgtgtgtcagaccagattccagcctgggaaccttcggccaaatcgccacctggccaacattgtggaaagggtgaaggaggtgaagatgtccccacaggagggacagaaaagggacgtttgtgagcaccatggaaagaaattacaaattttttgtaaagaagatggtaaggtgatttgttgggtctgtgagttatcccaagagcaccagggccaccagacctttcgaattaacgaggtcgttaaggagtgccaggagaagctccaggtggctctgcagagacttattaaagaagatcaggaagcagagaaactcgaggacgacattaggcaggagcggacagcctggaaaaattatatccagatcgagaggcagaagatacttaaaggcttcaacgagatgcgcgtgatcctggacaatgaggagcagcgcgagttgcagaagttggaagagggcgaggtcaatgtcttggataacttggcagccgcaaccgatcaactggtccagcagaggcaggacgctagcaccttaatttcggaccttcagaggagacttcgcggttcctctgttgagatgctgcaggacgtgattgatgtcatgaaacgtagtgagagttggaccctaaaaaagcccaaaagtgtatccaagaagcttaaatctgtattcagagtccccgacctctccggtatgttgcaagtcctaaaagagctgacagatgtacaatattactgggttgatgtcatgctgaacccaggaagcgcaacaagcaacgtagctatcagtgtggaccagcgacaggttaagactgtgagaacttgcacctttaagaacagcaacccctgtgattttagcgcattcggcgtctttggttgccaatacttctcatcaggcaagtattattgggaggtagacgtctctggcaagatagcctggattctcggcgtgcactccaagatatcatctttgaacaaacgtaaaagtagcggatttgcctttgatcctagtgtgaactactcaaaagtgtactctaggtatagaccacagtacggctattgggtgataggacttcagaatacttgtgagtacaacgcatttgaggattcttcttcttctgaccccaaggtgttgacattattcatggctgtgcctccttgcaggattggcgtgttccttgactacgaagcaggaattgtgagtttcttcaacgtgactaaccatggagcactgatctataagttctctgggtgccgattttctcgccctgcgtatccgtatttcaatccatggaactgcttagtgccgatgactgtttgccccccaagtagttag

SEQ ID NO: 244986 - DNA, 684 bp, synthetic construct
  misc_feature 1..684: note = Description of Artificial Sequence: Synthetic coding sequence
  source 1..684: mol_type = other DNA
atggatttctccgtgaaggtggacatcgagaaggaagtgacatgtccaatctgcctcgaacttctgactgagccgctgagcctcgactgtggccatagtttttgccaggcctgcatcaccgccaaaatcaaggaatctgtcattatcagccgaggtgaaagctcctgccccgtgtgccagacccggtttcaaccagggaaccttcggcctaacaggcatctagccaacatcgtcgagagagttaaagaagtcaaaatgagccctcaagaggggcagaagagggacgtgtgtgagcatcacgggaagaaactgcagatcttctgcaaggaagacggcaaggtgatctgctgggtttgcgaactctcccaagaacatcaaggccatcagacatttcgcattaacgaagtggtcaaggagtgccaagagaagctccaggttgccctgcagagactgattaaggaggaccaggaagctgagaaattagaagatgatatccgccaggaacgcacagcctggaaaaactatatccaaattgagaggcagaagatcctcaagggcttcaacgaaatgcgtgttatacttgacaatgaggagcagagagaacttcagaagctggaagaaggcgaggtgaatgtgctggacaatctagctgcagcgacagaccagctggtgcaacagaggtag

SEQ ID NO: 244987 - DNA, 612 bp, synthetic construct
  misc_feature 1..612: note = Description of Artificial Sequence: Synthetic coding sequence
  source 1..612: mol_type = other DNA
atggactttagcgttaaagtcgacatagagaaggaggtgacctgcccaatctgcctggagctactgactgagcctctgtcccttgactgtggccactcattctgccaggcctgcatcacagcgaagatcaaggaatcagtcatcatttcacgtggagagtcctcttgtcctgtttgccagactcggttccaacccggaaacttgagaccaaatcggcatctcgcaaatatcgtggagcgcgtgaaggaggttaagatgtctcctcaggaggggcaaaaaagggacgtttgtgaacaccacggcaaaaagcttcagattttttgtaaagaggacggtaaagtgatttgttgggtctgcgagctgagccaggagcaccaaggccaccaaacctttcgaatcaacgaagtcgtcaaggagtgccaggagaaactgcaggttgcgctccagaggctcattaaagaggaccaagaagccgagaaactggaagatgacattcgtcaggagagaacagcttggaagaactatatccagatagaaagacagaaaattttgaagggcttcaacgaaatgcgggtaattcttgataacgaagagcagcgggagcttcagtag

SEQ ID NO: 244988 - DNA, 1263 bp, synthetic construct
  misc_feature 1..1263: note = Description of Artificial Sequence: Synthetic coding sequence
  source 1..1263: mol_type = other DNA
atggacttttctgtgaaagttgacattgagaaggaggtgacctgtccgatatgtctggaactcttgacggaaccactgtccctggattgcggtcactccttctgtcaagcctgcatcacggctaagatcaaggagagcgtcattatttctcgcggtgagagctcctgtccagtgtgtcagaccaggttccaaccaggaaacttacgaccgaatagacacctggcaaatatagtggagagagtcaaagaagtcaaaatgagcccacaggagggccagaagagagatgtgtgcgagcatcacggcaagaaattacaaatattctgcaaggaggacggaaaagtaattttagataatgaggagcagcgcgaattacagaaacttgaagagggcgaagtgaacgttctcgataaccttgccgcagccacagaccagctggtgcagcagcgccaagacgccagcaccttaatctcagacttgcaaaggcgactgcgcggttcctcagtggagatgctgcaggacgtgattgacgtgatgaaacggtccgagagttggacgcttaagaagcccaaatcagtatcaaaaaagctgaagtccgtattcagggtgccggacctgtctgggatgctgcaagtgctgaaagagctcaccgatgtccagtattattgggtggacgtcatgttgaatccaggctcagcaacttccaatgtggccattagtgtcgatcagagacaagtgaaaaccgtaaggacctgtacctttaaaaactcaaatccatgcgatttctctgctttcggggtgttcggctgccagtacttctctagtggtaaatattactgggaggtggatgtgtctggtaagatcgcttggatattgggggtgcattcaaaaatatcctccctgaacaagcgcaagagttccggcttcgcattcgatccgtcagtaaactactcaaaagtctattcacgttatcggcctcagtacggatactgggtgatcggactgcagaatacgtgtgaatataacgcattcgaggacagttctagttctgaccccaaagtgctgactctctttatggctgttcctccttgtagaatcggagtcttcctggattacgaagctggaatcgttagcttttttaatgtgactaaccacggcgcactgatttataaattttcgggatgtcgcttcagccgacctgcatatccttatttcaatccgtggaactgtttggtccccatgaccgtctgtcctccaagctcttag

SEQ ID NO: 244989 - DNA, 930 bp, synthetic construct
  misc_feature 1..930: note = Description of Artificial Sequence: Synthetic coding sequence
  source 1..930: mol_type = other DNA
atgagagtcatcctggacaacgaggaacagagagaattgcagaagttagaagagggcgaggtgaacgtactcgacaacctcgccgctgctacggatcagctcgttcagcagcggcaggacgcttccaccctgataagcgatctccagagacgcttaaggggcagcagcgtcgaaatgctgcaagatgtcattgatgtcatgaaaaggtccgagtcctggaccctaaagaaacccaaaagcgtctccaaaaagctgaagtcagtatttcgcgtgcccgacctatccgggatgctgcaggtgctgaaggaactgacagatgtccagtactactgggttgacgtgatgctcaatcccggttctgcgaccagcaatgttgctatctcagtggaccaacgacaggttaaaaccgttagaacatgtacatttaagaactctaacccttgtgacttttccgccttcggagtgttcggatgccagtacttctcatctgggaagtactattgggaggtggatgtgagtggcaagatcgcctggatcctgggcgtccacagtaagattagcagcctgaataagcgtaagtcatctggattcgcttttgacccgtccgtgaactactccaaggtgtatagcagataccggccacaatacggctactgggttatagggctccagaatacctgtgagtataatgcctttgaagattccagctctagtgatccaaaggtgctgaccctcttcatggcggttccaccctgtcgcattggagttttccttgattacgaagcgggtatcgtgtccttctttaatgtgaccaaccacggcgcactgatttacaaattctccggctgccgattctctaggccagcgtacccatacttcaatccttggaactgcctggtgcccatgactgtttgcccacccagtagctag

SEQ ID NO: 244990 - DNA, 1893 bp, synthetic construct
  misc_feature 1..1893: note = Description of Artificial Sequence: Synthetic coding sequence
  source 1..1893: mol_type = other DNA
atggccgagttatgccctcttgccgaggagctgtcttgtagcatctgcctggagccgttcaaggagcccgtgaccaccccatgtggacacaacttttgtgggtcctgcctaaacgaaacttgggctgtgcagggatctccttatctttgtccacagtgccgagctgtgtaccaggcacgcccacagctgcataaaaacacagtattgtgcaatgtggtggagcagtttctccaggccgatctggctagggaacctcctgcagatgtgtggacccctccagcacgagcctctgccccatcaccgaatgcacaggtagcctgtgatcattgtctgaaggaagcggcagtgaagacctgcctcgtgtgcatggcctcattttgccaagagcaccttcagccccacttcgattctcccgctttccaggaccacccgctacaaccgcctgttcgcgacttactgcgcaggaaatgttcccagcataaccgcctgagagaattcttttgtcccgagcactcggagtgtatctgccacatttgtctagtcgaacataagacctgctcacccgcaagtctgagccaggctagtgccgacctggaagccaccttgaggcataagctgacggtaatgtacagtcagatcaatggcgcatctcgggctctcgacgatgtgaggaatcggcagcaggatgtccgcatgaccgctaaccgcaaagtcgagcagttacagcaagaatacacagaaatgaaggctttgttggacgcctcggagacaactagtaccaggaagatcaaggaggaagaaaaaagagtcaattctaagtttgatacaatctaccagattctcttaaagaagaagagcgaaattcagactttaaaagaagaaatagaacagtctcttacaaaacgagacgaatttgagttccttgaaaaggccagcaagctgagaggaatttcaacaaaaccggtgtatatacccgaagtggaactgaatcacaaattaatcaagggcattcaccagagtaccatcgatctcaagaacgagctgaagcaatgtatcggtcggctgcaggagcccaccccctctagcggggaccccggtgaacacgatccagcctcgacccataagagcaccaggccagtaaaaaaagtctcaaaagaggagaagaaatcaaaaaagcctcctcccgtgccggctcttccttccaaactccctaccttcggtgccccagagcaacttgttgacctgaagcaggccggactggaggctgcggctaaagctacgagtagtcatccgaacagcactagcctgaaagctaaggtcctcgaaacgtttctcgccaaaagcagaccagaactgctggaatattacattaaggtgatcctggattataacactgcccacaataaagttgctttgtccgagtgttatacagtagcatccgtagctgaaatgccccagaattaccgtcctcatccacagagatttacatactgctcacaagtcctggggctccattgttacaagaaaggtatacattattgggaggttgagctgcagaagaacaatttttgtggtgtgggcatttgttacgggagcatgaatagacagggccctgagagcaggctgggacgtaatagcgctagttggtgtgtggaatggtttaatacgaagatatctgcctggcacaataatgtggagaaaactctgccttccaccaaggcaactagggtcggcgtgcttttgaattgcgatcacgggtttgtcatatttttcgctgtcgctgacaaggtccacttgatgtataagttccgagtcgattttactgaggctctgtaccctgccttttgggtcttttcggccggtgccaccctgtccatttgcagcccgaaatag

SEQ ID NO: 244991 - DNA, 1893 bp, synthetic construct
  misc_feature 1..1893: note = Description of Artificial Sequence: Synthetic coding sequence
  source 1..1893: mol_type = other DNA
atggcagaattatgtcctctagccgaggagcttagttgtagtatctgtctggaacccttcaaggagccagtgactacgccttgtggccataacttttgcgggtcctgtctgaatgagacatgggctgtgcagggatctccatacttgtgtccccaatgccgggctgtttatcaggctcgaccccagctccacaagaatactgtgctctgcaacgtggttgagcagttcctgcaggctgatctcgctcgggaaccgcctgctgacgtgtggaccccacctgccagagccagcgccccatcacccaacgctcaggtagcctgcgaccactgtcttaaggaagccgctgtgaagacatgcttggtgtgcatggcttccttttgccaggaacacctgcagcctcactttgatagccctgcctttcaggaccatccactacaaccgcctgtgcgtgatctgctgcgccgaaaatgttcccagcataatcggctgcgagagtttttttgtccagagcatagcgaatgtatctgccacatatgcctcgtcgaacacaaaacttgttctccagcatctttaagccaggcttctgcagacttggaggccacactccgccacaagctcaccgtaatgtactcccagatcaatggggctagtagggcgttggacgacgtgcgcaatcggcagcaagatgtccggatgacggcaaatcgcaaggttgagcagttgcagcaggagtatacagagatgaaggccctgctggacgctagcgaaacaacttccactaggaaaatcaaagaggaggagaagagggtgaattccaagttcgatacaatctatcagatactgttgaaaaaaaaatcggaaatccagactttgaaggaagagatagagcaaagtctcacaaaaagagacgagttcgaatttttggaaaaggcttcaaaattacgcggaatctccacaaagccggtgtacattcccgaagtagagttgaatcacaaactaatcaaaggaatacatcaaagcaccattgatctcaagaatgaacttaagcagtgcatcggacgcctgcaagaacccacaccttcaagtggcgatcctggtgagcacgaccccgcatcaacccacaagagcactagacccgtgaagaaggttagcaaggaggaaaagaagtctaagaaacctccacccgtacctgctctcccctccaaattgcctacttttggggcaccagagcaacttgttgacctgaagcaggcagggctcgaggctgccgcaaaggcaaccagcagtcatccaaattccacctcactgaaagccaaagttctggaaacattcctggccaagagcaggcccgagctgctggaatactacatcaaagtcattcttgattacaacacagcgcataacaaagtcgcattatctgaatgttatactgtggcaagtgtggccgaaatgcctcagaattacagacctcatcctcagagatttacttactgcagccaggttctgggtctgcactgttacaagaagggtatccattactgggaggttgagctgcagaagaacaatttctgtggtgtcggtatctgctacggtagtatgaataggcagggaccggagagcaggcttggtaggaacagtgctagttggtgtgtggaatggtttaataccaaaatttcggcctggcacaacaacgttgagaagacactcccctctaccaaagcaacgcgagtcggcgtcctgttaaattgcgaccatgggtttgtaattttctttgcggtggccgataaagtacacctgatgtataaattccgagttgacttcacagaggccctgtatccggctttctgggttttttccgcaggggctacactctctatttgctctcccaagtag

SEQ ID NO: 244992 - DNA, 1077 bp, synthetic construct
  misc_feature 1..1077: note = Description of Artificial Sequence: Synthetic coding sequence
  source 1..1077: mol_type = other DNA
atggcctctggatctgtcgcagagtgcctgcagcaagaaacgacttgtccggtttgcctgcagtactttgccgaacctatgatgctcgattgtggccataacatctgctgcgcctgtctcgcccgatgttggggcaccgccgagaccaatgtcagctgtccacaatgtcgcgagactttcccacagcgacatatgagacctaaccggcacttggctaacgtaacccaactggtcaaacaacttcgaaccgagcggccatccggccctggaggggaaatgggcgtgtgtgagaaacatcgagaaccccttaagctctattgcgaggaggatcagatgcccatttgcgtggtctgcgatcggagcagagagcatagaggtcattcagttcttcccttagaagaggcggttgagggcttcaaggaacagatccagaaccaacttgaccacctgaagagggtcaaagacctaaagaagcggcgaagggcccaaggagaacaggcacgtgccgaactcctttccctgacgcagatggaacgagagaaaatagtgtgggagtttgagcagttgtatcactcactgaaagaacacgaataccgtttgcttgcacgcctcgaagagttagatctcgctatttataactctatcaatggggctatcacgcagttttcctgcaatatctcacacctgagtagtctgatagcccaacttgaggaaaagcaacaacagcctactcgagaactactccaagatataggggatacgctcagtagggctgagcggatccgcatacccgagccgtggataaccccgccagatcttcaggagaagattcatatcttcgcccagaagtgcctgttcctcaccgagagtctgaaacagttcactgaaaaaatgcaaagtgacatggagaagatacaagaactgcgggaagcacagctttacagcgttgatgtgacgctggatccagacaccgcctatccgtccctgatcttaagcgataacctccgccaggttcggtactcgtatctgcaacaggacctaccggacaatccagagcggtcacccagcacgacatag

SEQ ID NO: 244993 - DNA, 1542 bp, synthetic construct
  misc_feature 1..1542: note = Description of Artificial Sequence: Synthetic coding sequence
  source 1..1542: mol_type = other DNA
atggccagtggatctgtggccgagtgtctgcaacaagaaactacatgtccagtctgcctgcagtacttcgcggagccaatgatgctcgattgcggacataatatttgttgtgcctgcctcgcccgttgttgggggaccgccgagactaacgtttcctgccctcagtgcagggagacgtttccacaacgccacatgaggcccaaccgacacttggccaacgtgacacaactcgttaagcaactccggaccgaacgcccaagcggaccgggaggggagatgggagtgtgcgagaaacatagagagcccctcaaactgtactgtgaggaggaccagatgcctatatgtgtggtctgtgaccgcagtagggagcacagaggccattccgtgctgccactggaggaggcggtggaaggcttcaaggagcagatccagaaccagttggatcacctgaaaagagtgaaggatcttaagaagcggagacgggctcagggagagcaggccagggccgagctgttgtcgctcacacaaatggagcgggagaagattgtgtgggagttcgagcagctgtatcattcacttaaggagcacgagtaccggctcctagccaggctggaggaactggacctcgcaatttataatagcatcaatggcgcaatcacccagttctcctgcaatatcagtcatctcagtagtctgatcgcacagcttgaagagaaacagcaacagcccacccgcgaactgctgcaggacataggcgatactctgagtcgagcggaacgcataagaatccctgaaccatggatcacacctcctgaccttcaggagaaaatccacatcttcgcacagaaatgtctgtttctgacagagtccttgaaacagttcacagagaaaatgcagtctgacatggaaaagattcaggagctgagggaggcgcaactttacagtgtggatgttaccctggatcctgatacagcttatccttccttgatcctttcagacaatttgcgccaggtacgctacagctatcttcagcaggatcttcctgataatcctgaaagattcaacttgtttccgtgtgtgttaggctcgccgtgctttatcgctggtagacactactgggaggtggaggtgggcgataaggcgaaatggaccatcggcgtgtgtgaggatagtgtgtgcaggaagggaggggtcacatctgcgcctcagaatgggttttgggctgtcagcctgtggtacggaaaggagtattgggccctaacaagccctatgacagccctcccgctaaggactcctctgcagagagtcggcatctttttagattacgatgccggagaagtgagcttctataatgttacagagcgctgccacacctttaccttttcccatgccactttttgcggccctgttcgcccatacttctctctctcttatagtggagggaaaagcgctgccccactgataatctgtcctatgtccggtattgatggattctcaggccatgtcgggaatcatgggcacagcatggaaacctccccctag

SEQ ID NO: 244994 - DNA, 1542 bp, synthetic construct
  misc_feature 1..1542: note = Description of Artificial Sequence: Synthetic coding sequence
  source 1..1542: mol_type = other DNA
atggcaagtgggagcgttgccgagtgtcttcagcaagagactacctgccctgtatgcctgcaatattttgcagagcccatgatgctggattgtggtcacaatatctgttgtgcctgtctcgcacggtgctggggaactgccgagaccaacgtgtcatgcccccaatgcagggagacttttccacagagacatatgagaccaaatcgacaccttgccaacgtgacccagctggttaagcaactgcgaacggagcggccaagtgggcctggtggagagatgggggtttgtgagaaacacagggagccattgaaactgtactgcgaggaagaccagatgcccatctgcgttgtgtgcgataggtcgagggaacacagggggcatagcgtgctccccctggaggaggcagtcgaggggttcaaggaacagatccagaatcagttggaccacctcaagagggtgaaagacctgaaaaagagacggagagctcaaggtgagcaggcacgtgccgaactgctcagcctgacacaaatggagcgagagaagatagtttgggagttcgagcaattgtatcacagtttgaaagaacatgaatatcgcctgctcgcacgtctagaggaactggacttggcgatttataattctatcaacggcgcaattacccagtttagttgtaatatcagccacctttcgtctctgatagctcagttggaagaaaaacagcagcagcccaccagagagctgctccaggacatcggcgataccctgtcccgcgctgagaggattcggatcccagagccctggattactccccctgacctgcaggagaaaatccacatttttgcgcagaagtgcctcttcttgaccgagagtctcaagcagttcacagaaaaaatgcagtccgatatggaaaaaatccaggaactgagggaggcacagttgtactccgtcgatgtcacgcttgatcccgataccgcttatccaagtctcatcctctcggacaatcttcgccaggtccggtactcatacttgcagcaggatctgccggataaccctgagcgctttaatctattcccttgtgtcctgggatctccctgttttatcgcaggcaggcactactgggaagttgaagtgggggacaaagccaagtggaccattggcgtgtgtgaggactcagtgtgccgtaagggcggagtgacttccgccccacagaacggcttttgggctgtgagtctttggtacggtaaagaatactgggcattaacatcgcccatgaccgctctgcctctgcgcacccctctgcagcgggtgggaatctttctcgattacgatgcaggtgaagtgtcgttttacaacgtcaccgaaagatgccatacctttacattttcacatgctactttctgtggccctgttcgcccatattttagtttatcttacagcggcggtaagtccgctgctcctctgatcatctgtcccatgtccggcatcgatggcttttcaggacacgtgggaaatcacggccactccatggagacttccccctag

SEQ ID NO: 244995 - DNA, 1077 bp, synthetic construct
  misc_feature 1..1077: note = Description of Artificial Sequence: Synthetic coding sequence
  source 1..1077: mol_type = other DNA
atggcatccgggagcgtggctgagtgtttgcagcaggagacgacatgccctgtctgcctgcaatatttcgcagagccgatgatgctagattgcggccacaacatctgttgcgcatgtctcgctcgctgttggggcaccgcggagacaaatgtgtcctgtcctcagtgtagagagacgttcccccaacggcatatgcgccctaaccggcatctagcaaatgtgactcagttggttaagcagttgcgaacagagcggccatctggccctggtggagagatgggcgtgtgcgaaaaacatcgggagcccctcaaactctactgtgaggaggatcagatgccaatctgcgttgtgtgcgatagaagcagggagcatcgaggtcacagcgtccttcctctggaggaagcggttgaggggttcaaggagcaaatccagaaccagctcgaccatctgaagcgggtgaaggaccttaaaaaaagacggagagcacagggcgaacaggccagagctgaactactatctctgacccagatggaaagagaaaagattgtctgggaatttgagcaactgtaccactcactcaaagaacatgagtaccggctgctggccaggctcgaggaacttgatcttgccatttataacagtataaacggagcgatcacacaattcagctgcaacattagccacctctcttcccttatcgctcagctggaggagaagcagcagcagcccaccagggagttgctgcaggatattggcgacacactgtcaagggccgaacggattaggatacccgaaccttggatcacccctccagatctccaagaaaaaatccacatcttcgcacagaagtgcctattcctaactgaaagcctgaagcagtttactgaaaagatgcagtccgacatggagaagatacaagaacttcgagaagcccaactatactccgttgatgtgacattagaccctgataccgcttacccatccctgatactcagtgacaatctgaggcaggtacgatacagctacctacaacaggatctgcccgacaatcctgagcggtctcccagtactacctag

SEQ ID NO: 244996 - DNA, 747 bp, synthetic construct
  misc_feature 1..747: note = Description of Artificial Sequence: Synthetic coding sequence
  source 1..747: mol_type = other DNA
tgactcaaacagtttaccgagaagatgcaatcggacatggagaaaatccaggagagtgcagactctctagagggcggaattcttgatctgggctccgtcctatcacatatactccctgtgtccgagctgagggaagcgcagctgtacagtgtggatgttacgctggatccggacaccgcataccccagcttaatactcagcgataatctcagacaggtacgctattcttaccttcagcaagacttgccagacaaccccgagcgcttcaacctgtttccttgcgttttgggatctccctgtttcattgcaggcagacattactgggaggtagaggtaggagataaggccaagtggactatcggagtttgcgaagactctgtgtgtaggaagggcggagttacgtctgcccctcaaaatggattttgggctgtctccctctggtacgggaaagagtactgggcactgaccagccccatgaccgctttaccattgaggaccccccttcagagagtgggcattttcctggactacgatgccggagaggtatcattctacaatgttaccgagcgttgtcacactttcactttttcccatgcaaccttttgtggtccagtccgaccatatttttcactgtcgtactctggtgggaaaagcgcagccccattgatcatctgccccatgagcgggatcgatggcttctcaggacatgtcggcaaccacggccactccatggagacaagtccttag

SEQ ID NO: 244997 - DNA, 1077 bp, synthetic construct
  misc_feature 1..1077: note = Description of Artificial Sequence: Synthetic coding sequence
  source 1..1077: mol_type = other DNA
atggcatcaggcagtgttgcagaatgcctgcagcaggagactacttgtccggtatgcctgcagtactttgcagagccaatgatgttggattgcggccacaatatttgctgcgcttgtcttgcgagatgctggggcactgctgagacgaatgtctcttgtcctcagtgtcgggagactttcccacagaggcacatgcgcccaaaccgccatctggccaatgtcactcagctggttaagcagctgcgcaccgaacggcctagtgggccaggcggtgagatgggagtgtgcgagaagcatcgggagccactgaaattgtattgtgaggaagaccagatgcctatatgcgtggtatgtgatagaagccgggaacatcggggtcattccgtgctgcctctggaagaggccgtggaggggttcaaagaacagattcagaaccagctggatcatctgaaacgcgtcaaggacttgaagaaaaggagaagggcccagggcgaacaagcccgtgctgaactgctctccctgacccaaatggagagagagaagatagtctgggaatttgaacagctgtaccactcgctgaaagagcacgaatatcgattgctggccaggttagaagagcttgacctggccatctacaacagcatcaatggcgcaataacccaatttagctgtaacataagccaccttagttcccttatagcccaactggaagagaagcagcagcagcccactcgcgagcttctgcaggacattggtgatacccttagccgagccgagagaatcagaatcccggaaccttggatcacgccgcctgatctgcaggagaagatccatatcttcgctcaaaaatgcctatttctgactgagtccttaaaacagtttacagagaagatgcaatctgatatggagaagatccaggaattgcgagaggcccagctgtattcagtggacgtgaccctagatccggacactgcttaccccagtttgatcctgtctgacaacctgcgccaggtcaggtatagctacctgcagcaggacctccccgacaaccctgagagaagccccagcacaacttag

SEQ ID NO: 244998 - DNA, 747 bp, synthetic construct
  misc_feature 1..747: note = Description of Artificial Sequence: Synthetic coding sequence
  source 1..747: mol_type = other DNA
tgattaaaacagttcacggagaaaatgcagagcgacatggaaaaaattcaggagagtgctgattcactcgaggggggaatcttagacctcgggtctgttttatcacatatccttccggtgtcggaactgagggaggctcagctttactccgtggacgttaccttggacccagacacagcctacccgtccctaattctgtcagacaaccttaggcaggttcggtactcctaccttcagcaagatcttcctgacaatcctgagagattcaacctgtttccatgcgttctgggcagcccttgttttattgccggacgacactattgggaagtcgaagtgggggataaggctaagtggacaatcggcgtgtgtgaggattctgtgtgccggaagggaggagtgacaagcgcacctcagaacggattctgggctgttagcctatggtatggtaaggagtactgggccctgacctctcccatgactgctctccctctgagaactcccctgcagcgtgtcgggattttcctggactacgacgccggtgaagtgtccttctacaatgtgacggagaggtgtcatacatttacttttagccacgccaccttctgtggtccggtgcgtccctacttcagccttagctattccgggggtaaatcagctgcaccactgatcatttgtcctatgagcggcatcgatggtttcagcggccacgttgggaatcacggccactccatggagacatcaccctag

SEQ ID NO: 244999 - DNA, 1077 bp, synthetic construct
  misc_feature 1..1077: note = Description of Artificial Sequence: Synthetic coding sequence
  source 1..1077: mol_type = other DNA
atggccagcggatccgtggcggaatgtctgcaacaggaaaccacgtgcccagtgtgcctacagtactttgcagaacccatgatgttggattgcggccacaacatttgttgtgcgtgcttggctcgctgttggggaacagcagagacaaatgtctcatgtccccagtgtcgggagacattcccccaacgacacatgagacctaaccggcacctcgcaaacgtcacacagctggtcaagcagctaagaaccgagcgaccaagtggtcccggtggagaaatgggggtgtgtgaaaagcaccgcgaaccactaaagctatactgcgaagaggatcaaatgcctatatgcgtcgtgtgcgaccgaagcagagaacataggggacactcggtgttgccactcgaggaggccgtggagggtttcaaggaacagatccaaaatcagctcgaccatctgaaaagagtcaaagacttgaaaaagcggagacgggcacaaggcgaacaggcacgagcggagctcttgtctttgacccagatggagcgtgaaaaaatagtgtgggaattcgagcagttgtatcactcacttaaagaacacgagtacagattgctcgctcgtctcgaggaattggacctagccatatacaactcaatcaacggcgcaatcacacagttcagttgtaacataagtcatctgagctcactgattgcccagctggaggaaaaacagcagcagcccacgcgcgaactcctgcaggacatcggagacacactgtcccgagctgaacgcatcagaatcccagaaccttggattaccccacctgacttgcaggaaaaaatccacatctttgctcagaagtgcttgttccttaccgagagcttgaaacagttcacagaaaaaatgcaatccgacatggagaagattcaggagttgcgagaggcgcagctatactcagttgatgtgaccctggatcccgatacagcctatccctctctgatcttatccgacaatctgagacaagtccggtattcttacctgcaacaggacctgcccgataatcccgaaaggtctcctagtacaacctag

SEQ ID NO: 245000 - DNA, 747 bp, synthetic construct
  misc_feature 1..747: note = Description of Artificial Sequence: Synthetic coding sequence
  source 1..747: mol_type = other DNA
tgactcaagcagttcacagagaaaatgcaaagcgacatggagaagattcaggaaagtgccgactctctggaaggcggtatactcgatttgggcagtgtcctgagtcacatcctcccagtctcggagttgcgtgaagcccaattatacagtgtagacgtgactctggatcctgacacagcatatccttccctcatcctgtcggacaacctgagacaggtgaggtactcctacttgcagcaggacctgcctgacaacccagagcgtttcaatctgtttccctgtgtcctgggctcaccatgtttcatcgcaggaaggcattattgggaggtagaggtgggggacaaagcaaaatggacaataggcgtgtgtgaagacagtgtctgtcgaaaggggggtgtaacctcagcaccacagaatggcttctgggccgtgtccctgtggtatgggaaggagtactgggccctcacatcccctatgactgccctgcctcttagaacgccactacaaagggttggcatcttcttggactatgatgccggagaggtgtcattctacaatgtgactgaaaggtgtcacacatttaccttctcccacgcgaccttctgcggaccagtcagaccgtatttcagcctttcatattccggtggcaaaagcgccgcaccgctgatcatctgccccatgagtggtattgacgggtttagtgggcacgtgggcaaccacggccactctatggaaacgagcccatag

SEQ ID NO: 245001 - DNA, 750 bp, synthetic construct
  misc_feature 1..750: note = Description of Artificial Sequence: Synthetic coding sequence
  source 1..750: mol_type = other DNA
atggcctcgggctctgtggcagagtgcttgcaacaggagacgacatgccctgtgtgtctccaatattttgctgaacctatgatgctggattgcgggcataatatttgctgtgcttgtctagcccgttgctggggcaccgcagagacaaacgtgagttgtccccagtgtagagaaacctttcctcaacgccatatgcgcccaaacaggcacctcgctaacgtcactcaactcgtgaaacagctgcgcactgaacggccatctggccctggtggcgaaatgggagtgtgcgagaaacatagagagcccctaaaactgtactgcgaagaggatcagatgccaatctgcgtggtgtgcgacaggagtcgcgagcatcggggacactcagtacttcctttggaggaggctgtggagggctttaaagaacagatccagaatcagctggatcacctgaaaagggtgaaagaccttaagaagaggcgaagggcacagggtgagcaggccagagccgaactgctcagcctgacccagatggaacgcgagaagattgtttgggagtttgagcagctgtaccattcactgaaagagcacgaatacagactgttagccagactggaagagctggacctcgctatctataactccattaacggtgctattacacagtttagttgtaacatatcacacttgagctccctgatcgctcagctagaggagaagcaacagcagccgactagagaattactacagtag

SEQ ID NO: 245002 - DNA, 1542 bp, synthetic construct
  misc_feature 1..1542: note = Description of Artificial Sequence: Synthetic coding sequence
  source 1..1542: mol_type = other DNA
atggcctcgggttctgttgcagaatgcctgcagcaggaaactacctgtccggtgtgcctccagtattttgccgaacccatgatgctggactgtggtcacaacatttgttgcgcgtgcttggccagatgctgggggaccgctgagaccaacgtgagctgtccacaatgtagggagaccttcccgcagaggcatatgcgacccaatcgccatcttgctaatgtcactcaattggtgaagcaactgagaacagaacgcccaagtggtcccggaggggaaatgggagtctgcgaaaagcacagggagcctcttaagttatactgcgaggaggaccaaatgcctatctgcgtggtgtgtgatcgctccagggaacatcggggacattccgtactgcctctcgaggaagcagtggaaggatttaaagagcaaatccagaaccagctggaccatctgaaacgagtcaaagatttaaagaagagacgaagagctcagggcgaacaggcacgggcagaactgctgagtctcacccaaatggagcgcgagaaaatagtgtgggagttcgagcagctgtaccattccctaaaggaacatgaatacaggctgttggcccgactcgaagaactcgacttagctatctacaattccatcaatggtgccatcacacagttctcctgcaatatctctcatctgtccagtctgattgcccagctcgaggagaagcagcagcagcctacaagagagctcctgcaggacattggcgatacactctcccgcgcagaacgaattcgtataccagagccttggattactccccctgacttacaggaaaaaatccacatatttgcgcaaaagtgcttgttccttacagagtcacttaagcagttcaccgagaaaatgcaaagcgacatggagaagattcaggagctgagagaggctcagctgtattccgtcgacgtgactctagatccagataccgcgtaccctagtcttattctctccgacaacctacgacaagttaggtatagttatctacaacaggacttgcccgataatcctgaaaggttcaatcttttcccctgcgtactgggttcaccctgcttcatcgccggacgccattattgggaggtcgaagtgggtgacaaagccaaatggactataggcgtgtgtgaagatagcgtgtgccgaaaaggcggtgtgaccagcgctccacaaaacggcttttgggccgtgtccctgtggtatgggaaggaatactgggcactgacttctcccatgactgcgctccctctccgcacccccctgcagcgcgtgggcatcttcctggactatgatgccggagaggtcagcttctataatgtcacagagagatgccatacatttacattcagtcacgctactttttgcggccctgtcagaccgtacttttccctcagctacagtggcggtaagtctgctgcacctctcattatttgccctatgtctggtatagacggttttagcggccacgttggaaatcatggccactcaatggagacctctccatag

SEQ ID NO: 245003 - DNA, 1542 bp, synthetic construct
  misc_feature 1..1542: note = Description of Artificial Sequence: Synthetic coding sequence
  source 1..1542: mol_type = other DNA
atggctagtggcagcgtggccgagtgcctgcaacaggagacgacttgtcctgtctgtctccagtactttgcagaaccaatgatgctggattgcggtcataacatttgttgcgcatgtcttgctcggtgctggggtaccgctgagacaaacgtatcatgccctcagtgccgggagaccttccctcaacgacatatgagacccaaccggcatctggcaaatgtaacccagctggtgaagcagctgaggacagaaagacctagtggtccgggaggagagatgggagtgtgtgaaaagcacagggagcccctgaagctctactgtgaggaggaccagatgccaatttgcgtggtatgtgaccgctcacgggaacatcgcggacactctgtgttaccgctggaggaagccgtggagggcttcaaagaacagattcagaatcagctggatcatctaaagcgggtgaaagatctcaagaagagacgcagagcccagggggagcaggcaagggcagagctgctgtctttgactcagatggaaagggagaagatcgtgtgggagttcgagcagttgtaccattcactgaaggagcatgaataccgcctactggcacggctggaagaactggacctggcaatctacaactctattaacggggctatcactcaattttcatgcaatatttctcacctttctagcttaatcgcacagttggaagagaagcaacagcaaccgacacgagaactcctgcaagacataggagatactctgtccagagcggagagaatcagaatccccgagccatggatcacacccccagaccttcaggaaaaaattcatatcttcgcccagaagtgtctcttccttaccgagtctctgaaacagttcactgaaaagatgcagagtgatatggaaaagattcaggaactgcgggaggctcagctttatagcgtggatgtgacactggacccagacacagcgtacccgtctctcattctcagtgacaatctgagacaagtgaggtactcttacttacagcaggatctgccagataacccagaacggtttaacctgttcccttgcgtgctgggttctccatgtttcatagccggaaggcattactgggaggtagaggtgggagataaagccaagtggacgataggagtatgtgaagattcggtgtgccggaaggggggtgttacttcagcaccccagaatggcttttgggccgtgagcctatggtatgggaaggagtactgggcactgacctcaccgatgactgctttgccactgcgtacgccactgcagcgcgtaggaatttttcttgattacgacgcaggcgaagtctccttctataacgttacagaaagatgccatacttttactttctctcacgctacattctgcggtcccgtccgcccttatttctcgctgagctatagcgggggtaagtcagcagcgcctctgatcatttgcccaatgagcggcattgacgggttcagcggacatgtgggcaaccatggacattctatggagacttcaccatag

SEQ ID NO: 245004 - DNA, 750 bp, synthetic construct
  misc_feature 1..750: note = Description of Artificial Sequence: Synthetic coding sequence
  source 1..750: mol_type = other DNA
atggcatcagggtcagtcgcagaatgcttacaacaggagacaacgtgcccagtctgcttgcagtattttgctgagcctatgatgcttgactgcggccacaacatctgttgtgcctgtctggccagatgctggggaacggctgagactaacgtgtcctgcccacagtgcagggaaaccttccctcaaaggcatatgcgacccaacagacacttggctaatgtcacacagctcgtcaagcaactcagaaccgagcgtccaagcggacctggcggagaaatgggggtctgtgaaaagcatcgcgaaccgctcaagctgtactgtgaggaggaccaaatgcccatttgcgtcgtgtgcgaccgtagccgagagcatcggggacactccgtacttccactcgaggaagctgtcgagggtttcaaggagcagattcagaatcagcttgatcacctcaagagagtgaaggatctgaaaaaaagacgtcgggctcaaggcgaacaggcaagggccgaactcctatcactgactcaaatggaaagagagaagatcgtgtgggagttcgaacagctgtaccatagtctgaaggagcatgagtatagactattagcacggcttgaggaactagatctggccatatacaacagtatcaacggagccatcacccagtttagctgcaatatttcgcaccttagttcactaatcgctcagcttgaagagaaacagcagcagcccacgagggagctcctgcagtag

SEQ ID NO: 245005 - DNA, 1542 bp, synthetic construct
  misc_feature 1..1542: note = Description of Artificial Sequence: Synthetic coding sequence
  source 1..1542: mol_type = other DNA
atggcctcaggttccgtggcagaatgtctccagcaggaaaccacctgccctgtttgtctgcagtatttcgctgagcctatgatgttagattgtggacacaatatctgttgcgcttgcctggcgcgatgctggggtaccgccgaaacaaatgtgtcttgccctcagtgccgggaaacttttccccagcgccacatgcggccaaacaggcatttggccaacgtgacgcagctggttaagcagctccgcacggaacgcccatccggtcctggcggtgagatgggggtatgcgagaagcatcgggaacctctcaagctctattgtgaggaggaccagatgcccatctgcgtcgtgtgtgatcggagcagagagcataggggccactctgtgctgcccctggaggaggcggtagaaggattcaaggagcagattcagaaccagcttgaccatctgaaaagagtaaaggacctgaagaagcgaaggagggctcagggcgaacaggcacgggctgagctcctttctcttactcaaatggagcgagagaaaattgtgtgggaattcgagcaactgtaccattctcttaaagagcacgagtatcgtctgctggccagacttgaagagctcgaccttgccatctataactctattaacggggctattactcagttctcttgcaatatctcgcacttgagttctttgatcgcccagttagaagagaaacagcagcagcctactcgtgagctgctgcaggatatcggagatacactaagcagggctgagagaatcaggatccccgagccttggattactccacctgacctccaagaaaaaatccatatctttgcacaaaagtgcctgtttttgacagaaagtctgaagcagtttactgagaaaatgcagagtgatatggaaaaaattcaggagctccgggaggcccagctgtactcagttgacgttaccctggatcccgacaccgcctacccttcccttattttatccgacaatctcaggcaagtacggtacagttacttgcagcaggacctacccgataacccggaaagatttaatctcttcccatgcgtcctcggttcgccttgttttatcgcaggccgacattattgggaagttgaggttggcgataaagccaagtggactatcggggtgtgcgaggatagcgtgtgtagaaagggcggagtgacaagtgcacctcagaacggcttttgggccgtctccctgtggtacggaaaggaatattgggcccttacgtctcctatgaccgcactgccgttaagaacgccgctgcaaagagttggaatattcctggattatgatgcgggtgaggtgtccttttacaatgtgaccgagcgctgtcacaccttcactttttcccatgcaactttttgcggcccagttcgaccgtacttttctctgtcatattccggtgggaagagtgccgcacctctaataatctgtcctatgtcaggaatcgatgggttcagcgggcacgtggggaatcacggtcattcaatggagacatccccatag

SEQ ID NO: 245006 - DNA, 744 bp, synthetic construct
  misc_feature 1..744: note = Description of Artificial Sequence: Synthetic coding sequence
  source 1..744: mol_type = other DNA
ctcaagcagtttacggaaaaaatgcagtcggatatggagaagatacaagagtcagccgacagcttagaaggcggaattttggacctaggatcggtgctgtctcacatcctgcctgtgtcagagcttagagaagctcaactatactccgtggatgtgactctcgatccagatacagcttacccaagtctcattctgtcagataatcttaggcaggtgaggtacagttatcttcagcaggacctgccagataacccagagcgattcaatctgtttccatgcgtgctgggttcaccttgcttcattgccggtcgtcactattgggaggtagaagttggggacaaggcaaagtggaccatcggtgtgtgtgaggatagcgtgtgcaggaagggcggagtcacatccgcaccccagaatggtttttgggctgtcagcctgtggtatggcaaagagtactgggcgttgacgtcaccaatgacagctctgcccctgcgcaccccgctccaacgagtgggaatctttctcgattacgacgcaggggaagtgtcattttacaacgtcacagagcggtgtcacacttttaccttttctcacgcgactttctgtggccctgtgcggccttactttagcctcagctatagcgggggaaaatcagcagcccctctgattatctgccctatgagtggcattgatgggttctctgggcatgtcggtaaccacgggcattccatggagacttccccctag

SEQ ID NO: 245007 - DNA, 750 bp, synthetic construct
  misc_feature 1..750: note = Description of Artificial Sequence: Synthetic coding sequence
  source 1..750: mol_type = other DNA
atggcttccggcagcgtggccgagtgtcttcaacaggagaccacatgccccgtttgtctgcagtacttcgcagagcccatgatgctggattgtggccataatatatgttgtgcttgtctggccagatgttggggcactgctgagaccaatgtttcttgtccacagtgccgcgaaacattcccgcagcggcatatgcgcccaaaccgacatttagctaacgtgacccagctggtgaaacagctcagaacagaacggccatctggcccaggcggagaaatgggtgtatgtgagaagcaccgggagccacttaaactctattgcgaggaagaccaaatgcccatttgcgtcgtctgcgaccggagtagggagcaccgcggacattctgtattacctctggaggaggcggtggaaggcttcaaggaacagatccaaaatcagcttgatcaccttaagcgcgtaaaggacctgaagaaacggagaagggcccagggcgaacaggctcgggctgagctgttgtccctgacgcagatggaaagagagaaaatcgtgtgggagttcgagcagttataccacagcctgaaggaacacgaatatagactgcttgccagattggaggaactggatctggcgatctacaatagcatcaacggcgctattactcagttttcgtgcaatatctcccaccttagctcactcatcgcgcaactggaagagaaacaacagcagccaacacgtgaactgcttcagtag

SEQ ID NO: 245008 - DNA, 159 bp, synthetic construct
  misc_feature 1..159: note = Description of Artificial Sequence: Synthetic coding sequence
  source 1..159: mol_type = other DNA
tagctccgggaagcccagctctattccgtcgacgtgactcttgaccccgacactgcctacccctcgctaatcctcagtgacaacctccggcaagtcaggtattcctatctccagcaagatctgcccgataatcccgaacgtagtccatctacgacatag

SEQ ID NO: 245009 - DNA, 696 bp, synthetic construct
  misc_feature 1..696: note = Description of Artificial Sequence: Synthetic coding sequence
  source 1..696: mol_type = other DNA
taatccgccgacagccttgagggaggcatcttagaccttggctcggtgttgagccatattctccctgtcagcgaactgagagaggctcaattgtattcagtagacgtgactttggaccctgatacggcttacccatcattaattctgtccgacaatctgaggcaggtaaggtatagctatctgcagcaagacctgccagataaccccgagagattcaaccttttcccttgcgttctgggctcgccctgttttatcgcaggacggcattactgggaggtagaagtcggcgataaggcaaaatggaccattggagtgtgtgaggactctgtctgccgtaaaggcggagtgacatccgcccctcaaaatggattttgggctgtctcactgtggtacggcaaagagtactgggctctgaccagcccaatgaccgcgctgcccctgagaacaccactacagcgagtaggcatctttttagattacgacgccggagaggtcagcttctataatgttactgagagatgtcacacattcacatttagccatgccacattttgtggcccagtgcgtccatacttcagtctgtcctactcaggcggtaagtccgctgctcccttaattatctgtccaatgtctggcatagacggattcagcggccatgtcgggaaccatgggcactcgatggagacttctccttag

SEQ ID NO: 245010 - DNA, 624 bp, synthetic construct
  misc_feature 1..624: note = Description of Artificial Sequence: Synthetic coding sequence
  source 1..624: mol_type = other DNA
tagttgagggaggctcagttgtactccgtcgacgtgacactggatcccgatactgcttatccttctctgatacttagcgataatctcaggcaggttagatatagctacctgcaacaagatctcccagataatccagaaaggttcaacttgttcccctgtgtgttaggctccccatgcttcatcgcaggcaggcattattgggaggtggaagtcggagacaaggcaaagtggactatcggcgtgtgcgaagattctgtgtgtcgcaaaggtggcgtgacgtctgctccccaaaacggcttttgggcggtgtctttgtggtacgggaaggaatactgggctttgacctctcccatgacagctctgcctctgagaacaccgcttcagcgagtcggtattttcttggattatgatgcaggggaggtgtcgttttacaatgtgaccgagaggtgtcacacattcacatttagtcacgctaccttttgtggcccagttagaccgtacttctcgctctcatactcaggcggtaagagtgctgctccactaatcatctgccctatgtctggtatcgatgggttcagcggtcacgtcgggaatcatggacattccatggaaacatcaccatag

SEQ ID NO: 245011 - DNA, 1077 bp, synthetic construct
  misc_feature 1..1077: note = Description of Artificial Sequence: Synthetic coding sequence
  source 1..1077: mol_type = other DNA
atggcatcaggctccgtagcagagtgtctccagcaggagacgacttgtcccgtgtgcttacaatattttgcagaaccaatgatgctggattgcggccacaacatttgttgtgcatgtctggccagatgttggggaactgctgagacaaacgtgagctgtccccaatgtcgggagaccttcccccagcgccacatgcgtcctaatcggcatctggctaacgtcacccaactggttaagcaactaaggacagagaggccttcagggcctggcggtgagatgggagtgtgcgaaaaacatagagagccactgaagctttactgcgaggaagaccagatgcctatatgcgtggtctgtgatcgctcaagagagcatcgcggtcactctgtgttacctttagaagaagctgtggagggcttcaaagaacagatccagaatcagctggatcatctcaagcgagtcaaagatttaaagaagcgtcgcagagctcagggcgaacaggcccgtgcggagctgttgagcctgactcagatggaacgagagaagatcgtctgggagtttgaacagttgtaccattcactaaaagaacatgaataccgacttttagcacgcctagaggagctggaccttgcaatatacaactccattaacggggctataacccagttttcttgcaacatttcccacctatcatctctgattgctcagctggaagagaaacagcagcagcccactcgagagttgctacaagatataggggatacccttagccgcgctgagcgcatccgcattcccgaaccgtggattacaccgccagacctccaggagaagatccatatttttgcccagaagtgccttttcctgaccgagagcttaaaacagtttacggagaagatgcagagtgacatggagaaaatacaggaactcagagaggcccaactgtactccgtggacgtcacgctggacccggacaccgcgtaccctagcttgatactgagcgacaacctgcgtcaggtgcgctactcttacctgcaacaggatctgcccgacaaccctgaacgcagcccttcgactacttag

SEQ ID NO: 245012 - DNA, 747 bp, synthetic construct
  misc_feature 1..747: note = Description of Artificial Sequence: Synthetic coding sequence
  source 1..747: mol_type = other DNA
taacttaagcaattcactgaaaagatgcagtcagacatggaaaaaatccaggaaagcgctgactctctcgaaggaggtatcctggatctaggcagcgtgctttcacacatcctgcctgtgtccgaacttagggaggcccagctctattcagtggatgtgaccctagatcctgacacagcatatcctagcttgatcttgtctgacaatcttagacaagtgaggtactcctatcttcagcaagatctcccagacaatcctgagcgcttcaacctttttccgtgtgtcttgggaagcccctgcttcattgctgggaggcactactgggaggtcgaggtcggcgataaggcaaaatggactataggtgtgtgtgaggactcagtttgtcgtaagggaggcgtgacaagcgctccgcagaacgggttttgggcggtgtccctgtggtacggcaaagaatattgggccctcacaagcccaatgactgctctacctctgagaactcctctgcaaagagtcggaatctttcttgactacgatgcaggcgaggtgtccttctacaatgtaacagagaggtgccacactttcacctttagtcacgccacgttttgtggaccagtgagaccttacttttcgctgtcatattccggcggaaaaagcgcagcacctctgataatttgcccaatgtctggaatcgatggtttctcaggacacgtcgggaaccacggacactctatggagacctccccttag

SEQ ID NO: 245013 - DNA, 750 bp, synthetic construct
  misc_feature 1..750: note = Description of Artificial Sequence: Synthetic coding sequence
  source 1..750: mol_type = other DNA
atggcatctggaagcgtggcagagtgtttacaacaggaaaccacctgcccagtttgtttacagtacttcgcggagcctatgatgctggactgtggtcacaacatctgttgcgcttgtcttgctcgatgttggggcactgctgagaccaatgtgtcatgccctcagtgccgagagacatttccccaacgacacatgcggccaaataggcatctggcgaatgtgacacaactggtcaaacagcttcggacagagcgcccatcagggccaggaggggaaatgggcgtgtgcgagaaacaccgcgaaccccttaagctatactgtgaggaggatcagatgcctatctgcgttgtgtgtgataggtcacgggaacacagaggccactccgtcctgcctctggaggaggcggtggagggcttcaaggagcagatacagaatcagttggaccacctgaagagggtgaaggatctgaagaagaggagacgcgctcaaggggaacaggctagggccgaactactctcactgacgcagatggagcgcgaaaagattgtttgggagtttgaacagctttatcactcattaaaagagcacgaatatagacttctcgctcgccttgaagaactggatctagctatctataatagcatcaacggggcaattacccaattttcatgcaacattagccatctgagttcactgatcgctcaacttgaggagaagcagcagcaaccaactcgcgagttattacagtag

SEQ ID NO: 245014 - DNA, 2202 bp, synthetic construct
  misc_feature 1..2202: note = Description of Artificial Sequence: Synthetic coding sequence
  source 1..2202: mol_type = other DNA
atggccaagagggaggattcacccggtccagaagttcagcccatggataaacagtttttagtgtgctctatttgtctggatcgataccagtgtcccaaagttctaccctgcctccatacattctgtgagcgttgtttacagaactatatccccgcacagtccttaacgttgtcgtgtcccgtgtgccgtcagaccagtattctgcccgaacaaggggtctcagccctgcaaaacaatttttttatctcttctctgatggaagcaatgcaacaagcccctgacggcgcacatgatccagaggaccctcacccactgtccgtcgtcgctggccgaccactgagctgccctaaccatgaggggaagacaatggagttctactgcgaagcgtgcgagacagccatgtgcggagaatgccgcgcaggcgagcatcgtgagcaacacaaagctgcactgcagcgccagctcgaggccgttagagggaggctgccacaactgagtgccgcaatagctctcgtggggggaattagccagcaactgcaggagaggaaagcggaggcacttgctcagatctcagcagccttcgaggatctagagcaggcactccaacagcgaaaacaggcccttgtgagtgaccttgagactatctgcggagcgaagcaaaaagtcctgcaaagtcagctcgatacattgagacagggccaagaacacatcggctcctcctgcagcttcgctgagcaagcgctccggctcggaagcgccccagaggtcctgctcgtcagaaagcatatgagagaacgtctggccgctctagccgcacaggctttcccagagcgaccccatgagaatgcgcaactggaactggtcctggaagtggacggcctccggagatccgtgttgaacctaggcgctctgcttacaactagcgcgaccgcgcatgaaactgtggctaccggcgagggtttgcggcaggcccttgtcggacagccagcgtctctgaccgttacgactaaggacaaagacgggcgtctcgttcgaacaggtagtgctgagctaagggccgaaattaccggacccgatggaacacgcctccccgtgccagtcgtcgaccacaagaacggaacgtacgaactggtgtacacagctagaaccgagggcgaattgctcctgtccgtgctactctacgggcaaccggtgaggggatccccatttagggtgagagcgctacgcccaggcgacctgccccctagtcctgacgatgttaaaagaagggtcaagtctcccggaggacctgggagtcacgtgcgacaaaaagctgtgaggcggcctagcagcatgtattccacgggcggaaaacgcaaagataatcctatcgaggacgaactggtgttcagagtcggcagtcggggtcgagagaagggcgagttcaccaacctgcagggagtgagtgcagccagcagtggcagaatcgtcgttgcggattccaataatcagtgcatacaggtattttccaatgagggccaattcaagtttcgatttggtgtgaggggaaggagtcccggtcagcttcagcggcctacaggtgtcgccgtagatactaacggagacatcatcgtagctgattatgataatcgctgggtgtctatattttcacccgaggggaagttcaagaccaaaatcggagcaggcaggttgatgggcccaaagggagtcgctgtagacaggaatgggcacattatagtagtggacaataagtcttgttgtgtgttcacatttcagcccaacgggaaactcgtcggcagattcggcggacgaggagccaccgatcggcactttgccggaccacactttgttgccgtgaacaacaagaatgagatcgtggtaacagattttcacaaccactctgtgaaagtgtactccgctgacggagagtttctcttcaaattcggcagccacggtgaaggtaacggacagtttaacgcccctaccggggtggcagtcgattccaatgggaatattatcgtagctgattgggggaacagccgtatccaggtttttgatagttcggggtctttccttagctacattaatacctctgctgaacctctctatggccctcagggacttgcacttacaagtgacggccacgtggtggtggcggacgcaggaaatcattgctttaaagcctatcgctacctgcaatag

SEQ ID NO: 245015 - DNA, 2235 bp, synthetic construct
  misc_feature 1..2235: note = Description of Artificial Sequence: Synthetic coding sequence
  source 1..2235: mol_type = other DNA
atggctaagcgggaagactcaccaggcccagaggttcagccaatggacaagcagtttcttgtgtgctccatttgtctggacagataccagtgtcctaaagtattaccttgtcttcatactttctgtgaacgttgcttgcagaattatatacccgctcaatctttgacattgtcatgtccggtttgtcggcaaacttctattcttccagaacagggggtgtcagcccttcagaacaatttctttatttcctcccttatggaagcgatgcaacaggcccctgacggggctcacgacccggaagacccacatcccttgagtgtggtggcgggaaggcccctcagctgtcctaaccatgaaggcaaaactatggaattctattgcgaagcctgtgaaaccgccatgtgcggcgaatgcagagccggagaacaccgtgaacatggaacagtgctcctgagggacgtcgtggagcagcataaagcagcattgcaaaggcagctggaggctgtgagaggcaggctcccccaactgtcagccgctatagccctggtagggggaatctcacagcagcttcaggaaaggaaggcggaggctctggcccagatcagtgcagccttcgaggatttggagcaggccttacaacagcgaaagcaggcgttagtgagtgatttggaaacaatctgtggagcaaagcagaaggttctgcagagccagctcgatactctccggcaagggcaggagcatatcgggagttcttgttccttcgccgagcaggctttgagacttggatccgcaccggaggtactgttggtccgcaagcacatgcgggaaaggctcgcagcacttgcggcacaggctttcccagaaaggccccacgagaacgctcaactggagctggtgctggaggtggacggattgagacggagcgtactcaacttgggagccctcctgacaacctctgccacagcccatgaaacagtcgccacgggggagggacttcgacaagctttggttggccagcctgccagcctgacagtcacaactaaggataaggatgggagactggtccggactggctccgctgagctccgcgctgagatcaccgggccagacggaaccaggctgcctgttcccgtcgtggaccataagaacggaacctacgaactggtttatacagccagaacagagggcgaactgctcctgtctgttttgctctacggccagccagtgcgcggttcaccgttccgggtcagggcactgaggccgggagacctccccccatcccccgatgatgtcaaaagaagagtgaaatcacccggagggccaggctcacacgtgaggcagaaggctgttcggaggcccagctcaatgtatagcacaggcggaaaacgcaaggacaatcctattgaagatgagctcgtgttccgcgtggggagtcgcggtagggaaaaaggggagttcacaaatttacagggcgttagtgcagcctcatccgggaggatcgtggttgctgacagtaataatcagtgtatccaggtgttctccaatgagggacagtttaaatttagatttggggttcgcggacggtcacctggtcagttacagagacctacgggagttgcagtggacactaacggtgatattatagtcgcagattatgacaaccggtgggtgtctattttttctccggaaggtaagttcaagacaaaaattggcgctggccgactgatgggccctaagggagtagctgtggaccgcaatgggcatattatagtcgtagacaacaaatcgtgctgcgtgttcacattccagcccaatgggaaactggtgggccgatttggcggacgaggagccacagataggcacttcgctgggccacacttcgtggcggttaataacaagaatgagattgttgtgactgattttcacaatcactcagtgaaagtgtattccgctgacggtgagttcctgtttaaattcgggtcccacggggagggcaatgggcagtttaatgctcctacaggagtcgcagtggacagcaatggtaacatcatagttgccgattggggaaattcgcgcatccaggtgtttgatagctcaggtagttttctgtcgtacatcaatacttccgccgaacccctctatggaccccagggactagcacttacctctgatggacacgtggtggttgccgatgctggtaaccactgtttcaaggcttacaggtaccttcagtag

SEQ ID NO: 245016 - DNA, 2235 bp, synthetic construct
  misc_feature 1..2235: note = Description of Artificial Sequence: Synthetic coding sequence
  source 1..2235: mol_type = other DNA
atggccaagagagaggacagtccagggcctgaagtgcagccaatggacaaacagttcttagtttgttcaatatgtttagataggtatcagtgtcccaaggtgctgccctgtctgcatacattttgtgaacgatgtcttcagaattatattccagcccagagcctgacgctcagttgccccgtgtgtaggcagacatctatcctccctgagcagggggttagtgccttgcaaaacaattttttcatatccagtctgatggaggctatgcagcaggccccagacggagcccacgacccggaggaccctcatcctctgtcagtcgtggcaggacggcctctgtcttgccctaaccacgaaggtaagacaatggagttctactgtgaggcctgcgagactgctatgtgcggggagtgtcgcgctggggagcacagggagcacgggacagtccttcttcgagatgtggtcgagcaacacaaagcggctctccagcggcaactcgaggccgtgagaggacgattgcctcagttgagtgcagctattgctctggtggggggtattagtcagcaactccaagagcgtaaggctgaggcccttgcgcagatttctgccgctttcgaggacctggaacaggcactgcagcagagaaagcaggctttggtcagcgatctcgagaccatttgcggtgctaaacaaaaagtcttacagtctcagctcgacacgctgcgtcaaggacaggagcatattggaagtagctgctcattcgccgaacaggcacttagactcggttcggcacctgaggttctgctcgtgaggaagcatatgagagaaagactggcagcacttgcagcacaggcctttcccgagcgcccacatgagaatgctcagctggagctcgttctggaggtggatggccttcgcaggtccgttctcaatctgggggctttgctgaccacgtcggcaaccgcacatgaaacggtggcaacgggagaaggcctgagacaagcactagtaggacagccggcaagtttgaccgtcaccactaaagacaaggatggtagactagtgaggactgggagtgcagagcttcgcgctgaaattacaggtccggacggcactagactgccagtgcccgtggtggaccataagaacgggacctacgagctggtatataccgccagaaccgagggggagctgcttctctccgtgctgctttacggccagcctgttcgagggtcaccgtttcgcgtccgcgctctacgccctggagacctgccaccatcccctgatgatgtcaaacgcagggtcaaatccccaggtggaccaggttcacatgtgcgccaaaaggctgtgagacgcccatctagcatgtacagcaccggcggaaagagaaaggataaccctattgaagacgaactggtgttccgcgtaggctctcgtggacgagagaaaggggaatttaccaatctgcagggggtgtcggcggctagttctggtaggattgtagtcgccgactcaaataaccaatgcatccaggtgttcagcaatgaaggccagtttaaattccggttcggcgttagaggacgctctcccggacagttgcagcggcctactggggtggctgtcgacactaatggggacatcattgttgcagactacgacaaccgctgggtcagtatcttctcacctgaaggtaagtttaaaaccaaaattggggcagggcgactaatgggccctaaaggagtggctgtggataggaacggtcacatcatagtggtggataataaatcgtgctgtgtctttacgttccaaccgaacggcaagctagttggtaggtttggcggacgaggcgcaactgatagacacttcgcgggaccccacttcgtcgccgttaataacaagaacgaaattgtcgtaaccgattttcacaaccactccgtcaaagtctactccgctgacggtgaattcctgttcaagttcggctcccacggcgagggcaacggccagttcaacgcccctaccggcgtggctgtggattccaatggcaacatcatcgtggccgattggggcaactctaggattcaggtgtttgattcaagtggctccttcctgagctacataaacacgtcagctgaaccactttatggcccacagggcctggcgctcacgtctgatggccacgtggttgtggcggacgcgggtaaccattgcttcaaggcctatagatatctccagtag

SEQ ID NO: 245017 - DNA, 2235 bp, synthetic construct
  misc_feature 1..2235: note = Description of Artificial Sequence: Synthetic coding sequence
  source 1..2235: mol_type = other DNA
atggccaagcgcgaagattcccccggtcctgaggtgcagcctatggacaagcaatttctggtgtgtagtatttgcctagatcggtaccaatgccccaaggtgttaccatgtttgcacactttctgcgaacgctgtttacagaactacattccagcccagtccttgactctgtcttgccctgtctgcaggcagaccagtatactccccgaacagggagtgtcagcactacagaataatttcttcatctcatcactgatggaggcgatgcaacaggccccagatggagctcacgatcctgaagatccccacccactgtccgtagtggccggtcgtccattatcctgcccgaaccatgaggggaagaccatggagttttattgcgaggcttgtgagactgcaatgtgcggggagtgtagggccggagagcatcgagagcacggaactgtattacttcgggacgtggtcgaacagcacaaagctgcactgcaacgtcagctggaagccgtgcggggacgtctgccacagcttagcgcagctatcgccttggtcggtggcatctcacagcagctccaagagagaaaggccgaagccctggctcagatatccgctgcattcgaagatctggaacaagcgctacaacaacgcaagcaggctctcgtgtctgacctggagaccatctgcggcgcaaaacagaaggtgctacagagtcaattagacacattgcgacagggacaggagcacataggctcctcatgtagctttgcggagcaagcactccgccttggcagcgcccctgaagtactgctggtcaggaagcatatgagagagcggttagccgctttggctgcccaggctttccccgaaagaccccacgagaacgctcagttggagctcgtcttagaagtggatggtctccgcagatccgtgttaaatctgggcgcactgcttacaacctccgcaacggcacatgagacagttgccaccggcgaaggcttgcggcaagcactggttgggcagcccgcttctctgaccgttaccaccaaggataaagatgggcgacttgttcgtacaggatcggctgagctgagagccgaaatcactgggcctgatgggacccgcctgcccgtgcccgttgttgatcacaagaatggcacatacgaattagtctacacagcccgtacagaaggtgaattactgctgtccgttctgttgtacggccagccagtgagggggtcccctttcagggtaagagccctaagaccgggagacctacctccctcaccagatgacgtgaaaaggagggtcaagagcccgggagggccaggctcgcacgtgagacaaaaagctgtccgacgcccaagcagcatgtactccaccggtggaaagagaaaggataatcctattgaagatgaattggtcttcagggtcggttcccggggacgcgagaagggagagttcaccaacttgcagggggtaagcgcggcatcctcagggcgaatagtagttgcagattctaacaatcagtgtatccaggtttttagtaatgaagggcagtttaagttcaggtttggggtgcggggacgcagtcctggacaattacagcgacccactggcgtcgccgtggataccaacggggatattatagtggccgattatgacaaccggtgggtgtctatcttttccccagagggaaagtttaaaacaaagatcggggctggaaggcttatggggccaaagggagtcgctgtcgatagaaacggacacataattgtggtggataacaaaagctgctgtgtttttacttttcagccaaatggaaagctggtcggtcgctttggaggtagaggggcaacagataggcacttcgccggtccacattttgtagccgtgaataataagaatgagatagtggtcactgatttccacaaccactcggtcaaggtatattctgccgacggcgagttcctatttaagtttggcagccacggagaggggaacggccaattcaatgcccctacaggggtggctgtcgacagcaatggcaatattattgttgctgattggggaaatagtagaatccaggtatttgactccagtgggagctttctgagctacatcaacacttcagctgagcccctctacggaccccagggactagccctgacaagtgacggccatgtggtggtcgccgacgctggtaaccattgttttaaagcctaccgctacctccaatag

SEQ ID NO: 245018 - DNA, 2229 bp, synthetic construct
  misc_feature 1..2229: note = Description of Artificial Sequence: Synthetic coding sequence
  source 1..2229: mol_type = other DNA
atggctaaaagagaggattcgcctggaccggaagtgcagccgatggataaacagttcctggtgtgtagtatttgcctcgatcggtatcagtgtccgaaggtgctgccctgcctccacaccttctgcgagcgctgtctgcagaactatatcccagcacagtcactgactttgtcatgccccgtgtgtcgacaaacttccattctacccgagcagggggtttccgcactccagaataatttcttcatctcttccctaatggaagctatgcagcaggcacctgacggggcacacgaccccgaggatccacaccctctgagcgttgttgctgggaggcccctctcgtgccctaatcacgaaggcaagactatggagttctactgcgaggcctgcgagacggccatgtgcggtgaatgtagagcgggagaacaccgtgagcacggtaccgtgctgctgagggacgtggtcgagcagcacaaggcagccttgcagaggcagctcgaagcagttagaggaaggttgccacagctaagcgcagccatcgcgctggtggggggaatttcccagcaactgcaggaacgaaaagctgaggcactggcccagatctcggcggctttcgaagacctggagcaggctctgcaacagaggaaacaagctctagttagcgatctggagacaatttgcggtgccaaacagaaagtcctccagtcccagctggacactttgcgtcagggtcaggaacatattggcagcagctgtagttttgctgagcaggccctgagactcgggagtgctcctgaagtcctcctggtgcgtaagcacatgcgggaaaggttagcagccttggcagcccaagcgtttcctgaacgacctcacgaaaatgctcaactggagctcgtactggaagtcgatggtcttaggagatcggttctgaacttaggagccctgctgacaacatccgccactgctcatgagacagtggcaaccggggagggcttacgtcaggccttagtcggccagcctgcctctttgacagtaaccactaaagacaaggatggaaggctggttcgcaccggcagtgccgagcttcgcgctgagataacaggtccggatggcactagactccctgtgcctgtagtggatcacaagaatgggacctacgagctggtgtacaccgctcggacagagggggaactgctgctctccgttctgctgtatggccagcccgtgcggggatccccattccgcgtcagagctctgaggccgggagacctccctcccagtcccgatgacgtcaagcggagagtgaaatcacctggcggtccaggaagccatgtccggcaaaaagctgtcaggcggccatcatcaatgtacagtactggtggaaagcgcaaggacaatcccatcgaggatgagctagtgtttagagtgggaagccggggtcgcgaaaagggagaatttacgaatctgcagggagtctccgccgcttccagtgggaggattgtggtggccgacagcaacaatcagtgtatccaggtgttcagcaatgaaggacagttcaagtttagattcggagtcagggggagatctcctggacagctgcagcgccctactggtgtcgccgtagacacaaatggagacattatcgtcgcggactatgataatcggtgggtgagtatcttctcccctgagggaaagttcaagacaaaaatcggggcaggcaggctcatgggcccaaagggcgtggccgtcgaccgcaacgggcatattattgtggtcgacaacaaaagctgttgcgtttttactttccaacccaatggcaagctagtagggagattcggcggaaggggggcaactgacagacattttgcaggaccgcatttcgtagccgttaataacaagaatgaaatcgtggtgactgacttccacaatcactccgtgaaagtttactctgccgatggagagtttctgttcaagttcggctcgcacggagaggggaacggacagtttaacgctccgacaggcgttgcagtggattctaacggaaacatcatcgacgtgtgccgcgcttcaccttacccctcatacactcccccacacccctgtcaatcagctcctcacccccctgcctggggacagaactctctgccccaggatagaagccccagctcatgcttacccaccaccctgtacaccctcaccgaaactgccattccacacccaccttactag

SEQ ID NO: 245019 - DNA, 1878 bp, synthetic construct
  misc_feature 1..1878: note = Description of Artificial Sequence: Synthetic coding sequence
  source 1..1878: mol_type = other DNA
atgaaaacgatggagttttactgtgaagcatgtgagaccgcaatgtgcggtgaatgtagagcaggtgaacaccgagagcacggaacggtgcttctgcgggacgtggtagaacaacacaaggctgccctacagcgacagttagaggccgtgagagggaggttgcctcaactgtcagctgcgattgcgttggtggggggaatatctcagcagctacaggaacgaaaggcagaagctctcgctcagatctccgcagcctttgaggatctggagcaggccctgcaacagcggaagcaggccctggtctcagacctggaaacaatatgcggcgcaaagcagaaggtgctgcagagtcaactcgacacgctcagacaggggcaggagcacattggatccagctgttcgttcgcagagcaagccctgaggcttggatcagctcctgaagtcctcttagtgcgcaaacacatgagggagcgtctggcagccttggctgcccaagcatttcccgaaaggccccacgaaaatgcccagctggaacttgtcctggaggtcgacgggctcagacgatcagtgcttaacttgggcgcactacttacaacttctgctacggcacacgagactgtggctaccggcgagggcctcaggcaggccctcgttgggcaacctgccagtctcaccgtgactacaaaggataaggatggccgactggtcaggaccggttcagctgagctacgcgcagaaattacaggccctgacgggacaaggcttcccgtccccgtcgtggatcataaaaatgggacttatgagttagtgtacactgcccgtacagagggcgaactgctcctgtcggtgttactatacggccagcccgtgcgcggttcccccttccgcgtcagagccctgcgcccaggcgatttacccccatcaccagacgacgtcaagagacgagtcaaatccccgggaggacctgggtctcacgtgcggcagaaagctgtcagaaggccctccagtatgtactcaaccggtggcaaaagaaaagacaacccaattgaagacgagctggtttttagagtgggtagtcgcggtcgtgagaagggcgaattcacaaaccttcagggagtgtctgccgctagcagcgggaggattgttgtcgccgacagtaacaaccagtgcatccaggtatttagtaatgaaggacagttcaagttccgctttggggtgcggggtcggagtccaggccaactgcagcggccaacgggcgtggccgtggatacaaacggcgacatcatcgtggccgactacgataacaggtgggtaagcatttttagccctgagggcaagttcaagactaaaatcggagccggacggctgatgggtccaaaaggggtcgctgttgatcgcaacggccacattatagtagtggacaataagagctgttgtgtgttcacctttcagcctaatggtaagttagtgggcagatttggaggcaggggagcgactgataggcatttcgctggccctcatttcgttgcagtcaacaataagaacgagatcgtggtcacagattttcacaatcatagcgtcaaggtctactcggcagacggtgaattccttttcaagtttggcagtcatggtgagggaaatggacagtttaacgccccaacaggggtagctgtggacagtaacgggaacataatagtggctgactggggaaactcacgtattcaggtctttgactcctccggcagttttctgagttacatcaacaccagtgcagaacctctttatgggccacagggcctggcactgaccagtgatgggcacgttgtggtcgccgacgccggaaaccactgctttaaagcctaccgatacttgcaatag

SEQ ID NO: 245020 - DNA, 2001 bp, synthetic construct
  misc_feature 1..2001: note = Description of Artificial Sequence: Synthetic coding sequence
  source 1..2001: mol_type = other DNA
atggcgaaaagagaggatagccccggacctgaagtgcagcctatggacaaacagtttctggtgtgttccatctgcctcgatagataccagtgccctaaggtcctgccctgcctgcacacgttttgtgagcgatgcctgcagaactacatacctgcacagtcactgacactatcatgccccgtctgtaggcagacttctatcctgcctgaacagggcgtgagcgcattacaaaataattttttcataagctcgcttatggaagccatgcagcaggcccctgatggagcccacgatcctgaggatccgcatccattatccgtggttgccggacgccctctctcctgtcccaaccacgaaggcaagactatggaattttactgcgaggcatgtgagaccgctatgtgcggcgaatgcagggcgggtgagcatagggaacacggtactgttctgctgagggatgttgtcgagcaacataaggctgccctccaaagacagctggaggcagttaggggaaggttacctcagctgtcagcggctatagcccttgtagggggaatctcgcagcaactgcaagagcgcaaagccgaggctctggcccagatttcagccgcttttgaagacctggagcaagcattgcaacagaggaagcaagcgctggtatccgacctggttgacgggttgcggcgatctgtgttgaacctgggggcactgttgaccacttccgccactgcccatgagacagtcgcgaccggagaagggctgcggcaagccctggtggggcagcctgcgtcacttaccgttacaaccaaggataaggacggtagattagtgaggaccggcagcgctgaacttcgtgccgaaattacaggtcccgacggcacgaggttgccggtgcctgtcgtggaccacaagaacggcacttatgagcttgtgtacactgctcgcaccgagggagagctgcttctgtccgtcctgctgtatggacagcccgttagaggctccccattccgggttcgcgctctacgacctggcgacctcccgccaagtccagacgacgttaaacggagagtgaaaagtccaggaggaccgggatcacacgtccgccagaaagctgtaaggagaccaagtagcatgtactctacaggtggtaaacggaaggataaccccatcgaggatgaactcgtgtttagagttggtagccgtggcagagaaaagggggagttcacaaatctgcagggcgtttccgcagcgagcagcggtcgaatcgtggtggccgacagtaacaatcagtgcatccaggttttcagtaacgaagggcagtttaagttccgatttggagtgagggggagatctcctggacagttgcagcggccaacgggggtggctgtagacaccaatggtgacatcatcgtagccgactacgacaacagatgggtgagtattttctcccctgaaggcaagttcaaaaccaaaataggcgcaggccgactgatggggccaaaaggagtggccgtcgaccgtaacggccacataattgtggtggacaacaagtcctgctgcgtgttcacgttccagcccaatggcaaattggtcggtcgcttcggtgggcgaggagccaccgacagacacttcgctgggccacatttcgtggcagtgaataacaagaatgaaatcgtggtgacagattttcacaatcattcagttaaggtttacagtgctgatggggaatttctattcaagtttggctctcacggtgaaggcaacggccagtttaacgctccaactggagtcgcagtggactccaacggaaatattatcgttgcagactgggggaactcaaggattcaagtcttcgactcaagtggatcatttctctcttacattaatacttctgccgagcccctttacggcccacagggcctggcactcacatcagacggccacgttgtggtcgctgacgccggaaatcattgctttaaagcctacagatatctccagtag

SEQ ID NO: 245021 - DNA, 2226 bp, synthetic construct
  misc_feature 1..2226: note = Description of Artificial Sequence: Synthetic coding sequence
  source 1..2226: mol_type = other DNA
atggcaaagcgcgaggatagcccgggtccagaggtgcaacctatggacaaacagttcctggtttgcagtatatgcttggaccgctatcagtgtccgaaggtactgccgtgtctccataccttttgcgagaggtgcttgcaaaactacatccctgcccagagtctcacgctcagctgtcccgtgtgtcgtcaaaccagtattctccccgaacagggagttagcgcccttcagaacaacttcttcatttcatcacttatggaggctatgcaacaagctccagatggcgcacacgaccctgaggacccccatcctctctcggtcgttgctggtcgtcctttgtcttgccccaaccatgaaggcaagacgatggaattttattgtgaagcatgcgagactgctatgtgcggcgagtgccgcgctggggaacaccgcgaacatggtactgtcctgctgagggacgtggtggagcagcataaagccgcactccaaagacaactcgaagctgtgagaggcaggttgcctcagctgagcgccgcaattgcactggtgggtgggatatcccaacagctccaagagcgtaaggctgaggccctcgcacaaattagcgccgcatttgaggacctggagcaagctctgcagcagcggaagcaggctctggtgagcgacttggagacaatctgtggcgcaaagcagaaagtcctgcaaagtcagctggacactctgcgacaggggcaggagcatatcggttccagttgctcttttgcagaacaggctctcaggctaggtagcgcgccagaggttctgctggtgagaaagcatatgcgagaacgattagctgctctggcggcacaggcctttcctgagaggccacacgagaatgctcagctggagctggttctagaggttgacggtctccgaaggtctgtactgaacctgggggcactgctcaccacgtcagctactgcacatgagaccgtcgcaacaggcgaaggcctgcgccaagccctcgtgggccagcctgcctcacttacagttaccacaaaggataaggatgggagactcgtaaggacaggtagtgcagaactgcgggctgagataactggcccagacggaactcgcctgcctgttccagtggtggatcacaagaacggcacatatgagcttgtgtataccgcccgaactgaaggtgaactgctattgtcagtactgttgtatgggcagcccgtaagggggtcccctttccgcgttagagccctgcggcctggggacctgccaccatcacctgatgacgtgaaacggagagtaaaaagcccaggtggcccaggaagtcatgtgagacagaaagctgtgcggagaccctccagcatgtatagcacaggtggaaagaggaaggataatcctatcgaggatgagctggtattccgggttggcagccgtggacgggaaaaaggggagtttaccaatctacagggggtgagtgctgcatcaagcggcaggatcgtggtcgcggactccaacaaccagtgcattcaggtgttctctaatgagggacagtttaagtttcgtttcggtgtccgcggaaggtctcccggacagcttcaaagaccgactggggtcgccgtcgataccaacggtgacatcatcgttgccgattacgataaccgatgggtgagcattttttcccctgagggtaagttcaaaacgaaaattggggctggcaggctcatgggccctaaaggagtagccgtcgatcgcaacggccatatcatcgtggttgataacaagtcctgttgcgtcttcactttccaacctaatggcaagttagtgggacggttcggcggacggggagccacggatcggcatttcgctggccctcacttcgtggccgtgaacaataaaaatgagatcgtggtgactgatttccacaatcactccgtgaaggtgtacagcgctgacggtgagttcctcttcaaatttggcagccacggggagggtaatggtcagttcaatgcaccgactggcgtggcagtggactctaatggtaacatcatcgtgtgccgggctagcccctatccatcctacacacctccacacccatgtcagtccgcccctcatcctcccgcttgggggcagaactcactgccccaggacagaagccccagcagctgcctccctacgacactctataccctgaccgaaaccgcaattcctcaccctccttactag

SEQ ID NO: 245022 - DNA, 1278 bp, synthetic construct
  misc_feature 1..1278: note = Description of Artificial Sequence: Synthetic coding sequence
  source 1..1278: mol_type = other DNA
atggcaagcggccagtttgttaacaaacttcaggaagaggtgatctgtcctatctgtcttgacattctgcagaaacccgtgacgatcgactgtgggcataacttttgcttgaagtgcattacacagatcggcgagacgtcttgtggattttttaagtgccccttgtgcaagaccagtgtgagaaaaaacgccattaggtttaattcactactgcgaaacctggtggagaaaatacaggcacttcaggccagcgaagtgcagagtaagcgtaaggaggccacctgcccacggcatcaagaaatgtttcattacttttgcgaggatgacgggaagttcttatgcttcgtctgttgcgaatcaaaagatcataagagtcacaacgtgtctttgatcgaggaggctgcacagaactaccaaggtcagattcaggaacagatacaggtgctgcagcagaaggagaaggagactgtccaggtgaaagcccaaggagttcaccgcgtggacgtgttcaccgaccaggttgagcatgaaaagcaacgcattctgacagaatttgaattgctgcatcaagtgctcgaggaggaaaaaaacttcctcttgtctcgcatctactggctagggcatgagggcactgaggctggcaagcattacgtagcttccacggagcctcagctgaacgacctgaagaagctggtggatagcctgaaaaccaagcagaacatgccccctaggcagctcttagaagatattaaggtagttttgtgcaggtcggaagaatttcagttcctgaaccctacgcctgtgcccctggagctggagaagaagctctcggaggcaaaatcgaggcacgattctatcaccggttccctgaagaagttcaaagatcagctccaagccgacaggaaaaaggatgaaaaccggtttttcaaatctatgaacaaaaatgatatgaagtcttgggggttactccaaaagaacaaccataaaatgaacaaaacctccgaacccggttcttcgtccgcagggggtcgcaccacgtcgggaccccctaaccaccacagctcggcgccttcccatagcctgtttagggcttcatcagctggaaaagtgaccttcccagtttgcctgctggcatcatatgatgaaatctcaggccaaggggcatcttcccaggataccaaaacattcgatgtcgcactgtcagaggagcttcacgccgctctgagcgaatggctcactgccatcagggcatggttttgtgaggtaccatcttcctag

SEQ ID NO: 245023 - DNA, 1278 bp, synthetic construct
  misc_feature 1..1278: note = Description of Artificial Sequence: Synthetic coding sequence
  source 1..1278: mol_type = other DNA
atggcctctggacagtttgtcaacaagctccaggaagaggtgatttgccccatttgccttgatatactgcagaagccggtaaccatagattgtggtcacaacttctgcctgaagtgtattacccagatcggcgaaacgtcgtgcggatttttcaagtgccccctctgcaagaccagcgtgcgcaaaaacgcaatcaggttcaactccctgctgcgaaatttggttgaaaagatccaggccttgcaggcctccgaagtccaatctaagcgcaaagaagcaacctgtcctaggcaccaggaaatgttccactatttttgtgaggacgacggcaaattcttatgctttgtttgtcgcgaatctaaagaccataaaagccataatgtcagtctgattgaggaggctgctcagaactaccagggacagattcaggaacagatccaggttctccaacaaaaggagaaagaaacggtgcaggtgaaagcccagggcgtgcaccgggttgacgtgtttacagaccaggtggaacacgagaaacaaaggattctgaccgaatttgaattgctccaccaagtgttagaagaagaaaaaaactttctcctctctcggatctattggctcggtcacgaaggcacagaggccggaaaacattacgtggcgtctactgagccgcagctaaatgatctgaagaagttagttgattcattgaaaaccaaacagaatatgcctcctcggcagctgctcgagcccgcacagccacatttgccaagatcagaagagtttcagttcctgaaccctacaccagtgcctctagagcttgaaaaaaaactctcagaggcaaagagccgccacgatagtatcaccggtagtcttaagaaattcaaggaccagctccaggccgataggaagaaagatgaaaaccggttttttaagtcgatgaataaaaatgatatgaaaagttgggggctgttacagaagaataatcataaaatgaacaaaaccagtgaacctgggtccagtagcgccggtggcaggacgacctcaggaccgcctaaccaccattcatccgcaccaagccattcactgtttcgggcttcctcagcaggaaaggtgaccttccctgtttgcctgctagcttcctacgacgaaatctccggacaaggtgcatcctctcaggataccaaaacgttcgatgtcgcactgagtgaggagctccacgccgctctttctgaatggctgacagcaatcagggcatggttctgtgaggtcccctcatcttag

SEQ ID NO: 245024 - DNA, 1278 bp, synthetic construct
  misc_feature 1..1278: note = Description of Artificial Sequence: Synthetic coding sequence
  source 1..1278: mol_type = other DNA
atggctagcggacagttcgtgaacaaattgcaagaggaagtgatctgtcctatatgtttggacatactccaaaagcctgtgaccatcgattgcggtcataatttttgtctcaaatgtattacacaaattggtgagacttcctgtggcttcttcaaatgccccctgtgtaagacatctgttcggaagaatgcaatccggtttaactccttgctccgtaacttggttgaaaagattcaagcgctgcaagcaagtgaagtgcagagtaaacgcaaagaggccacatgccctcggcaccaggagatgtttcactacttttgtgaggacgacggtaagttcctatgctttgtctgccgcgagagtaaagaccacaagagccacaacgtgtcactcatagaggaagcggcacagaactaccaggggcagatccaggagcagattcaggtattgcagcagaaggaaaaggaaacagtacaagtcaaggcacagggtgtacatcgggtggatgtgtttactgaccaggttgagcatgaaaagcagcgaatcttgacagagtttgagctactccaccaggtgctggaagaggaaaagaattttctcctcagccgcatctattggctgggccacgagggcacagaagccggtaaacattatgtggcctctactgagcctcaactgaacgacttgaagaagctcgtggattcattgaaaaccaagcagaatatgccaccaagacagctcctggaggatatcaaagtggtgctgtgtcgctccgaagaatttcagttcctcaacccaacgccagtgccccttgagttagagaaaaagctctctgaggcaaaatctagacatgatagcatcacaggctctctgaagaagttcaaggaccaactccaagctgaccgtaaaaaggatgagaataggttcttcaagtcaatgaacaaaaatgacatgaaaagctggggattattgcaaaagaacaatcacaagatgaacaaaacttccgagcccggaagcagcagcgcgggaggtaggacgaccagcggaccgcctaaccatcatagcagcgctccatcccatagcctgttcagagccagctccgcaggaaaagtgaccttccccgtgtgtctcttggcttcctatgacgaaatatcaggccagggcgctagttcacaggacacaaagactttcgacgttgctctgagtgaggagctccacgccgcactgagtgaatggctgactgccatccgggcatggttttgtgaagtcccttcttcatag

SEQ ID NO: 245025 - DNA, 747 bp, synthetic construct
  misc_feature 1..747: note = Description of Artificial Sequence: Synthetic coding sequence
  source 1..747: mol_type = other DNA
atggcaagcgggcagttcgtcaacaaactgcaggaagaggtgatctgccccatctgcttggatatcctccaaaaaccggtcacaatcgattgtgggcataacttctgccttaagtgtatcacccagatcggagaaacctcttgcgggtttttcaagtgcccattgtgtaagacgagcgtacgtaagaatgctattaggtttaactcactgctccggaacctggtggagaaaatccaggcactgcaggcatccgaagtccagtccaaacgtaaggaagccacctgccctcgccaccaggagatgtttcattatttttgcgaagatgacggaaagttcttatgtttcgtgtgcagagaatctaaggaccacaagtcccacaacgtgtctcttattgaagaagcagctcagaactaccaaggtcagatacaggagcaaatccaggttcttcagcaaaaggagaaagagaccgtccaggtgaaagcccaaggcgttcatagagtggatgtttttactgaccaagtcgagcatgaaaaacagcgcattctgacggaattcgaactgctgcaccaggttctggaggaagaaaaaaactttctgctaagtcgtatctactggttaggacatgaagggacggaagccggaaagcattacgtcgccagcacagagccacaattgaacgacctgaagaagttggtcgattctctcaagactaaacagaacatgccacccaggcagctcttagaatag

SEQ ID NO: 245026 - DNA, 1278 bp, synthetic construct
  misc_feature 1..1278: note = Description of Artificial Sequence: Synthetic coding sequence
  source 1..1278: mol_type = other DNA
atggcctcaggccagttcgtcaacaaacttcaggaggaggttatctgtcctatttgcctcgacatcctgcagaaacccgtgacgatcgattgtggccataatttttgtctgaaatgcataacgcagataggggaaacctcttgtggtttctttaagtgcccgttgtgtaaaacctccgttcggaagaatgccatacggttcaacagtctgctgaggaacttggtcgaaaagattcaggccctacaggcaagcgaagttcagagcaagagaaaagaagccacttgcccgaggcaccaggagatgtttcattatttctgtgaagatgatggcaagttcctctgttttgtgtgtcgagagagtaaagaccataagtctcataacgtgtcacttatcgaagaggctgcccagaactatcagggccagatccaagagcagattcaggttctgcagcagaaagagaaagaaacagtccaggttaaggctcaaggagtacatagggtagatgttttcaccgatcaagtggagcatgagaagcagagaatcctgaccgaattcgagttgctgcatcaagtccttgaggaggaaaaaaatttccttctgtcgcgcatctattggttgggtcatgagggtactgaggctggaaagcattatgtggccagcacggagccccagctgaacgacttaaaaaagctagtggattcactgaagaccaaacagaacatgccccctaggcagctgctcgaggatataaaggtagtgctgtgcaggagtgaggaatttcagtttcttaatcccaccccagtccctcttgaattagagaagaagctgagcgaggccaagtctcggcatgacagcataaccggcagtctgaaaaaatttaaggatcagctacaggccgaccgaaaaaaagacgagaaccgttttttcaagtccatgaacaagaacgatatgaaaagttggggactcttgcagaagaacaatcacaagatgaacaagacgtctgagccgggtagcagtagtgccggtggtcgcactacctcgggcccacctaaccaccacagctcagcgccatctcacagcttatttcgggcatcctccgcgggtaaagtgacctttccggtgtgtctcctggcctcttatgatgagatctccggtcaaggggcaagttcacaggacaccaagactttcgacgtggccttgtctgaggagctccatgccgcattgagtgagtggctgacggccatcagagcctggttctgcaaagtcccatcatcctag

SEQ ID NO: 245027 - DNA, 1278 bp, synthetic construct
  misc_feature 1..1278: note = Description of Artificial Sequence: Synthetic coding sequence
  source 1..1278: mol_type = other DNA
atggccagcggacaatttgtcaacaaactccaggaagaggtcatatgcccaatttgcctagacatactccaaaaacctgtgactatcgactgcggccacaacttctgcttgaagtgtattacgcagatcggcgagacctcctgtggcttttttaaatgcccgctttgcaagacgtctgttcgtaagaacgcgatacggtttaatagcctcctacggaacctagtggaaaagattcaagcccttcaggcatctgaggtacagagtaagaggaaggaagcaacttgtccaagacatcaggaaatgtttcactacttctgtgaagacgatggtaaattcttgtgttttgtgtgcagagaaagtaaagaccataagtcacacaacgtgtccctcattgaagaagctgcccagaactaccagggacagatccaagaacaaatacaggtattgcagcagaaggaaaaagaaaccgtccaggtaaaggcacagggagtgcatcgcgtcgacgtgttcaccgaccaggtcgagcacgagaagcagagaatcctcacagagttcgagttgttacatcaggtgttggaagaggaaaagaattttctgctctctagaatctactggctgggccacgaaggcacagaggctgggaagcactacgtggcctctactgagccccagttaaatgaccttaaaaaacttgtggacagtctcaagaccaaacagaatatgccccctagacagctcctagaggacattaaagttgtactctgtagatctgaagagtttcagtttttaaacccaacacccgtcccattagagctcgaaaaaaaattgtccgaagcaaaaagccgccatgattcaatcacagggagcctgaaaaaattcaaggaccagcttcaggctgaccggaaaaaagacgagaatcggtttttcaaatcaatgaataaaaatgatatgaaaagttggggtctgctccagaaaaataatcacaaaatgaataaaacatccgagcctggcagctcatcagctgggggtagaactacaagcggtcctccaaatcaccatagtagcgcacctagccactctcttttccgtgccagctctgccggaaaggtgaccttcccagtctgcttgctggccagctatgacgaaatttccggacagggtgcaagctctcaagacacgaagaccttcgacgtggctctcagtgaggagttacacgccgcactctctgaatggctaaccgctattcgggcatggttctgtgaggtgccctcctcatag

SEQ ID NO: 245028 - DNA, 1278 bp, synthetic construct
  misc_feature 1..1278: note = Description of Artificial Sequence: Synthetic coding sequence
  source 1..1278: mol_type = other DNA
atggcctccggacagttcgtaaataagctccaagaagaggtgatctgtcccatttgcttggatatattacagaagccggtgacaatagattgtgggcacaatttctgtctgaagtgcattacgcaaatcggcgagacttcatgcgggttctttaagtgcccactctgcaagacatctgtccgcaaaaatgcaatccggttcaacagcctcctgaggaacctggtggaaaagatccaggctcttcaggccagcgaagtccagagcaaaagaaaagaggccacctgtccacggcaccaagaaatgtttcattacttctgcgaagatgacggaaaatttctgtgctttgtctgcagagaatctaaggatcacaagtcccacaatgtatcccttatagaagaggccgcacaaaactatcagggtcagatccaggaacagattcaggtgctccaacagaaagagaaagaaactgtccaggtcaaagcacagggagtccacagagttgatgtgttcacagaccaggtggaacatgagaagcagcggattctaactgagtttgagctgctgcatcaggtcttagaagaggagaaaaatttccttctgagtcgtatttactggctggggcatgagggaacggaagctgggaagcactatgtcgcatccaccgagcctcaactcaacgacctgaagaagctggtggattcactgaagacgaaacagaacatgcccccacgccagctgctcgaggacatcaaggtggttctgtgccggtctgaagagttccagtttctcaacccaaccccagttccattggagctcgagaagaagctgagtgaggctaagagtagacacgatagcattacaggttccctcaagaagttcaaggaccaactccaggcagatcgcaaaaaagatgagaatcggtttttcaagtcaatgaacaagaatgatatgaagtcctggggactcctgcagaagaacaaccacaagatgaacaagactagtgaacccggtagtagttctgccggaggtcggacgactagcggaccacccaaccatcattcaagcgcaccctcacatagtctgtttagagccagtagtgccggtaaagtcaccttcccagtctgtctcctggcctcttacgacgagatctccggacagggagccagcagtcaagataccaagacttttgatgtggccctgtccgaggagctgcacgccgcactgtctgagtggttgacggccataagggcctggttttgcgaggtcccaagtagctag

SEQ ID NO: 245029 - DNA, 1278 bp, synthetic construct
  misc_feature 1..1278: note = Description of Artificial Sequence: Synthetic coding sequence
  source 1..1278: mol_type = other DNA
atggcatctgggcaattcgtgaacaaactgcaagaggaagtcatctgtcctatttgcttagatatcctgcagaagcccgtgaccatagattgcggccataacttttgcctgaagtgcatcacccagatcggggagaccagctgtggcttttttaagtgtccattgtgcaaaacgtctgtgagaaaaaatgcaatccggttcaacagcttactgagaaatttagtggaaaagattcaagccctgcaggcttctgaagtccaatctaagcggaaggaagcgacctgtcccagacatcaggagatgttccattatttctgcgaagatgacgggaaattcctgtgcttcgtgtgtcgtgaatccaaggatcacaagagtcataatgtgtctctgattgaggaggccgctcaaaactatcaggggcagattcaggagcaaatacaagtcctacagcagaaggaaaaggaaaccgtccaggtcaaggctcagggggtccatcgagttgacgtgtttactgaccaggtcgagcatgagaagcagcggatactcacagagttcgagttactccaccaggtgttagaggaggaaaaaaacttcttactgtctcgcatatattggctcggccacgagggaaccgaggcaggaaaacattacgtagcttccacggaacctcagctgaacgatttgaaaaagctggtggattcactcaaaactaagcagaatatgccccctaggcagctgcttgaggacattaaggtggtgctctgccggagcgaggagtttcaattccttaacccgacaccagtcccactggagttggagaaaaaactctccgaggctaaatcccgccacgactctattaccggctctttaaagaagtttaaggatcagctccaggctgatcgaaagaaggatgagaataggttcttcaagtccatgaacaaaaacgatatgaagagttggggactcctccagaaaaacaaccacaaaatgaacaaaaccagtgagccgggatcgtcttccgcgggagggaggactacgtccggaccaccgaaccaccactcgagcgcaccatcgcattcgctcttccgagctagctctgctggcaaggtcacctttcctgtgtgtctgctggcatcctatgacgagatttcagggcagggagccagttcacaggatacaaaaaccttcgacgtggccttgagcgaagagctccatgccgcactaagtgagtggctgacagcaatccgggcatggttctgtgaagtcccgagttcatag

SEQ ID NO: 245030 - DNA, 1278 bp, synthetic construct
  misc_feature 1..1278: note = Description of Artificial Sequence: Synthetic coding sequence
  source 1..1278: mol_type = other DNA
atggcctcaggccagtttgtcaacaagctccaggaggaggtaatttgcccaatttgtctcgacattctgcagaagccggtcacgatcgattgcgggcacaatttctgtctcaagtgcatcacccaaattggggaaacctcttgtggatttttcaagtgtcctctttgtaagacctcagtgcgtaaaaatgcaatccgcttcaactctctgctccgcaacttggtagagaagattcaggctctccaggcatcagaagtgcagtctaagcggaaggaggccacatgcccacggcaccaagaaatgttccactacttttgtgaggacgatggcaagttcttatgcttcgtatgtagagagagtaaagaccacaaaagccataacgtctccctcatagaggaggcggctcaaaattatcagggacagatacaggaacagattcaggtgttacagcaaaaagaaaaggagactgtacaggtcaaagcgcagggagtgcaccgcgtggacgtttttaccgatcaggttgagcatgagaagcaacgaatcttaactgagttcgaactgctgcaccaggttttggaggaggagaagaatttcctgctaagcagaatatactggcttggccacgaaggtacagaagccggaaagcattatgttgcaagtaccgaacctcagttaaacgacttgaagaagctgatagattccctgaagacgaagcagaatatgcctcccaggcagctgctggaggatattaaggtggtgctctgccggtccgaggaatttcagttcctcaatcccacccccgtccccctagagctcgagaagaagctctccgaagctaagtctcgccatgattccattacaggctcgttaaaaaaattcaaggatcagttacaagcagacaggaaaaaagacgagaaccggtttttcaagtccatgaacaagaatgacatgaagtcctggggactgctgcagaagaacaaccataaaatgaataagacttctgaacccggatcctcaagcgctggcggacggacaactagtggcccacccaaccaccactctagcgctccctctcattcgctgtttagagccagtagcgccggtaaggtaaccttccccgtgtgccttctggcctcttacgatgaaatcagtgggcagggtgcctccagtcaagatacaaaaacattcgacgtcgccctgtctgaggagctccatgcagccctaagcgaatggttgactgctattagagcctggttttgcaaagtgccatcctcatag

SEQ ID NO: 245031 - DNA, 1278 bp, synthetic construct
  misc_feature 1..1278: note = Description of Artificial Sequence: Synthetic coding sequence
  source 1..1278: mol_type = other DNA
atggctagcgggcaatttgtgaataaattacaagaggaggttatctgtccaatttgcctggacatattacagaagcctgtcaccatcgactgtggccataatttctgtctgaagtgtattacccagataggcgagacgagctgcgggttctttaagtgccccctctgcaaaacgtcggtgcgaaaaaatgccattcggttcaactcactcctccgcaatttagtcgagaaaatccaggcccttcaggccagtgaggttcagagtaagcgtaaagaggccacctgtcccaggcaccaggaaatgtttcattacttttgtgaggacgatggcaaatttctatgcttcgtgtgtagggagtccaaagatcacaagtcccacaatgtgtctttgatagaggaagcagcacagaactaccagggtcaaatccaggaacagatacaagttctgcagcaaaaagagaaagaaactgtgcaagtgaaagctcagggtgtgcatcgtgttgacgtgtttacagatcaagtcgaacatgaaaagcaaaggatactaacggagttcgaattgttacaccaggtacttgaggaggaaaagaatttcctccttagccggatctattggctggggcacgagggaaccgaggcaggcaagcactacgtagcctccacagagccccagctcaacgatctcaagaagctggtggactctttgaaaaccaagcagaatatgccaccacggcagctcctggaagatattaaagttgtgctgtgtcggtcagaggagtttcagttcctcaaccccacgcccgtccccctcgagcttgaaaagaagctttctgaggctaagtctcgacatgactctattaccggatctctcaagaagtttaaggaccaactccaggcggaccgcaaaaaggatgaaaatagattcttcaagtctatgaataaaaacgacatgaaaagctgggggctgttacaaaagaacaatcacaaaatgaataaaacatcagagcctggcagctcttccgctggaggacgcacaacttctggtccaccgaaccatcactcgtccgctccgtcgcactcattgttccgcgcaagtagcgccggtaaagtcacgtttcctgtgtgtctgctggctagctatgatgagatatctgggcagggagctagttctcaggacacaaagacctttgacgtggcgcttagcgaggaactgcacgccgctctgtccgagtggcttacagcgattagggcgtggttttgcgaagtgcctagcagttag

SEQ ID NO: 245032 - DNA, 1278 bp, synthetic construct
  misc_feature 1..1278: note = Description of Artificial Sequence: Synthetic coding sequence
  source 1..1278: mol_type = other DNA
atggcatccggacagttcgtcaacaagctgcaggaggaagtgatctgtccaatttgcctcgacatcctgcagaagcctgttacgatcgattgtggccataatttttgtctgaagtgcattacccagattggcgagacctcttgcggtttctttaaatgccccctatgtaagacttctgtgaggaagaacgcgatccggtttaacagcttattaagaaacctggtggagaagattcaggctctgcaggcctccgaggtgcagagcaagcgcaaagaagcaacatgccctaggcatcaggagatgtttcactacttctgcgaagacgacggaaagttcctttgctttgtatgtcgggaaagcaaggatcataagtctcacaacgtgtcgctgatcgaggaggcagcccagaattaccaggggcagatccaggagcagatccaggtgctccagcagaaggagaaggagacggttcaggtgaaagcccaaggagtgcatcgggtcgatgtgttcaccgaccaagtcgaacatgagaagcagagaatcttaaccgaatttgagctcctgcaccaggtccttgaggaggagaagaactttttgttgtcacgtatttattggttggggcacgaaggtacagaggctggaaaacactacgtcgcaagcactgagcctcagctgaatgacctaaagaaactggtcgacagtttgaaaaccaaacagaacatgccccctaggcaattgttagaacccgcacagcctcatctcccccgaagtgaggagtttcagttcttaaacccaacccccgtccccctagaactcgagaagaaattgagcgaagccaaaagccgccacgactctataactgggtctttaaagaagttcaaggaccaactacaggcagatagaaaaaaggatgagaataggttttttaaatccatgaacaagaacgacatgaagtcctggggcctcctgcaaaagaacaatcataagatgaataaaacctcagaaccaggatcttcaagcgctggcggacgcacaacatcagggccacccaatcaccactctagtgcgcctagccactccttgttccgagctagtagcgctggcaaggtgacgttccccgtgtgtctcttggcttcctatgatgaaattagcggtcagggcgcatcgagtcaggacaccaaaactttcgacgtggccctctctgaagagctccacgcggcactgagcgagtggctcaccgctatcagggcctggttttgcgaagtaccgtcctcttag

SEQ ID NO: 245033 - DNA, 1278 bp, synthetic construct
  misc_feature 1..1278: note = Description of Artificial Sequence: Synthetic coding sequence
  source 1..1278: mol_type = other DNA
atggctagcggtcagttcgtaaacaagttgcaagaggaggtgatttgccctatctgcttggatattctgcagaaacctgtcacgatcgattgtggccataatttttgcttgaaatgcataacacagatcggagaaacaagctgcggcttctttaaatgtcccctatgtaagacaagtgttcgaaaaaacgcaatccggtttaactcactactacgcaaccttgtggagaagatacaggcccttcaggcttcagaggtacaatccaaacggaaggaggctacctgtccgcgtcaccaagagatgtttcactatttctgcgaggacgatggaaagttcttgtgcttcgtctgccgggaatccaaggatcataagtcacataatgttagccttatagaggaggcagcacagaattatcagggacaaattcaggaacagatccaagtgcttcagcaaaaggagaaggagaccgtgcaggtaaaagcacagggagtgcacagggtcgatgtattcaccgatcaggtggaacacgaaaagcagagaattctaacagagtttgaactactgcaccaagtgttagaggaggagaagaactttttattatctcggatatactggcttgggcacgagggcactgaagcaggtaagcattatgtggcttccactgagcctcaattgaacgacctaaagaagctagtggatagtctgaagaccaagcagaatatgcctccaagacagcttctggaagatatcaaagtggtcctttgcaggtcagaagaattccagtttttaaaccccacaccggtaccgctggagctcgagaagaagctcagtgaggctaaatctcggcacgacagcatcactggcagcttgaagaagtttaaagatcagttacaggctgaccgtaagaaggatgaaaacaggttctttaagtccatgaacaaaaacgacatgaagagttggggcctgctacagaaaaacaatcacaaaatgaataagacatctgagcccggttcctcctctgccggaggccgaaccacctcagggccaccgaatcaccattcttcagctccttcccattcactgttccgcgcatcatccgccggaaaggtaactttccccgtctgtctgctcgcctcttacgatgagatctcgggtcagggtgcatccagtcaggatacaaaaacgtttgatgtcgccctgtctgaagagctgcatgccgctctgagtgagtggttaactgctatacgggcatggttctgcaaggtgccctcctcttag

SEQ ID NO: 245034 - DNA, 1278 bp, synthetic construct
  misc_feature 1..1278: note = Description of Artificial Sequence: Synthetic coding sequence
  source 1..1278: mol_type = other DNA
atggctagcgggcagttcgtcaacaaactgcaggaggaagtgatttgtccaatctgtctggatatcttacagaaaccagtgactatcgactgtgggcacaacttctgtctgaaatgcatcactcaaatcggggaaacatcttgtggtttttttaagtgtcctctctgcaaaacatccgtccggaaaaatgctattaggtttaatagcctactcagaaatcttgtcgaaaagatacaagcacttcaggcttcagaggtccagtcaaaaaggaaagaagcaacatgtccaagacatcaggagatgtttcattacttctgcgaagatgacggaaagttcctgtgcttcgtatgtcgggaatccaaagaccacaagtctcacaatgtcagcctgatcgaagaggctgctcaaaactatcaggggcagattcaggagcagatccaggtgctgcagcaaaaggaaaaggaaaccgtacaagtgaaggctcaaggagtacatagagtcgacgtgtttactgatcaggtggagcacgagaaacagaggattttaaccgaatttgaattactgcatcaagtcctggaagaggagaaaaatttcctcctgagtagaatttactggcttggacacgaggggacggaggccggtaaacactacgttgctagcacagaacctcaactgaatgatcttaagaagttagtcgacagcctaaaaaccaagcaaaacatgcccccacgccaactcctcgaaccggcacagcctcacctccctagaagcgaagagttccagtttctgaatcctacaccagtgcctctagaattggagaagaaactcagcgaggccaagagccgacacgacagcattacagggtctctgaagaagttcaaggaccaattacaggccgacaggaagaaggatgagaacaggttcttcaagagcatgaataagaacgacatgaagtcttggggactgctgcaaaaaaacaaccataagatgaacaagacttccgaaccgggaagcagcagcgcgggtggaaggactacatccggtcctcccaaccaccactcgagcgccccatcccactccctctttagggcgagttctgcgggtaaggtgactttccctgtttgtctcctcgcttcttacgatgaaatctcgggccagggagcttctagccaggacaccaaaacgtttgacgttgctctatctgaggaactgcacgccgctctgtctgaatggttgaccgcgatcagggcttggttctgcgaggtaccctcctcatag

SEQ ID NO: 245035 - DNA, 1278 bp, synthetic construct
  misc_feature 1..1278: note = Description of Artificial Sequence: Synthetic coding sequence
  source 1..1278: mol_type = other DNA
atggccagtgggcagttcgttaacaaacttcaggaggaggtcatctgtccaatctgcttggacatcttacagaaacccgtgacaattgactgcggccacaacttctgccttaagtgtatcacccagatcggagagacgagttgcgggttctttaagtgtcccctgtgtaagacttctgttcgcaagaatgccattcggtttaatagcctgctgcgcaacttggtggagaagatacaggccctgcaggctagcgaggttcagagcaaaaggaaggaggccacctgcccacgccatcaggaaatgttccactatttctgtgaggatgacggaaagtttctgtgctttgtgtgcagagaatctaaagaccataagtctcacaatgtgagcttaatagaggaggccgcacagaattatcagggacagattcaggaacaaattcaggtcctgcagcagaaagagaaagagacagtacaggtcaaagcacagggtgtccaccgtgtcgacgtttttactgaccaagtggagcacgaaaagcagaggatcctgacagaattcgagctgttacaccaggttctggaagaggagaaaaatttcttgctgtcccgcatctattggctgggacacgagggaacagaagccggtaaacattatgtggcctctacagagccccagctgaacgacctgaaaaagctcatcgactccctcaaaaccaaacagaacatgcctcctagacagcttcttgagcccgcacagccccatctgcctaggtccgaagaattccagtttctgaatccaacgcccgtgcctcttgagttggaaaagaagttgtccgaggcaaaaagccgacatgacagcattaccgggtctctgaagaagttcaaagaccagctccaggcagataggaagaaagacgagaacaggttcttcaagagcatgaacaaaaacgacatgaagtcttggggtctgctacagaagaacaaccataagatgaataagacatccgagcctggctcaagcagtgctggcggaaggactacgagtgggccacccaatcaccatagttccgccccttcacattctctgtttcgggcatcatccgcaggaaaagtgaccttcccagtctgtctcctggcctcctacgacgagatttccggccagggggcatcttcacaagatacgaaaacattcgatgtggccctgtcagaagaactacacgcagccctttcagaatggctgactgcaattcgagcctggttttgtaaagtgccgtccagttag

SEQ ID NO: 245036 - DNA, 1278 bp, synthetic construct
  misc_feature 1..1278: note = Description of Artificial Sequence: Synthetic coding sequence
  source 1..1278: mol_type = other DNA
atggcctcaggccagttcgtcaacaaactgcaggaggaggtgatttgcccaatctgtttagatattctgcagaagccagtgaccatcgactgcggccataacttctgtctcaagtgtataactcaaatcggggaaactagctgcgggttttttaaatgtcccctgtgtaagacaagtgtacgaaaaaatgccatccgatttaattctttgctgcgcaacttagtagaaaaaatccaagcgctccaagcaagtgaggtccagtccaaaagaaaggaggcaacctgcccacgccaccaagaaatgttccactatttttgcgaggatgatggaaagttcctgtgtttcgtttgttgcgagagtaaagaccacaaaagccacaatgtaagcctcattgaggaggcagctcagaattatcaaggccagattcaagagcagatacaggtcctgcaacagaaagagaaggaaacagtgcaggtgaaggcccagggagttcatcgggttgacgtgtttacagaccaggtagaacacgagaaacagcggatactcacagaatttgagctcctgcatcaggtgcttgaggaggagaaaaacttcctcctcagtcggatttactggttaggccacgagggaaccgaggctggaaaacattatgtggccagtaccgaacctcagctcaatgatctcaaaaagttagttgactccttgaagaccaagcagaatatgccccctaggcagttgcttgagcctgcacagccacatctcccacgcagtgaggagttccaatttctaaaccctactccagtaccccttgagctggaaaagaagctttccgaagcaaagtcacggcacgattcaatcactggtagtttgaagaagtttaaggatcagctccaggcggacagaaagaaggatgagaatcgctttttcaaatccatgaacaaaaacgacatgaagtcttggggtttgctccagaagaacaaccacaagatgaataagacatctgaacctggctcttcctccgctggcggaagaaccacatctgggcctcccaatcatcacagctccgctcctagccactctctctttagagctagttctgctggcaaagtgacattcccagtatgtttgctggcatcatatgatgaaatctcaggccagggtgcttcctcccaggatactaagacattcgatgtggctctttcagaggagcttcatgccgctctgtcagaatggctgacggctatccgggcttggttttgtgaagtgcccagcagttag

SEQ ID NO: 245037 - DNA, 1278 bp, synthetic construct
  misc_feature 1..1278: note = Description of Artificial Sequence: Synthetic coding sequence
  source 1..1278: mol_type = other DNA
atggcctcggggcagtttgtcaataagctgcaggaagaggtcatctgccccatatgcctggacatactccagaagccagtcacgattgactgcgggcataacttttgtctcaaatgcataacccaaatcggggagacgtcctgcggattttttaagtgtcctctgtgcaagaccagtgtccgtaagaacgctatccggtttaacagcttgctaagaaacctggtggagaagattcaggctctgcaagccagcgaggtccagtctaagaggaaagaagccacatgcccaagacatcaggagatgttccattatttctgtgaagatgacggtaagtttctctgtttcgtgtgccgagagagcaaagatcacaaatcccacaacgtctccttgatcgaagaggctgcccagaactatcagggtcagattcaggaacagattcaggtgttacagcagaaggaaaaggaaacagtccaggtaaaggcgcagggggttcacagagttgacgtgttcacagaccaggttgagcatgagaagcagcggatactcaccgagttcgagttactccaccaggtgctagaagaggagaaaaactttctactatccaggatctactggctcggacatgaggggactgaggccggaaaacattacgtggcaagcacggaaccacagctgaacgacctcaagaagctcgtggattccctcaaaaccaaacagaacatgcccccaaggcaacttctcgaggacatcaaagttgttctctgccgttccgaagaattccagtttctcaatcctacaccagtccctctcgagcttgagaaaaagctgtccgaagccaaaagccgacacgattcaatcaccggatccctgaagaagttcaaggatcagctgcaggccgaccggaaaaaagacgaaaaccggttcttcaagagtatgaacaaaaacgatatgaaatcgtggggcctgttgcagaaaaataaccataaaatgaataaaaccagtgaacctggatcgtctagtgctgggggaaggaccacatccggtccgcctaatcaccactcttccgcccctagccatagcctgttcagggcttcttcagccggtaaggtgaccttccccgtgtgcctcctggcatcctacgacgaaatctccggacagggagcaagctcccaggacacaaagacgtttgacgtggccctgtcagaagagctgcatgctgcgctcagcgagtggctgactgcgatccgggcatggttctgtgaggtgccatcatcatag

SEQ ID NO: 245038 - DNA, 1278 bp, synthetic construct
  misc_feature 1..1278: note = Description of Artificial Sequence: Synthetic coding sequence
  source 1..1278: mol_type = other DNA
atggcaagtggccagttcgttaacaagctccaggaggaggtgatctgcccaatttgcctagatattttacaaaagccagtcactatcgattgcggacataacttttgtctcaagtgtattactcaaatcggggagacatcttgtggatttttcaagtgccccttgtgcaagacttctgtaagaaaaaatgccatcaggttcaacagcttactccgtaatctcgtggagaagattcaggcgctgcaagcctcggaggtgcagtcaaaacgcaaggaagccacttgtcctaggcaccaagagatgtttcattacttctgcgaagatgatgggaaatttctgtgcttcgtctgtcgagaatctaaggaccacaagagccataatgtgtctcttatcgaagaggcagcacagaactaccagggccagatccaggagcagattcaggttttgcagcagaaggaaaaagagaccgtccaggtgaaggcacagggcgtccaccgcgtggacgtgtttacggaccaggttgagcatgagaaacaaagaattcttaccgagttcgaactactgcaccaagtcctggaagaggaaaagaacttcttacttagtcgtatatactggctaggtcatgaaggaaccgaggcgggtaagcactacgtggcctcaacggagcctcagctgaatgatctcaagaagcttgtggatagcctgaaaacaaagcagaacatgccgcctaggcagctgttggagccagcacagccacacctcccacggtcagaagagttccagttcctgaaccctacaccggtgcccctcgagttagaaaaaaagctgtcagaagccaaaagcagacatgacagcatcactggttctctgaagaaattcaaggaccagcttcaggctgaccgtaaaaaagatgagaataggttttttaagtcgatgaacaaaaatgacatgaagtcttggggattgctgcaaaagaataatcataaaatgaacaagaccagtgaacctggcagttcctctgccggtggacggacgacctctggacctcctaaccaccactcttctgccccttcacacagcctgttccgggcaagttccgctggcaaggtaacatttcctgtctgtctcctcgcttcttacgatgagatcagtggacagggggcatctagtcaagatacaaaaaccttcgacgttgctttatcagaggaactgcacgctgccttgagcgaatggctgacagcaattcgagcttggttctgcgaagtgcctagctcgtag

SEQ ID NO: 245039 - DNA, 1278 bp, synthetic construct
  misc_feature 1..1278: note = Description of Artificial Sequence: Synthetic coding sequence
  source 1..1278: mol_type = other DNA
atggcctctggccaattcgttaataaactgcaggaggaagtcatctgtccgatttgtctggatatccttcagaaaccagtgacgatcgattgcgggcacaacttctgtctgaagtgcatcacccaaatcggtgaaactagttgcggcttcttcaaatgtcctctttgcaagacatcagtaagaaagaacgctattcgattcaactcgttgctgcgtaacctagtcgagaagattcaggccctacaggcgagcgaggtccagtcaaagagaaaggaggctacgtgtcctcgccaccaagagatgtttcactacttttgtgaggatgatggcaaattcttgtgctttgtgtgctgcgagagcaaagaccataagagccataacgtgtccctcatagaagaggctgcccagaactaccagggacagatccaggagcagatccaggtgcttcagcagaaagaaaaggagaccgttcaagtgaaggcgcaaggtgtgcatcgcgtagacgtctttactgaccaggtagagcatgaaaagcagaggatcttaacagaatttgaactcctgcaccaggtgctggaagaggagaaaaactttctgctgtcacgaatctattggctggggcacgaaggtactgaagctgggaagcactacgtggcgagtacggagcctcagttaaatgacctaaaaaagctcgtcgattctctcaaaaccaagcagaatatgccacccagacagctactcgaagacatcaaagttgtgttgtgcaggtctgaggaattccaattcttaaaccccacacccgtaccattggagctcgagaagaagctgtcggaggcaaaatctcgacatgactcaatcaccggcagcttgaaaaagtttaaagatcagctccaagccgatcgcaagaaagatgagaacagatttttcaaatccatgaataaaaatgacatgaaatcttgggggctcttacagaagaataatcacaagatgaacaaaacatctgagcccggaagttcctcagctggagggaggacaacctctgggcctcctaaccatcactcaagcgcaccttcccactctctattccgagcgtcatccgccggtaaagtgactttcccggtgtgcctgctggcatcctacgatgagatttccggtcagggcgctagttctcaggacacaaagactttcgatgtggccctatctgaggagcttcatgcggcactgagtgagtggttgactgccatacgggcatggttctgcgaggtgccatccagctag

SEQ ID NO: 245040 - DNA, 1278 bp, synthetic construct
  misc_feature 1..1278: note = Description of Artificial Sequence: Synthetic coding sequence
  source 1..1278: mol_type = other DNA
atggcatctggtcaatttgtcaataagctccaggaagaggtgatttgccccatttgcctggatatcttgcagaaaccggtgactatagactgtgggcataacttctgtttgaaatgtattactcagattggcgagacgagctgtggcttcttcaagtgtccactgtgcaagacctctgttcggaagaacgctattaggttcaactccctattgcgcaatttggtggagaaaatacaagctctccaggctagcgaggtgcaatcaaagcgaaaagaagccacctgcccacgtcaccaggagatgttccactacttttgtgaagatgatggtaagttcctgtgtttcgtctgccgagaaagcaaagaccacaagtcccataatgtttctcttatcgaggaggctgctcagaactatcagggccaaatccaggaacagatccaagtcctgcagcagaaagagaaggaaactgtgcaggtcaaggctcaaggagtgcaccgcgtcgatgtgtttacagaccaggttgagcacgagaagcagagaattctcactgagtttgagctcctacaccaggtgctggaggaagagaagaactttctcctgtccaggatatactggctcgggcacgagggcaccgaagcagggaagcattatgttgcttctaccgagccacagcttaacgatttgaagaagcttatcgattcgcttaagactaagcagaacatgccccctcgccagctgttggaagatattaaggtggtgctttgcagaagcgaggagtttcagttcctcaatcccactcctgtgcctttggagttggaaaagaagctttccgaagcaaagtctcggcacgactctattaccggttcattaaagaagtttaaagatcaattgcaggctgacaggaagaaggatgagaaccggttctttaaatcgatgaacaagaatgacatgaagagctggggcttgctgcagaaaaataaccataaaatgaacaagacttccgagcctggcagctccagcgccggagggagaacaacaagcgggcctcccaaccaccacagttcagctccctcgcattctttgttccgcgcatcctcggcaggaaaggtgacatttccggtctgcctgctggcttcctatgacgagataagcggccaaggagctagctctcaggatacaaaaacattcgatgtggccctaagtgaggagttacacgctgctctttctgaatggttaacagccatacgtgcctggttctgtaaggtaccgtcatcttag

SEQ ID NO: 245041 - DNA, 1278 bp, synthetic construct
  misc_feature 1..1278: note = Description of Artificial Sequence: Synthetic coding sequence
  source 1..1278: mol_type = other DNA
atggccagcggacagttcgtgaacaagctacaggaagaagtgatttgtccaatatgtttagacattttacagaagcccgtaaccattgactgtggtcataacttctgcctgaaatgcatcacccagatcggtgagacctcatgcggcttttttaaatgcccactgtgcaaaacgtcagtgcgcaaaaatgctatccggtttaactctctgctacgcaacttggtcgaaaagattcaagcccttcaggcaagtgaggtccagtctaaaaggaaagaagcaacttgtccaaggcaccaggaaatgttccactacttctgcgaagacgacgggaagttcctgtgtttcgtgtgcagagagagcaaggatcacaagagccataacgtgtccttaatcgaggaggcagcacagaattaccagggccaaatccaagaacagattcaggtgttacagcagaaggagaaagaaacggtgcaggtcaaggctcagggcgtccaccgcgtggacgtgtttaccgaccaagttgagcatgaaaagcagaggatcctgaccgagtttgagctactgcaccaagttctcgaagaggaaaaaaacttcctcttgtccaggatctattggctgggtcatgaaggcacagaggccggaaagcattacgtggcctctacagagcctcagttgaatgacttgaagaaactcgtcgacagcttaaagactaagcagaacatgccccctaggcagcttctggagcctgcccaacctcacctgccccgaagcgaggagttccagtttctcaatcctacaccagttccgctcgagctcgagaaaaaactcagcgaggctaagagcaggcacgatagtatcactgggagcctcaagaaattcaaagaccagctgcaagccgacaggaagaaggatgaaaatcgtttcttcaagtccatgaacaagaatgatatgaagagctggggcctgcttcagaaaaataaccacaaaatgaacaaaacctcagagccaggctcctcgagcgctggtgggaggactacatcgggaccacccaaccaccactcctctgccccaagtcattccctgttccgagcctcttctgccggaaaggtcactttcccggtatgtttactggcttcctacgacgagatcagtggtcaaggggcttcctcgcaggacactaagacgtttgatgtcgctttatcagaagaactccacgccgcactgtcggagtggctgacggctattagagcgtggttctgcaaggtgccaagtagttag

SEQ ID NO: 245042 - DNA, 1278 bp, synthetic construct
  misc_feature 1..1278: note = Description of Artificial Sequence: Synthetic coding sequence
  source 1..1278: mol_type = other DNA
atggcctctggccagttcgtaaacaaattgcaggaggaggtcatctgccccatctgtctggacatcttacaaaagcccgttactattgactgcgggcacaacttttgcctcaagtgtatcacgcaaatcggcgaaaccagctgcggattctttaaatgtcctctgtgtaagaccagtgtccggaagaacgcaattcggtttaatagcttactgagaaacctggtggaaaaaatacaggctttgcaagcctcagaggtgcagtccaagcgaaaggaggctacatgcccaaggcaccaggaaatgttccactatttttgtgaagacgacggtaaattcttgtgtttcgtctgccgggagagtaaggaccacaagagtcataatgttagtctgatcgaggaagcagcgcagaactaccagggacagatccaagaacagattcaagtacttcagcagaaggaaaaggagaccgtgcaggtaaaggcacagggcgtacatagagtggacgtgtttactgaccaggttgaacatgagaaacagcgcatattgactgagtttgaactgctgcatcaggttctggaagaagagaaaaacttcctgctttcgcgcatctattggctaggacatgaaggaaccgaagcaggtaagcactatgtggcatctaccgaaccccagctgaatgacctaaaaaagctcgtagattcccttaaaactaaacaaaacatgccacccagacagctcttggaagacattaaagtcgtgctgtgtcgctcagaagagttccaatttctgaatcctaccccagttcctctggagctggaaaaaaagttaagcgaggccaagagcaggcacgacagtattacaggttccctaaagaaattcaaggaccagctgcaggctgatagaaaaaaggatgagaatcggttctttaagagcatgaacaaaaatgatatgaagtcctggggcctgttacaaaaaaataatcacaagatgaataagacatcagagccaggctcatcttcagcaggcggaaggactacaagcggacctccaaatcatcactcaagtgcacccagtcactctcttttccgcgcttcctccgcgggtaaagtgaccttcccagtttgcttgcttgcgagctatgatgaaatcagcggtcagggggcttcgagtcaggacaccaagacctttgatgtggccctcagtgaagagctgcatgctgccttgtcggagtggttaactgccatcagggcttggttctgcgaggtgccttcatcttag

SEQ ID NO: 245043 - DNA, 1278 bp, synthetic construct
  misc_feature 1..1278: note = Description of Artificial Sequence: Synthetic coding sequence
  source 1..1278: mol_type = other DNA
atggcatccggccagtttgtgaacaaactacaggaggaagtgatctgccccatctgtctggatatactgcaaaaaccagtcacgatcgattgcggacacaacttttgtctgaaatgcatcacgcagataggcgaaacctcctgcgggtttttcaaatgccccctttgtaaaacctccgtgcggaagaatgctattcgcttcaactctcttctgcggaacctggtggaaaaaatccaggccctgcaggcttctgaagtgcagagcaaacgtaaggaagccacatgcccgcgacaccaggaaatgttccactacttctgtgaggatgatggtaaattcctgtgcttcgtatgcagggagtccaaggatcacaaaagtcacaatgtcagcctgattgaagaggcagctcagaactaccaagggcagatacaggaacaaatccaagttcttcaacaaaaagagaaggagactgtgcaagtgaaagctcagggggtgcatcgcgttgatgtgttcacagaccaagtggaacatgagaaacagagaattcttacagagtttgagctgcttcaccaagtgttggaggaagagaagaatttcctgctctccagaatatactggctgggtcatgagggtaccgaagccggtaagcactacgtagccagcacagaaccacagctgaacgacctgaaaaaacttgtcgactctttgaaaacaaaacaaaatatgcctccccgtcagttattggaggacattaaggttgtgctgtgccggtcagaagaatttcagtttctcaacccgacacccgtcccactggagcttgagaaaaagctttctgaagctaaatcacggcacgacagtataaccggctccctgaagaaatttaaggaccagctccaagccgatcgcaagaaggacgaaaaccgattctttaagtccatgaataaaaacgatatgaagtcctggggtctgttgcagaaaaataaccacaaaatgaataagacgtcagagccgggatcttctagcgccggaggcagaaccactagcggtccacctaaccatcactccagtgcgcctagccatagtctgtttcgggcttcatctgccggtaaggtgacattcccagtctgcttgcttgcttcttatgacgaaatttctgggcagggcgcttcttcccaggatactaaaacattcgatgtagcactatccgaggaattacacgccgctctgtccgagtggctaacggctatccgggcatggttctgcgaagttccatccagctag

SEQ ID NO: 245044 - DNA, 1962 bp, synthetic construct
  misc_feature 1..1962: note = Description of Artificial Sequence: Synthetic coding sequence
  source 1..1962: mol_type = other DNA
atggcagccgcagctgcttcacacctgaatctagacgccctccgtgaggttctcgaatgcccaatttgtatggaatcatttactgaagaacagctccgccctaagctcttgcattgtgggcacaccatctgtcggcagtgcctggaaaaactgctcgctagttcaataaacggggtcaggtgtccgttttgctcgaagattacgaggataacatctctgacccagctaaccgataatctgactgtactgaagattattgatacagcagggctgtctgaggcggtgggtctgctcatgtgcaggtcttgcggccgacgcctgcctcggcagttttgtcggagttgtggccttgtgttgtgtgagccatgcagagaggcagatcatcagccaccaggccattgcactttacccgtcaaagaagcagctgaggagagaaggcgggatttcggggaaaagttgactaggcttcgggaactgatgggcgaactccagcgccgaaaggctgctcttgaaggagtgtcgaaagacctgcaggctcgttacaaagcagtattgcaggagtatgggcatgaggagcgccgagttcaggatgaactggctaggtcccgcaaattctttaccgggtcccttgccgaggtcgagaaatctaacagccaggtggtggaagagcaatcttacctgctcaacatcgctgaggtccaagcggtttctcgatgtgactattttcttgccaagattaaacaggcagacgtggccctcctggaagaaacggccgatgaagaagaaccagaacttaccgcctcactaccgagagagctcactctccaggatgttgaactactgaaggtgggccatgtcgggcctcttcagatcggtcaagcagtcaagaagccaaggaccgttaacgtcgaggactcctgggctatggaggccaccgcaagtgccgcttccacctcagtcacattccgcgagatggatatgtcacctgaagaagtggtggctagtccaagggctagcccagccaagcagagaggccctgaagccgcttcaaacattcagcaatgtctcttcctgaagaaaatgggggcaaaaggctcaacccccggaatgtttaatttgccagtcagtctatacgtcactagccagggcgaggtgctggtcgcagaccgcggaaactacagaatccaagtgtttacaagaaaggggttcctcaaagagattcgaaggagcccgagcggcattgactcgttcgttctttccttcttgggcgctgatctcccaaatctgacccccctgagtgttgctatgaattgccagggtctgattggcgtgactgactcatacgataattctcttaaggtttatacactggacggtcactgtgtggcttgccacagatcacaactgtcgaaaccctggggaataaccgcactgccttctggacagttcgtggtgacagatgtagagggcggaaaattgtggtgcttcacagtcgaccggggttccggcgtggttaaatactcatgcctctgtagcgccgtccggccaaaatttgtaacctgcgacgctgaaggtaccgtctattttactcagggactgggtctcaaccttgagaatcggcagaatgagcaccacctcgaggggggattctctatcggctcagtgggccctgatggccaactggggaggcagatttcacatttcttctcagagaacgaagattttcgatgcatagctggcatgtgcgtggacgcccgtggagatctgatagttgcggatagttcgcgtaaggaaatcctgcactttccaaagggcggaggctattcagtgctcatcagagaaggtctcacatgtcctgtaggaatcgcgctcactcccaagggtcagctgctggtgcttgattgctgggaccactgtattaagatctactcataccacctgaggcgctactccaccccttag

SEQ ID NO: 245045 - DNA, 522 bp, synthetic construct
  misc_feature 1..522: note = Description of Artificial Sequence: Synthetic coding sequence
  source 1..522: mol_type = other DNA
atggctgccgctgccgctagccacttgaacctggacgcgctaagagaagttcttgaatgccctatttgcatggaatcatttacagaggagcaactgcggcctaagctgttgcattgcggccataccatttgccgtcagtgtttggaaaagctcctcgcaagtagcatcaatggggtccgatgtccattctgttctaagattactcggattacgtcactgactcagcttacagacaacctgaccgttctgaaaataatcgacaccgctggattatccgaagctgtgggcctgctcatgtgtcggtcctgcggacgaaggttgccacgccaattttgcaggtcgtgtgggctcgtcctctgcgaaccttgtcgagaggcagaccatcagcctccaggacattgcaccctgccagttaaggaagcggctgaggagaggagaagagacttcggagagaagctcactcggctgcgagagctgatgggcgagctgcaaaggagaaaggccgctctggagggggtctag

SEQ ID NO: 245046 - DNA, 1962 bp, synthetic construct
  misc_feature 1..1962: note = Description of Artificial Sequence: Synthetic coding sequence
  source 1..1962: mol_type = other DNA
atggctgcagccgcagcatctcatctcaacctcgatgccctgcgcgaggtcctggagtgtccgatctgtatggagtcctttactgaggagcaactcaggcctaagcttttgcactgcgggcacactatctgtaggcagtgcctcgaaaagcttcttgccagttctatcaatggagtaaggtgtcccttctgttccaaaattacgaggattacctctttgacccaactcaccgataatctgactgtgttgaagatcatcgatacggccggactgtcggaagccgtgggcctgctgatgtgtaggtcctgtggaagaaggctaccacgacagttctgtcgttcatgcggattagtcctctgcgaaccatgccgggaggccgatcatcagccaccaggccattgtacgctcccggtaaaggaggcagctgaggagcggaggcgcgacttcggcgagaaattgacgaggttgcgtgagctcatgggcgaactgcagcgccgtaaggcagccctggagggagtgagcaaggatctgcaggctaggtataaggctgttcttcaggaatatggccacgaagagaggcgtgtacaggatgagctagctagaagccgcaagttctttaccgggtcgctcgctgaggttgagaagtcgaattcccaagtagtggaggaacagtcctacctgctgaacatcgccgaagtccaagccgtatctcgttgtgattattttctcgccaagatcaaacaggcggacgtggccctgctcgaggagacggctgatgaagaagaaccggagctcaccgctagtctgcccagggaactgaccctgcaggacgttgagctgctgaaggttggacacgtagggccactccagatcggacaggcagtgaagaaaccccgtaccgttaatgttgaagacagctgggccatggaagcaaccgcttctgcagcaagcacctcagtgacctttcgagagatggatatgagcccagaagaagtcgtcgccagtccacgggcatcacctgccaagcagcgcggaccagaggctgctagcaatatacaacaatgccttttcctgaaaaagatgggggcaaaaggatccacacctggtatgtttaacctaccagtgagtctgtacgtgacctcacaaggtgaagtactggttgccgaccggggaaattacagaatccaggtgtttacaagaaaaggcttcttaaaggagataaggagatcgccaagtggtatcgattcttttgtgctcagcttcctcggggctgatctccctaacctgacaccgctgtccgtcgccatgaattgtcagggactgattggcgtgactgactcttacgacaactcgttaaaagtttacacactcgatggccactgtgttgcatgtcaccgaagtcagctgtctaaaccctggggtattacagccttgccctccggacagttcgtagtcacagatgtagagggagggaaactgtggtgctttaccgtggatcggggttctggcgtggtgaagtactcatgtctgtgctccgcggtgcggccaaaattcgtgacttgtgatgcagagggtacagtctactttacgcaggggctgggtttgaatctggagaacaggcagaatgaacaccacttagaggggggattctccattgggtcggtgggtccagatggccagctgggtcgccagatcagccatttcttttctgaaaacgaggactttcgttgcattgcgggaatgtgcgtggacgctaggggtgacctcatcgtcgccgattccagcaggaaggagatcctgcacttcccgaagggtggcggatactccgtgctgatccgagagggtttaacttgcccggttggcatcgcccttacccccaagggccagcttctggttcttgactgctgggaccactgcatcaagatctactcttatcacctgaggagatacagcacaccttag

SEQ ID NO: 245047 - DNA, 3384 bp, synthetic construct
  misc_feature 1..3384: note = Description of Artificial Sequence: Synthetic coding sequence
  source 1..3384: mol_type = other DNA
atggcagaaaacaagggcggtggcgaagcagaatctggcggtggcggttctgggtctgccccagtgacagccggtgccgctggacctgccgcacaagaggctgagcctcccctaactgcagttctggtggaagaggaggaggaggaagggggtagagcgggtgctgagggtggcgctgccggaccagacgatggcggagtggctgcagcctcgtccggcagcgctcaggccgcttctagccctgcagcgagtgtcggcacgggggtggctggcggagcagtgagtacacctgccccagccccagccagtgcgccagcaccgggacccagtgcaggcccaccacctggaccccctgcaagtctgctggacacatgcgctgtgtgtcagcagtccctacaaagcaggcgcgaggctgagcccaaactgctaccgtgtctgcatagcttttgtctgaggtgtctgccagagccagagagacagctaagcgtgcccattcctggaggatcaaacggtgatatacagcaggtcggggtcatccggtgtccggtgtgtcggcaggagtgcagacagattgacctggtggacaactacttcgtgaaggatacgagcgaggcacccagttcctcagacgaaaaatcagaacaagtttgtacatcttgtgaagacaatgccagtgccgtaggcttttgcgtcgaatgcggggagtggttgtgtaagacttgcatcgaagcccatcaaagagtgaagtttacgaaggatcatctcatcagaaaaaaggaagacgtttctgaatccgtcggagcatcagggcagcgtccggttttctgtccggttcataaacaggaacaactcaagctgttttgtgaaacatgtgacagactgacatgtagggactgtcaactgttagaacacaaggaacaccggtaccagttccttgaggaagcatttcagaaccagaaaggtgcaatcgaaaacttgctggcaaaattgctggagaagaaaaactacgtccactttgcggctacacaggtgcaaaacagaattaaagaggtgaacgagaccaataagagggtggaacaagaaattaaggtcgcgatctttactttaataaatgagatcaacaaaaaaggaaagtccttgctacagcagctcgagaacgtaaccaaggaacgccagatgaagctgctgcagcagcaaaatgatataaccggcttaagccgccaggttaagcatgtaatgaattttacaaactgggcaattgcaagcggctcatccaccgctttgttatactccaaacggctaattacctttcaacttcgacacatcttaaaggctcgttgcgatcccgtgcccgcagctaatggtgctatcaggtttcactgcgaccctacattctgggctaagaatgtggtgaacctcggcaatctggttattgagtctaagccagcacccggatacactccaaatgtcgtggtaggccaagttcctcccggaactaatcatatatcaaagaccccaggccagatcaacctcgctcagctgcggctgcagcatatgcagcagcaagtttacgcccagaaacatcagcagttgcagcagatgcggatgcagcagccccctgcacctgtgccaaccacaaccacgaccactcagcagcatccgagacaggccgcacctcagatgctgcaacagcagccgccacgcctcatctccgtgcagaccatgcagcgcggtaatatgaattgtggtgcattccaggcccaccagatgaggcttgcccagaatgctgcacgtatcccaggcatccccagacattctgggccacagtacagtatgatgcagcctcaccttcagagacagcactctaacccaggccatgcagggccattccccgtcgtgagtgtgcacaacaccacgattaatccaacctctcctaccacggccactatggccaatgccaacagaggccctacttccccctccgtgacagccattgagttgatacctagtgtgactaaccctgaaaacctgccgtctctgcctgatattccacccatccagctggaagacgcaggtagctcctccctcgacaatcttctgagccgatatatcagtggatcccatctgcccccacagcctacctcaactatgaacccatcacccggaccctccgccctgagtcctggatctagcggcctctcaaatagccatacaccagtgcggcctccttctaccagctccaccggatcaaggggtagctgtggatccagcgggaggactgcagaaaaaacatccttgtcttttaaaagtgaccaagtcaaggttaagcaagagcccggaacggaggatgaaatctgcagcttttctggcggagtgaaacaggaaaaaacggaagatggtaggagatctgcctgtatgctttcttcacccgagtcaagtctcacccctccactgtctacaaacctgcatttggagagcgaactggacgcactcgcctctttagaaaatcacgtgaagattgagccggcagacatgaacgagtcttgcaagcagtcaggactcagctcattagtcaacggaaagtcacctatccgaagcttaatgcataggagcgctaggataggcggtgatgggaataataaggatgatgacccgaacgaagactggtgtgcagtttgccaaaacgggggtgatctgctttgctgtgaaaagtgccccaaggtgtttcacctgacatgtcacgttcctacgttgctgtcttttccatccggggactggatatgtaccttctgcagagacataggcaagccagaggttgaatatgactgtgataatctacagcacagcaaaaagggcaaaaccgcccagggtctcagtccagtggaccaacgcaagtgtgaaaggttactgctgtatctgtattgccacgagctatctatcgagtttcaagaaccggtgcccgctagcattcctaattactacaagattattaaaaagcctatggatttgagtaccgttaaaaagaaactgcagaagaagcactctcagcactaccagataccagatgacttcgtcgccgatgtgaggctcattttcaaaaactgcgaacgttttaacgagatgatgaaagtggtgcaggtctacgccgatacccaagagattaatcttaaagctgacagtgaagttgctcaagccggtaaggccgtagcactatacttcgaagacaagctgactgagatttacagtgataggacctttgcacctctgccggagttcgagcaggaggaggacgatggagaggtgaccgaggactcagacgaagattttatccaaccccgtcgaaaacgtctaaaaagcgacgagcgtcccgtgcacattaagtag

SEQ ID NO: 245048 - DNA, 3333 bp, synthetic construct
  misc_feature 1..3333: note = Description of Artificial Sequence: Synthetic coding sequence
  source 1..3333: mol_type = other DNA
atggccgaaaacaaggggggaggggaggcggagtccggcggagggggtagtggaagcgccccagtaaccgctggcgcagccggaccggcagcccaagaagcagaaccgccactgacagctgtcttggtcgaagaggaggaagaagagggcggtagggccggagcagaaggcggtgctgccggtcccgacgacggaggcgtcgcggctgcctcaagtggctcagctcaggccgcttcctcacctgctgccagtgtaggaactggggtggcaggtggcgctgtatctacacctgcccctgctcccgcttctgcccctgcacccggaccctccgcaggtccccctccagggcctccagcctcactcttagacacttgcgccgtttgccagcagtccttgcaatcacgcagggaagcagaacctaagctgctgccatgtttgcattccttctgcctgcgttgtctgccagagcctgaaagacagttaagtgtcccgattcccggaggatccaacggcgatattcagcaggtaggggttataagatgccccgtgtgccgccaggagtgcagacagattgacctcgtggacaattatttcgtgaaagacacgtccgaggccccatccagctctgacgaaaaaagtgagcaggtgtgcacttcatgcgaggacaacgcatccgctgtcggattctgtgttgagtgcggagaatggctgtgtaaaacttgcatagaagcccatcaaagggtaaagtttacaaaagaccacctaatccggaagaaagaggatgtcagtgagtctgtgggggcatcggggcaaagacctgtcttctgccccgttcacaaacaggagcagctgaaattattctgcgaaacatgcgatcgactaacctgccgtgattgccagcttctggagcacaaggagcatcggtaccagtttctggaagaggccttccagaatcagaaaggcgcaattgaaaacttactcgccaagcttcttgagaaaaagaactatgtgcattttgccgcaacccaggtgcagaatcggattaaagaggtaaatgaaaccaacaagagggtcgagcaagagatcaaggtcgccatattcacgttgattaatgaaatcaataaaaaggggaagtcccttcttcagcaattggagaacgtgaccaaggagcgccagatgaaattgctgcagcagcagaacgatattactggtctctcgcgtcaagtcaaacacgttatgaactttactaattgggcaattgcatcaggtagttcaaccgcgctgctgtacagcaaacgtctgattaccttccaactgaggcacattctcaaagctaggtgtgaccccgtgccagccgctaatggcgcaatcaggtttcattgtgatcctactttctgggcaaagaacgtggtgaacctgggtaatctggtgatcgagtcaaaacctgccccaggctacactcctaacgtggtcgtaggacaggtaccacccggaaccaaccatatctcaaaaaccccgggtcagatcaaccttgcacagctgcggcttcagcacatgcagcaacaggtgtacgcccaaaaacaccagcagctacaacagatgaggatgcagcagcccccagctcccgtacccacaaccaccaccactacgcagcagcaccctcgtcaagccgcaccccagatgctccagcaacagccccctagactgatctcagtccagacgatgcagcgaggaaatatgaattgtggtgcttttcaagctcaccagatgcggctggcccagaacgctgcacgcatccccggaattccccgtcacagtgggcctcaatacagtatgatgcagccccacctgcagcgccagcacagtaacccgggacacgctggaccttttcccgtagtcagcgtgcacaataccactattaatccaacctctccaactaccgcaaccatggccaatgctaatcgcggtcctactagcccttcagtaacagccatagagctcataccaagtgttaccaaccctgagaacttgcctagtctgcccgacatcccccctatccagcttgaggatgcaggcagttcttcattggataacctcttatccaggtatatctcaggatcccacctccctccacagccaacgagcactatgaacccctctcccggacccagcgccctgtccccaggtagctcaggtctgtctaattcccacacccctgtgcgcccaccgtccactagctcaaccggctccagaggtagctgtggctcatcaggcaggaccgcggagaagacgtccctgtcctttaaatctgaccaagtcaaggtcaagcaagaacctggcaccgaggacgagatctgctcattttctggtggagttaagcaagagaagactgaagatgggcgacgctccgcctgcatgttgagttcaccagagtctagccttacacctccactgagcaccaatcttcatctggaaagcgaacttgacgcgcttgcgtccctcgaaaaccacgtgaagatcgagcctgctgacatgaatgaatcatgtaaacagtccgggctgtcctccctcgtcaatggcaagtcacccatccgtagcttgatgcatcgcagcgccaggatcggcggtgacggaaacaacaaagacgacgatccaaacgaagactggtgtgcagtttgtcaaaacggcggagatctgctttgttgtgagaagtgtccaaaagtcttccatctgacatgccatgtccccacacttttaagtttccccagtggcgattggatatgtacattctgccgggatataggcaaacccgaagtggagtacgactgtgacaacttgcaacatagcaaaaagggtaagaccgcgcaaggcctgtctcctgtggaccagagaaaatgcgaacgcctgctcctgtatctctattgtcatgagctgagcatcgagttccaagagcccgtgcccgcttcgattcccaactattacaagatcataaagaagccaatggatctgtctacggtgaaaaagaagctccaaaagaagcactcacagcactatcagatcccagacgattttgtcgccgatgtcaggcttatcttcaaaaactgtgaaaggtttaatgaggctgactcggaggtggcccaagccggaaaagcagtggctttgtatttcgaggacaagttgacagagatctactcagataggacctttgcccctctacctgagttcgagcaagaggaggatgacggtgaagtcactgaagactcggacgaggactttatccagcctcgccgtaagcggctgaagtccgacgaaaggcccgttcatattaaatag

SEQ ID NO: 245049 - DNA, 2667 bp, synthetic construct
  misc_feature 1..2667: note = Description of Artificial Sequence: Synthetic coding sequence
  source 1..2667: mol_type = other DNA
tgatccgtcggcgcatctgggcagaggccagtcttttgccccgtccacaaacaggaacaattgaagttattttgcgaaacttgcgacagactcacatgcagagactgtcaactgctagaacacaaggagcatagataccaattcctggaggaggcattccagaaccagaaaggggctatagagaaccttctggctaaactcctcgagaagaagaattatgtgcacttcgcggctacccaggtgcaaaaccgcataaaggaggtgaatgaaaccaacaaacgtgtggaacaggaaatcaaagttgccatatttacgctgatcaacgaaatcaataaaaaaggtaagtcccttttgcaacagctggagaatgttaccaaggaaagacagatgaaactccttcagcagcagaacgatatcacaggcctgtccagacaggtcaaacacgtgatgaattttaccaactgggctatcgcgtctggctcctccaccgctctgttatattcaaagagactcatcaccttccagctcaggcacatcttgaaagctcggtgcgaccccgtcccagctgctaacggcgctattcggtttcattgcgacccaacattttgggccaagaacgtcgtcaacttggggaacctggtcattgaaagtaagccagcgccagggtacacccctaatgttgtcgtaggacaggtcccccctggcacaaaccacattagcaagactcccggtcagatcaacctcgcccagctcaggttgcagcatatgcaacagcaggtttacgcacaaaagcatcaacagctccagcaaatgcggatgcagcagccgcctgcccctgtacctacaacaaccactaccacacagcaacatccacggcaggctgctcctcagatgctccagcagcagccccctcgcctaattagtgtgcaaacaatgcagaggggcaacatgaactgtggcgcattccaggcacaccagatgcggctggctcagaatgccgctaggatcccgggaatcccgagacacagcgggccacagtattccatgatgcaaccccatctgcaaagacaacactctaatccaggccatgccggaccattccctgtggtgtctgtgcacaacacaaccatcaacccgacatcccccactacagctaccatggcgaatgctaaccgcggacccacaagtcctagtgttaccgctattgagctcattccatctgtgactaatccagagaacctgccatcgctgcccgatattccaccaattcaggctaatgtcgtgccaatgatgcactcttggtacgagttcggagctcgggaaaaaacccaggaccagaacgtgctggaagacgccggaagtagtagcctggacaatttgctgtccagatacataagcggcagtcacctgccgccacaacccacttccacaatgaatccttccccagggccttccgcgcttagccctggctcctcaggtctttctaattcccacacccccgtgagaccaccctcaacttcctcaacaggatcccgaggctcatgtggttcgtctggcagaaccgccgaaaagacgtccctgtctttcaagtctgaccaggtaaaagtcaaacaagaacctggaaccgaggatgaaatctgctcattctcaggcggagtgaaacaagaaaaaactgaggatggtcgccgttccgcttgtatgctgagtagtcccgaaagtagccttacccccccactgagcaccaacctgcatctcgaatcagagcttgatgctctcgcgtcactggaaaatcacgttaagatcgagcccgctgacatgaacgagagctgtaagcagtccgggttgagctccttggtcaatgggaagtctcctattagatctctgatgcataggtctgcacgcattggtggtgacgggaacaataaggatgatgaccctaacgaggactggtgcgccgtttgccagaatggtggcgacctactctgctgcgaaaagtgtcccaaagtgttccatctcacgtgccatgtccctacactgctgagttttccttccggcgactggatctgcaccttctgcagggatattgggaaacccgaagttgagtacgactgcgataacctgcaacacagcaaaaaagggaagacagctcaggggctgagcccagtcgatcagcggaagtgcgaaaggctcctactgtatctgtactgtcacgaactgagcatcgagtttcaagagcctgttcctgcctccatccctaactactataagatcattaagaagccaatggatttgtctaccgtcaagaagaagttacagaaaaaacactcccagcactatcagatcccagacgactttgtggccgacgttcgattgattttcaagaattgcgagcggtttaacgagatgatgaaagtagtccaagtgtacgcagatacccaggaaattaatctgaaagccgattcagaggtagcccaggccggaaaggcagtggctctctatttcgaagacaaactgaccgaaatctacagtgacaggacatttgcacccctgcctgagttcgaacaggaggaggatgacggagaggttaccgaagactcagatgaagacttcatccagcctagacggaaacggcttaagtctgatgaaagacccgtccacataaagtag

SEQ ID NO: 245050 - DNA, 2280 bp, synthetic construct
  misc_feature 1..2280: note = Description of Artificial Sequence: Synthetic coding sequence
  source 1..2280: mol_type = other DNA
atgaagctgttgcagcagcagaacgacattactggtctgtcgagacaggtgaagcacgtgatgaattttacaaactgggccatcgctagcgggtcttccacagccctgttgtactctaaacggctaatcacattccaactcagacacatactgaaagccaggtgcgatcccgttcctgctgctaatggagcgataaggttccactgcgaccccactttctgggctaaaaatgttgtgaacctaggcaatttggtgatagagagcaagcctgcgcctgggtacaccccaaatgtggttgttggtcaggtgccaccagggacgaaccacatcagcaaaaccccaggccagattaatctggctcagttgagactgcagcacatgcagcagcaggtgtatgcccagaagcaccaacagctgcagcagatgaggatgcagcagcccccagcccctgttcctaccacaactacaacaactcagcagcacccaagacaggccgctccccaaatgttacagcaacagcccccaagattaatatccgtgcagaccatgcaacgtggtaacatgaactgcggagcattccaggcgcatcagatgcggctggcccaaaatgcggctaggattcccggtatccctcgacactccgggcctcagtacagcatgatgcagccccacctgcagcgtcagcactctaaccccggtcatgccggacctttccctgtcgtgtccgtgcacaacaccaccataaacccaactagccctactactgcgacaatggccaacgccaacagaggccctacatccccatccgtgactgcaatcgaacttattccctccgtgaccaaccccgagaatcttccctccctacccgacatccccccaattcaggcgaatgttgtgccaatgatgcactcctggtatgaatttggtgccagggaaaagactcaggatcaaaacgtgttagaggacgctggctcatcctctctggataatctcctcagtagatacatctcaggttcacaccttccccctcaacccactagcaccatgaatccgtctcctggaccatcagcactttccccgggatctagcggtctgtctaacagccacacacccgtccgccctccttccacttcttccacagggagccggggaagttgtggctccagcgggagaactgctgaaaaaacctccttaagtttcaagtccgatcaggttaaggtcaagcaagagcctggcaccgaagacgagatctgctccttctctggaggggtaaagcaagaaaaaacggaagacggtcgcaggtccgcatgtatgctaagttcccccgaatcatcactcacacccccattgtccactaacctgcacctggaaagtgaacttgacgccctagcaagcctcgaaaatcatgtgaagatcgagcccgctgacatgaacgaatcttgtaagcaatccggtctgtcatcattggttaatggtaagtctcctattcggagtctgatgcatagaagcgctcgaatcggcggtgatggtaacaacaaagacgatgacccaaatgaggattggtgtgctgtgtgtcagaatggaggagatttgctgtgttgtgaaaaatgccccaaagtcttccatctcacctgtcacgtgccaactcttctctcatttccctcaggggactggatctgtacattctgtcgcgacattgggaagccagaggtcgagtatgattgtgacaacctgcagcactctaagaaaggcaagacagcccagggattaagtcctgttgaccagcgaaagtgtgagcggctgttgctctacctgtattgccatgagctgtcaatagagttccaggagcctgttccagcttcaattcctaactactataagattattaagaagcccatggatttaagcactgtcaagaagaagctgcaaaaaaagcattcacagcactaccaaataccggacgacttcgtcgccgacgtgaggttgatattcaaaaattgcgagcgttttaatgagatgatgaaagtggtgcaggtgtacgcagacacacaggaaatcaatctgaaagcggacagtgaagtcgcacaggcgggaaaggctgttgctttgtacttcgaagacaagttaaccgaaatttatagcgaccgtacttttgctcccctgccagaattcgaacaggaagaagacgatggggaggttaccgaggactctgatgaggacttcattcagccacgccgaaaaagactcaagagcgacgagcgtccagtacatattaagtag

SEQ ID NO: 245051 - DNA, 2529 bp, synthetic construct
  misc_feature 1..2529: note = Description of Artificial Sequence: Synthetic coding sequence
  source 1..2529: mol_type = other DNA
atgtgtggaagtgaacgtatattgcaagccggtaatattttggaaatcagagttgggcaggccggagccaggcgagttgcgactatgacaagcccagtcttggtcgatattcgcgaagaagtgacatgtcctatttgcctggaactcctaacagagcccctgtctattgactgcggacactccttctgccaggcgtgcatcaccccgaatggtcgcgaaagcgtgataggacaggagggagaaaggtcttgtccagtgtgtcagacctcttaccagccagggaatctcaggccaaacaggcacctggctaatatcgtcaggcgcctgcgggaggtggtcctggggccaggaaaacaattgaaggcagtcctatgtgccgaccacggggaaaagttgcagcttttctgtcaggaggacgggaaagtgatctgctggctatgcgagaggagtcaggagcacaggggacaccacaccttcctggttgaggaagtggcccaagaatatcaggaaaagttccaggagagtctgaagaagctgaagaacgaggaacaagaggccgaaaagctgacagcattcatccgagagaaaaaaacctcatggaaaaatcagatggaaccagaaagatgtcgcatccagacagaattcaaccagctgcggaatatacttgatcgggtggaacagcgtgagctgaagaagcttgaacaggaggaaaaaaaggggctgcggataattgaggaggctgagaatgacctggtgcaccagacccagtctctgcgggaattgatctcagacctggagcggaggtgccaaggcagcaccatggagctgctgcaggacgtctccgacgtgactgaaagaagtgagttttggactttgagaaagcccgaagccctgccgactaagctgcgctcaatgttcagggcaccagacctgaagaggatgttgcgggtgtgtcgagaactgactgacgtgcagagctactgggcgattcaaggctctttgacacgccgtgagaggcgcgcttctggcgtgcgcactcggcgttcccagggatctagcgccatggccagcaagatcctcctcaacgtgcaggaggaggtgacgtgcccaatctgcctggaattgttgactgaaccattgtctctcgattgtggacactcgctatgcagagcttgtataacagtgagcaataaggaagcagtgacttccatgggtgggaaaagcagctgtccagtctgcgggatctcatattcctttgaacacctacaggcgaatcagcatctcgcaaatattgtggaacggttgaaagaagtgaagttaagtcccgacaatggcaaaaagagggacctttgtgatcaccacggcgaaaaactgcttttattttgtaaagaggatcggaaagttatctgttggctctgcgaacggtcccaagagcatcggggacatcacaccgtgcttaccgaggaagtgttcaaagagtgtcaggagaaacttcaagctgtactgaaaaggctaaagaaagaggaagaagaggccgagaagcttgaagccgacattagagaagaaaaaacttcatggaaataccaggtgcagactgagaggcagagaattcagacagagttcgatcaactgagaagcatccttaataacgaagaacagcgggaattgcagcgccttgaagaagaggaaaagaaaactcttgacaaatttgccgaggcagaggatgaattggttcagcagaagcagcttgtcagagaacttattagtgacgtcgagtgtagaagccagtggagcaccatggagctgttgcaagacatgtctggcatcatgaaatggtcggaaatttggcgccttaaaaagcccaagatggtgtcaaagaaattaaaaacagttttccatgcaccagatctttcccgaatgctgcagatgtttcgcgaattgacggccgtgaggtgttattgggttgatgtgactctcaactcggtgaacctgaacttaaatctcgtgctgagcgaagatcagaggcaggtgattagtgtgcctatttggccttttcagtgttacaactacggcgtcctcggcagccaatatttttcgtctggcaaacattattgggaagtggatgtctcaaaaaagactgcctggattctgggtgtatactgccgaacctattcacgccacatgaagtacgtggtacgccgttgtgccaatagacagaatctttacacaaagtataggcctctatttgggtattgggtcatcgggcttcagaacaaatgtaaatacggtgtgtttgaagagtctttaagctcagatcctgaagtcctgacattgtctatggccgtacctccgtgtcgcgttggagtcttcctagactatgaggctgggattgtgtcgtttttcaatgtgacctcacatgggtcactgatctataagttcagcaaatgctgcttcagccagcccgtttatccatacttcaatccttggaattgtccagccccaatgaccctgtgtcccccatcgtcatag

SEQ ID NO: 245052 - DNA, 1467 bp, synthetic construct
  misc_feature 1..1467: note = Description of Artificial Sequence: Synthetic coding sequence
  source 1..1467: mol_type = other DNA
atggcgtccaagatcctcctaaatgtgcaggaagaggtaacctgccctatatgcctcgaattgctcacagaacctctcagcttagactgcggccactctctgtgccgggcttgcattacagtgtccaataaagaagccgtcacgagcatgggtgggaaatccagctgccccgtttgtggtataagctattcctttgagcatttgcaggccaaccagcatcttgcgaatattgtggagcggctgaaggaggtcaagctaagtccggacaatggaaaaaagagggacctgtgcgatcaccatggcgagaaactgcttctgttctgcaaggaggaccgcaaggttatttgctggctgtgcgagcggagccaagagcacagagggcaccatactgtcctcactgaggaggtgttcaaagaatgtcaggaaaagctgcaggccgtgctgaaacggcttaagaaggaagaggaagaggccgagaaactagaggccgatatccgcgaagagaagacttcctggaagtatcaggtccagactgagcggcaaaggatacaaaccgaattcgatcaacttaggtccatccttaataatgaagagcagagagaactgcagcgtctggaagaggaagagaagaagaccctggataagttcgctgaagccgaggatgaactggtccagcagaaacagctggtgcgcgagcttatctcagatgtggaatgtcgttctcagtggtccacgatggaactgcttcaggatatgagcggaatcatgaaatggagtgagatttggcggctgaagaagcccaagatggtgtcaaagaagttgaaaacagtgtttcacgctccagatctcagtaggatgctgcagatgttccgggaactgaccgctgtgagatgctattgggtggatgtgaccctcaattcagtgaatctgaatctgaatcttgttctgtcagaggaccaacgacaagtcatatcagtgcccatctggccctttcagtgctataactacggagttctcgggagccagtacttcagttcaggaaagcattattgggaagttgacgtgtccaaaaagactgcctggatcctgggagtgtactgtagaacttactcaaggcatatgaagtatgtcgtaagaagatgcgccaaccggcaaaatttgtataccaagtaccggccactttttggatactgggttatcggtctgcagaataaatgcaaatacggagtgtttgaggagtctctctcgtcagacccggaggtacttactctgtcaatggctgtccccccatgtagagtcggtgtcttcctcgattatgaagctggtatcgtgtcattttttaacgtaacaagccacggatccctcatatacaagttcagcaaatgctgctttagccagccagtgtacccctactttaatccttggaactgcccagcaccaatgacattgtgtcctccgtctagctag

SEQ ID NO: 245053 - DNA, 1467 bp, synthetic construct
  misc_feature 1..1467: note = Description of Artificial Sequence: Synthetic coding sequence
  source 1..1467: mol_type = other DNA
atggcgtccaagatcttgctcaatgtacaggaagaggtgacctgtcccatatgcctggaactcctgacggagccactgagcttggactgcggccacagcttgtgcagggcttgtattacagtgtcaaataaggaggccgttacgtctatgggtgggaaatcttcctgccctgtgtgtggcatctcttattcatttgagcacctgcaggccaatcaacacttggccaatatcgtagaacggctgaaggaagtcaagctatccccagacaatggcaagaaacgggacctctgtgatcatcatggcgagaagctgctgctcttttgcaaagaggacagaaaagttatctgctggctgtgtgagcggagccaggagcacagaggccaccacaccgtgctgacggaggaagtttttaaagagtgccaggaaaaactgcaggccgtcctaaagagacttaagaaggaggaggaggaagccgaaaaactggaagccgatattagggaggaaaaaacaagctggaagtatcaggtccagacagagcggcaaaggatccagacggagtttgaccaactgagatccatattgaataacgaggagcagcgggaactgcagcgcctcgaagaagaagagaagaagacgctagacaagttcgccgaggccgaggatgaactggtgcagcagaagcaactggttagagagctgattagcgacgtggagtgtcgatcccaatggagtactatggagcttcttcaggatatgagcggcataatgaagtggagcgaaatctggcgcctgaagaaacctaaaatggtgagtaaaaagctcaaaacagtgttccacgccccagacctgagcagaatgctccaaatgttcagagagttgaccgcggtgcggtgttactgggtggacgtgacactcaactccgttaacctgaatctcaacctggtgctttccgaggatcaacgacaggttatctccgtgcccatctggcccttccaatgttataactacggggttttaggtagtcagtatttctcttcgggcaaacactattgggaagttgacgtgagcaaaaaaactgcttggatccttggtgtgtactgcaggacctatagtagacacatgaaatatgttgtacgcaggtgtgcaaaccgccaaaatctgtacacaaagtacagaccgctgtttggatattgggtcatagggctgcagaacaagtgtaaatacggcgtttttgaggaatcactgagttcagatccagaagtgctcaccttatccatggcagtgccaccctgcagggtgggcgttttcctcgattacgaggccggaattgtgtccttctttaacgtgacttcacacggtagtctcatatacaaattctccaaatgttgcttctcacaacctgtatacccctattttaatccttggaactgtccagccccaatgaccctctgccctccgtccagctag

SEQ ID NO: 245054 - DNA, 1467 bp, synthetic construct
  misc_feature 1..1467: note = Description of Artificial Sequence: Synthetic coding sequence
  source 1..1467: mol_type = other DNA
atggcaagtaagattttgctcaatgttcaggaggaagttacatgccctatttgtctggagcttctgactgaacctctgagcctagattgcggacacagcctttgccgtgcctgtattactgtaagtaataaagaagctgtcaccagcatgggcggaaagagttcctgtccggtttgcggaatatcttactctttcgaacatctgcaagccaatcagcacctcgccaacatcgttgagcgtttgaaagaggtgaaactcagcccagacaatggcaagaagcgagatctgtgtgaccaccatggggagaaactgctgctgttctgcaaggaggatagaaaggtgatttgctggctgtgcgagagatctcaggagcaccggggacaccacaccgtgctaactgaggaagtatttaaagagtgtcaagaaaaacttcaggccgtactgaagaggctgaaaaaggaggaggaggaggcagagaaactcgaggctgacattcgcgaagagaagacaagctggaaataccaggtgcagacagaacgacagcgcattcagactgaatttgaccagttgcgttccatactaaataacgaagagcaaagagaactgcagcggttggaggaagaagagaaaaaaactctggacaagttcgcagaggctgaagatgagcttgtgcaacagaagcagctggtgagggaacttatcagcgatgtggagtgtcgcagccagtggagcacgatggagctgctccaagacatgtctgggatcatgaaatggtccgaaatttggagattgaagaagcctaagatggtctccaagaagctgaagactgttttccacgctcctgacttgtctcggatgctgcagatgttcagagaactgaccgccgtcagatgttattgggttgacgtgactttgaactctgtgaacctgaacctgaatcttgtcctttctgaagaccagaggcaggtgatctccgtgccaatttggccctttcaatgttataactatggagtgctgggctctcaatacttctccagcgggaaacactactgggaggtggacgtatccaagaagaccgcctggattttgggcgtgtactgccggacctactcacgacacatgaagtatgtggtacgccgatgcgctaatcgtcagaacctttacaccaagtaccggccactgttcgggtactgggtcattggccttcagaacaaatgcaagtacggggtgtttgaagagagtctttcaagcgatcctgaggtcctcaccttgtctatggccgtgcctccatgcagggtgggagtgtttctggactatgaggccggaattgtgtcattctttaacgtgaccagtcatggttctctaatctacaaattctcaaagtgttgcttctcacagcctgtctacccgtatttcaacccctggaattgtcccgcacccatgacactgtgccccccatcctcttag

SEQ ID NO: 245055 - DNA, 2187 bp, synthetic construct
  misc_feature 1..2187: note = Description of Artificial Sequence: Synthetic coding sequence
  source 1..2187: mol_type = other DNA
atgtcggagagcggcgaaatgagcgagtttggttacatcatggaattgattgccaaaggtaaagttactatcaagaatatcgagcgcgaattaatctgtcccgcatgtaaagaactgttcacacacccgctgatcttaccatgtcagcattcaatatgccacaaatgcgttaaggagcttctgttgaccctggatgactcttttaatgacgtcgggagcgacaacagtaaccaatcatcacctcgcctacgattaccgagtccatctatggacaagattgataggattaaccggccaggttggaaaaggaacagcctcacccctcggacgactgtgtttccgtgccccggatgcgaacatgacgttgatttgggggaacggggaatcaatggcctgttcaggaacttcaccctggaaacgattgtagaaagataccggcaggctgccagagccgcaacagccatcatgtgtgacctgtgtaaaccaccccctcaggagtccaccaagtcgtgcatggattgtagcgccagctattgcaatgagtgtttcaagatccaccacccgtgggggacaattaaagcacagcacgaatacgttggcccaaccacgaatttccggccaaagattcttatgtgtcctgaacacgaaaccgagcggatcaacatgtactgtgaactgtgccgccgtcctgtctgccatttgtgtaaattgggcggtaaccatgccaaccatagagtgacaacaatgtcctccgcatacaagacactgaaggagaagttgtcaaaggatatagattatctcatcggtaaggagtcgcaggtgaagagccaaatctctgaactgaacttgctgatgaaggaaaccgagtgcaatggtgagagagctaaggaagaggccataacccattttgaaaaactctttgaagtcctagaagagcggaaaagttcagtgttgaaagcaattgactcttctaaaaaacttaggttagataagttccagacccagatggaggaatatcaaggattactggagaataatgggttggtgggttatgctcaggaggtgcttaaggaaaccgatcaaagttgtttcgtgcagacagccaaacaactgcatcttagaatccaaaaagcaactgaaagtctgaaatcctttaggcctgcggcacagacctctttcgaagattacgtggtgaatacatcaaagcagacggaactgctcggagaactatcttttttctccagcggcatagacgttcccgagattaatgaggagcagtcaaaggtctacaacaatgcgctgatcaattggcatcatcccgagaaagataaagctgattcgtacgtacttgagtacaggaagattaatagagatgacgaaatgagctggaacgaaattgaagtgtgtggcacttctaagatcatccaggacctggaaaacagtagtacctatgcattccgggtgagagcctacaagggctctatctgttctccctgtagcagagagctcattctgcacacccctccggcaccagtcttttctttcctcttcgacgagaagtgtggatataacaacgaacacctgttactcaatctgaaacgggatcgcgtggagagtagggctggatttaatctcctgttggcggctgagcgcattcaggtggggtactacaccagccttgactatatcattggcgacacaggaataactaagggtaaacacttctgggccttccgggtggagccatattcctatctagtaaaagtgggggtagcgtccagtgacaagctccaggagtggctacgaagtccacgcgacgccgtgtcaccacgatacgagcaggactctggacatgactcgggcagtgaagatgcctgtttcgattcctcacagcccttcaccttggtcactatcggtatgcagaagtttttcatccctaagtctcctacctccagtaatgagcctgagaaccgcgttctacccatgcccacatcgattggaatctttttggattgtgataaggggaaagtcgacttttacgatatggaccaaatgaaatgcctttacgagagacaggtggactgcagccacacgctgtacccagcgtttgccctcatgggcagtggcggaatccaactagaagaacccataaccgcgaagtacctggagtaccaggaggatatgtag

SEQ ID NO: 245056 - DNA, 186 bp, synthetic construct
  misc_feature 1..186: note = Description of Artificial Sequence: Synthetic coding sequence
  source 1..186: mol_type = other DNA
atgagtgagagcggagagatgtccgaatttggctatatcatggagcttattgccaaagggaaagcctccgctatgggcttgcagcagacccacgagcattctcggctgacctccaagggcggtgaagccagatgcccctttgagatatcggaggtgggaaagcagagcctcccgagacgaacctag

SEQ ID NO: 245057 - DNA, 183 bp, synthetic construct
  misc_feature 1..183: note = Description of Artificial Sequence: Synthetic coding sequence
  source 1..183: mol_type = other DNA
atgtccgagtccggagagatgtccgagttcggatatatcatggagcttatcgccaagggcaaaatgcccgattggaggaggggatatcggtgtcgacagggatgtggtaagactaccgaactcgctaccgcaacagacttttcccagaccggaaacaagtctggtaaacattttaagacatag

SEQ ID NO: 245058 - DNA, 2895 bp, synthetic construct
  misc_feature 1..2895: note = Description of Artificial Sequence: Synthetic coding sequence
  source 1..2895: mol_type = other DNA
atggacgagcagtccgtcgagagtattgccgaggtgttccgctgcttcatctgcatggagaaactacgtgatgctaggctgtgtccacactgctctaaactctgttgctttagctgtatacgcaggtggctaacagaacagagagcacagtgcccccactgccgggctcccctacaactgagggaactagtgaactgcaggtgggctgaggaggtgacccaacagctagatacgctgcagctttgttccctgaccaaacacgaggaaaatgaaaaggacaaatgcgagaatcatcacgaaaaactttccgtattttgctggacttgcaaaaagtgcatatgtcaccaatgtgccctctggggtggcatgcatggtggtcacactttcaaacctctggctgagatttacgaacaacatgtgactaaggtgaacgaagaagttgccaaactcaggcggcgactgatggaattgatcagccttgtacaggaagtcgaacgcaacgtggaggcagtaagaaacgccaaagacgagcgagtgcgggaaattagaaatgccgttgagatgatgatcgccaggctggatacccaactgaagaacaaattaataaccctcatggggcagaagacttccctcacgcaagagacagagctgctcgagtccctcctccaagaagtggagcaccagctccgatcttgctcaaagagcgaactgatctcaaaaagcagtgaaatcttaatgatgtttcagcaagttcataggaagcccatggccagcttcgtcacaactccagtcccacccgattttacaagcgaactcgtgccatcatacgattcggcaacttttgtgctcgagaatttctccactctccgtcagcgggcagacccagtgtatagcccgccactccaggtgtctgggctgtgctggcggctgaaagtctatcccgatgggaatggtgtggtgcgcggatactacctctcggtcttcctggagttgtctgccggactacctgaaacctccaagtacgagtaccgggtggagatggtccatcagtcatgcaacgatccgactaagaacattattcgcgagttcgcgtcagactttgaagtcggagagtgttggggatataatcgattcttcagactcgatcttctggctaatgagggatacctgaatccccagaacgacacggtgatactccgcttccaggtcaggtctccaacattctttcagaagtctcgggatcaacactggtacatcacacaactagaggcggcacagaccagttacatacagcagattaacaacctgaaggagcggttgacaatcgaactcagcagaacgcagaagtctcgagatctatcaccaccagacaatcacttgtccccgcaaaatgatgatgccctcgagacaagagccaaaaagagcgcctgcagtgacatgctcctcgaaggcggacccaccacagctagtgttagggaggcaaaggaagacgaagaagatgaggaaaaaatccagaatgaggactaccatcacgaactatctgacggggacttagaccttgacctggtgtacgaagacgaagtgaaccaactggatggcagtagcagcagcgcctcaagtacagccacctccaacactgaggagaacgacattgatgaggagacaatgagcggagaaaacgacgtggaatataacaatatggaactggaggagggcgagttgatggaagatgctgctgcagctggtccggcaggttcatctcacggttacgtgggcagcagttctcgcatttcgcggcgtacccacctgtgttcagcagcaacgagcagcttactggacattgacccgctgatcctgatacatctactagacctcaaagatagatctagtatagaaaacttgtggggactccagccaagaccacctgcctccctgcttcagccaacggctagttatagccggaaggataaggatcagagaaagcagcaagccatgtggcgggtgccgtccgatctcaagatgctgaagcggcttaaaacacagatggcggaagttcggtgtatgaaaaccgacgtgaaaaatacgctctccgaaatcaaaagcagcagtgcagcatccggtgacatgcaaactagtctctttagcgcagatcaggctgcactggccgcttgcgggaccgaaaacagcggtaggctccaggatctgggaatggagctgttggctaagtcttctgtggcaaactgttatatccgtaactccacgaataaaaagagtaatagccccaagcccgctcgctcgtccgtcgccggaagtctgtcattgagacgtgcagtcgaccccggtgagaatagcaggtcaaagggcgattgtcagacattgagcgaagggagcccagggtcaagccagagtgggtccaggcattcaagcccaagagccctgatacatggaagcatcggcgatatactgcccaagaccgaggaccggcaatgtaaagctctcgatagcgacgctgttgtggtggccgtgttttccggactgcccgcagtcgaaaagagaaggaaaatggtgacactgggggctaatgccaagggcggacacctggaaggcctccagatgactgacctggagaacaacagcgagaccggcgagctgcagcccgttctgccagagggcgcatccgcggctcccgaagaagggatgtccagcgattcagacattgaatgcgatacggagaatgaggagcaggaagagcacactagtgtggggggattccatgatagtttcatggtcatgacacagcccccagacgaggacactcatagctcatttcccgatggggagcagattggaccagaagacctgagttttaacacagacgagaattccggacgatag

SEQ ID NO: 245059 - DNA, 2412 bp, synthetic construct
  misc_feature 1..2412: note = Description of Artificial Sequence: Synthetic coding sequence
  source 1..2412: mol_type = other DNA
atgcacggaggccacacttttaagccattggccgagatctacgagcagcatgtcaccaaagtcaacgaagaagttgctaaattaagaaggcgcctcatggaactgatatcccttgtccaagaggtggagcggaatgtcgaagccgtcagaaatgccaaagatgagcgagtgcgtgaaatcagaaacgccgtggagatgatgatcgctagactagacactcagttgaaaaacaagctgatcaccttaatggggcagaaaaccagcttgacacaggagacagagcttctggagtccttattacaagaggtcgagcatcagctcaggagctgttcgaaatccgagctgatctctaagtcctcggagattctgatgatgtttcagcaggtgcacaggaagcccatggcgagcttcgtaaccacccctgtccctcccgatttcacttcagagctcgtccctagctatgactcggctacatttgtgcttgagaatttctctaccttgagacagcgcgcagacccagtatattctcctcccctccaggtgtctggtctctgctggcgcttgaaggtttatccggacggcaatggcgtcgttcgtggttattacctaagcgtgtttcttgagctgagtgcaggactgccagaaacgagcaagtatgaatatcgagtcgaaatggtgcatcaatcttgtaacgatccgaccaaaaatattatccgggagtttgcaagcgatttcgaggtgggggagtgctggggctacaataggtttttccgactagatctcctggccaacgaggggtatctgaatccccagaacgacaccgtgatactacgattccaggtaaggtctcctaccttcttccagaaatctagggaccagcactggtatatcacacagctggaggccgcacagacatcttacatccagcagataaataatcttaaggaacggctgacgatcgagctcagccgcacccagaagtcccgggatttgtctccgcctgataaccacttgtccccacagaacgatgacgcactggagactcgcgcaaaaaaaagcgcttgcagtgacatgttgctggaaggcggacccacaaccgcctcggtcagggaagctaaggaagatgaggaggacgaagaaaaaatccaaaatgaagactatcatcacgagctgtcagatggtgacctcgatctggatttggtgtacgaggacgaggtgaaccagctagacgggagctcctcctcagcttccagtaccgcaacatccaacactgaggagaatgatattgatgaggagaccatgtcaggagaaaacgacgtcgagtataataacatggagctggaagagggcgagctcatggaagacgccgctgcagctggccctgcaggctcgagtcacggatatgtcggatcaagcagtcggattagcaggcggacccacctctgttcagccgctactagtagccttctggatattgaccccctaattttgatccatctactcgatctgaaggaccgctccagtatagagaatctctggggtctccagcctagaccccctgcctcactccttcagccaaccgcttcctatagcaggaaagataaggatcaacgcaagcagcaggcaatgtggagagtgccctctgatctgaagatgctcaagagactgaagacacaaatggctgaggtgcggtgtatgaagaccgacgtcaagaacactttaagcgaaataaaatctagttctgctgcatccggtgatatgcaaactagtttgttcagcgctgaccaagctgcccttgcagcctgcggtacggagaactcgggacgtttgcaggacctgggcatggaactgctggcaaaatcttccgtcgctaattgttacatcaggaattctaccaacaaaaaatctaatagtcctaagccggctagaagttctgtagcgggaagccttagcctccgacgtgccgtagatcccggagaaaacagtcggtctaaaggagactgccagaccctgagtgaaggcagcccgggttcctctcaaagcgggagtcgacactcctccccaagggccctgatccatggttccatcggtgacatcttacccaagacagaagaccggcagtgtaaggcattggacagcgatgccgtggttgtggccgttttctcaggcctgcctgcagtggagaaacggcgtaagatggtgactctgggggcaaatgccaaggggggtcaccttgaaggcctgcaaatgaccgacctagagaacaacagcgagacgggtgaactgcagcctgtgctcccagagggcgctagcgcagcaccggaagaagacacacacagttcctttccggacggcgagcagattggaccggaagacctgagcttcaatactgacgagaattctggtagatag

SEQ ID NO: 245060 - DNA, 2793 bp, synthetic construct
  misc_feature 1..2793: note = Description of Artificial Sequence: Synthetic coding sequence
  source 1..2793: mol_type = other DNA
atggatgaacagtcagtggagcggtggctaaccgagcagagggctcagtgtccacattgtcgagctcccctgcagctgagagagctggtgaactgtcgttgggccgaagaggtgactcaacagctggacaccttgcagttgtgcagcctgactaagcatgaagagaacgaaaaggacaaatgtgaaaaccatcatgaaaaactctctgtgttctgttggacatgcaaaaagtgtatatgccaccagtgcgctttatggggcggaatgcacgggggtcacacctttaagcccctagccgaaatctatgaacagcacgtgactaaagttaacgaggaagttgctaagctacgtcgtaggctcatggaactgatctctctagttcaagaggtagagaggaatgtcgaggctgtccggaacgccaaagacgagcgggtgagggaaatacggaacgcagtagagatgatgatagcacggttagacactcagctgaagaacaaattaattacattgatggggcagaagacttccctgacacaggagaccgagctgcttgagtccctgctacaggaggttgagcatcagctgagaagttgcagtaagtcggagctcatctctaagagctctgagattctcatgatgttccaacaggtgcatcgaaagcctatggccagtttcgtgacaacgcctgtccctccggactttacgagtgaactggtgccttcatacgattccgccacatttgtgcttgagaattttagtactctgaggcagcgggcagacccagtatattcacctcctctccaggtgtccggcctttgctggcgactgaaagtgtatcccgacggcaacggagtcgtacgaggctattacctgtccgtttttctcgagctatcagcaggcctgccagagacctccaaatacgagtatagggtggaaatggtgcaccaatcctgcaacgaccctacgaaaaatatcatacgggaatttgcaagcgattttgaggttggagagtgctggggatataatagattttttcgcctggaccttctggctaacgaaggatatctgaacccccagaacgatacagttatcctgcgatttcaggtgagatcacccaccttcttccaaaagagtagagaccagcactggtacatcacacagctcgaggccgcacagacctcatacattcaacagattaataatctcaaagagcggttaacgattgaactgtcacgaactcagaagtcccgagatctgagccccccagacaatcacctttctcctcagaatgatgacgccctggagactcgcgcaaaaaagtccgcatgttccgacatgttgctggagggcggtccgacgacggctagcgtgagagaagcgaaggaggatgaagaagacgaagagaagatccagaatgaagattatcaccatgaactgagcgacggtgacctggacctcgaccttgtctacgaggacgaagtgaatcagctggatggttcgtcctctagcgcttcgagcaccgctacaagcaacactgaggagaacgatatcgatgaggagacgatgtcgggcgagaacgacgtagagtataacaatatggaactcgaagagggagaactgatggaggatgccgcagctgcgggaccagctgggagtagtcatgggtatgttggttcctcaagcagaatttcccggaggacacacctctgctctgccgctacgtccagcctcctcgatattgatcccctcatcctaattcatctactggatctcaaggacagatcctcaattgaaaacttgtggggcctccagccgagaccccctgcttccctgctccaaccaactgcttcttacagtcgaaaagataaagaccaaaggaaacagcaagcaatgtggagggtgccgtcagatctgaagatgctcaagcgcctgaagactcagatggcagaggtccgctgtatgaagaccgatgtcaaaaacacactctccgagatcaaatcaagttccgcagccagtggagacatgcagacctccctgttttccgctgatcaagctgccctggccgcttgcgggaccgagaattctggtcgattacaagatctcggcatggagctgttggctaaaagctccgtggcaaactgctacattcgtaactccactaacaaaaagtctaactccccaaagccagccaggagtagtgtggccggttccctgtccttgcgacgcgctgtggatcccggtgagaacagtagatcaaagggcgactgtcagacactctcagaaggctctcccggaagctcccagtccgggtcccgccattcctcaccaagagccttgatccacgggtctattggcgatattcttcctaaaaccgaggatcggcagtgtaaagcacttgatagcgacgctgtggtggtcgctgtctttagtggattgcctgccgtggagaaacgacggaaaatggtgactttgggagctaatgcaaaggggggacatctagaagggctgcagatgactgatctggaaaataactccgaaactggggagcttcagcccgtgcttccagagggcgctagtgcggctcccgaggaaggaatgtcctcagacagcgacattgagtgcgatacagaaaatgaagaacaggaggaacatacatcagttgggggatttcatgactcctttatggtaatgacacagccgccagatgaagacacacactcttcctttcctgatggggaacagatcggacctgaggatctttccttcaacacagacgagaattccgggcgatag

SEQ ID NO: 245061 - DNA, 2895 bp, synthetic construct
  misc_feature 1..2895: note = Description of Artificial Sequence: Synthetic coding sequence
  source 1..2895: mol_type = other DNA
atggacgaacagtctgtggagtccatagcggaggtctttagatgttttatttgtatggagaagttaagggatgcacggctctgcccccactgttctaagctgtgctgtttcagctgtatacgacgctggctgacagagcagcgtgcccaatgtccacactgccgcgctcccttacaactgcgcgaactcgtgaattgtcgctgggcagaagaagtgacacaacagctcgatacattacagctctgcagcctgacaaaacacgaagagaacgaaaaagataagtgcgaaaatcaccacgaaaagctgagtgtcttctgctggacatgcaagaaatgtatttgtcaccagtgcgccctgtggggcggaatgcatgggggtcataccttcaagcccctggcagaaatctacgagcagcatgtgaccaaggtgaatgaggaagtggctaagctgcggaggcgcctgatggagttgatctctctagtccaagaagtggagcgaaatgtggaggctgtaaggaatgctaaggatgaacgagtgcgcgagattagaaacgcagtcgagatgatgatcgcacgtttggatacccagctgaaaaataaactcatcaccttgatgggccagaagacgagcttgacccaggaaactgagctgctggaaagtttactgcaggaggtggagcatcagctcaggagttgcagtaagtctgaactgatctctaaatcctctgagattttgatgatgttccaacaggtgcatcggaagcctatggctagcttcgtgacaacccctgtcccccctgatttcacatcggaattggtgccttcttacgactctgcaactttcgttctcgaaaatttctcgaccttgagacagcgtgctgatccagtctattctccccctctgcaggtcagtggactatgttggagactcaaggtttacccagacggcaatggagtcgtccgcggatactacttaagcgtgtttttggaactgagcgcagggctccctgagactagtaaatacgagtatcgcgtggagatggttcaccaatcatgcaatgacccgactaagaatatcattagggaatttgcctcagacttcgaagttggcgaatgctggggttacaatagattctttagactcgatcttcttgccaatgaagggtacctgaacccacagaacgatacagtgatcctgcgcttccaggtgcggtcccctaccttcttccagaagtcaagggaccaacactggtacatcacccagctcgaggccgctcagacaagctatatccagcagatcaataatctcaaagagcgtttgacaatcgagctctcccgcacacagaaatcacgcgacctatcaccacccgacaatcatttgagcccccagaacgatgacgccctcgaaactcgtgcgaaaaagtctgcatgctcggacatgctgcttgagggcggacctactacagcgtcggttcgcgaggccaaagaagacgaagaggatgaggagaagattcaaaacgaggattaccaccatgagctgtcagacggggacctggacctggatttggtgtacgaagacgaagtgaatcagctggacggatcatccagcagtgcctcttcaacagccacgagtaacacggaagaaaacgatatcgacgaggagacaatgtccggcgagaacgacgtggagtacaataatatggaattggaggagggtgagctgatggaagatgcagctgcagctgggccagctggttcttctcacggctacgtgggttcaagtagcaggatttcgaggagaacacacttgtgctcagccgcaacctcctctctgttagacattgacccattgatccttatccatttattggacctcaaggacaggtcatcaattgaaaatctgtgggggctccaaccaagaccacccgcttctctccttcagcccaccgcatcctattcacgcaaggacaaggatcagagaaaacagcaagcgatgtggcgggtaccctccgatctgaagatgctaaaacggctgaagacgcaaatggccgaggttcggtgtatgaaaacagacgtgaagaatacgctgtcagagattaaaagcagctccgccgcttccggggacatgcagacctcactcttttcagccgaccaggccgcactggcagcgtgcggaaccgagaatagtggacgccttcaggacctcgggatggagctcctggccaaatcgtcggtcgcaaactgctacatacgcaatagtacaaataagaagtccaattcacccaaaccagcccgttcaagcgttgctggttccctatccctcagaagagcagtagatcctggagaaaattctagaagcaagggggattgccagaccctgtcggaaggctcacccggatcttcccagtccgggtcacggcactcttcaccacgtgcattaattcacggttccataggcgatattctcccaaagactgaagatcggcaatgcaaagccctggatagcgatgcagtcgtcgttgctgttttctcaggactgcctgccgttgagaagcgccgaaagatggtaaccctaggcgcaaacgcgaaaggaggtcacctggaaggtctccagatgacggatctggagaataattccgaaaccggggagcttcagcctgtattaccagaaggggcttctgccgctcccgaagagggcatgagttccgatagcgatatcgagtgtgatacagagaacgaagaacaggaagagcacaccagcgttgggggtttccacgattcattcatggtcatgacccagccacccgatgaagacacacatagctcttttccagacggagagcagatcggacccgaggacctttctttcaacacagacgaaaactcgggcaggtag

SEQ ID NO: 245062 - DNA, 1557 bp, synthetic construct
  misc_feature 1..1557: note = Description of Artificial Sequence: Synthetic coding sequence
  source 1..1557: mol_type = other DNA
atggctgaaacctccctgttagaggctggcgctagcgctgcttctacagcggctgcactggaaaacctacaggtggaggcctcctgcagtgtttgtttggagtaccttaaggagcctgtgattatcgaatgtgggcacaacttctgcaaggcctgtattacccggtggtgggaggacctcgagagagactttccttgtcctgtctgtagaaaaacctccaggtatagaagccttcgtcctaaccgccaattggggtctatggtcgagatcgctaagcagctacaggcggttaaacggaagattcgtgacgagagtctttgcccacagcatcacgaggccctctcactgttctgttatgaagatcaggaggccgtttgcctcatctgcgccatttcccatacacaccgggcacacacagtagtgccgctagacgatgccacgcaggaatataaagaaaaattgcagaagtgcttggaaccactagaacagaaactgcaggaaatcacgagatgcaagagtagcgaagagaaaaaacctggcgagttgaagcgcctggtcgagtcccgtcgccagcaaatcctccgtgaattcgaggagctccatagaaggttagatgaggagcagcaggtacttcttagtcggctcgaagaggaggagcaagatatactgcagcgcctgcgcgagaacgcagcacacctgggagacaagcggagagacctggcccacctggccgcagaggtagaaggaaaatgcttgcagagcggatttgagatgctaaaagatgtaaagagtaccttggaaaagaatattcccagaaaattcggagggtcgctgtcaacaatctgcccacgggaccataaggccctgctaggactggtgaaggagattaatagatgtgaaaaagtcaaaacaatggaggtcacaagtgtgtccatagaactggagaagaatttcagtaattttcctcgccagtacttcgcgttgagaaagatcttgaaacagttaatagccgatgtcacgctcgaccccgagactgctcatcccaatttggttttaagtgaggatcggaaatccgtgaagttcgtggaaacaagactgcgggatctccccgacactccaagacgtttcacattttatccttgcgtgttggccactgaggggttcacttccggaaggcattactgggaggtggaagttggtgataagacccactgggcagtgggagtgtgtagagattcagtttcacggaagggagagcttacgcccctgccagaaactggctactggcgtgtcaggctctggaacggtgataagtacgcggctacaaccactccatttacacccttgcacatcaaggttaagcccaaaagggtggggatctttctcgactacgaagccggtaccttaagcttctacaacgtaacggatcgttcacacatttacacatttacagatacattcacagaaaaactgtggcctctgttttaccccggaatccgggcaggaaggaaaaacgctgcaccactaaccatcagacccccaacggactgggagtag

SEQ ID NO: 245063 - DNA, 1467 bp, synthetic construct
  misc_feature 1..1467: note = Description of Artificial Sequence: Synthetic coding sequence
  source 1..1467: mol_type = other DNA
atggccgaaacgagtttgctcgaggcgggagcctcagccgcaagcacagccgcagcccttgagaaccttcaggttgaagcatcctgttctgtctgtcttgaatacctcaaagaacccgtgattatagagtgtggccacaacttttgtaaagcatgtatcacaaggtggtgggaagacctcgaaagggatttcccctgtcccgtgtgccgtaagacaagtaggtaccggtctttgcgccctaataggcaactgggctcaatggtcgagatagccaaacagcttcaggccgtcaagcgaaaaattcgggatgaatctctgtgccctcagcaccacgaggctttaagcttattttgctatgaggatcaggaggccgtttgtctcatctgtgccatttctcacacacatcgcgcacatacggtggtaccgttagacgacgcaacacaggaatacaaggaaaagcttcagaaatgtttggaacccctggaacagaaactgcaggaaatcacacgctgcaaaagtagtgaagaaaaaaagcctggcgagcttaagcggctggttgagtcacggagacaacagattctccgagaatttgaggagctgcaccgtcgactggacgaagaacaacaggttttgctttctcgactggaagaggaagagcaggatatcctacagaggctgagggagaatgccgcacatcttggcgacaagcggcgagatcttgcccacctcgctgccgaggtggaggggaaatgcctgcagagcggatttgaaatgctgaaagacgtgaaatcaaccctggaaaagtgcgaaaaagtgaagacaatggaggtgacatcagtgtccattgagcttgaaaagaactttagtaatttcccaaggcagtacttcgcattaaggaaaattctgaagcaactcatagctgacgtcacattagatcccgaaacggcacacccgaacctggttctaagcgaggacaggaagagtgttaaattcgtggagacacgcctcagagatctgccggataccccgaggcggttcacattttacccatgtgtgctggccacggaaggcttcactagcggtcgccattattgggaggtcgaggttggggacaaaacacactgggctgtaggcgtctgtagagattccgtgtctagaaaaggcgagctgacaccactccctgaaaccggctattggagggtccggctgtggaacggggataaatatgcagcgaccacaaccccattcacaccactacacatcaaagtaaagccaaaacgcgtgggtatttttctggactatgaggccggtaccttaagtttctataatgtgacagatcgatcccacatctatacttttactgatacctttactgaaaaactctggccactcttttaccctggtatcagggcaggcagaaaaaatgccgcacctctgaccatacggcctcctaccgattgggaatag

SEQ ID NO: 245064 - DNA, 1467 bp, synthetic construct
  misc_feature 1..1467: note = Description of Artificial Sequence: Synthetic coding sequence
  source 1..1467: mol_type = other DNA
atggctgaaacctctttactcgaggcaggagcctccgctgcctcaactgcagctgcactggagaacctccaggtggaggcctcgtgttccgtgtgccttgagtacctgaaagaacccgtgatcatcgaatgtgggcacaacttctgcaaggcttgtatcactagatggtgggaggacctggaacgtgacttcccctgcccagtctgtaggaaaacttccagatatagatcactgcgaccaaaccgacagctgggatcaatggttgagatcgcaaaacagctccaggccgtgaagcgcaaaatccgggacgagagtttatgtccacagcaccatgaagctttatctctgttttgctatgaggatcaggaggcagtttgcttaatttgcgcaatcagccatacacacagggcccacactgttgtacccctggacgatgccactcaggagtataaagaaaaactgcaaaaatgtttggagcccctggaacaaaagttgcaggagataacccggtgtaagtcaagtgaggagaagaagccgggagaactcaagcgattagtggagagcagaaggcagcagattcttagggagttcgaagagctgcatagaaggctggatgaagaacagcaggtcctcttatcccgactagaagaagaggagcaagacatcctccagcgtctacgggagaacgctgcacacctgggggacaagcgccgtgacctggcacatctggcagcggaggtggagggcaagtgtttgcaaagcggattcgagatgctgaaggacgtaaagtcaactctcgaaaagtgtgagaaagtaaagacaatggaggtcacctcagtatccatagagctggagaagaacttctcgaacttccccagacagtattttgcactccgcaagattcttaagcagctgatcgcagatgtgaccctcgaccctgaaaccgcccatccgaatctcgttctgtctgaggaccgaaaatctgtcaagtttgtcgaaacgcgtctgcgcgacctgcccgacaccccaaggcgattcactttctacccatgcgtgttagccacagaggggttcacgtctgggcgacactattgggaagttgaggtgggcgacaaaacccactgggctgtgggtgtgtgccgcgattccgtgagcaggaaaggcgaactgacacccctcccagagaccggctactggcgagtgagattgtggaacggcgataaatatgccgcaactactacgccatttacacccctgcatattaaagtgaaaccaaagagggtgggaatttttctggattatgaagctggtacactctcattttacaatgtcacggatagaagccatatttacacctttactgacacttttaccgagaagctctggccacttttctatcccggaatcagggccggaaggaaaaacgcagcaccactaaccatcaggcctcctacggattgggagtag

SEQ ID NO: 245065 - DNA, 1557 bp, synthetic construct
  misc_feature 1..1557: note = Description of Artificial Sequence: Synthetic coding sequence
  source 1..1557: mol_type = other DNA
atggctgaaaccagcctattagaggctggggcatccgcagccagcactgcggctgctcttgaaaacctgcaggttgaggctagttgtagcgtgtgcctagaatacctgaaagaacccgtgataatcgagtgtggtcataacttctgtaaagcctgcattacaaggtggtgggaggacctcgaaagagactttccctgtcctgtgtgtagaaaaacatctcggtacaggagtttgcgccctaataggcagttaggaagcatggttgaaattgctaaacagttgcaggcagtgaagcgcaaaatccgggacgagtcactgtgcccacaacaccatgaagccctctctctgttctgttacgaggatcaagaggcggtctgtctaatatgtgccatcagccatacccatcgcgctcatactgtcgtcccccttgatgatgcaacacaggagtacaaagaaaagctccagaagtgtttggaaccgctggagcagaagcttcaggaaataacaaggtgcaaatctagtgaagagaaaaaaccgggtgaactcaagagactagtcgaaagcaggcggcaacagatcttaagggaatttgaggaattacacagacgtctggatgaagaacagcaggtgctgctctctaggctggaggaagaggaacaggacattcttcagaggctgcgcgagaacgctgcacatcttggggacaaaagacgcgatctagcccatctcgctgcagaggtggaagggaaatgcctgcaatctggcttcgagatgttgaaggacgtgaagtcaaccttggagaaaaacatccccaggaaatttggtggttcactctcaaccatctgccccagggaccacaaggccctgctgggcctggtgaaggagataaaccgttgcgaaaaggtgaaaacaatggaagtgacgtccgtgtctattgagctggagaagaatttctctaactttcctcgccaatatttcgctctgcggaaaattctcaagcagttaatcgctgacgtgacccttgacccagaaacagcccaccctaacctcgttctgtctgaggaccggaaatccgtgaagttcgtggaaaccagactcagggatttacccgacaccccccgacgatttactttctatccctgtgtgctcgccaccgagggatttacgtccggacggcattattgggaagttgaggtgggggataagacacattgggcggtgggggtttgtcgggactctgtgtcccggaagggagagcttactccactgcccgagactggatactggcgagtacgcctttggaacggggacaagtacgcagcaaccactactccgtttacccccctgcacataaaggtgaaacctaaacgggtggggatcttcctggattacgaggcagggaccctgagtttttacaatgtgactgataggtcacatatctacacgtttacggacacattcaccgaaaagctatggcctctcttctacccagggatccgcgcagggcgtaaaaatgcagcccctctgacgatccggcctccaactgactgggagtag

SEQ ID NO: 245066 - DNA, 1467 bp, synthetic construct
  misc_feature 1..1467: note = Description of Artificial Sequence: Synthetic coding sequence
  source 1..1467: mol_type = other DNA
atggcagaaacatcactcctggaagctggggcatccgcagcctccaccgctgctgctctcgaaaatctgcaagtcgaagctagttgctccgtttgtttagaatacctgaaggaaccggttataatcgagtgtgggcataatttttgtaaagcctgcatcactcgttggtgggaggacctcgagagggatttcccttgtcctgtgtgtcgcaagaccagccggtatagatccctgcggccaaacaggcaactggggagtatggtcgagatcgcaaagcagctccaggccgttaaacggaagataagagatgagtctctttgtccacagcaccacgaggccctttccttgttctgttatgaggaccaggaggcagtatgcttgatctgtgcaatctcacacactcacagggcccacacggtcgtccccctcgacgacgccacccaggaatacaaggaaaagctgcagaaatgtctggagccactggagcagaagttgcaggagattacccggtgtaagtcatctgaggaaaaaaagccaggtgaactgaagagactggtggagtctcggcgtcagcagatcctgcgagagtttgaggaactgcaccggcgactggatgaggagcaacaggtcctgttatctaggctggaggaggaagaacaagacatcctgcagaggctgcgcgagaacgccgcacacctgggggacaaacgcagggatttagcccacttggccgcagaggttgaaggcaaatgtttacagtccggttttgaaatgctgaaagatgtcaaaagcacactcgagaaatgtgagaaggtgaaaaccatggaagtaacatccgtatctatcgagctggaaaagaacttcagcaattttcctaggcagtattttgcactgcgcaagattcttaagcaactcatcgccgatgtgacgctggatcccgagacagcacatccaaatttggtgctgagcgaagacagaaagtccgtgaagttcgtagaaaccaggctgagagacctgccagacaccccaaggaggtttaccttctatccctgcgtgcttgcgaccgagggattcacaagtggacggcattattgggaggtcgaggtgggtgacaaaacacattgggcagtgggagtgtgtcgagatagcgtctccaggaaaggggagctgaccccgcttcctgagactggctactggcgtgttaggctgtggaatggcgataagtatgccgctacaactaccccttttactcctctccacataaaggttaagccaaagagggtggggattttcctcgactacgaagccggtaccttgagcttttacaacgttaccgatcgatctcatatttacacattcaccgacacattcacagaaaaactgtggcctttattctatccagggatccgggcaggtaggaagaacgccgctcccttgactattcggcctcccacagactgggagtag

SEQ ID NO: 245067 - DNA, 1557 bp, synthetic construct
  misc_feature 1..1557: note = Description of Artificial Sequence: Synthetic coding sequence
  source 1..1557: mol_type = other DNA
atggccgaaacatctctcctggaagcaggagccagcgcagccagtactgctgctgccctcgagaatctgcaggtcgaagcctcttgtagcgtttgtctggaatacttaaaggaacctgtgattatcgagtgcggtcacaacttttgtaaagcctgtataacccgatggtgggaggacctggagagggacttcccatgcccagtgtgcagaaagacatccaggtataggtctctgagacctaataggcaattgggaagtatggtagagatagccaagcagttgcaggctgtcaagagaaagattcgggatgagtccctatgccctcaacatcacgaggctctgtccctgttctgctatgaagatcaggaggccgtctgtctgatctgtgccatctcacacacacaccgggctcatactgttgttcccttagacgatgccacacaggaatacaaagaaaagctacagaagtgtcttgagcctctggagcaaaagctccaggaaattactaggtgcaagtcctctgaggagaaaaagcccggtgagttaaaaagactggtggaaagcaggcggcaacagatactcagggagttcgaagaactccacaggagactagacgaggaacagcaggtcttgctttcgaggctggaggaggaagagcaggacatactgcagcggctgagagagaacgcagcacacctgggagataaacgcagagatctcgcccatctagctgccgaggtggaaggcaaatgtctgcagtcagggttcgagatgttgaaagatgtaaagtcaactctcgaaaaaaacatacccagaaagtttggcggttccttgagtacgatctgtcccagagaccacaaagctctgctgggacttgtgaaagaaattaaccgatgtgagaaggtgaagacaatggaagtgacttccgtcagcatcgaactcgaaaaaaacttctccaacttccctcggcagtacttcgcactccgcaagattctcaaacaactgattgccgatgtgacactggacccagagaccgctcatcccaacctcgtgctctccgaggaccgcaaatctgtgaagtttgtcgaaaccagacttagagatttacccgatactcctcgtagatttaccttttacccctgcgtcttggctactgagggattcacatcagggcgacactattgggaggtcgaggtgggagacaagacgcactgggcagtgggagtatgcagagatagcgtgagccgtaaaggcgagctaacccctctgcccgagacaggttactggagggtgaggctctggaacggcgataagtacgccgctaccacgacgcccttcacccccctgcatattaaggtgaaaccaaagcgggtcggaatattcttggattatgaggctggtacgctcagtttctacaatgtcaccgatcgctcccatatttacacatttacggacacattcacagaaaaactgtggcctctattttatccagggattcgagccggacgaaagaacgctgcccctctaactatcagaccccctaccgattgggaatag

SEQ ID NO: 245068 - DNA, 1467 bp, synthetic construct
  misc_feature 1..1467: note = Description of Artificial Sequence: Synthetic coding sequence
  source 1..1467: mol_type = other DNA
atggcagagacatcactcctggaagctggcgctagcgccgctagtacagcagccgctctggagaacctgcaggtggaagcctcttgcagcgtgtgtcttgagtatttgaaagagccggtgatcattgagtgcgggcacaacttttgtaaggcttgtatcactcggtggtgggaagatcttgaaagagactttccatgccccgtgtgtaggaaaacaagccgttaccgctcattacgtccgaacagacaattgggatcaatggtcgagattgcaaaacagctgcaagccgtcaagaggaaaattcgcgacgaaagtttgtgcccacagcatcacgaggcgctttccttattctgttacgaagaccaggaggccgtgtgtctcatttgcgccatatctcatacacaccgggcacacactgtggtgccactggatgatgccactcaggaatacaaggaaaagctgcagaagtgcctcgagcccctagaacaaaagctgcaggaaatcacaagatgcaaatcttccgaggagaaaaagccaggcgaactgaaacgactggttgaaagccggaggcagcagatcttaagggaattcgaggagctgcaccggaggctggacgaagagcagcaggttctattgtctcgacttgaagaggaagaacaggacatactccagaggctaagagagaatgcagcccacctgggggataagcggcgagatttagcacacttggctgcagaggtagaggggaagtgcctgcagtccggcttcgagatgctgaaggatgtgaaaagcaccctggagaagtgtgagaaagttaagactatggaggttactagcgtgagcatcgaactggaaaaaaatttctcaaacttcccaagacagtactttgctctgaggaagatcttaaagcagctgatcgcggacgtgacactcgatccagagaccgcccacccaaatctggttctgtcagaagatcgaaaatctgttaagttcgttgaaactcgcctgcgcgatttgccagacacccccaggcggttcaccttctacccatgcgtgctcgcaacagagggtttcacatcaggtaggcactactgggaagtggaggtaggggacaagacacactgggcagttggtgtgtgtagagattcagtcagtcgaaagggagaattgactccactgcctgaaaccggctattggcgcgtgcggctctggaatggagataagtacgcagctacaactactccgtttacaccactgcatatcaaggtgaagcccaagagggtaggcatctttctggactacgaggctggtactctgtctttctataatgtcaccgatagatcacatatctataccttcaccgatacctttacagaaaagctgtggccacttttctatccgggaatccgcgctggacgaaagaacgccgctccactaactatccgccctccaaccgattgggaatag

SEQ ID NO: 245069 - DNA, 1467 bp, synthetic construct
  misc_feature 1..1467: note = Description of Artificial Sequence: Synthetic coding sequence
  source 1..1467: mol_type = other DNA
atggcagaaacctctcttttagaggccggtgcctccgcagccagcactgctgcagcccttgaaaacctccaggtggaggcttcttgctcagtctgcttggagtaccttaaagagccggtaatcattgaatgcggtcataatttctgcaaggcctgtattacccgttggtgggaagatttggagagggatttcccgtgccctgtgtgcagaaaaacatcacgatatcggagcctgcgcccaaaccggcagttaggatcgatggtggagatcgctaaacagctacaggctgtgaagagaaagattcgagatgagtctctgtgtccgcagcatcatgaggccctcagtcttttctgctacgaggaccaggaggccgtgtgtctgatctgcgctattagccatacccaccgcgctcacactgtggtacccctggacgatgctacccaggaatacaaggaaaagttgcagaagtgcctcgagccactcgagcagaaactgcaagagatcacccgctgcaaaagctctgaggagaagaaaccaggtgagcttaagagactcgtcgaatctagaagacagcagatccttcgcgaatttgaagagctgcacaggaggctcgatgaggagcaacaggtgttactgtctcgccttgaggaagaggaacaggatattttgcagcgcctgagggagaacgccgcacatctaggcgataaacgcagagacttggctcatttggctgcagaggtcgaaggcaagtgtctgcagtccggattcgagatgctgaaggatgtaaaatcaacacttgaaaagtgtgagaaggtgaagactatggaagtgacatccgtcagcatagagctcgagaagaacttctcaaattttccaaggcagtattttgcactgaggaagatcctcaagcagcttattgccgacgtgaccctagatccagaaaccgctcatcctaatctggtgctctccgaagacagaaaatcagtaaaattcgtagaaacaagactccgggatttgcctgacaccccccgaagattcacattctatccctgcgtgctggcaacagaagggtttacatcagggcgacattattgggaagtagaggtgggcgacaagacgcattgggccgtcggggtgtgtcgtgactctgttagtcgcaagggagagctgacgcctctccctgaaaccggctactggagagtaagactctggaatggcgacaagtatgccgctactacaactccctttactcctctgcatatcaaggtcaagcctaagcgagtaggtatctttcttgactatgaagcagggaccctgtctttttataacgtcactgaccgcagtcatatttacacgtttacagatactttcacagagaaactctggccgctgttttatccaggcattagagcgggacggaaaaacgccgcacccctgacaattcggcctcctactgattgggaatag

SEQ ID NO: 245070 - DNA, 1467 bp, synthetic construct
  misc_feature 1..1467: note = Description of Artificial Sequence: Synthetic coding sequence
  source 1..1467: mol_type = other DNA
atggcagagacttcccttctggaggctggagcatctgcagccagtacagccgcagccctggagaacctgcaggtcgaggcatcctgttccgtgtgtctggagtacctgaaggagcccgtcatcatcgaatgcgggcataacttctgcaaggcatgcatcactcggtggtgggaggacctagagcgggactttccgtgccctgtgtgcagaaaaacttcccgttatcgcagtttgcggccaaaccgtcagctcggttcaatggtagaaatagccaagcaattgcaggccgtcaaaaggaaaataagggacgagtcactgtgcccacagcaccatgaggccctgagcctgttttgctatgaagatcaggaggccgtgtgtctcatatgcgccatttctcacactcaccgagcccacacagttgtccctttagacgacgccacacaggagtataaggagaaactgcagaagtgtctcgaaccccttgagcagaaacttcaggagatcaccaggtgtaagtccagcgaggagaagaagccgggtgagcttaaacgcctggtggagagccggagacagcagattttaagagagttcgaggagttgcaccggaggctggatgaggaacagcaagtgctgctttctcggttagaggaagaagaacaggatatcttacagcgactgcgcgaaaacgccgctcaccttggtgacaagagacgagatctggcccacctcgctgctgaggtggaaggtaagtgtcttcagtctggctttgagatgcttaaagacgtgaaaagcactctggagaagtgtgagaaagtcaagacaatggaagtgactagcgtgtccattgaactagaaaaaaacttcagtaattttcccagacagtactttgcattgaggaagattttgaaacagcttatcgccgatgtcaccctagatccagaaaccgcgcatccgaacctggtcctgtcagaagatcggaagtcagtgaaattcgtggagactagactcagagatctgcccgacacgccacgtagattcaccttttacccatgtgtgcttgcaaccgagggtttcacgtctggtcgccactattgggaggtggaagtgggagacaagacccactgggccgtgggagtctgcagagacagcgtgtccagaaaaggggaactgactcctctgccagagacagggtactggcgcgtgcgactgtggaacggggacaagtacgccgcaactacaacacccttcacacccctgcacatcaaggtgaaaccgaagcgcgttggtatcttcctcgattatgaagccggaacgctgtctttctacaatgtgacagataggagtcatatatatacttttaccgataccttcaccgaaaaactatggcctcttttttaccctggcattcgtgccggacgaaagaacgcagcacccctgacaattaggcctccaactgactgggaatag

SEQ ID NO: 245071 - DNA, 435 bp, synthetic construct
  misc_feature 1..435: note = Description of Artificial Sequence: Synthetic coding sequence
  source 1..435: mol_type = other DNA
atggccgaaacatcactgctcgaggcaggtgcctccgcagcttccaccgcagctgctttagaaaacttgcaagtggaggcgtcatgttccgtgtgtttggaatatctgaaggagcccgtgataattgagtgcggccataatttctgcaaagcgtgtataaccagatggtgggaagacctggagcgcgattttccatgtcccgtctgcaggaaaacatcgcggtatcggtcacttcgaccaaatcggcagctcggaagtatggtcgaaattgccaagcagctccaggctgtgaagaggaagatccgcgatgagtctctgtgcccgcagcatcatgaggcactcagcctcttctgctatgaggaccaagaagccgtttgtcttatctgcgccattagccacacccacagggctcacactgtggttcctttagactag

SEQ ID NO: 245072 - DNA, 684 bp, synthetic construct
  misc_feature 1..684: note = Description of Artificial Sequence: Synthetic coding sequence
  source 1..684: mol_type = other DNA
taaacgtctcgttatagatctctaaggcctaaccgccagttgggtagcatggtagagatcgcaaaacaactacaggccgtcaaaaggaaaatccgggatgaatctctttgtccccaacatcatgaagctctttcactgttttgctacgaggaccaggaggccgtgtgcctgatctgtgcaatatcccacactcacagggcacatactgtcgtgccgctcgacgacgccacacaggaatataaggaaaaactccagaaatgtctcgagcctctcgaacagaaacttcaggagataacacgctgtaaaagctcagaggaaaagaagcctggggaactaaagcgtctggtggagtcccgtcgccaacagattctcagggaatttgaggagctgcataggcgcttagatgaagagcagcaggtgctgctgtctcggctggaggaagaagagcaggacatcttgcagaggctaagggaaaacgcagcacacctgggcgacaaaagaagggatctcgcacatttagcagctgaggttgaaggtaagtgcttgcagagtggcttcgagatgctgaaggatgttaagagcacactcgaaaaatgtgagaaggtgaaaaccatggaggtcacatctacaaccccctgtactagtcttcactccgagattaatgacaacgtgcggggtcgctag

SEQ ID NO: 245073 - DNA, 225 bp, synthetic construct
  misc_feature 1..225: note = Description of Artificial Sequence: Synthetic coding sequence
  source 1..225: mol_type = other DNA
atggctgaaacctcactgctggaggctggagcatccgcagccagtaccgcggctgccctcgaaaatctgcaggttgaagcctcatgcagtgtatgcctggagtacctgaaggaacctgtgatcattgagtgcggccacaacttctgcaaagcatgtataactcggtggtgggaagatctggagagggacttcccctgtccagtgtgcagaaaaacttctcgatag

SEQ ID NO: 245074 - DNA, 1254 bp, synthetic construct
  misc_feature 1..1254: note = Description of Artificial Sequence: Synthetic coding sequence
  source 1..1254: mol_type = other DNA
atggtcgaaattgcaaaacagctgcaagccgtgaagcggaaaatcagggatgaatctctatgcccacagcatcacgaagctctgagcctgttctgttatgaagaccaggaggccgtgtgcctgatttgtgccatcagccacacccaccgcgcacataccgtggtgcctttggatgacgccacacaggagtataaagaaaagctgcaaaaatgcctcgagcccctcgagcagaaattgcaggagatcacccggtgcaaatccagtgaggagaagaagcctggtgagcttaagaggttggtggaaagccgccgtcaacagatattacgagagttcgaagagctccaccggagactggacgaagaacaacaggtcctgctcagccgacttgaagaggaggaacaggatattctgcaaagactgagggagaatgccgcacacctgggggacaagcggagggacttagcacacctggccgctgaggtggagggtaagtgtctccagtcaggttttgagatgctcaaaccagtgttgtctgctcgcgaggagtgcgagaaggtgaagacaatggaggtgacgtcggtgtccatagagcttgaaaagaacttctcaaatttccctagacagtactttgctttgcggaaaatcctcaagcagttgattgccgacgttaccctcgaccctgagaccgcccatcccaatctagtgctcagtgaagaccggaaaagcgttaaattcgtggagaccagactgcgggacctccctgatacgccaagacggtttaccttctatccatgcgttctggctacagaggggtttacaagtggtcgtcactattgggaagtggaggcggcacactgcgtactggcccaagaccctgaaaaccaagctctcgctagattctactgttatacggagcgaaccattgccaaacgcctcgtgctgcgcagagacccctctgtcaaacggaccctttgtcgcggttgttccagccttttggtgcccggactgacttgtactcaacggcaaaggcgctgtcgcggacaaagatggactgtccaaacgtgtctaacctgtcaacgtagtcagaggtttttaaacgatcctgggcacctgctgtggggagaccgacccgaagcacagctcgggagccaggccgacagcaaacctttacagcccctgcctaatacagcgcactctatttccgatcggcttcccgaggagaaaatgcaaacacagggttcaagtaaccaatag

SEQ ID NO: 245075 - DNA, 1557 bp, synthetic construct
  misc_feature 1..1557: note = Description of Artificial Sequence: Synthetic coding sequence
  source 1..1557: mol_type = other DNA
atggcagaaacatccctgttggaggccggtgcctccgctgctagtacagcggcagccctggaaaatctgcaagtggaagcatcctgcagtgtctgtctagagtatctcaaggagcccgtaatcatcgagtgtggacacaacttctgcaaggcatgtatcacaagatggtgggaagatctagagcgcgactttccctgtccagtgtgccgcaagaccagtcggtaccgtagccttcgtcccaatcggcagctggggtctatggtcgagatcgccaagcagctccaggctgttaagaggaagattagagatgaaagcctgtgccctcagcatcacgaagccttaagtcttttctgttacgaagaccaggaggctgtttgcttgatttgtgccatctcccacactcaccgcgctcataccgtagtgccactggacgacgccacgcaggaatacaaggagaaattacagaagtgtttggaaccactcgaacagaagttgcaagaaattacccgttgcaagagctccgaagagaagaaacccggagagcttaaacgtctcgtggagagcaggcgccaacagattcttcgggaattcgaggaactccaccgccgtctcgacgaagagcagcaggtgcttttgtcgagactggaagaggaggaacaggacattctccagcgactgagagagaatgcagctcacctgggagacaaaaggagagatctagctcatttggcagccgaagtcgagggcaaatgcctgcaatcaggttttgaaatgctcaaagacgtaaagagtaccctcgaaaaaaatataccaaggaagttcggaggctccctaagcaccatctgcccacgtgaccataaagccctgctcggccttgtgaaagaaatcaacaggtgcgagaaagtcaagaccatggaggttacgagtgttagtatagagctcgagaagaatttctccaatttcccacgccagtacttcgctttgcgcaagattctcaagcaacttatcgctgatgttacgctcgaccccgagaccgcgcaccccaatttggttctgtccgaggacaggaagagcgtgaagttcgtggaaactcgcctacgggatctgcctgacacacctcggaggtttactttttacccatgtgtcttggcaacagagggatttacatccggacggcattattgggaagtggaggtaggggataagacacactgggccgttggtgtgtgtagagacagcgtatctcgcaagggcgaacttacccctttgcctgagacaggatactggagggtgcgcctttggaacggagacaaatacgcagccacaaccacacccttcacaccactgcacatcaaggtaaaacctaagcgggtggggattttcctggactacgaagcgggtaccctgtctttctacaacgtgaccgatagatcccatatttataccttcacagacaccttcactgagaaactatggcccctcttctatcccggaatcagggcgggaagaaagaacgccgcacccctaaccatacgaccacccactgactgggaatag

SEQ ID NO: 245076 - DNA, 1467 bp, synthetic construct
  misc_feature 1..1467: note = Description of Artificial Sequence: Synthetic coding sequence
  source 1..1467: mol_type = other DNA
atggcagagacctctctgttagaggcaggggctagcgccgcaagcacagccgctgccctggaaaacctgcaagtcgaggctagttgcagcgtgtgcttagaatatttgaaggagcccgtgatcatcgaatgtggtcacaatttctgcaaggcctgtataacacgttggtgggaggatcttgagagagatttcccatgtcccgtctgccgtaagacctccagatacagaagtttaaggcccaatagacagctggggagcatggtggagatagcaaaacagctgcaggcagttaagaggaagatccgggatgaaagcttgtgtccgcagcaccacgaggctctgtcactgttttgttacgaggaccaggaggcagtatgcctcatatgcgccatttcccatacccatagagctcatacagtggtcccactggacgatgccacccaggaatataaagagaagcttcagaagtgtctggaacccctggaacagaagttgcaggaaattactagatgcaagtccagcgaggaaaaaaaaccaggagagcttaagagactggtggagagccggagacagcagatcctacgggaatttgaagaactccatcgcagactagatgaggaacagcaggtgctcctcagccggttggaagaggaagaacaggacatcttacaaagactccgggagaacgccgctcacctgggggataagagacgagatctcgctcacttggccgctgaggttgaaggaaagtgtttgcagtccgggttcgaaatgctcaaagatgtgaagtccactctggaaaaatgcgaaaaggttaaaactatggaggtgacctctgtgagcatcgaattggaaaaaaatttcagcaacttccctaggcagtacttcgccctgcgcaaaatcctgaagcagctcattgctgacgttactttagatcccgagaccgcacatccaaacctcgtgttgtcggaagacaggaaaagcgtgaagtttgttgagactagactaagggatctgcccgacacacctcgtcgtttcacgttttatccttgtgttttggcgacggaaggcttcacaagtggaaggcactactgggaagttgaagttggggacaagacgcactgggccgtcggcgtctgccgggacagcgtctccaggaagggcgagttgacccctctgcccgagaccgggtattggcgcgtacgcctgtggaacggagataaatacgctgccaccacaaccccattcacaccactgcacataaaggtgaagccaaagcgagtgggtatatttttagattatgaggccggaaccttgtctttctataacgtgaccgacagatcccacatttataccttcactgatacgtttaccgagaaactgtggccgctgttttaccccggaatacgtgctggacggaaaaacgcggctccgttgacaataagacctccgaccgattgggagtag

SEQ ID NO: 245077 - DNA, 435 bp, synthetic construct
  misc_feature 1..435: note = Description of Artificial Sequence: Synthetic coding sequence
  source 1..435: mol_type = other DNA
atggctgagacctccttgttggaagcgggagctagtgctgcctctaccgctgctgccctcgaaaacctgcaggtcgaggcatcatgtagtgtctgcttggaatacttaaaagaacctgtcatcattgaatgtggacacaatttctgtaaggcttgtattactcggtggtgggaagatctggagagagatttcccatgccccgtttgtcggaaaacaagtaggtaccgcagtctcagaccaaaccgtcaattgggctcaatggtggaaatagctaaacagctgcaggctgttaagcgcaagatacgagatgagtccttatgcccacaacatcatgaagccttatccctgttttgctacgaagaccaggaagctgtctgtctgatctgcgccatcagccacacccatagagcacacaccgtggttccgcttgactag

SEQ ID NO: 245078 - DNA, 225 bp, synthetic construct
  misc_feature 1..225: note = Description of Artificial Sequence: Synthetic coding sequence
  source 1..225: mol_type = other DNA
atggcggaaacctctctgcttgaagcaggagctagcgccgcttctacggcagctgcactcgaaaatttgcaagtagaagcaagttgcagcgtgtgtctggaatatttgaaggagcctgtgatcattgagtgtggtcataatttttgcaaagcatgcatcactagatggtgggaggatctggagcgggatttcccttgtcctgtttgccgcaagacgtcacggtag

SEQ ID NO: 245079 - DNA, 147 bp, synthetic construct
  misc_feature 1..147: note = Description of Artificial Sequence: Synthetic coding sequence
  source 1..147: mol_type = other DNA
atggccgaaacttcactgttagaggccggtgcttctgcggcttccaccgccgcagcactggaaaatctgcaggtggaggcatcttgtagcgtttgcctagaatacctgaaagagccagtgatcatcgagtgtggccacaatttttag

SEQ ID NO: 245080 - DNA, 1467 bp, synthetic construct
  misc_feature 1..1467: note = Description of Artificial Sequence: Synthetic coding sequence
  source 1..1467: mol_type = other DNA
atggctgagaccagcttacttgaggcaggggctagcgcagcttccaccgcagccgctctggagaatctgcaagttgaggcttcctgctccgtgtgccttgagtacttaaaggaacccgtgattattgaatgtggccacaatttctgcaaagcctgtattacccggtggtgggaggacttagagcgcgacttcccttgtcctgtctgccgaaagacgtcccgctaccgaagcctcaggcctaatcggcagctgggctccatggtggagatcgccaagcagctgcaggccgtgaagcgcaaaatccgagacgaatccctttgtccacagcatcacgaagccctgagtcttttctgctatgaggaccaggaggccgtgtgcctgatctgcgccatatcgcacacacaccgcgcacataccgtggtgcccctggacgatgcaacccaggagtataaagaaaagctacagaaatgcctcgaacctttagaacagaagctccaggaaatcaccagatgcaagtccagcgaggaaaagaagccaggagagctgaaaagactggtggagtcccgcagacagcaaatcctccgggaattcgaggaattgcatagacggcttgatgaggaacagcaggtgctcttatccaggttggaggaggaagaacaggacattttacagcggctgcgtgagaacgctgcccatctgggcgacaaacggagggacctggctcacctggcagcagaggtggaaggcaaatgcctccaaagtggattcgagatgttgaaagatgtgaaatccactctggagaagtgcgagaaagtgaagactatggaggtaacatccgtctcaattgagcttgaaaagaacttctctaattttccgagacaatactttgctcttcgcaagattttgaaacaactaatcgctgatgtgacgctcgatcctgaaacagcacatcccaacctcgttctaagcgaggatcgcaagtcggtgaagttcgttgagactcgtctaagagacctacccgatacaccccgtagatttaccttttatccatgtgtgctggccaccgaagggttcacatccggaagacactattgggaagttgaggtaggcgataaaacacactgggccgtgggggtgtgtcgtgattccgtttccagaaaaggcgagctgactccacttccagaaactgggtattggcgggttcgcctgtggaacggagacaaatatgccgcaactactactccattcacccctctgcatatcaaagtgaagcctaaaagagtcgggatcttcctggactatgaggccggtaccctcagcttctacaacgtgacagacaggtcacatatttataccttcacggatactttcacggagaagctgtggcccttgttctacccaggaataagggcaggtagaaagaacgctgcaccattgaccatcaggcccccaaccgattgggagtag

SEQ ID NO: 245081 - DNA, 684 bp, synthetic construct
  misc_feature 1..684: note = Description of Artificial Sequence: Synthetic coding sequence
  source 1..684: mol_type = other DNA
taaactagccgttacagatccttaaggcccaaccgacagctgggcagcatggttgaaattgcgaagcagttgcaggcagtcaagagaaagataagggatgagtcattgtgcccacagcaccatgaggcgttatcacttttctgctacgaggatcaagaggccgtgtgcctgatttgcgccatctcacacacacacagggcacatacggtcgtcccactggacgacgccactcaggagtataaggaaaaattgcagaagtgcctggagcccctcgagcagaagctccaggaaatcacccgctgcaagagcagcgaggaaaagaagcctggagagttaaagcgcttggtggagagccggaggcaacagatcctcagggagttcgaagagctccacagacggcttgacgaggagcagcaagtcctgctcagtcggttagaggaggaagagcaggacattctgcaacgcctgcgggagaacgccgcacatctcggggacaagcgtcgagacttggcacatctcgccgctgaggtggaaggcaaatgcctgcaatctgggttcgagatgttaaaagacgtgaaatccaccttggagaagtgtgagaaggtgaagactatggaggtgacttcgaccacgccttgcacatctcttcattcagagattaacgataacgttcgcggaagatag

SEQ ID NO: 245082 - DNA, 147 bp, synthetic construct
  misc_feature 1..147: note = Description of Artificial Sequence: Synthetic coding sequence
  source 1..147: mol_type = other DNA
atggccgagacatcactgctggaagccggtgcatctgccgctagcaccgcggctgctctggagaatttgcaggtggaggccagctgcagcgtgtgcctggagtacctaaaggagcctgtaatcattgagtgcggccacaatttttag

SEQ ID NO: 245083 - DNA, 147 bp, synthetic construct
  misc_feature 1..147: note = Description of Artificial Sequence: Synthetic coding sequence
  source 1..147: mol_type = other DNA
atggccgagacgagcctcctggaagctggcgcatctgctgcaagtacggccgctgcgcttgagaacctccaggtggaggcctcatgctctgtgtgcttggaatatctgaaagaaccggtcataatcgaatgcgggcataatttttag

SEQ ID NO: 245084 - DNA, 180 bp, synthetic construct
  misc_feature 1..180: note = Description of Artificial Sequence: Synthetic coding sequence
  source 1..180: mol_type = other DNA
atggccgaaacttcgctacttgaagctggcgcaagcgccgcatctacagccgctgctctggagaacctgcaggtggaggctagctgtagcgtatgtctggagtacctgaaggaacccgttatcatcgaatgtgggcacaatttttgcaaagcatgcattaccagatggtgggaagattag

SEQ ID NO: 245085 - DNA, 180 bp, synthetic construct
  misc_feature 1..180: note = Description of Artificial Sequence: Synthetic coding sequence
  source 1..180: mol_type = other DNA
atggccgaaacctctcttctagaggcgggagcctcagctgcctccactgctgcagccctggagaacctgcaggtggaagcaagctgctctgtgtgcctagagtacctcaaggagccagtgattatcgaatgtggtcacaacttctgcaaggcatgtatcacgaggtggtgggaagattag

SEQ ID NO: 245086 - DNA, 435 bp, synthetic construct
  misc_feature 1..435: note = Description of Artificial Sequence: Synthetic coding sequence
  source 1..435: mol_type = other DNA
atggctgaaacctcccttctcgaggccggagcatcggcagcctcaactgctgccgctctggaaaatttgcaagtggaagcgtcctgtagtgtgtgcctggaatatctgaaagaaccagtgatcatcgagtgcggccataacttctgtaaagcttgtattaccaggtggtgggaggacctggaaagggacttcccctgccctgtgtgccggaaaacatcaaggtaccgctctctccgtccaaataggcaactaggctccatggtagagatcgcaaagcaattgcaagctgttaagcgtaagattagagacgaatcgttgtgtccccaacatcacgaggccctctcgttgttctgctacgaagaccaggaagccgtgtgcctgatatgcgcgatctcacacacgcacagggctcacacagtggtaccgctggactag

SEQ ID NO: 245087 - DNA, 1557 bp, synthetic construct
  misc_feature 1..1557: note = Description of Artificial Sequence: Synthetic coding sequence
  source 1..1557: mol_type = other DNA
atggccgaaacatccctgttggaagcaggggctagcgctgcctccacggccgctgcactggaaaaccttcaagtggaagcaagttgctctgtgtgcttggagtacctgaaggagcctgttattatcgagtgtggccacaatttctgcaaggcctgcatcactcggtggtgggaggacttggagagagactttccgtgtccagtgtgcaggaagaccagtcgttaccgctcactgaggccaaatcgtcagctcggctcgatggtggagatcgctaagcaactgcaagccgttaagagaaaaattagagacgagagcctgtgccctcagcatcacgaagccttgtcactgttctgctacgaggaccaggaggccgtctgcctgatttgcgctatcagccatactcatcgcgcacacaccgtggtccctctggatgatgccactcaggagtacaaagaaaagttacagaagtgcttagagcctcttgagcagaagctgcaagagatcacaagatgtaagagcagcgaggagaagaagccaggcgagttaaagagactggtggagtcaaggcgccagcagatactccgggagttcgaagagcttcaccggagactggatgaggagcaacaggtgctattgagccggctggaagaagaggaacaggacatcctgcagcgtttgcgcgaaaatgccgctcacctgggtgacaagagacgggaccttgcccacctcgctgcggaggtggaagggaagtgcctgcagagtggcttcgaaatgctcaaagatgtcaagagcacattggagaagaatatccccagaaagttcggaggatcactgtctacaatttgccccagagaccacaaagctctgctaggtctggtgaaagaaattaaccggtgtgagaaggttaagactatggaggtgacatccgtttctatcgagctggagaagaacttcagcaattttccaaggcagtactttgcattgcggaaaattcttaaacaactcatcgcggacgttaccctcgaccccgaaacggctcatcccaaccttgtgcttagtgaggatcgaaagtccgtgaagttcgtggaaaccagattgagggacctgccagatacgccgaggagattcactttttacccttgtgttctggcaaccgaaggtttcacatccggaaggcattattgggaggtagaggtgggagataaaacacactgggccgtcggggtgtgccgggatagtgtgagtcggaaaggcgagctgacccccctccctgagacgggctattggcgcgtgcgattatggaatggagacaagtatgcagctaccacaacaccattcacgcccctccacattaaagtgaagccaaaaagggtcgggatctttctggactacgaagctgggaccctgtctttctacaacgttaccgatcgaagccatatatatacctttaccgatacatttactgaaaagttatggccactcttttatccaggaatccgcgcaggacgcaaaaacgccgctccgcttaccattcggcctcctaccgattgggaatag

SEQ ID NO: 245088 - DNA, 684 bp, synthetic construct
  misc_feature 1..684: note = Description of Artificial Sequence: Synthetic coding sequence
  source 1..684: mol_type = other DNA
tgaaccagcaggtataggtcgctgaggcccaacagacagctcggaagcatggtggagatcgcaaagcagctacaggccgtcaagcggaaaattcgcgacgagtccctctgcccccagcaccacgaagctctgagccttttctgttacgaggatcaagaagccgtttgcttgatttgcgctataagccacacccatagagcccacactgtggtcccactggacgatgctacccaagagtacaaagagaagctgcagaaatgcctcgagcctctcgaacagaagctgcaggagatcaccagatgtaagagctcagaggagaaaaagcctggcgagttgaagcgcctggtggaatcacgtcggcaacagattctccgcgaattcgaagagctccacagaagactggacgaggagcaacaagttctcttgagccgccttgaggaggaagagcaggacatactgcaaagacttagagagaacgcagcacacttaggcgacaaaaggcgggatctggctcatctagctgcagaggtcgaggggaagtgcctgcagtccggatttgagatgcttaaggacgtgaaatctaccctcgagaaatgcgaaaaggtgaagacaatggaagtgacctcaaccactccctgtacaagcctccactctgagattaacgataacgtgcgtggacgctag

SEQ ID NO: 245089 - DNA, 684 bp, synthetic construct
  misc_feature 1..684: note = Description of Artificial Sequence: Synthetic coding sequence
  source 1..684: mol_type = other DNA
tgaacatcacgctacaggtccctgagaccaaaccgacagctgggatctatggtagaaatagccaagcagctgcaggctgtgaaaagaaagattagggacgaatcgctgtgcccacagcaccacgaggccctgagcctgttctgttacgaggaccaggaggcagtgtgtcttatctgtgcaatctcacatacccacagagcgcatacagttgttccattagacgacgccacgcaggagtacaaagaaaagctgcagaagtgcctcgagcccttggaacaaaagctgcaggaaatcacgcggtgtaaatcctctgaagaaaaaaagcctggcgaactgaagagattagtggagagtcgtaggcagcagatcctgagagagtttgaggagttgcacaggagacttgacgaggaacagcaagtactgctcagcagactggaggaagaggaacaggacattctccagcggttgcgcgaaaacgccgcacatttaggcgataaacggagagatctggctcacttggctgccgaggttgagggtaaatgccttcagtctggcttcgaaatgcttaaggacgtgaagtctacacttgagaaatgtgagaaggtcaagactatggaggtgaccagcaccaccccatgtacatcgctgcattcagaaataaatgacaatgtgcgcggtcgatag

SEQ ID NO: 245090 - DNA, 147 bp, synthetic construct
  misc_feature 1..147: note = Description of Artificial Sequence: Synthetic coding sequence
  source 1..147: mol_type = other DNA
atggctgagacctctttgttggaggcaggcgcaagtgctgcctcaacagccgctgccctcgaaaatcttcaggttgaggctagttgtagcgtgtgtctggagtatctgaaagaaccagtaatcatcgaatgtggccacaacttctag

SEQ ID NO: 245091 - DNA, 1557 bp, synthetic construct
  misc_feature 1..1557: note = Description of Artificial Sequence: Synthetic coding sequence
  source 1..1557: mol_type = other DNA
atggctgagacatccctgttggaagctggcgcttccgcggcatcgactgccgcagctctcgaaaatctgcaggtagaagcaagttgttctgtctgtttagagtatctaaaggaacctgtcattatcgagtgtgggcataatttttgcaaggcttgtatcacccgctggtgggaggatctagagcgagatttcccttgtcctgtgtgcagaaaaacttctcgctaccgctccctacggcctaatcgtcagttagggtccatggtggaaatcgccaaacagctccaggcagtgaagagaaaaatccgggacgaaagtctttgtccacagcaccatgaggccttgtctctgttctgctacgaggaccaagaagccgtctgcctgatttgcgctataagccacacccacagggctcatacagtggtgccactcgatgacgccacccaggagtacaaggagaaacttcagaagtgcctggaacctctcgaacaaaagctccaggagattacaaggtgtaaatccagtgaagagaagaagcccggtgaacttaagcgactggtggagtcacggaggcaacagatactccgcgagttcgaggaactgcaccgcaggctggatgaggaacagcaagtccttttatcaagacttgaggaggaggagcaggacattttgcagcgccttagagaaaacgccgcacatctcggagacaagcggcgagatctcgcccacctggcggctgaggtggaaggaaagtgtttgcagagcggttttgagatgcttaaggatgtgaaaagtacccttgagaaaaatatcccgagaaaattcggcggaagcctgagcacaatctgccctcgcgaccataaagcattgctgggactggttaaagagattaacagatgcgagaaggttaaaacgatggaggtgacttctgttagtattgaactagagaagaatttctccaactttcctcgccagtactttgctttgaggaagattctcaagcagttgatcgccgacgtgaccctggaccctgagaccgcccaccctaacttagtgcttagcgaagatagaaagtccgttaagttcgtggaaactaggctgcgggatctccccgatacaccaaggcggttcaccttttacccttgcgtgctggcaacagaaggatttacaagcggcaggcactattgggaggtggaagtgggagacaagactcattgggctgttggagtttgcagagattccgtgtcaagaaaaggcgagctcaccccactgcccgaaacaggttactggcgtgtaagactctggaatggtgacaagtacgcagccactactacacctttcacaccattgcacatcaaagtcaaacccaagcgggtgggaattttcttagactatgaagctgggactctctccttctacaatgtaacagataggtcacacatctatacattcacagacaccttcacagagaaactgtggcctctgttttacccaggcatccgcgctggaagaaaaaacgctgcgccactcacaattcggcctcctacggattgggaatag

SEQ ID NO: 245092 - DNA, 225 bp, synthetic construct
  misc_feature 1..225: note = Description of Artificial Sequence: Synthetic coding sequence
  source 1..225: mol_type = other DNA
atggcagaaacctctctcctcgaggcaggcgcaagcgccgctagcaccgctgcagcgctggaaaacctgcaagtcgaggcctcttgcagcgtgtgcctcgaatacctaaaagagcccgtgataatcgaatgtggtcacaacttctgcaaagcttgcattaccaggtggtgggaagacctggagcgagactttccttgtcccgtctgcaggaaaacgagccgctag

SEQ ID NO: 245093 - DNA, 180 bp, synthetic construct
  misc_feature 1..180: note = Description of Artificial Sequence: Synthetic coding sequence
  source 1..180: mol_type = other DNA
atggcagagacaagcctgttagaggctggagcctccgccgcatcgacagcagcggctttagaaaacttgcaggtggaggccagctgttcagtctgtcttgaatatctgaaggaacccgtgatcatagagtgcgggcataacttttgcaaagcatgtatcactcgatggtgggaagactag

SEQ ID NO: 245094 - DNA, 147 bp, synthetic construct
  misc_feature 1..147: note = Description of Artificial Sequence: Synthetic coding sequence
  source 1..147: mol_type = other DNA
atggccgaaacttctctgctcgaggccggagcctcggctgctagcaccgcagccgctctggagaacctacaggtggaagcatcttgcagcgtttgcttagagtacctgaaagaacctgtgattattgagtgcggccacaacttctag

SEQ ID NO: 245095 - DNA, 786 bp, synthetic construct
  misc_feature 1..786: note = Description of Artificial Sequence: Synthetic coding sequence
  source 1..786: mol_type = other DNA
atggccgagacatcacttttggaagctggcgcatctgcagcctcaactgcagctgcactcgagaatctgcaggtggaagccagctgtagtgtttgcctggaatatctgaaagagccggttatcatcgagtgtggacacaatttctgcaaggcctgcataactcgctggtgggaagacctggagcgggacttcccttgtcctgtgtgccggaagacatcaaggtataggtctctgcgccctaatcgccagttaggatccatggtggaaattgccaagcagctccaggccgtgaagcgaaagatcagggacgagtctctgtgtccccagcatcacgaagcgctgagtctgttctgctacgaggaccaggaggctgtctgtctgatttgcgcgatctcccatacacacagggcccatactgtcgtccccctcgatgacgccacccaggagtacaaggaaaaactgcaaaagtgtctggaaccactggagcaaaaactccaagaaatcacaaggtgtaaatcctcagaggaaaagaaaccgggagagttgaagcgtttggtggagtccaggcgacagcagattcttcgcgaatttgaggagctccacaggcggctggacgaagaacagcaagtgctcctttcgagactggaggaagaggagcaggatattctgcagaggcttagagagaatgcagcgcacttgggagacaagagaagggacctggcacacctcgctgcagaagtcgagggaaagtgtcttcagagcggctttgagatgttgaaggtatag

SEQ ID NO: 245096 - DNA, 180 bp, synthetic construct
  misc_feature 1..180: note = Description of Artificial Sequence: Synthetic coding sequence
  source 1..180: mol_type = other DNA
atggctgagacttccctgttagaggctggcgcatctgccgcaagcactgccgctgcactcgaaaacctgcaggttgaggcgagctgctctgtgtgccttgaatatctaaaggaacctgtgattatagagtgtggtcacaacttctgcaaggcatgtattacgagatggtgggaagactag

SEQ ID NO: 245097 - DNA, 435 bp, synthetic construct
  misc_feature 1..435: note = Description of Artificial Sequence: Synthetic coding sequence
  source 1..435: mol_type = other DNA
atggctgagactagcctgctggaggcgggagcatcggctgctagcactgccgcagcattagaaaacctacaagttgaggcatcctgctcggtgtgtcttgaatatctcaaagagccggtcataatcgaatgtggccacaacttctgtaaagcatgtatcacgcgttggtgggaagatctggagcgcgactttccatgccccgtttgtcggaagacaagccgctatcgaagtctcagacctaatcgacagttaggatctatggtggagattgccaagcaactgcaagcagtgaaaaggaaaatcagagacgagtcactgtgcccacaacaccacgaagcgctgagcttattttgttacgaggatcaggaagcggtatgtcttatttgtgccatttcacacacgcatagagcccacacagtggtgcccctcgattag

SEQ ID NO: 245098 - DNA, 1467 bp, synthetic construct
  misc_feature 1..1467: note = Description of Artificial Sequence: Synthetic coding sequence
  source 1..1467: mol_type = other DNA
atggctgagacttcactactggaagctggagcctcagccgcttctacagctgccgctttagaaaatttgcaggttgaagcgtcctgtagtgtttgtctagagtatttaaaggagcccgtcatcatagagtgtggtcataatttttgtaaggcctgcattacccggtggtgggaggatctggaacgggactttccatgtccagtgtgcaggaaaacaagtcggtaccgttccctcaggcccaatagacagctgggaagtatggtagagatcgcgaaacaacttcaggcggtgaagcgcaaaatcagggacgaatccctctgcccccagcatcatgaggctctcagtcttttttgttatgaagaccaggaagctgtctgtcttatctgcgcaatttctcacactcatagggctcataccgtggtcccattagatgatgctacacaggagtataaagaaaagctgcagaagtgccttgaacccctcgagcagaaactgcaggaaataaccagatgtaaaagcagcgaggagaagaagccaggtgagttgaagcgcctggtagaatcaagacgacaacaaattctcagagagtttgaagagctgcacagacgtttggatgaggaacaacaggtgttgcttagcaggttagaggaggaggagcaggacatactgcaacgtcttagggagaatgccgctcatttgggcgataagcggcgtgatctggcccacctcgctgctgaagttgaaggaaagtgtctgcagtccggcttcgagatgttaaaagatgtcaagagtactctcgaaaagtgtgaaaaagtcaagactatggaagtgacatctgtttcaatcgagcttgagaagaacttctctaactttcctcgccagtatttcgcactccggaagatcttgaagcagctaattgccgacgtgacactggatcccgagactgcacaccctaacttggtactcagtgaagacagaaaaagtgtgaaattcgttgagacacggctcagagatctgccggacactccaaggagattcaccttttatccttgcgtcctggctactgagggctttaccagtggtcgccactactgggaggtcgaagtcggagataaaacccactgggcggttggagtttgtagggactccgttagtcgcaaaggtgaactcactcctctgccagaaactggctattggagggtcaggttgtggaatggggataagtacgcagctactaccacccccttcacgcctctccacatcaaggttaaacccaaaagagtgggaatttttctggattatgaggccggtactctgtcgttttacaacgtgactgataggtcccacatatatacctttacagatacattcacggaaaaactgtggccactgttttaccctggcatccgcgctggccgtaagaatgcggcacctctgacaatccggccacctacggattgggagtag

SEQ ID NO: 245099 - DNA, 1467 bp, synthetic construct
  misc_feature 1..1467: note = Description of Artificial Sequence: Synthetic coding sequence
  source 1..1467: mol_type = other DNA
atggcggaaaccagtctgctggaggccggagcctcagctgcttccaccgccgctgctcttgagaatctgcaggtcgaggcatcatgctccgtttgtctggaatatctcaaagagcctgtcataattgagtgtggccacaacttctgcaaagcatgcatcacacgatggtgggaagacctagagcgtgatttcccttgccccgtgtgtcggaaaaccagccggtatcgctctctgcgaccgaatagacaactcggctcgatggtagagatcgccaagcagctgcaggccgtgaagagaaaaatccgcgatgagtctctgtgcccccagcatcatgaggccctgagtttattctgttacgaagatcaggaggcggtgtgcctgatttgcgcaatctcccatacccaccgcgcacatacagtggtgcccctggatgacgccacccaagagtataaggagaagctccagaagtgtctggagccgctcgaacagaagctgcaggagataaccaggtgtaagtcttctgaggaaaaaaagcctggcgaactgaagaggcttgtagaaagtcgcaggcaacaaatcctacgggagttcgaagaattgcatcggagactggatgaggaacaacaggtgctgctctcccggttggaagaggaggaacaggacatactgcagcgcttgcgagaaaatgctgcccacctgggtgataagaggagagacttagcccatctggctgcagaagttgaaggaaagtgcctccaaagtggctttgagatgctgaaagacgtgaaatctaccctggaaaaatgtgagaaagtgaagaccatggaagtgacctcagtttctattgagctcgagaaaaatttttccaatttccccaggcagtatttcgcactacgaaaaatcctgaaacagttaattgctgacgtcactctggacccggagaccgctcaccctaatctagtattgagtgaggatagaaaatccgtgaaatttgtagaaacccgcctgcgtgacctgcctgatacgcccaggcgctttaccttctatccatgtgttcttgcgaccgaggggttcaccagcgggagacactactgggaggtggaggtgggagataagacccactgggctgtcggcgtgtgtcgcgattctgtaagccgcaagggagaacttaccccactcccagagactggctattggcgcgtgcggttatggaacggagataagtatgccgcaacaacaacacctttcacgccgttgcacataaaagtaaagccgaagcgcgtgggcatctttctggactacgaggctggcaccctatccttctataatgttactgatcgctcccacatctatacattcacagataccttcacagaaaagctgtggcccctattttatcctggcattcgcgcaggacgcaagaatgctgcccctctcactatcagacctccaaccgattgggagtag

SEQ ID NO: 245100 - DNA, 786 bp, synthetic construct
  misc_feature 1..786: note = Description of Artificial Sequence: Synthetic coding sequence
  source 1..786: mol_type = other DNA
atggccgagaccagtctcctggaggcaggtgctagtgccgcaagcactgctgctgccctggaaaacctgcaggtcgaagcctcatgcagcgtctgcctggagtaccttaaggagcctgtcatcatcgaatgtggccataacttttgcaaagcatgcattacaagatggtgggaggaccttgaacgggactttccttgcccagtctgcagaaaaacctccaggtatcgctctctgaggcccaatcgacagctaggcagcatggtggaaatagcaaaacaacttcaggccgtgaagagaaagataagggacgagagcctatgcccccaacaccatgaggccttaagtttgttttgctacgaggaccaggaggcagtgtgtttgatctgcgcaatcagtcacacccatcgcgcacatacggtcgtgcccctggatgacgcgactcaggagtacaaggagaagttacaaaaatgcctcgagcctttggaacaaaaattgcaggaaataacccggtgcaagtcgagtgaagagaagaagccaggtgagctgaagcgcttagttgagagtcggcgtcagcagatcttaagagagttcgaagaactgcaccgcaggctggatgaagaacaacaggtactcctgtcccgactggaagaagaagagcaggatatcttgcagagacttcgagaaaatgctgcacatcttggagacaagcgcagggatctggcccatctggccgcagaggtggaaggcaagtgccttcagtcgggctttgagatgctcaaagtatag

SEQ ID NO: 245101 - DNA, 1467 bp, synthetic construct
  misc_feature 1..1467: note = Description of Artificial Sequence: Synthetic coding sequence
  source 1..1467: mol_type = other DNA
atggccgaaaccagcctgctcgaagcaggtgccagcgccgcttccacagctgcagccctggagaatttacaggtggaggcctcctgtagtgtatgcctcgaatatctcaaagagccagtcataattgagtgcggccacaacttctgcaaagcttgcataaccagatggtgggaggaccttgaaagagattttccatgcccggtttgtcgcaaaacctccaggtataggtctctgcgccctaaccggcagcttggtagcatggtggagattgcgaagcagttacaggctgttaagcgtaaaatccgcgacgagagcctgtgtccgcagcaccatgaagccctttcactgttctgctacgaggaccaggaggctgtttgtctgatctgcgctatttcacacactcatagggctcatacagtggtcccactcgacgacgccacacaagagtataaagagaaattacagaagtgcctcgagcccctggagcagaaactgcaagagataaccagatgcaagtcatccgaagaaaagaagccgggtgagttaaaacggctggtggagtctagacgccagcagatcttgagggagttcgaggaacttcatagaaggctggatgaggagcagcaggtgctgctgagtcggctggaggaagaagagcaggacattctccagcgactgcgggaaaatgccgctcatctgggtgataagcggagggacttagcccacttagccgcagaggtagaaggcaaatgcttacagtcaggttttgagatgttaaaagacgtcaaatcaacgttagagaaatgtgagaaagtaaagacaatggaggttacgagtgtgagcattgagttggaaaagaatttttctaattttccacggcagtactttgctctgcgaaagatcctcaagcagctcatcgcggatgtaactctggatccagagacagctcatccaaacctcgtactgtcggaggatcgaaagagcgtaaagtttgttgagacccggttaagggacctgcccgacacccccaggcgcttcaccttctacccctgtgttcttgccacagaggggtttaccagcgggaggcactattgggaggtcgaagtgggtgataaaacccattgggctgtgggtgtttgtcgcgattcggtatcacgaaaaggagagctaacacctctgccagagacagggtactggcgcgttcggctctggaatggcgacaagtatgctgccaccactaccccatttactccgctgcatatcaaggtcaagccaaagcgcgtgggaatcttccttgattatgaagccggtaccttaagcttctacaatgtgaccgacagatcccatatctacacttttacagacacatttactgagaaactgtggcctcttttttacccagggatacgggctggtcgtaagaacgccgctcctctgacaattagaccccctaccgactgggagtag

SEQ ID NO: 245102 - DNA, 180 bp, synthetic construct
  misc_feature 1..180: note = Description of Artificial Sequence: Synthetic coding sequence
  source 1..180: mol_type = other DNA
atggccgagaccagtttgctagaggccggtgcttctgccgctagcaccgccgcagccttggagaacttgcaagtcgaggcaagttgttcagtgtgccttgagtacctgaaagaacccgtaatcattgaatgtggtcataacttctgcaaagcttgtattacccgatggtgggaagattag

SEQ ID NO: 245103 - DNA, 180 bp, synthetic construct
  misc_feature 1..180: note = Description of Artificial Sequence: Synthetic coding sequence
  source 1..180: mol_type = other DNA
atggccgagactagtctcctggaagctggtgcttcagcggcatccaccgccgctgctctggaaaatctgcaggtggaggcctcttgtagcgtgtgcctggaatatctcaaggagcccgttattatcgagtgcggccataatttctgcaaggcctgtataaccaggtggtgggaggactag

SEQ ID NO: 245104 - DNA, 684 bp, synthetic construct
  misc_feature 1..684: note = Description of Artificial Sequence: Synthetic coding sequence
  source 1..684: mol_type = other DNA
tgaacctcacgataccgaagcctacgtccaaatagacagcttggcagcatggtggagatagccaagcagctgcaagctgtaaagcgcaaaatccgggacgaatccttgtgcccccaacatcacgaagcactgagtttgttttgttacgaagaccaggaagccgtgtgcctgatttgtgccatctcccacacgcaccgtgcgcacaccgtcgttccactggacgacgccacccaggaatacaaggaaaaactccagaaatgcctggagcctctagagcagaagctgcaagaaatcacaagatgcaaatcctccgaggagaagaagcctggggagttgaaacgcctagtagagtcccggagacagcagatccttcgagagtttgaggagctgcataggcgattggatgaggagcaacaggtgttgctaagcagactggaagaggaagaacaggacattctccagaggctccgggagaatgccgctcatctcggggacaagagacgcgacctggcacatcttgccgcagaggttgaaggtaagtgcctgcagtctgggttcgaaatgcttaaggacgtgaaatccacgttagaaaagtgtgagaaggtgaagaccatggaagttactagcacaactccctgtacatctctgcactccgaaatcaatgataatgtccgcggaagatag

SEQ ID NO: 245105 - DNA, 1467 bp, synthetic construct
  misc_feature 1..1467: note = Description of Artificial Sequence: Synthetic coding sequence
  source 1..1467: mol_type = other DNA
atggcagagacgagcctgttggaggccggagcttcagcagcatctacggccgctgcccttgagaacttgcaggttgaggcttcatgcagcgtctgtctggagtacttgaaagaacctgtaattattgagtgcggccataatttctgtaaagcttgcatcacccgctggtgggaggacctggagcgagatttcccctgcccagtgtgtcggaagacctctcgataccgctcgctccgacctaaccggcagcttgggtctatggtcgagatagctaagcagctccaggcagtgaagcggaaaatacgagatgaatctctatgcccacaacaccatgaggcgctctctctgttttgttatgaggatcaagaagcggtctgtttaatatgcgccatttctcacacccatagggcccatacagttgtgcctcttgacgatgccacgcaggagtacaaggaaaagctccagaagtgtctagagcccttagagcagaagttgcaagagatcaccagatgtaagagtagcgaggaaaaaaagcccggagaactgaagcggcttgtggagtccagacgccagcagatcctgcgggaattcgaagaactgcataggcgcctggacgaggaacaacaggttctattatctcgactggaggaagaagaacaggatatactccaaagattgcgcgagaatgcagcccacctcggcgataaacgcagagacctggcccacctcgccgctgaggttgagggaaagtgtttgcagtccggcttcgagatgcttaaagacgtgaaaagtaccctggaaaagtgcgaaaaagtgaagaccatggaggtgacctcggtcagcattgaacttgaaaagaatttttccaacttccctagacagtacttcgcccttcgcaagatcttaaaacagctgatcgccgacgtcactctggatccggagactgctcatcccaacctcgttctttccgaagatagaaagagcgtgaaatttgttgaaacccggctgcgagacctgcctgatacaccacgtcgctttaccttctatccttgcgtgctggctaccgaaggcttcacctccgggagacactattgggaggtcgaggtgggggataaaacccactgggcggtgggtgtgtgtagagattccgtctcaaggaagggggaactcacacctctgcccgaaacggggtattggcgagtgagactgtggaacggggataaatatgctgctactaccacgccgtttacaccactccacatcaaggtgaagcccaagcgcgtggggatatttctggattatgaagctggcacgctgtccttctacaacgtgactgatcgcagccacatatacacattcacagatacatttactgagaagctgtggccactgttctacccaggtatccgcgcaggaagaaaaaacgcagcccctttgacaatccgtcctcctactgactgggagtag

SEQ ID NO: 245106 - DNA, 225 bp, synthetic construct
  misc_feature 1..225: note = Description of Artificial Sequence: Synthetic coding sequence
  source 1..225: mol_type = other DNA
atggctgagacgtcgttactggaggccggagccagtgccgcatctactgccgcagcccttgaaaacctgcaagttgaggctagctgctctgtttgtttggagtacctcaaggagccagttatcattgagtgcggccataatttttgtaaagcctgcattactcgatggtgggaggatctcgagcgagacttcccatgcccggtttgcaggaagacttctcggtag

SEQ ID NO: 245107 - DNA, 684 bp, synthetic construct
  misc_feature 1..684: note = Description of Artificial Sequence: Synthetic coding sequence
  source 1..684: mol_type = other DNA
tgaacctcgcgctaccgatctctgcgtccaaatcgtcagctcggctctatggtcgagattgcaaagcaactgcaggcagtgaagcgtaaaataagagacgaaagtctttgtccacaacaccatgaggccctgtcactcttctgctatgaggatcaggaggcagtgtgtctaatttgtgcaatatcccacacacacagggcccatactgttgttccactggatgacgccactcaagagtataaggagaaactacagaaatgtttggagccgctggaacagaagttacaggagatcactcggtgcaaatcaagcgaagagaagaaacccggagaacttaaaaggctggtggaatcgcgccgacagcaaatattgagagagttcgaggagctccaccggagattggacgaggaacagcaggtgctactgagcaggctggaagaggaggagcaggatatacttcaacggctccgagaaaacgcagcccatcttggagacaagaggagagacctcgcgcacctggcagccgaggtagagggtaaatgtctgcagtctggtttcgaaatgctaaaggatgtcaaatcaacattggagaagtgtgagaaagtgaaaacaatggaggtcacctccacaactccctgcacatccttgcatagcgagattaatgataatgtgcgtggtagatag

SEQ ID NO: 245108 - DNA, 1467 bp, synthetic construct
  misc_feature 1..1467: note = Description of Artificial Sequence: Synthetic coding sequence
  source 1..1467: mol_type = other DNA
atggcagaaacctcacttttggaagcaggcgctagcgctgcttccacggcagccgcactcgaaaacctccaggtggaagccagctgttccgtttgcctggagtacctcaaggagcccgttatcatcgagtgcggacacaatttttgcaaggcttgcattacaagatggtgggaggaccttgagcgcgacttcccatgtcctgtatgtcgcaaaacttctcgatatcgttcgctaagaccgaacagacagttaggaagcatggtcgaaattgccaagcagctgcaggctgtgaaacgcaagatcagggatgagagcttgtgtcctcaacaccatgaagcactgtccctgttctgttatgaggaccaagaagccgtctgcctgatctgcgcaatcagtcacacccatagagcgcatacagtggtgcctcttgacgatgctactcaggagtataaggaaaaattgcagaagtgcctcgaaccccttgaacagaaactccaggaaattacacggtgtaagagctccgaggagaaaaagcccggagagctgaagagactcgttgagtcaaggagacaacagattcttagagaatttgaagaattgcacagaagactcgacgaggagcagcaggtgctcctgtcccggttagaagaggaggagcaagatattttgcagaggctacgcgagaatgcagcccatctgggtgacaagagacgcgatttggcccacctagccgcagaagtggaggggaaatgcttacagagcggattcgagatgctgaaggacgtaaagtcaaccctggagaaatgtgaaaaagtgaaaactatggaggtgacttctgtcagcatcgagctggaaaaaaacttctcaaactttcctcgacagtatttcgccctgcggaaaatattaaaacaactcatcgcagacgtgaccttggatcctgagacagcccacccaaacctggtcctaagcgaggatcggaaatccgtgaagtttgtggaaacaagacttagagacctgcccgataccccacggagattcaccttctacccgtgcgttctggctactgagggctttacctctggaagacactattgggaggttgaggtaggcgataagactcactgggctgtgggcgtgtgcagagatagtgtgtcccgtaaaggagaactgacaccccttccagaaacagggtattggcgggtacgcttgtggaatggtgacaagtacgcagctaccactaccccattcactcccctccatattaaggttaagccgaaacgcgttggtatcttccttgattatgaggccggtactctctcattctacaatgtgaccgaccggagccacatctacacattcaccgacactttcaccgagaaactttggcccctgttctaccccggaatcagagccggtcggaaaaatgccgctcccttgaccattagaccgcctacagattgggagtag

SEQ ID NO: 245109 - DNA, 1467 bp, synthetic construct
  misc_feature 1..1467: note = Description of Artificial Sequence: Synthetic coding sequence
  source 1..1467: mol_type = other DNA
atggccgagacctcccttctggaggcaggcgcatccgccgcaagtaccgcggctgccctggaaaacctccaggtagaagctagctgcagcgtatgcctggagtaccttaaggaaccagtgattatcgaatgcggtcacaacttctgtaaggcatgcattacacgatggtgggaggatctcgagcgagacttcccctgtcccgtctgccgaaaaacttctcgttacagatctctcaggccaaatcggcaactgggctctatggtggaaatcgcaaagcaactgcaggccgttaagcgcaagatccgtgacgagagtctgtgtccccagcaccacgaggctctctctctgttttgctatgaagaccaggaagccgtctgtctaatctgcgccatttcccatacccacagggctcatacggtagtcccccttgatgacgccacccaggaatataaggagaagttgcagaaatgcctggaacctctcgaacagaaattgcaggaaatcaccagatgcaaatcctcggaagaaaagaaacctggggagctaaagcggctggtcgaatctaggcgccagcaaattcttcgggagttcgaagaactccaccgcagattggatgaggagcagcaggtgctgctcagccgcctggaagaagaagagcaggatattcttcagaggttaagagagaatgcagcccatttgggggacaagagacgggacctggcgcatctagctgccgaggtcgaagggaaatgtttacagagcggattcgaaatgttaaaggatgtcaagtctacattagaaaaatgcgaaaaagtcaaaacaatggaagtgaccagcgtgtcgattgagctggagaaaaatttctcaaatttcccgaggcagtactttgccctgcgcaaaattctgaaacaattaatcgccgatgtcaccctcgatccggaaacagctcatcccaatctggtgttgagcgaggaccgcaagtccgttaaatttgtggagacccggttgagagacctgcctgacacacccaggaggtttaccttttatccatgcgtgttggcgacggagggttttacatctggcagacattattgggaggtggaggtgggagacaagactcactgggcggtcggcgtttgcagagattccgtgtcacggaagggggagctaacgccattgccggaaacgggctattggagggtgcggctgtggaatggggacaaatacgcagctaccactacgccctttactcccctgcatattaaagtgaagcccaagcgcgtgggaattttcctggattatgaggctggcaccttatccttctacaatgtcaccgatcgcagccacatatacacgtttaccgacacatttaccgagaagttatggcccctcttctatccagggataagggcgggacgcaaaaacgccgcacctttaacgatcaggccgcctactgactgggaatag

SEQ ID NO: 245110 - DNA, 786 bp, synthetic construct
  misc_feature 1..786: note = Description of Artificial Sequence: Synthetic coding sequence
  source 1..786: mol_type = other DNA
atggccgaaacctcccttctcgaagccggagcctctgccgcatcaaccgccgcagcactagagaatctgcaggtggaagcctcctgttccgtgtgtctggaataccttaaggagcccgtgatcattgagtgtgggcacaatttctgtaaagcctgtatcacccgttggtgggaggatttagagagggattttccatgcccagtgtgtaggaaaacctcacgttatcgttcccttagacccaacagacagctcggatcaatggtggaaatcgccaaacaactccaggctgtgaaaaggaagattagggatgaaagtctctgccctcaacaccatgaagctctgagtctcttctgctacgaggaccaggaagctgtgtgtctgatctgcgccatctcccacacacaccgagctcacacagtagtgcctctggatgatgcaacccaggagtataaagagaagctgcagaagtgcctggagccactggagcagaagctgcaagaaatcacgagatgcaaatcatcagaggaaaaaaaacctggcgagctgaaacgcctcgttgagtcaagacgccagcagatcctcagagaattcgaagagcttcacagaagactggatgaggagcaacaagtgctactatcccggctcgaagaagaggagcaggatatcctgcaacgtctgcgggaaaatgctgctcatctgggggacaagagacgcgaccttgctcacttagcagccgaggtggaaggaaaatgcctgcaatcaggatttgagatgctgaaggtgtag

SEQ ID NO: 245111 - DNA, 225 bp, synthetic construct
  misc_feature 1..225: note = Description of Artificial Sequence: Synthetic coding sequence
  source 1..225: mol_type = other DNA
atggccgaaacaagcctgctcgaagccggtgccagcgcggcttcaacggccgcagccctggagaacttgcaggtggaagcctcctgtagcgtctgtctcgaatacctcaaggagccagtgataatagagtgtggccataatttttgcaaagcctgtatcacccgatggtgggaggacctggaaagagatttcccctgcccagtgtgtagaaaaacttctagatag

SEQ ID NO: 245112 - DNA, 180 bp, synthetic construct
  misc_feature 1..180: note = Description of Artificial Sequence: Synthetic coding sequence
  source 1..180: mol_type = other DNA
atggctgagacctcacttcttgaggccggagcatccgccgctagcacagccgctgccctcgagaacctccaggtcgaggcctcttgcagcgtttgccttgagtacctgaaggaaccagtcattatcgaatgtggacacaacttttgtaaggcatgcattacgagatggtgggaagactag

SEQ ID NO: 245113 - DNA, 786 bp, synthetic construct
  misc_feature 1..786: note = Description of Artificial Sequence: Synthetic coding sequence
  source 1..786: mol_type = other DNA
atggctgagaccagcttactggaagccggtgccagcgctgcgagtactgctgctgcccttgagaaccttcaagttgaagccagctgctctgtctgccttgaatacctaaaggagccagtgattatcgaatgcggacacaatttctgcaaggcctgtataacaaggtggtgggaggatctggagcgtgatttcccttgtcccgtgtgtcggaaaacttcccgctatcgttcactgcgacccaatcggcagctggggtctatggttgaaattgccaaacagctccaggcggttaaacgaaagatccgagacgaaagcttgtgcccacagcaccacgaggcacttagtctgttctgttacgaggaccaggaggctgtgtgtctgatctgcgccatcagccacacccaccgggctcatacagtggtgccattggacgatgctacccaggagtataaggaaaaattacaaaagtgtctcgagccactggaacagaagctgcaggagatcacgaggtgcaagtcgtctgaggagaagaagccaggtgaactcaagagacttgtggagtctcgtcgacaacagattctgagagagttcgaagaactgcatcgaaggctcgatgaagaacagcaagtactcctcagccggctagaggaggaagaacaggacatccttcaaagactgagggagaacgccgcacacctcggtgataagaggcgcgacctggcacacctcgccgcagaagtcgagggtaaatgccttcagagcgggttcgagatgcttaaggtgtag

SEQ ID NO: 245114 - DNA, 1467 bp, synthetic construct
  misc_feature 1..1467: note = Description of Artificial Sequence: Synthetic coding sequence
  source 1..1467: mol_type = other DNA
atggcagagactagcctgctcgaggctggagcctcagctgcatctacggcagcagcactagaaaaccttcaggtagaagccagttgttctgtgtgcctggagtatctcaaagagccagtgattatcgagtgcggacacaatttctgcaaagcctgcataacgcgctggtgggaagatcttgagcgcgatttcccgtgtccagtatgcaggaagaccagtagataccggtctctcagaccaaataggcagctggggtcaatggttgaaattgccaagcagctgcaagctgtgaagcgtaaaatcagagacgaatctctgtgccctcagcatcatgaggctctcagcctcttttgttacgaggaccaagaggctgtctgtttgatttgtgcaatttcccacacccaccgggcacatacagttgtacctctcgatgatgcaacacaggaatataaggagaagctgcagaaatgtctcgagccgttggaacaaaaactccaggaaatcacccggtgcaagtcaagcgaagaaaagaagcctggagagctaaagcgattggtggagtccagaagacagcagattctcagggagtttgaggagttgcacaggcgcctggatgaggagcaacaagttctcctttctcggctggaggaagaagagcaagacatacttcagcgcctgcgagagaacgctgcacacctgggcgacaagaggcgcgatttggcccacctcgcagctgaagtagagggaaagtgtttgcagagcgggtttgagatgctcaaagacgtgaaaagcacattggaaaaatgtgaaaaggtgaagacaatggaggtgaccagtgtgagcatcgaactggaaaagaactttagcaactttcccagacaatacttcgcattaagaaaaattcttaagcagctgattgccgacgtgacattagatccagagactgctcatcccaacctagtgttgtccgaggaccggaagagcgtgaaatttgttgagacaaggctcagggacctgccagacactcccaggagattcaccttttatccatgcgtgctggctaccgaaggcttcacttctggaaggcattactgggaggtggaggtgggtgacaagacccattgggcagtgggcgtctgtcgggactctgtctcaaggaagggcgagctcacaccccttcctgagaccggatactggagggtgcggctgtggaacggcgacaaatatgccgcaaccaccacacctttcaccccgcttcacatcaaagtcaagcctaaaagagtgggtatctttttggattatgaagctggaaccctttcattttacaatgttacggacagatcccacatttataccttcaccgacacgtttaccgagaaactctggcccctcttttaccccggaatccgagcaggcaggaagaatgcagctcctctgacaattagacctcccacagactgggaatag

SEQ ID NO: 245115 - DNA, 1557 bp, synthetic construct
  misc_feature 1..1557: note = Description of Artificial Sequence: Synthetic coding sequence
  source 1..1557: mol_type = other DNA
atggccgaaacttctctgctggaagctggagcatctgccgcatcaacagcagcggctcttgaaaacctgcaggtcgaagccagctgctccgtctgcctggagtatttgaaagagcctgtgataatcgagtgcgggcacaacttctgtaaagcctgtattacacgatggtgggaggatttggaaagagattttccctgtcctgtctgcaggaagactagcagataccgttccctgcgccctaacaggcagctgggaagtatggtcgagattgcaaaacagttacaagccgtgaagcgaaaaattagggacgagagcttgtgtccccagcaccatgaggctctcagcctgttttgttatgaagatcaggaagccgtgtgtctgatctgtgccatctctcacacccatagggcgcacacagtggtcccattggacgacgccacccaggagtataaggagaaacttcagaagtgcctggagcctctggagcagaagctgcaggagattaccaggtgcaaaagcagcgaggaaaaaaaacccggtgagctcaaacgattggtggagtcgagaaggcagcaaattctgagagaatttgaggaacttcacagacgtctagacgaggaacagcaggtgttgttgtcacgactggaggaggaagagcaggacatacttcagcgtctccgggaaaatgctgcccatttgggggataagcggagggacctggcccacttagcggctgaggtggaggggaagtgtctgcaatccgggttcgaaatgctaaaggacgtcaaatctaccttagagaaaaacattcctcggaagttcgggggaagcctgtcgaccatctgtccccgtgaccacaaggccttgctggggctggttaaggagatcaatagatgtgagaaggtcaaaacgatggaggtgaccagtgtatcaatcgagttagagaaaaatttttccaactttccccgtcagtactttgcccttagaaaaattctcaagcagcttatcgctgatgtgacactagatccagagacggcacaccctaacctggtgctgtcagaggaccggaaatccgttaaattcgtggagacccggctgagagatttacctgacactcccaggaggttcactttttacccatgcgtgctggccaccgagggctttactagtggacgccattactgggaggtcgaagtgggggacaaaactcattgggccgtgggggtgtgccgggattccgtttctcgtaaaggagagctgactccactgccggaaacgggatattggagagtccgattgtggaacggcgataagtacgccgctacaacaactcctttcacaccactgcatataaaagtgaagcccaagcgggttggaatttttctcgattatgaagccggaacgcttagtttttataacgtcacggacaggagtcacatatataccttcacagatacattcacagaaaagctctggcccttgttctaccccggtattcgcgcaggcagaaaaaacgcagcccctctgactatcaggccgccaactgactgggagtag

SEQ ID NO: 245116 - DNA, 1467 bp, synthetic construct
  misc_feature 1..1467: note = Description of Artificial Sequence: Synthetic coding sequence
  source 1..1467: mol_type = other DNA
atggccgagacaagcttactggaggccggagcatccgccgcttcaacagccgcagccctggagaatctccaagtggaggcaagttgctcagtgtgtctagaatatctgaaggaacccgtgatcatcgaatgtggccataacttctgtaaggcgtgcatcacaagatggtgggaggatctcgagagagattttccctgtcccgtctgccgcaagactagtcgctacaggagtctgaggcccaaccgccagttgggaagtatggtggagatcgcaaagcagttacaagcggtcaagcgaaaaatcagagatgaatctttatgtccacaacaccatgaagccctttcactcttttgctacgaggatcaggaggccgtctgtctgatctgcgccatttcccacacccacagagctcatactgtcgtgcccctcgacgatgccacacaggaatataaggagaagttgcagaaatgcctcgaaccactggagcaaaaactgcaggaaattaccaggtgcaagtcatccgaagagaagaagccaggtgaattaaaaagacttgtagagagtcggaggcagcagattcttcgagagtttgaggagctccaccgaagattggacgaggagcaacaggtgctgctctctcgactggaggaggaagaacaggatatactccagcggctgcgcgaaaacgctgcccacctcggggacaagcgcagggaccttgcccatcttgcagcagaagtggaagggaagtgcctgcagtccgggttcgagatgttaaaggatgtgaaatctacattggagaaatgcgagaaggtgaaaactatggaggtcaccagcgtttctattgaactcgaaaagaatttcagtaatttcccaagacagtactttgcgttgcgaaagatcttaaaacaacttatcgcagatgtcaccctcgaccccgagacagctcacccaaatctggtcctgtctgaagaccgtaagtctgttaaattcgtggagactcgcctgcgggaccttcctgatactcctcgtagattcacattctacccctgcgtgttggccacagagggtttcaccagcggtcggcattactgggaggtcgaggtcggcgacaaaacacactgggcagttggagtgtgccgtgattccgtttcgagaaagggtgagctcacaccactgccagaaaccgggtattggcgcgtgcgcttgtggaatggtgataaatacgcggcaacgacgaccccatttaccccgctacacatcaaggtgaagccaaagcgagtcggaatatttctggattacgaggccggaactctcagcttttacaacgtgactgatcgctcccatatttataccttcaccgacactttcacagagaaactgtggcccctcttttatcccggaatccgtgcaggccgaaagaacgccgctcccctgaccatccgccctcctactgattgggaatag

SEQ ID NO: 245117 - DNA, 786 bp, synthetic construct
  misc_feature 1..786: note = Description of Artificial Sequence: Synthetic coding sequence
  source 1..786: mol_type = other DNA
atggcagaaactagtctcctggaggccggtgccagtgcagcctcgacagctgccgcactggaaaaccttcaggtggaggccagttgtagcgtctgtctggaatacctgaaggagcccgtgattatcgagtgcgggcacaacttttgcaaagcttgcattaccaggtggtgggaggacctggagcgagactttccatgtcctgtgtgccggaaaactagtcgctaccgctccctgcgccctaatcgacagctgggcagcatggtggaaatcgctaagcagctccaggccgttaagaggaagatccgtgacgagtcactgtgtcctcagcaccatgaggcacttagtctgttctgctacgaagaccaggaagccgtgtgcctgatatgcgccatttcccacactcacagagcacacaccgtagtccccctagacgatgccacacaggaatacaaagaaaaactccagaagtgtcttgagcctctggaacagaaactgcaggaaatcacacggtgtaagtcttctgaggagaagaaaccaggggagctgaaacgtctggtggagtccaggcgtcagcagatcttgagagagtttgaggagcttcaccggaggctggacgaggagcaacaggtgttacttagtcgcctcgaggaggaggaacaggatattctacagagactgagagaaaacgcggctcacttgggggataagagaagggatctagctcatttggctgccgaggttgagggcaaatgtctgcaatcgggtttcgagatgcttaaagtctag

SEQ ID NO: 245118 - DNA, 225 bp, synthetic construct
  misc_feature 1..225: note = Description of Artificial Sequence: Synthetic coding sequence
  source 1..225: mol_type = other DNA
atggccgagacgtcactgctcgaggcaggcgctagtgcagcaagtactgcggcagcactcgaaaacctgcaggtggaagccagctgctctgtgtgtctggagtacctaaaagaaccagtgattattgaatgcggacataacttctgtaaggcttgtatcactcgttggtgggaggatctggagagggacttcccttgtccggtctgtagaaaaacaagccggtag

SEQ ID NO: 245119 - DNA, 1236 bp, synthetic construct
  misc_feature 1..1236: note = Description of Artificial Sequence: Synthetic coding sequence
  source 1..1236: mol_type = other DNA
atggccgagacctcactgctggaagcaggagctagtgccgcttcaacggctgctgctttagagaaccttcaggtggaggcaagctgctctgtctgcctcgaatatctaaaagaacctgtgattatcgagtgtggacacaatttctgcaaagcatgtattacgcggtggtgggaagacttagagcgtgatttcccatgtccagtgtgcagaaaaactagccggtatcgaagtctgcggcctaataggcagctgggatcaatggtggagatcgccaaacaactccaggccgtgaaacgcaagatcagagacgaatctctctgccctcagcatcatgaggccctaagtctgttttgttacgaagatcaagaggctgtctgcctcatttgtgctatttctcatacacatagagcccacaccgttgtgccactggacgacgctacgcaggaatacaaggagaagcttcaaaaatgtcttgagcccctcgaacagaagctccaagaaattacccgttgcaaaagcagtgaagagaagaaaccaggcgagttgaaacgcttagtagaaagcagaagacagcaaattctgagggagttcgaggagctgcatcggaggctggatgaagaacagcaagtccttctgtcccgcctggaagaagaggagcaggatatccttcagaggttgcgggaaaacgcggcacatctaggagacaaaaggagagatcttgcgcaccttgctgccgaggtggagggcaaatgcctgcagagcggcttcgagatgctgaaacccgtgttgtcagcaagggaggagtgcgagaaagtgaagacaatggaagtgacaagcgtgtcaatcgagctggagaaaaatttttcgaacttccccagacagtactttgcgcttcgaaagatcctaaagcagttgattgcagacgtgactctggatccagaaacagcacaccccaacttagtgctgagtgaagatcgcaaatcagtcaagttcgtcgaaacccgcctgcgtgacctccccgatactcctcggaggtttacattttacccttgtgtcctcgctacggaggggtttacaagtggaaggcactactgggaggtggaggtcggcgataagacccattgggccgttggcgtgtgtcgggattcggtttctaggaagggagggtgtgggtacggcatgggtacaaacatgcaacctcctccccatctcttaccactatgcacaagtcggtag

SEQ ID NO: 245120 - DNA, 1467 bp, synthetic construct
  misc_feature 1..1467: note = Description of Artificial Sequence: Synthetic coding sequence
  source 1..1467: mol_type = other DNA
atggctgaaacttcccttctggaagctggtgcttcagcggcttctaccgccgctgctctggaaaacctccaagtggaagcgtcatgttcagtgtgcctggagtatttgaaagagcccgtcataatcgagtgtggacataatttctgtaaggcctgcatcacccgttggtgggaagaccttgagagagacttcccatgccctgtctgtcggaaaaccagtaggtacagatccttgaggccaaatagacagctgggaagtatggtggagatcgccaagcagctccaggctgtgaaacgaaagataagggatgaaagtctgtgcccgcagcaccacgaggccctctcgcttttttgctacgaagaccaggaagcagtgtgcctgatctgcgcaatttcacacacccacagagctcacaccgtggtgcctctggatgatgccactcaggaatataaggaaaaactacagaagtgtttggagcctctcgaacaaaagttgcaggagatcactcggtgcaagagtagcgaagagaagaaacctggggagctgaaaaggctggtggagtccaggcgacagcaaatactgagggagttcgaggagctccatcgccgtctcgacgaggaacagcaggtcctgttatccaggctagaagaagaggagcaggatatcttgcagcgcctgagggagaacgctgcccacctgggtgataagagaagggaccttgcccacctcgctgcggaggtggaaggcaagtgcctgcagagtggctttgaaatgctgaaggacgtgaaatctaccctggagaagtgcgagaaggtcaaaaccatggaagtgacctccgtgagcatcgaactcgagaagaacttcagtaatttcccacggcagtattttgctctccgtaaaatcctgaagcagctgatcgccgatgtgacactggatccggagacagctcatcctaacctagtcctgtccgaggatagaaagagcgttaagttcgttgagacccggctgcgagacttacccgatactcctcgcagattcaccttctacccatgcgtgttagccactgagggattcactagtggcaggcattattgggaggtagaggtcggcgataaaacccattgggctgtgggcgtctgcagagacagcgtctcccgaaagggtgaactcaccccacttccagagaccggatactggcgggtgaggctgtggaacggcgataaatacgccgcaactaccactccttttacacctctccatattaaagtcaagcccaaaagggtaggcattttcttagattatgaggcaggcacactctcattttataacgtgaccgatagaagccacatatatacattcaccgacacattcacagagaagctctggcccctgttctaccccggaattagggccggacgcaaaaatgcagcccctttgacaattcgcccacccaccgattgggagtag

SEQ ID NO: 245121 - DNA, 786 bp, synthetic construct
  misc_feature 1..786: note = Description of Artificial Sequence: Synthetic coding sequence
  source 1..786: mol_type = other DNA
atggccgagacttccctgctggaagcgggagcttcagccgcatctacagccgctgccctcgagaatctgcaggtggaggccagttgctccgtttgcctggaatacctgaaagagccagtgatcatagagtgcggccacaatttttgtaaggcatgcataactagatggtgggaggatctggagcgcgacttcccctgccctgtttgccgaaagacatcaaggtaccggagccttcggccaaacaggcaattgggttcaatggtggagattgcaaaacagctgcaggccgtgaaaagaaaaatacgggatgaatctttatgcccgcagcaccatgaggccctgagtctgttctgttacgaagaccaggaggcggtgtgtctcatttgcgctatatctcatactcatagggcccacactgtggtaccactcgacgatgcgacccaggaatataaggagaagcttcagaagtgcctagagcccctggagcaaaagttacaagaaatcaccagatgcaagagtagtgaggaaaagaaacccggagagctaaaacggcttgtggaaagtcggaggcaacagattttgcgcgaatttgaggagcttcatcgacggctcgacgaggagcaacaagtgctgctgtctaggctggaggaggaggagcaggatatcctgcagaggcttcgggagaatgccgctcatcttggggataaacggagagatctcgcgcacctcgcggctgaagtggagggcaagtgtctccagtctggcttcgagatgttgaaagtgtag

SEQ ID NO: 245122 - DNA, 147 bp, synthetic construct
  misc_feature 1..147: note = Description of Artificial Sequence: Synthetic coding sequence
  source 1..147: mol_type = other DNA
atggctgaaacaagccttctggaggcaggcgcaagcgcagcctctactgccgcagccttagaaaatctccaagtggaggcctcctgttccgtgtgcttagaatacttgaaggagccagtgatcatagaatgcggtcataatttttag

SEQ ID NO: 245123 - DNA, 786 bp, synthetic construct
  misc_feature 1..786: note = Description of Artificial Sequence: Synthetic coding sequence
  source 1..786: mol_type = other DNA
atggccgagacttcactgctggaagccggagcaagcgctgcctcaaccgctgcagccctcgagaatttacaggttgaagcttcttgcagcgtgtgtctggaatatctgaaggagcccgtgataattgaatgcggccacaatttttgtaaggcttgcatcacccggtggtgggaggatctagagcgcgactttccctgtccggtttgccgtaaaacctccaggtaccgctcacttaggcccaaccggcagctcggcagcatggtggagatcgccaaacagctgcaggccgtgaaacgcaagattagggacgagtcactgtgtccccagcatcacgaagccctgtctttgttctgctacgaggaccaggaggcagtttgtttgatatgtgcaattagtcacacccatagagcccacaccgtcgtgcccttggatgatgcgactcaagagtataaggagaagctgcagaagtgtctcgagcctctcgagcaaaagctgcaggagataacccgctgcaagtcaagcgaggaaaagaagccaggagagctcaaaagactggtcgaaagtagacggcagcaaatcctgcgcgagtttgaagagctgcataggcggcttgacgaggagcaacaagtcttgctaagtcgcctggaggaggaggaacaggatatcctgcaaagacttcgtgaaaatgctgcccatctcggcgacaaacgcagagacctcgcccacctggctgcagaagtggagggcaagtgccttcaatccggtttcgagatgctgaaagtctag

SEQ ID NO: 245124 - DNA, 1467 bp, synthetic construct
  misc_feature 1..1467: note = Description of Artificial Sequence: Synthetic coding sequence
  source 1..1467: mol_type = other DNA
atggcggagaccagcctgttggaggccggagcgtccgccgcttcaacagccgctgcccttgaaaatctgcaggtggaggctagctgtagtgtttgcttagagtatctcaaagaacctgtgattatcgaatgtggtcataatttttgcaaggcttgcattacacgctggtgggaagatctggagcgtgactttccatgccccgtgtgtaggaaaacttcgcgttatcggagtctgaggcccaatcggcagctgggcagtatggtggaaattgcaaaacagctgcaggctgttaagcgaaaaatccgagacgagtccctctgcccccaacatcatgaagccctcagcctcttttgttatgaagaccaggaagcagtctgtttaatttgcgctatttctcacactcatcgtgctcacaccgtggtgcccctagatgacgccacgcaggaatacaaagaaaaacttcagaaatgcctcgaaccactggagcagaaactccaggaaattacccggtgcaaatccagtgaggagaaaaaacctggcgaactgaaaagactggtcgaaagcaggcgccagcagattctgcgtgaatttgaagaactgcacaggcgattagacgaggagcagcaagttctgctgagccgcctggaggaggaggaacaggacatactgcagagactgcgtgaaaacgccgcacatttaggagataagaggcgagaccttgctcacctagccgctgaggtcgaggggaaatgcctgcagtccggttttgaaatgctgaaggacgtcaagagtaccttggaaaaatgcgagaaagtgaagactatggaggtaacatccgtcagcattgagttggagaagaatttttccaatttccccaggcaatatttcgcccttcgtaaaattcttaagcaacttattgcagacgtcacactggatcccgagacggcccatcccaatctggtgctgagcgaagaccggaagtccgtgaagttcgtggagacacgtctccgcgatctgcccgataccccccgacgcttcaccttttacccctgtgtcctagcgaccgaaggctttacaagcggcagacactattgggaggtggaggtgggagataagacccattgggccgtcggggtttgtcgagattctgtcagccgcaagggagagctcactcccctgcccgagaccggttattggagagtacgcctgtggaatggcgacaaatatgccgcaacaactaccccttttacacctctgcatataaaagtaaagcccaagcgcgtaggcatatttctggactacgaagctggcacactctcattctacaatgtgacggaccggagccacatctacaccttcacggacacttttacggaaaagttgtggcccctcttctaccccggtatccgagctggtcgaaagaatgccgcacccctcacaatcaggccaccaacagactgggagtag

SEQ ID NO: 245125 - DNA, 225 bp, synthetic construct
  misc_feature 1..225: note = Description of Artificial Sequence: Synthetic coding sequence
  source 1..225: mol_type = other DNA
atggccgaaacttcactcctcgaggccggtgccagtgccgcaagcactgccgctgccctcgaaaacctgcaagtggaagcctcttgttctgtctgtctcgagtatctcaaagaacccgtgatcattgaatgtggccataacttctgcaaggcctgtatcacgcgctggtgggaggacctcgaacgggactttccctgcccagtttgccggaagacctcccgatag

SEQ ID NO: 245126 - DNA, 1467 bp, synthetic construct
  misc_feature 1..1467: note = Description of Artificial Sequence: Synthetic coding sequence
  source 1..1467: mol_type = other DNA
atggcagaaaccagccttctagaggcaggcgcttccgccgcttctactgcggcagctctcgaaaacctgcaagtcgaagcatcttgctccgtctgtctcgagtatctaaaggagccggtgattattgagtgcggtcacaacttctgcaaagcctgtatcactcgctggtgggaagacctcgagcgggattttccctgtccagtttgccgcaagacgtcccgctatagatctctgcgtcccaatcgtcagcttgggagtatggttgaaatcgcgaagcaacttcaggccgtgaagagaaagattagagacgagtctctttgcccacaacaccacgaggccctgtctctgttttgctatgaagatcaggaagctgtctgtctgatctgtgcgatttcacacacccacagggcccatacggtggtgccacttgacgacgcgacacaggaatataaagaaaagctgcagaaatgtctggaaccactggaacagaagctgcaagaaatcacccgctgcaaatctagcgaagagaagaaaccgggtgagttgaaacggctcgtggagtccaggagacaacagatcctgcgggaattcgaagaactgcaccgcaggctggacgaagagcagcaagtgttgctgtcaagactggaggaggaggaacaagacattttgcagcggcttagagagaatgctgcccacctgggggacaaacgccgagacctcgcacaccttgctgccgaggtcgaggggaagtgtctgcagagtggttttgagatgttgaaagacgtaaaaagcactcttgagaagtgcgaaaaagtgaagaccatggaggtgaccagtgtgtctattgagctagagaaaaacttttccaatttccctcggcagtacttcgctttgaggaagattctgaagcagctgatcgcagacgtgaccttagatcccgaaacggcccacccaaatctcgttctaagcgaagatcgcaaatcagtgaaatttgtcgagaccaggctacgggatctgcctgacacgcctcggagattcactttctatccttgcgtgttggccaccgagggattcacctccgggcgacactattgggaagttgaagtcggtgataaaacccattgggcagtaggggtgtgcagagactccgtgtcccgtaaaggggaactcacgcccctacctgaaactggctattggcgagtgaggctttggaacggcgataagtatgccgcaacgaccactcccttcacgccccttcatatcaaggtaaagcctaagagagtcggaattttcctggattatgaggctggcacactgtctttctataatgtcaccgacaggagccacatttatactttcaccgacacattcacagaaaaactgtggccgctcttttatccaggaataagggccggtaggaagaacgcggcacccctcaccatcaggccaccaaccgattgggaatag

SEQ ID NO: 245127 - DNA, 1557 bp, synthetic construct
  misc_feature 1..1557: note = Description of Artificial Sequence: Synthetic coding sequence
  source 1..1557: mol_type = other DNA
atggctgagactagcctgcttgaggctggggcatccgccgctagcaccgccgctgctctggaaaatctacaggtggaagcgagctgttctgtctgtcttgaatacctgaaagagcccgtcataatagagtgcggtcacaatttttgtaaggcatgcattacacggtggtgggaggatctggaacgcgactttccgtgcccagtatgccggaaaacctctagatatcggagtctccggccaaaccgccagttaggaagcatggtggagatcgccaagcagctacaggccgtaaaacgtaaaattcgagacgaaagcctgtgcccccaacaccatgaggcactctctctgttctgttatgaggaccaggaggccgtttgcttaatctgtgctatttcccacactcaccgcgcacacaccgttgtgccactggacgatgctacccaggagtataaggaaaagctccagaaatgcctcgagcccctagaacagaagctacaagagattacccgttgtaaatcttctgaggaaaaaaagcctggcgagttgaaacggcttgtggagtcacggcgtcaacaaatcttacgggaattcgaagaactacaccggaggctagatgaggaacagcaggtactgcttagccgcctggaggaagaggaacaggacatcctgcaacggctcagagaaaacgcagctcatctgggtgacaaacgaagagatttggcccatctggcagcagaagtcgagggaaagtgcctccagtctgggttcgaaatgctgaaagacgtcaaaagcacactggagaagaatatcccgcgaaagttcgggggtagcctctcaacaatctgccccagggaccataaggcccttctggggttagtgaaggagattaataggtgcgaaaaggtcaagaccatggaagtaacaagtgtgtccatcgagctggagaaaaacttttcaaactttccaagacagtatttcgctcttaggaaaatactgaagcaattgatcgcggacgtgaccttggaccctgagacggcccaccccaatctggtgttgtcagaagacagaaaaagcgttaaattcgtagagactcgccttagagacctgcctgatacacctagacggttcaccttctacccatgcgttctcgctactgaaggtttcactagtggacgacattactgggaagtggaagtcggcgacaaaacccactgggcagtcggagtatgcagggactccgtgtcccgcaagggtgaactcactccccttcctgagaccggatactggcgtgtgaggctttggaatggcgataagtacgccgcaactaccacgccctttacccccctccacattaaggttaaacccaaacgggtggggatctttctggattacgaagctggcaccttgtccttctataacgtcaccgaccgatcccacatctacacattcaccgacactttcaccgagaagctgtggccattgttttatccgggaattcgcgctggtagaaaaaacgctgctccactgacgatacggcctcccaccgactgggagtag

SEQ ID NO: 245128 - DNA, 1467 bp, synthetic construct
  misc_feature 1..1467: note = Description of Artificial Sequence: Synthetic coding sequence
  source 1..1467: mol_type = other DNA
atggccgaaacatcactactggaggcaggtgccagcgccgcatctaccgcagccgctttagagaacctgcaggttgaagcttcttgttcagtgtgcctggagtacctcaaggagccagtcattatcgagtgcggacacaatttttgcaaagcgtgtatcactcgctggtgggaagacctggaacgggatttcccctgcccagtgtgccggaaaactagccggtaccgttccctgcggccaaaccggcaattgggatcgatggtggagattgccaagcagctacaggctgtaaagcgcaagatccgagatgagtccctgtgccctcaacatcatgaagcattatccctattctgctacgaagaccaggaagctgtgtgtctgatctgtgccatatctcacacccacagagctcacaccgtcgtgccattagacgatgcaacccaagagtacaaagaaaagctccagaagtgccttgagcctctggagcaaaagctgcaagaaataacaaggtgtaagtcctccgaggaaaagaagcccggtgagctgaagcgcttggtcgagtcccgcagacagcaaattttgagggagttcgaggagctgcaccgacgcctcgacgaagaacagcaggtattgcttagtaggctggaagaggaagagcaggacattttgcaaaggcttagagaaaacgccgcacacctgggcgataagaggagggatcttgcccatctggctgccgaggtcgagggtaaatgcctgcagagtggcttcgagatgctcaaggacgtaaaatctactcttgaaaaatgcgagaaggtgaagacaatggaggtgacttcagtgtctattgaactcgagaagaatttctctaatttcccgagacagtattttgccttgaggaagattctgaaacagctgatagccgacgtgactctggacccagaaactgcccatcctaatctagtgctatcagaggacagaaaaagcgtgaaatttgtggaaacgaggttaagggacctcccagacacacctcgtcggttcaccttttatccctgtgtactggccacagaggggtttacaagtggcagacattactgggaggttgaggtcggcgacaagacccattgggccgttggagtctgccgtgattcagtctcccgcaaaggggagctcacaccattaccagagaccgggtactggcgggttcgcctgtggaatggagacaagtacgccgcaactacgactcccttcacaccattacacatcaaggtaaagcccaagcgggtcggcatattcctggactacgaggccggaacactgtctttttataacgtcaccgatcggtcccatatctatacattcactgatactttcacagagaaattatggccactcttttatcccggaattcgagccggaaggaagaacgcagcccctcttactatccggcctcccacggactgggagtag

SEQ ID NO: 245129 - DNA, 435 bp, synthetic construct
  misc_feature 1..435: note = Description of Artificial Sequence: Synthetic coding sequence
  source 1..435: mol_type = other DNA
atggcagagacaagtctcctcgaggccggagcaagtgctgcatctacagcagctgccctggagaatttgcaggtcgaggcatcttgttctgtatgtcttgaatacctgaaggagcctgtcattatagaatgcggccacaatttttgcaaggcctgcattactcggtggtgggaagatcttgaaagagacttcccttgccccgtatgccgcaagacctcgcggtaccggtccttaaggcctaatagacagctggggtccatggtagagatcgctaaacagctacaagcagtgaagcggaagattcgggacgagtccctgtgcccacaacaccatgaagcccttagtcttttctgctacgaagatcaggaggctgtatgcctgatctgtgccataagtcatactcatcgcgctcataccgtggtgccactggattag

SEQ ID NO: 245130 - DNA, 435 bp, synthetic construct
  misc_feature 1..435: note = Description of Artificial Sequence: Synthetic coding sequence
  source 1..435: mol_type = other DNA
atggccgaaacatccctgcttgaagccggtgcttccgccgctagtactgctgccgctctggaaaatctgcaggtagaggcaagctgcagcgtttgtcttgagtatctcaaagaaccagtgattattgagtgcggacacaatttctgcaaggcgtgtattactaggtggtgggaagacctggagcgggatttcccatgccctgtgtgccgaaagacttcaagatatcggtctctcagacctaaccgccaactggggtctatggtggagatcgctaaacagctacaggccgtgaaaagaaaaatccgcgacgagtccttgtgccctcaacatcacgaagccctttccctgttctgctacgaagaccaggaggctgtctgcctgatttgtgctatctctcatacgcatcgagcacacactgtggtgccgcttgattag

SEQ ID NO: 245131 - DNA, 684 bp, synthetic construct
  misc_feature 1..684: note = Description of Artificial Sequence: Synthetic coding sequence
  source 1..684: mol_type = other DNA
tgaacctccaggtatcggagtctcagacctaaccggcaactgggaagcatggtggagattgcaaaacagttgcaggcagtcaaacggaagatccgggacgagagcctgtgcccccaacatcacgaggcattaagtctcttctgctacgaggaccaggaggctgtttgcctaatctgcgcaatctctcacacacaccgtgcccacaccgttgttccacttgatgacgccactcaggaatataaagaaaaactgcagaagtgcctggagccactggagcagaagctgcaggaaataacccgatgcaagtcgtccgaggagaagaaacccggtgaactgaaacgtttggtggaaagtcgcaggcaacaaatactgagggagtttgaggaactgcaccggcgactggatgaagagcagcaggtgcttctctccaggctggaggaagaagagcaggacatccttcagcgattgcgagaaaacgctgcccacctgggagataagcgtagagacctcgctcatctggccgcagaagttgagggcaagtgcctgcagagcggcttcgaaatgctgaaggacgtgaagtccaccctggagaagtgtgagaaggtgaaaaccatggaggttactagcacaaccccatgcacctctctgcactctgaaattaatgataatgtgcgagggagatag

SEQ ID NO: 245132 - DNA, 147 bp, synthetic construct
  misc_feature 1..147: note = Description of Artificial Sequence: Synthetic coding sequence
  source 1..147: mol_type = other DNA
atggccgagactagcttgttggaagccggagcctcagccgcttctactgcggctgcgttggaaaacctccaggttgaggcctcgtgctcagtgtgtctggaatatctcaaagaacccgtgataatcgagtgcggtcataatttttag

SEQ ID NO: 245133 - DNA, 435 bp, synthetic construct
  misc_feature 1..435: note = Description of Artificial Sequence: Synthetic coding sequence
  source 1..435: mol_type = other DNA
atggcagaaactagcctgctggaggccggagcatctgccgcttctactgctgcagctctggaaaacctgcaggttgaggccagctgctccgtatgtcttgaatatttaaaagagccagtgattatcgagtgcggccataatttttgtaaagcctgcattaccaggtggtgggaggatcttgagcgcgattttccctgccctgtctgtcggaaaacctcaagatatcggtctttgcggcctaataggcagctcggctccatggtggaaatagctaagcagctgcaagccgtaaagcggaagattagagatgaaagcctgtgtccccagcatcatgaggctctcagcctcttctgttatgaagatcaggaggccgtgtgtctcatctgtgccattagccatacccaccgggctcataccgtagttcctctagattag

SEQ ID NO: 245134 - DNA, 1467 bp, synthetic construct
  misc_feature 1..1467: note = Description of Artificial Sequence: Synthetic coding sequence
  source 1..1467: mol_type = other DNA
atggccgagacgtccctgctagaagccggagctagtgcagctagtaccgcagctgccctggaaaatctccaggttgaagcctcttgctctgtgtgcctcgagtacctgaaagagcccgttataattgagtgtggtcataatttctgtaaggcgtgtatcaccaggtggtgggaagacctagaaagggacttcccctgtcctgtgtgcagaaagacaagtcggtatcggagcctgcgcccaaaccggcagctgggttcaatggtagaaatagcgaaacagctacaggcagtaaagcgcaagatacgagacgagtccctgtgtcctcaacatcacgaggctcttagcctgttttgttacgaggaccaggaggccgtgtgcctgatctgtgctatctcccacactcatcgggcacatacagtggtcccactggatgacgctacacaagagtacaaggagaaactccaaaagtgcctggagcctttggagcagaaactccaggagattacacggtgcaaatcttcggaggaaaaaaagccgggagagctgaagcgtcttgtcgagagtaggcggcaacagatcctcagggagttcgaggagctgcatcggagactggatgaggaacagcaagtgttactttctaggctggaggaggaagagcaggacatcttgcaaaggttaagagagaacgccgctcacctgggcgataagcgaagggatctagcccatcttgctgctgaagttgaaggaaagtgcctccaaagtggattcgaaatgctaaaagatgtgaaatccaccctggagaaatgcgaaaaagtaaaaacgatggaggtgacatcagtgtcgatcgagttggagaagaatttttccaacttcccaagacagtattttgccctgcgtaaaatcttaaaacagttgatcgcagatgtgaccctggatcccgaaacagcccatcctaacctggtcctgtccgaagaccggaagagcgtgaaattcgtggagacaagacttcgcgacttgccagacacccccaggcgtttcactttttatccttgtgttttggccacagaggggtttacatctggccgtcactattgggaagtggaggttggcgataaaacacactgggccgtaggcgtctgccgcgactccgtcagcaggaagggagaactgactcccctgccagaaactggctattggagagtgagactatggaacggcgacaagtatgctgccacgaccacaccctttactcctctgcatatcaaagttaagcccaagcgcgtcggaatctttctcgattacgaggcaggcactctctcattttacaatgtcactgaccggtcccacatatataccttcaccgatactttcactgaaaagctgtggccacttttttatccagggattagggctgggagaaagaacgctgccccattaactatcagacccccaactgattgggaatag

SEQ ID NO: 245135 - DNA, 1467 bp, synthetic construct
  misc_feature 1..1467: note = Description of Artificial Sequence: Synthetic coding sequence
  source 1..1467: mol_type = other DNA
atggctgagacctcactcctggaagcaggcgcaagcgccgctagcactgccgcagctctggaaaacctccaggtggaggccagctgttccgtgtgtctggagtacttgaaagaacccgttataatagagtgtggtcataacttttgcaaggcgtgcataacgcgctggtgggaagaccttgagagagattttccatgtcctgtctgccggaagacttctcggtaccgcagtctgcgtccgaacagacaactaggatccatggtcgagatcgccaagcagctacaggctgtcaaacggaagatccgcgacgaatccctgtgtcctcagcaccatgaagccttatcacttttctgctacgaagaccaggaagctgtgtgtttgatctgcgcaatatcgcacactcatagggcacacaccgttgtgccacttgatgacgctacccaggaatacaaggagaaattgcagaagtgtctggagcccctggagcagaaactacaggaaataaccaggtgcaaaagttccgaggaaaagaagccaggggaattgaagcgattggttgaaagcagacgccagcagatacttagagagttcgaggagttgcaccgaagacttgatgaagagcagcaggtcctgcttagccgactggaagaggaagagcaggatattttgcaaagactgagagagaacgcagcacacctgggcgataagcgtagagatctggcacacctggcagctgaagtcgaggggaaatgtttacagtcggggttcgagatgctcaagccggtgctgtctgccagagaggaatgcgaaaaagtgaagacaatggaggtcacatccgtgtcaatcgagcttgagaaaaacttttctaattttccacggcaatattttgcactgaggaagatcctgaaacagctcatcgccgacgtcactctggatcctgagactgcccacccaaacttggtgctgagcgaagaccgtaaatccgtaaaatttgtagaaacacgacttagagacttgcctgacacgccccgtaggttcaccttctacccctgcgtcctagccaccgagggtttcacatctggacgtcactactgggaggtcgaagtgggcgacaagacacactgggcagtgggagtgtgtagagactccgtgtcccggaagggcgaactcacacctctgccagagaccggatattggcgggtcaggctgtggaatggggacaaatatgcagccacaacaactccatttaccccactacatattaaggtgaagccaaagcgagtgggcattttcctggactatgaagcaggaaccctttcattttataacgtgaccgacagaagtcacatttacacatttacagacactttcactgagaagttatggccacttttttaccccggtataagggcaggtaggaagaacgcagccccattaactatcaggcccccaactgattgggagtag

SEQ ID NO: 245136 - DNA, 1557 bp, synthetic construct
  misc_feature 1..1557: note = Description of Artificial Sequence: Synthetic coding sequence
  source 1..1557: mol_type = other DNA
atggcagagacatctctgctagaggccggagctagcgccgcttcgactgcagcagcactcgagaaccttcaggtcgaagcctcctgttctgtgtgtttggaatatctgaaggagccggtgatcatagaatgtggccataacttctgcaaagcgtgtattacccggtggtgggaagacctcgagagagactttccttgtcctgtttgcaggaaaacctctaggtacagaagtctgcggcctaaccgtcaacttggctcaatggttgagatcgcaaaacaactccaagccgtgaaaaggaaaattagggacgaaagtctgtgtcctcagcatcacgaggcactttctctgttctgttatgaagaccaggaggccgtgtgtttgatttgcgcgatctctcacacccatagggctcacaccgtcgtgccactggatgatgccacacaagaatacaaggagaagttacagaagtgtctggaaccactcgagcagaaacttcaggagatcaccaggtgtaagtcttccgaagagaagaagccaggagagctgaagcgtctagtcgaaagccggagacagcaaatcctccgagaattcgaggaactgcatcggaggcttgacgaagagcagcaggtgctgctaagtaggcttgaagaggaggagcaggacattctccagaggctgcgcgaaaatgctgcacacctgggcgacaaaagaagagatcttgcccacttggccgcagaagtcgagggcaagtgccttcagagcggctttgaaatgttaaagccggtgctttcagcgagggagaagaatataccacggaagttcggtggctctttgtcgacaatctgccctcgtgaccataaggctttgcttggactggtgaaggaaatcaacagatgtgaaaaagtaaagacgatggaggttaccagcgtttcaatagagctggagaaaaatttcagcaactttcctcggcagtacttcgcactgagaaaaattctcaagcagctgattgccgatgttaccctcgatccagagaccgctcacccaaatctggtactaagcgaagacagaaaatcagtgaagtttgtggaaactcgcctgcgagacctccctgacactccacgacggttcaccttttacccatgcgtcctggcaaccgagggatttaccagcggccgtcattattgggaggtagaagttggcgataagactcactgggccgtcggcgtttgcagagatagcgtatcgcgcaagggggagcttacccccctgcctgaaactggatattggcgcgtcagactgtggaatggagataagtacgccgcaacaactactccttttacacccctgcacatcaaagtgaaacctaagcgggtgggcatcttcctggactatgaagcaggcactttatcattttacaatgttaccgataggagtcacatttacaccttcacagacacgtttacggagaagctgtggcccctgttttatccaggcatcagggcaggacggaaaaacgcagctccactaacgattcgcccacccacagattgggagtag

SEQ ID NO: 245137 - DNA, 1236 bp, synthetic construct
  misc_feature 1..1236: note = Description of Artificial Sequence: Synthetic coding sequence
  source 1..1236: mol_type = other DNA
atggcagagacgagcttgttggaagctggggcatctgccgctagtaccgctgctgcccttgagaatctgcaagtggaggctagctgtagtgtgtgtctggagtatctgaaagagccagttatcatcgaatgcggacacaatttctgcaaggcctgcattactagatggtgggaggacttagagagggactttccatgccccgtctgcaggaagacctctcgctaccgatcactgagaccgaatagacagcttggaagcatggtggagattgcgaagcaactgcaggccgtgaagagaaaaataagagacgaatctttgtgccctcaacaccacgaagcactttccctgttttgctacgaggaccaggaagccgtgtgtttgatttgcgccatctcccatacacaccgagcccataccgtagtgcccctagatgacgctacacaggagtacaaagaaaagttgcaaaagtgcctggaaccactcgaacagaagttacaagagattactcgttgcaagagctccgaagaaaaaaaacccggtgagctgaaacggctcgtggaatccaggcggcaacagatcctccgggaattcgaggagctccatcggagacttgacgaggagcagcaggtcctcctcagtcggctagaggaggaagagcaggacatcctgcagcgattgcgagagaatgccgctcatctcggggacaaacgaagggatctggctcacttagcggctgaggtcgaaggtaagtgcttgcaatcgggatttgaaatgctgaagccagtcctatctgcaagggaggagtgtgaaaaagtcaagacaatggaggtgacaagcgtttcaatcgagctcgaaaaaaactttagcaatttccctcgccagtatttcgcactgcgtaaaatactgaaacaactgatcgcagatgttaccctcgacccagagacggcccaccctaatctcgtgctgtccgaggacaggaagagcgtcaagttcgtcgaaactcgtttgcgggacctccctgatacacctcggaggtttaccttttacccctgtgtccttgccactgagggctttaccagcggccgtcattactgggaagtagaggtgggggacaagactcactgggctgtgggtgtctgcagagattccgtgagccgcaaagggggatgtggatacgggatgggcactaatatgcagcctccaccccacctgcttcctctctgcacttcccgatag

SEQ ID NO: 245138 - DNA, 1557 bp, synthetic construct
  misc_feature 1..1557: note = Description of Artificial Sequence: Synthetic coding sequence
  source 1..1557: mol_type = other DNA
atggccgagacctcactgttggaggctggtgcctcggcggctagcacagctgcagccttggaaaacctgcaggtggaggcttcatgttcagtgtgccttgaatacctcaaggaacctgtaatcatcgagtgcgggcataatttctgcaaagcttgcattactaggtggtgggaggaccttgaacgagattttccctgccccgtgtgccggaaaactagtcgctaccgcagtcttaggcctaaccgccagttggggtctatggtggagattgccaagcagctccaggctgttaagcgaaagattcgggacgaatccctgtgcccacagcatcatgaggcactgtctttgttctgttacgaggaccaagaagccgtgtgcttaatttgcgctatctcgcacacacaccgagcccacacagtggtgccgctggacgacgctacccaggaatataaagaaaagctgcagaaatgccttgagcccttggagcagaaactccaagagatcacgaggtgtaagtcaagcgaggaaaaaaagcccggagaactcaaaaggctcgtcgaatctcgacggcaacagatcctaagagaatttgaagagctccaccgtcgcctggacgaagaacaacaagtgctgctctcccgtctcgaagaggaggagcaggacatcctgcagcggctcagagaaaacgccgcacacctgggcgataagagacgagacctggcacacctggccgctgaggtggaagggaagtgccttcaaagtggattcgaaatgctcaagcctgtcctgagtgctcgggaaaagaacattcccagaaaatttggaggcagcctatctacaatctgccccagggaccataaagccctgttaggacttgttaaagagattaatcgatgcgagaaagttaagaccatggaggtgacgtccgtgtctattgagctcgaaaaaaacttcagtaatttccccaggcaatattttgctctcagaaaaattctgaagcagctgatcgccgacgtgactctcgaccccgaaaccgcccaccctaacctggttctgagcgaggatcgaaaaagtgtgaagtttgttgagacaaggcttagagacctgcctgatactccccgaaggtttacgttctacccctgcgttctcgctaccgaaggatttacaagcggtagacattattgggaggtggaagtgggtgacaagacacactgggctgtgggggtatgcagagactcggtgtcaaggaagggcgaattaactcctttgccagaaacagggtactggcgcgttcgactgtggaatggggacaagtacgcggctactactacaccctttaccccgttacatatcaaagttaagcccaaaagggtgggcatcttcctggactacgaagctgggacactttccttttacaatgtgacagaccgctctcacatttacaccttcacagacacgttcactgaaaaactttggcctcttttttatcctggcattagagcaggacgaaagaacgctgctccactcacaatcagacctcctaccgactgggagtag

SEQ ID NO: 245139 - DNA, 1467 bp, synthetic construct
  misc_feature 1..1467: note = Description of Artificial Sequence: Synthetic coding sequence
  source 1..1467: mol_type = other DNA
atggcagagacttcactcctggaggctggggcatccgcggcatctacggcagccgcactcgaaaatctccaggtggaggctagctgctcagtctgcctggaatatctcaaggagccagtgattatcgagtgcggccataatttctgtaaagcatgcataacacgctggtgggaagaccttgaacgcgattttccctgtccggtctgcaggaagaccagccgttaccggtcacttagacccaatcgacaactggggagcatggtcgaaatagccaaacagttacaagcagtgaaacgcaaaattagggacgagtccctgtgtccccaacaccacgaagccctgtccctgttctgctacgaagaccaggaagcagtgtgtcttatctgtgcaattagccacacccatcgggctcacactgtggtgccacttgatgatgccacccaggaatacaaagagaagctgcagaagtgcttggaaccattagaacaaaaactgcaagagattacccggtgtaagagtagcgaggagaaaaaaccaggggagctgaagaggcttgtggaatctagaaggcagcagattttgcgggagtttgaggaacttcatcgcaggctggacgaggagcagcaagttctgctgtccaggctcgaagaagaggaacaggacatccttcagagacttcgagagaacgcggcacatctgggtgataaacggcgtgacctcgcacatcttgctgccgaagtggagggaaagtgtttgcagtcagggttcgagatgctgaagcccgttctcagcgctagagaggagtgtgagaaggtcaaaaccatggaggtgactagtgtatccatagagttggagaaaaatttttcaaatttcccaagacaatatttcgccctacgcaaaattttgaagcaactgatcgccgatgtaacattggaccctgaaactgcacatcccaacctagtactctctgaagaccgtaaaagtgtgaaattcgtggagacacgactgagggacttgccagacactccaagacgattcactttctacccttgtgtgctcgctaccgaagggttcacctccgggagacactactgggaggtggaggttggtgacaaaactcattgggcagttggggtgtgtagggatagtgtctcccgcaagggcgagttgactccactgcccgagactggctactggagggtgaggctgtggaatggcgacaaatacgctgccacaacaacccctttcaccccactccacattaaggtgaaacccaagcgcgttggcatcttcctcgactacgaagctggtaccctgagtttctacaacgtgaccgatagaagtcatatctacacctttaccgatacatttacagagaagttatggcctctgttttacccaggtattagggcagggaggaagaatgccgctccactcactatccgccctcccacagattgggagtag

SEQ ID NO: 245140 - DNA, 1557 bp, synthetic construct
  misc_feature 1..1557: note = Description of Artificial Sequence: Synthetic coding sequence
  source 1..1557: mol_type = other DNA
atggcagaaacaagcctactggaagccggtgcatcggctgcaagcactgctgccgcactagaaaaccttcaagtggaggccagttgcagcgtgtgtctggagtacctaaaagaacctgttattatcgagtgcgggcataatttttgcaaagcctgtattacacgctggtgggaagatctggaacgagacttcccatgccctgtgtgcagaaagacctctagatatagatctctccgccctaaccgacagctcgggagcatggtagaaatcgctaagcaactccaagcggtgaaaagaaagatccgcgacgaaagcctatgtcctcagcatcacgaggcattaagcctgttctgttacgaggatcaggaggcagtttgcctgatttgcgccattagccacactcatcgggctcacaccgtcgtgcccctcgacgacgccacccaggagtacaaagagaagcttcagaagtgcctggagcctttagaacagaaactgcaggagatcacacgctgtaagtccagtgaggagaaaaaacctggggagctgaagcgcctggtggaaagccgaaggcagcagatcctgagagagttcgaagagttacatagacggcttgatgaagagcaacaggtgctgttatccagattagaggaggaagaacaggatattttacagcgactcagggaaaacgctgctcatctgggagacaaacggcgagaccttgcgcacctggctgctgaagtggaggggaaatgcctccagtctggctttgaaatgctgaaagacgttaagagtacactggaaaagaatattcccagaaaattcggcggtagccttagtaccatctgccccagagaccacaaagccctgttaggcctcgtgaaagagatcaaccgttgcgagaaggttaagaccatggaagtgacttcggtgtccatcgaactagagaagaatttttctaattttccccgacagtacttcgccttgagaaaaattttgaagcagctgatcgcggatgttacgctggaccccgagacggcccacccaaatttagtgctttctgaagatagaaagagcgtaaagtttgtggagaccagactaagggacttgcccgacactccaaggcgattcacattctatccctgcgtccttgctacggaaggctttacgtctggtaggcactactgggaagtagaggtgggggacaagacccactgggcggtgggcgtttgtagagactcggtaagcaggaagggagaacttacccccctgccggaaacaggatactggcgggtgaggctctggaacggagataaatatgcagccacaaccacaccttttactcccttgcatatcaaggttaaacccaagcgcgtcgggatatttttggactatgaggccggtactctctcattttacaatgtaaccgatagatctcatatctacacttttacggacaccttcacagagaagctctggcccctattctatccaggaattcgtgccggtcgaaagaacgccgctcccctaacaatccggccacctacagactgggagtag

SEQ ID NO: 245141 - DNA, 1467 bp, synthetic construct
  misc_feature 1..1467: note = Description of Artificial Sequence: Synthetic coding sequence
  source 1..1467: mol_type = other DNA
atggctgagacgagcttgctggaagccggagcatctgctgccagtactgcagctgctctggagaacctgcaggtggaggctagctgtagcgtgtgtctggagtacttaaaggaaccggtgattattgaatgtggccacaacttctgtaaggcatgcatcacccggtggtgggaggatttagagcgcgactttccttgtccagtgtgcagaaaaacctctaggtaccggtctctccgcccaaatagacaactgggatctatggttgagatcgcaaaacagctccaggccgtgaagaggaagataagggacgagagtctgtgcccccaacaccatgaggccctcagtctgttttgttatgaggaccaggaagcagtttgcctgatttgtgccatctcccacactcaccgagcccacactgtggtacctctcgatgatgccactcaggaatataaggaaaagctgcaaaagtgtctcgagcccctcgagcaaaaattacaggagatcacacggtgtaaatccagcgaggagaaaaagcctggagagctgaaacgccttgttgagtcacgacggcagcaaatactgagagagttcgaggaactgcatcgcagactagacgaggagcagcaagtcttactatcaaggctggaggaagaggagcaggatatcctgcaacggctccgcgagaacgctgcgcacttgggggataagagaagagatctcgcccatttggcggctgaagtcgaaggcaagtgtctccagtcagggttcgaaatgcttaagcctgtccttagcgcccgagaagaatgcgaaaaggttaagacgatggaggtcaccagcgtttctatcgagctggagaagaatttcagtaattttccaagacagtatttcgccttgagaaaaattctcaagcagctgatcgccgatgtgacgcttgatccagaaactgcccaccctaatctggtgctcagcgaggatagaaagtcagtcaaattcgtggagacacggctgcgcgatctgcccgacaccccacggcgttttacattctacccttgcgtcctggccacggaaggtttcacgagcggacgccactactgggaggtcgaggtcggcgacaagacccattgggccgtcggggtgtgcagagactcagtgtcacgtaaaggggaattaacccccctccccgaaactggttattggcgggttcgactttggaatggtgacaaatacgctgcaacgaccaccccttttacccccctccatatcaaggtgaaacccaaacgtgtgggaatttttctagactacgaagccggaacattgtcattctataatgtcaccgaccgcagccacatttatacctttacagataccttcacggaaaagctgtggcctctcttctatccgggaattagagctgggcgtaagaatgctgcaccgctcacaattcggccacctacagactgggagtag

SEQ ID NO: 245142 - DNA, 1467 bp, synthetic construct
  misc_feature 1..1467: note = Description of Artificial Sequence: Synthetic coding sequence
  source 1..1467: mol_type = other DNA
atggcagaaacaagcctgcttgaggccggagcatcggccgcttccacggccgcagcactcgagaatcttcaggtggaggcgtcctgtagtgtgtgtctggaatacctgaaggaaccagtaattatagagtgtggacacaacttctgtaaggcctgcatcactagatggtgggaggacctggagcgcgacttcccttgtcctgtgtgccggaaaaccagcaggtatcgaagtctgcgacccaatcgtcagctagggtccatggttgaaatagccaagcagctacaggcagtgaaacgtaaaatccgtgacgaatcgttgtgccctcagcaccatgaggcactctctctgttctgttatgaggatcaggaagctgtctgtctcatttgtgccatttctcacacccatcgggcacataccgtcgttcccctcgatgatgctacccaggaatacaaagaaaaattgcagaagtgtctggagcccctggaacagaaactgcaggaaatcacgcggtgtaaatcttcagaggagaaaaaaccgggagagcttaaaaggctggtcgaaagtagaaggcagcagatcctgagagagttcgaggagctgcaccggagactggatgaggagcagcaggtgctcttgtcgaggctggaggaagaggaacaggacatcctgcagcgcctgagagagaacgccgcacatttgggcgataagagaagagacttggctcacctggcagccgaagtggaaggaaagtgtctccaaagcggttttgaaatgctgaaaccagtcctgtcagccagagaagagtgtgaaaaagtgaagaccatggaggtgacatcggtctctatcgaactggaaaagaacttctctaacttcccccgacagtatttcgccctccgcaaaattctcaagcagctcattgccgatgtgacactggaccccgaaacagcgcaccccaatcttgtgcttagcgaggacagaaaatctgttaagtttgtggagacgcggctcagggacctccctgatacccccagaaggtttaccttctacccttgtgtcctagccaccgagggctttacatcaggacggcattattgggaagttgaagtcggtgacaagacacattgggccgtcggagtttgcagggattccgtgagcagaaagggggagttgacccctctccccgaaaccgggtactggagagtgagactgtggaatggagacaagtatgcggctaccaccaccccttttacacctctgcatatcaaggtaaagccaaagagggtgggcatatttctcgactacgaagcaggaaccctgagcttttacaatgttacggaccgctcccatatatatacgtttacagacacctttaccgagaagctgtggcctctgttctaccctggtatacgtgccggaagaaaaaacgccgctccactcaccattagacctccaaccgactgggagtag

SEQ ID NO: 245143 - DNA, 1467 bp, synthetic construct
  misc_feature 1..1467: note = Description of Artificial Sequence: Synthetic coding sequence
  source 1..1467: mol_type = other DNA
atggctgagaccagtctacttgaagcaggtgcctctgcagcctcaactgccgcagcactggaaaacctgcaggtggaggcctcttgctccgtgtgcctagaatacctgaaagaacccgtgattatcgagtgcggacataatttctgtaaagcctgcattacacgctggtgggaggatctggagagggatttcccttgccctgtgtgtagaaagacttcccgatatcggtctcttagaccaaaccggcagctaggctccatggtcgagatcgctaaacagctgcaggcagttaagaggaaaattagggatgagtctttgtgcccgcaacaccacgaggctttgagcctgttctgctatgaggatcaagaggctgtctgcctgatatgtgccattagccatacccaccgagcccacactgtcgtgcccctagacgacgctacccaggagtacaaggagaaactgcagaaatgtctcgaaccattggaacaaaagttacaggaaatcaccaggtgcaaatcatcggaagagaaaaagccaggcgagctcaagcggcttgtggagagcaggaggcaacagatcctccgagaattcgaagagttgcatagacgtcttgatgaggagcagcaagtcctcttgagtcgacttgaagaagaggagcaagatatcttgcagcggctaagagaaaatgccgcacatttgggggataagagacgcgaccttgcccacctcgccgctgaagttgagggaaagtgtctgcagtccggcttcgagatgctgaagccagtgttatctgcacgcgaggaatgtgagaaggtgaaaacaatggaggtcacttcggtcagcatcgagctggagaagaatttttcaaactttcccagacagtacttcgcactgaggaagattctgaagcagctcattgcagatgttaccttggaccccgagactgcacatcccaaccttgtgttaagcgaggaccgaaaatccgtgaagtttgtagaaacccggcttcgggatctgcctgatacccctaggcgattcacattctacccttgcgttcttgctacagagggatttactagtggtcgtcactactgggaggttgaggtgggtgacaagacccattgggctgttggggtgtgccgggattcagtgtctagaaaaggagagcttacacctctgcccgagacaggatattggcgtgttcgattgtggaatggggacaagtatgccgctacaacaacaccctttacgcctttacacatcaaggttaaacctaagcgcgttggcatattccttgactatgaggcaggaacgctgtctttttataatgtaaccgaccggagtcatatctacacgtttaccgacacctttactgaaaagctttggccgttgttctacccaggcatcagagccggaaggaagaatgccgctcctctgaccattcgcccaccgactgactgggaatag

SEQ ID NO: 245144 - DNA, 1557 bp, synthetic construct
  misc_feature 1..1557: note = Description of Artificial Sequence: Synthetic coding sequence
  source 1..1557: mol_type = other DNA
atggccgaaactagcctcctggaggctggagcatccgcagcctcaacagcagcggcactggagaaccttcaggtagaagctagctgctcagtgtgcctcgaatacttgaaggaacctgttattattgagtgcggccacaacttttgcaaggcatgcattacaagatggtgggaagacctggagagggattttccatgtcctgtttgtcgtaaaacttcacgctaccgtagcctcagacctaataggcagttgggtagcatggtcgaaatagccaagcagctgcaggccgtgaaaagaaaaattcgtgacgagtcactgtgtccacaacaccacgaggctttatcgctgttttgctacgaagaccaggaagccgtctgcctgatctgcgcgatttctcacacgcacagagcccacactgtcgttccactagatgacgcgacgcaggaatataaggaaaagctccagaagtgtctggagccactcgaacagaaactacaggagataactcgctgtaagtcatccgaagaaaaaaaacctggcgagctgaagcggctggtggagagtcgtcgtcagcagatcttacgggaattcgaggagctccatcgacggcttgacgaggagcagcaggttctgctgtcacggttggaggaggaggagcaggacatcctgcagcgcttgcgcgagaacgcagcccatttaggagataaacgaagggatctggcgcacctggcagcagaagtcgaagggaagtgtctccagtctggatttgagatgcttaaagacgtaaagtcaactttagagaaaaacatacctagaaagttcggcggatcactctcaactatttgtccaagagatcacaaggctctgctgggactggtcaaggaaatcaaccgttgcgaaaaggtgaagacaatggaggttactagcgtgtcaatcgaactggaaaagaatttttcgaacttcccaaggcagtacttcgcattacggaagatattgaagcagctgatcgcggacgtgaccttggatcccgagaccgcccaccccaacctggtgctgtccgaggacagaaagtctgtaaaattcgtggaaaccagactaagggacctaccagacacacccagaaggtttaccttttatccctgcgttctggctactgaaggcttcacaagtggacggcactattgggaggtggaggtcggtgacaagacacattgggccgtgggcgtctgccgcgactctgtgtcaaggaagggcgaactcaccccattgcccgagactggttattggagggttagactgtggaatggggacaagtacgctgccactacgacccctttcacccccttgcatatcaaggtgaagcccaagcgagtgggtatttttctcgactacgaggccggtactttgtcattttacaatgttacagaccgcagccacatttacacatttactgacacattcacagagaaactgtggcctctgttctaccccggaatccgggctggcagaaaaaatgccgctccactcacaattcgacctcccaccgattgggagtag

SEQ ID NO: 245145 - DNA, 1236 bp, synthetic construct
  misc_feature 1..1236: note = Description of Artificial Sequence: Synthetic coding sequence
  source 1..1236: mol_type = other DNA
atggccgaaacaagcctactggaggccggagcgtcggcagcttcaactgctgctgccctggaaaatctgcaggtggaggcaagttgcagtgtatgcctggagtacctaaaggagccagtaatcattgagtgcggacataatttctgtaaggcctgcattacacggtggtgggaagacctcgagcgcgactttccatgccctgtatgccggaaaacttcgcgctacagaagcctaaggcccaataggcagctggggtctatggttgaaattgcgaagcagcttcaggcagtgaagcgaaagattcgtgacgagtccttgtgtccacagcaccatgaagctctgtcactgttctgctacgaggaccaggaggcagtttgcttgatttgtgctatttcccatactcaccgcgcacacaccgttgtgcccctcgacgacgccactcaggagtataaggagaaactgcagaagtgcctcgagcccctggagcagaaactccaggagattacgagatgcaaatcttcagaagaaaagaaacccggtgaactcaaacggctagtggagtcacggagacaacagatactgcgagaattcgaagaattacaccggagactggacgaggagcagcaggtattactgtcacgactagaggaggaagaacaggacatcctgcaacggttgcgcgagaatgcagcccacttgggcgataagcggagagacctggctcacctggccgctgaggttgagggcaagtgtcttcaaagtggcttcgagatgctgaagccagtgctgagcgctagggaggagtgcgagaaggtgaaaacaatggaagtcacaagcgtgagtatcgaattggaaaagaatttttcaaacttcccaaggcagtacttcgcactgagaaagatcttgaaacagctcatcgccgacgtcacccttgatccggagacagcacatcccaacttggtgttgtccgaagaccgcaagtccgtgaaattcgtcgagacacgtctgcgagatcttccggacacgcctcgacggttcacattttatccctgcgtcctggctacagagggctttacttctgggcgacactactgggaggtggaggtaggcgataaaacccattgggctgtgggagtgtgccgggattctgtgtcccgcaaaggtggatgcggctatggcatgggcacaaatatgcaacctcccccacatcttctccccctttgcacaagtagatag

SEQ ID NO: 245146 - DNA, 1557 bp, synthetic construct
  misc_feature 1..1557: note = Description of Artificial Sequence: Synthetic coding sequence
  source 1..1557: mol_type = other DNA
atggctgaaacctctctgctggaggctggggcaagcgccgcaagtactgccgcagccctggagaatctgcaggtcgaggcgagctgcagcgtgtgtttagaatacctgaaagagcccgtgatcattgagtgcggtcacaacttctgcaaggcttgcattactaggtggtgggaggacctggagcgggatttcccctgcccagtctgcagaaaaacttctagatatcggagcctaagacctaatcgacagcttggcagtatggtggaaatcgctaagcaactgcaggccgtgaaacggaaaataagggatgaaagcttatgcccgcaacaccacgaagcgctgtccttgttttgttatgaggaccaggaagccgtgtgtctgatttgcgctattagccacacccacagagcgcacactgtggtgcctctggacgatgctacccaggagtataaggagaagttgcagaaatgcttggagccgttagagcagaaattacaagagatcacacggtgtaaatcatccgaggagaagaaacctggtgaactgaagcgcctcgtggaaagccgacggcagcagatcctgcgcgagttcgaagaacttcaccgccgattggatgaggagcagcaggtcctgttatcacggttagaagaagaggagcaagacattctccagcggttgcgcgagaacgccgctcacctcggcgataaaagaagggacctggctcacctggcagccgaggtcgagggcaagtgtctgcagagcggcttcgaaatgttgaaaccggtcctctccgccagggagaaaaacatccctagaaaatttggcggtagcctaagcaccatctgtcctagagaccataaagccctgcttgggctggttaaggaaataaatcggtgtgagaaggtcaagacaatggaagtgacctctgtatccatcgagctggagaagaattttagtaacttccccagacagtacttcgcactccgcaaaatcttaaaacagctcattgccgacgtgaccctcgaccctgagacagcccatccgaacctggtgctgtccgaagaccggaaatctgtgaaattcgtggagacacgcttgcgagacctccctgacacacctcggaggttcactttttatccttgcgtgcttgcaacagagggttttacatctggtagacactactgggaagtggaagtcggggacaagacacattgggccgttggcgtgtgcagggacagcgtcagcaggaagggagaactaacacctttgcctgaaaccggatattggagagttaggctgtggaacggcgacaaatatgcggcaacgactacaccttttactcccctgcacatcaaagttaaaccaaagcgggttggcattttccttgattatgaagctggcacgctgtcattctataacgtgacagatcgctctcacatttacacctttactgacacattcaccgagaagctctggcctcttttctatcctggaatcagagcaggcaggaaaaacgcagcccctttgacaattagacctccaactgactgggagtag

SEQ ID NO: 245147 - DNA, 1236 bp, synthetic construct
  misc_feature 1..1236: note = Description of Artificial Sequence: Synthetic coding sequence
  source 1..1236: mol_type = other DNA
atggccgagaccagtctgcttgaagcaggcgcaagcgccgcatctacagctgcagccctagaaaatttacaggttgaggccagctgctccgtgtgtctcgaatatctcaaggagccagtaataatcgagtgcgggcacaatttctgtaaggcctgtataaccagatggtgggaagatttagagagggacttcccatgtcccgtgtgccggaagacctcccggtatcgttcacttaggcctaaccggcagctcggcagcatggtcgagatcgctaaacagttacaggccgtgaagcggaagatcagggacgaatctttatgcccacagcaccatgaagctttaagcctcttttgttatgaggatcaagaggctgtctgtctcatctgcgccatctctcatacacacagagcacatacggtcgtgcctcttgacgatgcgacacaagagtacaaagagaaattgcaaaaatgcttagaaccccttgagcagaagctgcaggagattactcgttgcaagagttccgaggaaaagaagccaggtgagcttaagcggctagtcgaatctcggagacaacagatcctacgggaattcgaagaacttcacagaagactggacgaagagcagcaagtcctgctctccaggttggaggaggaggagcaggacatattgcagaggctcagagaaaacgcagcccatctgggcgacaagaggagggaccttgcccaccttgccgctgaggtcgagggcaaatgtctccaatcaggctttgagatgctgaaacccgtgctgagtgccagggaagagtgtgagaaggtcaagacaatggaagttacgtctgtaagtatcgagctcgagaagaatttctccaatttcccgagacaatactttgctctccgtaagattctgaaacagctgattgcggatgtgactctggatcctgaaacggcccacccaaacctggtgctatcggaagataggaagagcgtcaaattcgtggaaacgagacttcgggatctcccagacactcctcggcgatttactttctacccttgtgtgttggccaccgaaggattcacgtccggacgacactattgggaggtggaggtgggcgataaaacccactgggcggttggagtctgcagagattccgtgtcacgcaagggaggatgtggctatggtatggggacaaacatgcagcccccaccccatctactgcccctgtgtacttccagatag

SEQ ID NO: 245148 - DNA, 1236 bp, synthetic construct
  misc_feature 1..1236: note = Description of Artificial Sequence: Synthetic coding sequence
  source 1..1236: mol_type = other DNA
atggccgagacctcactgctcgaggctggggcatcggcagctagtaccgccgctgccctagaaaatctccaggtggaagcctcgtgttccgtgtgtttggagtatctcaaggagcctgtgattatcgaatgtggtcacaatttctgtaaggcctgtatcacccgctggtgggaggacctcgagagagattttccctgtcctgtctgtcggaaaacatccagatataggtctttgcgcccaaatcgtcagcttggctcaatggtggaaattgcaaagcagctgcaggcggtaaagcgcaaaattagggacgagtctttgtgccctcagcaccatgaagccttgtcccttttctgctatgaagatcaggaagccgtctgtctgatctgtgcaattagccacacacatcgggctcataccgtggtccctctagatgatgcgacacaagaatacaaagagaaactgcagaaatgcctggaacctctggaacagaaactgcaggagattacaagatgtaagagtagtgaagaaaagaagcccggagaactaaaacggttggtcgagagcagacggcagcagatcctacgagagtttgaggagctccacagacgactcgacgaggagcagcaggtgcttctgtcccggctggaagaggaagagcaggacatcctccagaggctgagagagaatgccgctcatttgggagacaaacgccgagatttggcccacctggcggcagaagttgaagggaagtgtctgcagagcggcttcgagatgttgaaaccagtgttatctgcacgggaggaatgcgaaaaggtcaaaaccatggaagtgacatccgtatcaattgaattagagaagaattttagcaattttccaagacagtacttcgcgctccgtaagattctcaaacagttgatcgcggacgtgactctagatcccgaaaccgcccaccccaatctggtcctctccgaggacaggaagtctgtcaagtttgtcgagacccggctgagggacctgcccgacaccccaaggagatttactttctacccgtgtgttctcgccactgaagggtttacctcagggaggcattactgggaagtcgaagtgggcgacaagacgcattgggcagtcggcgtgtgtcgggattccgtatccaggaagggcggatgtggctacgggatgggaactaatatgcagcctccgcctcacctgttgcctctctgcacctcacgctag

SEQ ID NO: 245149 - DNA, 1557 bp, synthetic construct
  misc_feature 1..1557: note = Description of Artificial Sequence: Synthetic coding sequence
  source 1..1557: mol_type = other DNA
atggcagagactagcctactcgaagctggggcttcggctgccagtacggccgcagctctggagaatctccaggtggaggccagttgttctgtgtgtttagagtacctaaaggaacccgtaatcattgagtgcggccataacttttgcaaggcctgcatcaccaggtggtgggaggacttggaacgcgactttccttgtcctgtgtgccgtaaaacctccagatatcgtagccttcgcccaaaccgtcaactgggatccatggtggaaattgccaagcagctgcaggccgtgaagcgaaagattcgggatgagagtctctgtccacaacaccacgaggccttgagcttgttctgctatgaggaccaggaagccgtgtgtctgatatgcgctatctctcacactcaccgagctcacactgttgtgcctttagatgacgcaactcaggagtataaagagaagttgcagaaatgcctggaacccctagagcagaagctgcaagaaataactaggtgcaagtcaagcgaggaaaagaagcctggcgagttgaaacggctggttgagtcccgaagacagcagattctcagagaattcgaggaactgcataggaggctggacgaggaacagcaggtgctcctgtcccgccttgaagaagaagagcaggacattctgcagcgattgcgcgagaatgctgcccaccttggcgacaaaagaagggatttggcccacctggcagctgaggttgaggggaagtgcctgcagtcaggcttcgaaatgttgaaggatgtgaagtcgaccctggaaaaaaatatcccaagaaaatttgggggatctcttagcactatttgcccaagggaccataaagccctcttgggtctggtaaaagagattaacagatgtgagaaggtgaagacaatggaagtcacttccgtttccatagagctggagaagaatttcagtaacttcccccgacagtactttgccctccgcaagatccttaagcagcttattgctgacgtgaccctggatcctgaaaccgctcatcctaacttagtgctgtcagaggaccggaagtccgtgaaattcgtggagacacgacttcgcgatctccccgataccccgagaagattcactttctatccctgtgtcctagccacagagggctttaccagcggcagacattactgggaggtagaggtcggcgataagacgcattgggcagttggcgtgtgccgagactcagtgtcccgcaaaggcgaattaacccccctgcccgaaacgggctactggagagtgcggctttggaacggcgacaaatacgccgcaaccactacaccattcacccccctgcatatcaaggtcaagccaaagagggtggggattttcttggactacgaggctggtactttatccttttataatgtgactgataggagtcacatttatacgttcaccgacacttttacggagaagctatggcctctcttttacccaggcatcagagctggacgaaaaaatgccgcacccctaaccatcaggccccctacagactgggagtag

SEQ ID NO: 245150 - DNA, 1557 bp, synthetic construct
  misc_feature 1..1557: note = Description of Artificial Sequence: Synthetic coding sequence
  source 1..1557: mol_type = other DNA
atggcagaaacttcattgctggaggctggcgcttcggccgcttcgaccgccgctgctctcgagaacctccaagtggaggcctcctgttcagtctgcctggaatatcttaaggaaccagtcattatcgagtgtggacataatttttgtaaggcctgtattacgagatggtgggaagatctggaacgagattttccttgcccagtatgccggaagacctcacgctaccgctctctaagacccaatcgccagctggggagtatggtggagatcgcaaagcaactgcaggcagttaagcgcaaaatcagggacgaaagcctctgtcctcaacatcacgaggcattatcattgttctgttatgaggatcaggaggctgtgtgtctgatctgtgctattagccatacccatcgagcccataccgtagtacctttggacgatgctactcaggagtacaaggagaagctccagaagtgtctagagccattagaacagaaactgcaggagattacacggtgcaaaagctctgaagaaaaaaaacctggggaactgaaaaggctggttgagagccggagacagcagatcctccgagaatttgaagaactgcacaggagattggacgaagaacagcaggttctgctgtcccggctcgaagaggaggagcaggacattctgcagaggctgagagagaacgcagctcaccttggtgataaacgacgagatctggctcacttggccgctgaggtggagggcaaatgtctgcagtcaggatttgaaatgctgaagcctgttctatccgctcgcgagaagaatataccgaggaaattcggaggttctctgtctaccatctgtccaagggaccataaagcactcctggggctggtaaaggagataaaccgttgcgaaaaggtgaagactatggaggtgacttctgtcagcattgaactggagaagaacttttccaattttcccaggcaatacttcgcccttcgtaagatcttgaagcagttgatcgcagacgttaccctggaccctgaaactgcacacccaaacctcgtgttgagtgaagatagaaaaagcgtcaaatttgtggaaactcgattgcgggacctccctgatacacccaggagatttaccttctatccttgtgtgctggcaaccgagggttttacctccgggagacactactgggaggtggaggttggtgacaagacacactgggccgttggagtttgccgcgacagcgttagcaggaagggggagcttacgcctttacctgagacaggttactggcgggtgcggttgtggaacggagataagtatgctgccactactacaccattcaccccactccacattaaagttaaacccaaaagggtggggatttttctcgattacgaagctggtacactgtccttctacaacgtcaccgacagatcccatatatatacttttaccgacacctttactgagaagctctggccactgttctatccgggaatcagggccggaaggaaaaatgcggctcctttgactattagacctcctacagattgggagtag

SEQ ID NO: 245151 - DNA, 1557 bp, synthetic construct
  misc_feature 1..1557: note = Description of Artificial Sequence: Synthetic coding sequence
  source 1..1557: mol_type = other DNA
atggccgaaaccagtctcctggaagccggagcttccgctgcctctactgccgctgctctggagaacttacaggtggaggccagttgcagcgtgtgtctggaatatctgaaagagccagtcataattgaatgcggacataacttttgtaaggcttgcattactagatggtgggaggatctggagagggactttccctgcccggtgtgcaggaaaacctcacggtaccggagtctccgcccaaatcgccagctgggttccatggtagaaatcgcaaaacaattgcaagccgtgaaacgcaagattcgcgacgaatccctgtgtccacagcaccacgaagccctgagcctgttttgttacgaggaccaggaggcagtgtgcctgatctgtgcaatatcccacacccacagagctcataccgtagtgcccctagacgacgccactcaggagtataaagagaaactgcagaagtgcctcgagccccttgagcaaaagcttcaggagattacccgctgcaagtcgtccgaggagaagaaacccggtgagctgaaaaggctcgtggagtcgcggcgacaacaaattttgagagagtttgaggagcttcatcgcagactggacgaagaacagcaggttttactgagcaggctagaggaggaggagcaagatatcctgcaaaggctccgcgagaatgccgcacatttaggagacaagcgacgggatctggcacacctggccgcagaggtcgagggaaagtgtctgcagtctggatttgagatgttgaagccggttctgtccgcacgagagaagaacatacccaggaagttcggcggaagcctaagcaccatttgtccaagagatcacaaggccttgctcgggcttgtgaaggaaatcaaccgttgcgaaaaggtgaagacgatggaagttaccagcgtatccatcgaactcgaaaaaaatttttctaactttccgagacagtatttcgccttgcgcaaaatccttaagcagctgattgccgatgtgacactcgaccctgaaaccgcccacccaaatctggttctgtctgaagataggaaatccgtcaagttcgtcgagacacgcctgagagacctgcctgacactcccaggaggttcaccttttacccctgcgtgctggccaccgaaggttttacttccggccgacattactgggaggtggaggtgggtgataaaacccattgggctgttggggtttgcagagactcagtgagccgtaagggtgagctgacgcccctgccagaaacaggttactggcgggttagattgtggaacggcgataaatacgccgctactacgacaccctttacgcccctgcatatcaaggtcaagcccaaaagggtcggcatcttcctggactacgaagcaggcactctcagtttttacaatgtcaccgatagatctcatatctacaccttcactgatactttcaccgaaaagctctggccactattctatcctgggattcgcgctggcaggaagaacgcagcccctcttactatacgcccacccacagactgggagtag

SEQ ID NO: 245152 - DNA, 1557 bp, synthetic construct
  misc_feature 1..1557: note = Description of Artificial Sequence: Synthetic coding sequence
  source 1..1557: mol_type = other DNA
atggctgagacctctctgttagaagctggcgcaagtgcagcatccaccgccgctgcgttagagaacctgcaggtggaggcttcttgttccgtgtgtcttgagtacttgaaggagccagtgattatcgaatgtggacacaatttttgcaaggcctgtatcactaggtggtgggaagacctggagagggattttccttgccctgtttgccgaaaaaccagccggtatagaagcttgcgtccaaaccggcagttgggaagtatggtggaaatcgctaaacagctgcaagccgttaagcggaagattcgggacgaatccctgtgccctcaacaccacgaagccctttccttattctgttatgaggatcaggaggccgtctgtttgatatgtgcaatatcacacacacacagagctcacactgttgtgcccttggacgacgccacacaggaatacaaggaaaagctgcagaaatgtctcgagcccttggagcagaaactccaggagatcacaagatgtaagtcttctgaagagaagaaacccggagagcttaaaagactggttgaaagcaggcgccagcagattctcagggaattcgaagagctgcatcgcaggctggacgaggaacagcaggtgttgctttcacgattagaggaggaggaacaggatatactgcaaaggctacgcgagaatgctgctcatctgggcgacaagagacgggatctggcccacctagctgcggaagtggagggcaagtgccttcagtcaggctttgaaatgctgaaagacgtgaagagtacccttgaaaagaacatcccacggaagtttgggggatccctgtcgactatctgcccgagggaccataaagccctgcttggcctggttaaggagattaatagatgcgagaaggtgaagacaatggaggtaacgtccgtgagtattgagctcgagaagaacttctccaactttccacggcaatactttgcacttcgcaagatcttaaagcagctgattgccgacgtcacacttgatcctgaaactgcacaccccaacctagtgctctccgaggataggaaatctgtgaagttcgtggagactcggttgcgcgacctgccagatacaccaaggaggttcacgttctacccatgcgtgctcgccaccgaggggttcacgtccggcaggcactactgggaggtcgaggtgggcgacaagactcactgggccgtgggggtgtgccgtgacagcgtaagcagaaaaggcgaactcacaccacttcccgaaactgggtactggcgcgttcgcttgtggaacggtgacaagtatgccgcaaccacaactccattcacacctctgcacataaaggtgaaacctaaacgtgtgggcatctttctcgattacgaggcaggcacattaagcttctacaatgtgactgacagaagtcacatctacaccttcacagataccttcaccgaaaagttatggccactgttttaccctgggatccgcgctggaagaaagaacgccgctcccctgacgattagaccccctactgattgggagtag

SEQ ID NO: 245153 - DNA, 1557 bp, synthetic construct
  misc_feature 1..1557: note = Description of Artificial Sequence: Synthetic coding sequence
  source 1..1557: mol_type = other DNA
atggccgaaacatcactcttggaagctggtgccagcgccgcatccaccgccgcagccctcgagaaccttcaagtggaggcctcctgctctgtatgcttagagtatctaaaggaaccagtgataattgagtgtggacataatttttgcaaggcttgcatcacgaggtggtgggaagatctagaaagggattttccctgccccgtgtgccgcaagacctccaggtatcgcagcttacgccctaaccgacagctgggatctatggtggaaatagcaaagcagctacaggctgttaaacgcaagattagggacgaaagtctgtgtcctcagcatcacgaagcgctgtctctcttttgttacgaagaccaagaggcggtctgcttgatctgtgccatatctcacacccatcgagcccacactgtggtgcccctggacgacgcgacgcaagaatataaggaaaaactgcaaaagtgtctggagccccttgaacaaaaacttcaggaaatcaccaggtgcaaatcttccgaagaaaagaagccaggggaactcaagcggttagtggaaagtcgtagacaacagatcctgcgcgaatttgaagaattacaccggagactcgacgaagaacagcaagtcctcctgagcaggttggaggaagaggaacaagacatcctccaaagactccgagagaatgccgcacatttaggagacaagaggagagaccttgctcacctcgcggcagaggtcgagggaaagtgtttgcagtccggatttgagatgctgaaacctgtgctatcagcgagggagaaaaatatcccaagaaagttcggcggttcgttgtctactatttgtccccgagatcataaagcgctcctcggtctcgtcaaggagatcaatagatgcgagaaggtgaaaaccatggaggtgacatctgtatctatcgagctcgagaagaatttcagtaatttccccagacagtattttgctttgagaaagatccttaaacagctgatcgccgatgtcaccttagacccggagacggcccacccgaatctcgtcctcagcgaagatcggaagtctgtgaaattcgtcgaaacccggctcagagatctgccggacacccccaggaggttcaccttttacccatgtgtactcgccaccgagggctttacatctgggagacactattgggaggtggaagtgggagataagacacattgggcagttggcgtttgtcgggatagcgtatcgcgcaagggcgagctaacaccgctgcccgaaactggatactggcgggtccgactatggaacggggataaatatgcagctacaaccactccgttcacccctttgcacatcaaggtcaagcctaagcgggtggggattttcctggattacgaagcaggaacgttgagtttttacaatgtgacagaccggtcgcacatctataccttcacagatacctttaccgagaagttgtggcctctcttttaccctgggataagggcgggtcgcaagaatgcagcaccgctgacaattagaccccctactgactgggaatag

SEQ ID NO: 245154 - DNA, 1254 bp, synthetic construct
  misc_feature 1..1254: note = Description of Artificial Sequence: Synthetic coding sequence
  source 1..1254: mol_type = other DNA
atggtcgagattgctaagcagctccaagccgttaaaagaaagatccgggatgagtccctctgtccacaacatcatgaggccctgtctctcttctgttacgaagatcaggaggccgtctgtctgatctgcgccatttcacacacacatcgagcccacactgtagtgcctctggatgacgccacacaggaatacaaggagaaactgcagaaatgccttgagcccctggaacagaagcttcaggagattacaagatgcaagtcttctgaggagaaaaaaccaggagagttgaaacgccttgttgagtctcgcaggcagcagattctccgcgagttcgaagaactgcatcggagattagatgaggagcaacaggtgctgctttcccgccttgaagaagaagaacaagacattctgcagcgactgcgggagaacgcggctcatctaggcgacaaacgtcgagaccttgctcatctagccgcagaggtggaaggcaagtgtcttcagtcaggtttcgagatgctcaagcctgtgttgagcgctcgcgaagaatgcgagaaggttaagaccatggaagtgacatccgtatcaatcgaactggaaaagaatttctccaatttccccaggcagtattttgcccttcggaaaatcttaaagcaactgatcgcagatgtgacactggaccctgagacggcccaccccaacctcgtgttgagcgaggatagaaaatcagtgaaattcgtggagaccagattgcgagatttgcccgacacccctcggagatttacattctacccttgtgtgctagccaccgagggctttacctccgggagacactactgggaagtggaagctgcccattgtgtcctggcacaagatcctgaaaaccaagctctggcgcgattttactgctataccgagagaaccatcgcaaagcgtctggtcctccgcagagatccatctgtcaagaggacgctctgtaggggctgttcgtccctgcttgtgcctgggctgacttgcacacacagacagcgaagatgccgcggacagcgatggactgtgcaaacctgtctgacatgccagaggtctcaacgtttcttaaatgaccctggtcacctgctctggggggaccggcctgaggcacagctgggttcccaggccgacagcaagccactgcaaccattaccaaacaccgcccactctatcagcgaccggctacctgaagaaaagatgcagacccaaggcagtagtaaccaatag

SEQ ID NO: 245155 - DNA, 1254 bp, synthetic construct
  misc_feature 1..1254: note = Description of Artificial Sequence: Synthetic coding sequence
  source 1..1254: mol_type = other DNA
atggtggaaatcgccaagcaactccaagctgttaaaagaaaaataagggacgaaagcctttgcccccagcaccatgaagcgctgtctttgttttgttatgaggatcaggaagctgtgtgcctgatttgtgctattagccatacacaccgggctcatactgtagtgccgctggacgacgctacccaggagtataaggaaaagctgcagaagtgcctggagcctctggagcagaagctccaggaaataacacggtgtaagagtagtgaagagaagaaacctggggaactaaaacgcctggtggaatcaaggcgtcagcagattcttcgggagtttgaggaactgcacaggcgattggatgaggaacaacaggtgcttctcagccggttagaggaggaagagcaggacattcttcaaagattgcgtgagaatgcggctcacttaggcgacaagcggagggacctggcccacctggccgcagaggtggagggcaaatgcttacagagcggctttgagatgctgaagcctgtactgtctgcaagagaagaatgcgaaaaggtgaagaccatggaagtgacaagcgtgtccatcgaactcgagaagaatttttccaatttcccgcgacaatactttgctctgagaaaaatccttaaacaactgattgccgacgtcactctcgatcctgagacagctcacccaaatcttgtgttgtctgaagacaggaaatctgtgaagtttgtagaaactcggctgagagacctccctgacacaccgaggcgtttcaccttttacccgtgcgttctcgccacagaaggcttcactagtggacggcactactgggaagtggaagccgctcactgtgtactggctcaagacccagagaatcaggccctcgctcggttttattgctataccgagcgaactattgcgaaaagacttgtcctcagacgggatcccagtgttaaaaggaccttatgccgaggctgtagttccctattggttcctggacttacgtgcactcacagacagcgtcgttgtaggggtcagaggtggacggtccaaacttgcctcacttgtcagaggagccaacggttcttgaacgatcctgggcacttactctggggcgaccgcccagaagcccagctcggaagtcaggcggacagtaagcctttgcaacctttgcccaacacagcccactctattagtgaccgcttgcccgaggagaaaatgcagacccaggggtcaagcaatcagtag

SEQ ID NO: 245156 - DNA, 1236 bp, synthetic construct
  misc_feature 1..1236: note = Description of Artificial Sequence: Synthetic coding sequence
  source 1..1236: mol_type = other DNA
atggccgagacatcactgctcgaagccggtgcctccgccgctagcacagccgcagcgctcgaaaatctgcaagtggaggccagttgttcagtctgcctggaatacttgaaggaacccgtgatcatcgagtgtgggcataatttctgtaaggcttgtatcactcgatggtgggaggacctcgagcgagattttccatgtccggtgtgtaggaagacaagcaggtaccgaagcctgagacccaaccgccagcttggctctatggtggaaattgcaaagcagctacaggctgtgaaacggaaaattagagacgaatctctatgccctcaacaccatgaggcactgagcctgttctgttatgaggaccaggaagctgtgtgtcttatctgcgctatctcgcatacccaccgggctcatactgtggtccccctggatgatgcgacacaggagtacaaggaaaaactgcaaaagtgtctggagccacttgaacagaaactgcaggaaattaccaggtgtaaaagctctgaggagaaaaagcctggggaactaaaaaggttagtggaatcccggagacaacaaatccttagggaattcgaggagctgcatcgcaggctcgacgaagagcagcaagtgctgctgtcaagactcgaggaagaggaacaggatattcttcaacgcctccgcgagaatgctgcacatcttggggacaaaagaagagatttagcccaccttgctgccgaagttgaggggaaatgtctgcagtctggctttgaaatgctcaaaccggtgctcagcgccagagaagagtgcgaaaaagttaagaccatggaagtaacctctgtctccatagagctggagaaaaacttcagtaattttccacggcagtactttgctctgaggaagatcttaaaacagctcatcgctgatgtcactctggacccagagactgctcacccgaatttagttctctccgaggaccgtaaaagcgtgaagttcgtggagactagactcagggatctgcctgacaccccaagacgatttaccttttatccgtgtgtcttggctacagaagggttcacttccgggaggcattactgggaggttgaagtgggtgacaagacacattgggctgtgggcgtttgccgggattccgtctctaggaagggaggctgcggctacgggatgggtacaaatatgcagccaccaccacacctattgcccctctgtacatcacggtag

SEQ ID NO: 245157 - DNA, 1254 bp, synthetic construct
  misc_feature 1..1254: note = Description of Artificial Sequence: Synthetic coding sequence
  source 1..1254: mol_type = other DNA
atggtggaaatcgccaagcaattgcaggcagtgaaacggaagattcgggacgagagcctgtgtccgcagcaccatgaggccctgtctctgttttgctacgaggaccaggaggcagtgtgtttgatttgcgctatctctcacacacatcgtgcccacacagttgttcccctcgacgatgccacccaggagtataaagagaagctgcagaaatgcttagagcctctggaacagaagttgcaagagattaccaggtgcaaatcatcagaagaaaagaaaccaggagagctgaagcgactcgtggaatcacggaggcaacagattttgcgggagtttgaagagctccaccggagactggacgaggaacagcaagtgcttctcagccggctggaagaggaggagcaagatatactgcagaggctgcgtgaaaatgccgctcacctaggagataagagacgagacctggcgcacctggccgcagaggtcgagggcaagtgcctacagagcgggttcgaaatgctcaagcccgtcctctcagccagggaagagtgcgagaaagtcaaaacaatggaggtgacttctgtaagcatagagttggagaagaacttctcaaacttccctcgccagtatttcgctctgaggaagattcttaagcaactgatcgcagacgtaaccctggaccccgaaacagcacaccccaacctcgtgctctctgaagatcgcaagagcgttaagtttgtggagaccagactccgcgacctccctgatacaccacgcagatttaccttttatccttgcgtcctcgcaaccgaagggtttacatccggtcgccattattgggaagtggaagctgctcactgcgttttagctcaagaccctgagaaccaggccttagccaggttttactgttacacagaaagaactatcgcaaagcgcttagtgttgaggcgagatccatccgtgaaacgtactctctgccgagggtgtagctcactccttgtgcccggactgacttgcactcacaggcagaggcgatgccgtgggcagcggtggactgtgcagacgtgtttgacttgtcagaggagccaaaggtttttgaatgatccaggacacttgctgtggggggacaggccggaggctcaattgggaagtcaagcagacagtaagccattgcagccactgcccaatacagcccactcaatttcggacagactccccgaggagaagatgcagacacaaggctctagcaatcaatag

SEQ ID NO: 245158 - DNA, 1557 bp, synthetic construct
  misc_feature 1..1557: note = Description of Artificial Sequence: Synthetic coding sequence
  source 1..1557: mol_type = other DNA
atggctgagacaagtctattggaggccggagccagtgcagcatccaccgccgcagcactggagaatcttcaggtcgaggctagctgcagcgtgtgcttagagtatctgaaagaacctgttatcatcgagtgtggccataatttttgcaaggcatgcatcactagatggtgggaggatctggaacgcgatttcccttgtcccgtgtgcaggaagacctcaagatatagatctctccgtcccaatcgccaacttggcagtatggtcgagatcgctaagcagctccaggccgtgaaaagaaagatccgcgacgagtcactttgcccacagcaccatgaggctttaagcttgttttgctacgaagatcaggaggccgtgtgcctcatctgcgcaatctcacacacacacagggcacacaccgtcgttccgctggacgatgccacccaggaatataaggaaaaactgcaaaagtgtctggaaccactggagcagaagttacaggagattacccgctgtaagtcctccgaggagaagaaacctggcgagctgaaacgtctggtggagagcagacgtcagcaaattttaagggagtttgaggagctacaccgtcgcctggatgaggagcagcaggtcttgttgtcccgcctcgaagaagaagaacaggacatcctccaaagactgagagagaatgcggcacatctaggcgacaagcggcgtgacctggcgcatctggcagccgaggtagagggtaaatgccttcagagcggttttgagatgttaaaacccgtcctgagtgccagggagaagaacatacccaggaagttcgggggttccctgagcacaatctgccccagagatcacaaggcgctccttgggctggtgaaggagattaacagatgcgagaaggtcaaaaccatggaagttacttccgtgagtatagagctcgagaaaaacttttctaattttccaagacagtattttgccctgcgaaagatcctgaagcagctgatagccgacgtgaccctggaccctgaaaccgctcacccgaatctcgtgttgagcgaggacaggaaatctgtgaagtttgtggagactcgtctcagagacctgcccgacacccctcgtcgcttcactttttatccctgcgtcctcgccactgaaggatttacctccggaagacattattgggaggtggaggtcggagacaagactcactgggccgtgggtgtttgccgagactcagtttcacgcaaaggggagctgacgcctctccccgaaacaggatattggcgggtgcggctgtggaatggtgacaagtacgccgctactacaacgccattcacacctctgcacatcaaggtaaaacccaagcgcgttgggatattccttgattacgaggcagggaccctgagcttctataatgtgacggatcgtagtcacatatacacatttaccgacaccttcaccgagaagctgtggccactcttttatccaggcatcagagcgggacgcaaaaatgctgcccctctgactatccggccaccgacagattgggagtag

SEQ ID NO: 245159 - DNA, 1254 bp, synthetic construct
  misc_feature 1..1254: note = Description of Artificial Sequence: Synthetic coding sequence
  source 1..1254: mol_type = other DNA
atggtggagatcgccaagcaacttcaagcggttaagcggaaaatcagagacgagagtctgtgtccgcaacaccacgaagcgctgtcactcttctgctatgaagaccaagaagccgtgtgtctaatttgtgctataagtcacacccatcgcgctcatacggtagtacccctggatgacgccacccaggaatataaggagaagctacagaagtgtcttgagcctcttgagcagaagctgcaagaaattactaggtgtaagagctccgaagagaaaaaaccaggcgagctgaagaggctggtggagtcccgtcgtcagcagatcctccgggagttcgaggagctgcaccggaggctcgatgaagaacagcaggtgctgctgagccgcctggaggaggaggagcaggacatcctccaaaggctgagggagaatgctgctcacctgggtgacaaacggcgtgatctggctcatctcgccgctgaggtggaaggcaaatgcttgcagagcggatttgagatgttaaagccggtgctgagcgccagggaggagtgcgaaaaggtcaaaaccatggaggtgactagcgtgtccatcgaacttgagaagaacttttctaattttcccagacagtacttcgccctgcgtaagatcctgaagcagctcattgcagatgtaaccctggatccggagaccgcccaccccaatctggtgctaagcgaagatcgaaagtccgtcaagtttgtcgagacgaggctgagggatctgcccgatacaccacggagatttaccttctacccttgcgttttagccactgaagggttcacctccggcaggcattattgggaggtcgaagccgcacactgcgtgttggcgcaggatcccgaaaatcaggctctggcacgtttctattgttacacggagcgcaccattgccaaaaggctggtcctgcgaagggatccatccgtgaagaggactctgtgtagaggctgctcttccctgttagtgccgggtcttacgtgcacgcagagacagcgaaggtgtcgcggacaacggtggaccgtccagacatgtttaacctgtcaaagaagccagcgctttctgaatgaccctggacacctgttgtggggagatcggccagaagcccagctaggttcacaggccgatagcaaaccactgcagccgttaccaaatactgcccacagcatttctgaccgtttgccggaggagaagatgcagactaagggaagtagcaaccaatag

SEQ ID NO: 245160 - DNA, 1236 bp, synthetic construct
  misc_feature 1..1236: note = Description of Artificial Sequence: Synthetic coding sequence
  source 1..1236: mol_type = other DNA
atggctgaaacatctctgttagaggctggtgctagcgctgcgagtacagccgcagctctggaaaacctgcaagtggaagcatcatgtagcgtgtgccttgagtacctgaaggagcctgtgattattgagtgcggacataatttctgcaaggcttgcatcactcggtggtgggaggacctggaacgcgacttcccctgccccgtttgtagaaagacaagtcggtatcggtcactgcgaccaaaccgacagctgggcagcatggtcgagatcgcaaaacagctgcaggcagtgaagcggaagatccgcgacgagtccttatgtccccaacatcatgaggccctgagcttgttctgttacgaggatcaagaagcagtgtgcttaatctgcgccatttctcatacccaccgcgcacatacagtggtcccactcgacgatgcaacccaggagtataaagagaagctgcagaagtgtctcgagccattagagcaaaagttgcaggaaatcacaagatgcaagagcagtgaagagaagaagcccggagagctcaagaggctggtagaaagtcggagacaacagatcctgcgcgagttcgaggaattacaccgcaggttggatgaggagcaacaggtacttctaagcaggcttgaggaagaggaacaggatatactgcaaagactgcgggaaaacgcggctcatctgggggacaagcgcagagatcttgcacatttggccgctgaggtggagggaaagtgtctccagtcagggttcgagatgttgaaacccgtgttgagcgcgagggaagagtgtgagaaagttaaaaccatggaagtgacatctgtgtcaattgaattggaaaaaaacttctctaacttccctcgtcagtactttgccttacgcaagattctgaagcaactgatcgcagacgtgacgctggaccccgaaactgctcacccgaacctagtcctgtccgaggataggaaatccgtaaaattcgtggagacgcggttgagagacctgccagacaccccacgaagattcaccttctacccttgcgtactggcgacagaaggctttacttcagggcgacactactgggaggtggaggtaggagataaaacacattgggcagtgggagtgtgcagagactcagtgagcaggaaggggggatgtggctatgggatgggaactaacatgcagccccctccccatctcctgccactgtgtacttcgaggtag

SEQ ID NO: 245161 - DNA, 1254 bp, synthetic construct
  misc_feature 1..1254: note = Description of Artificial Sequence: Synthetic coding sequence
  source 1..1254: mol_type = other DNA
atggttgagattgctaagcagctccaggcagtcaagcggaaaataagggatgagagtttatgtccgcagcaccatgaggccctgagtttgttttgttacgaggatcaagaagcagtgtgtctgatttgcgctatatcgcacacccaccgagctcacacggtggtcccactggacgatgccacccaggaatataaggaaaagctccagaagtgcttagagcctctggagcagaagctgcaggagatcacaagatgcaagagttcagaggagaaaaagcccggagagttaaagcgactggtggagtccagaagacagcagatccttcgcgaattcgaggaactgcaccgtcggctcgacgaggagcaacaggtgctactctcaaggctagaagaggaggaacaagacattctgcagcgcctacgcgagaacgctgctcatctgggggacaaacgtagagatcttgcccaccttgccgctgaagtagaaggaaaatgtctgcaatctggtttcgaaatgctgaagccggtactgagtgccagagaggagtgcgagaaggtgaagactatggaggtgacctccgtgagtatcgagctggaaaaaaatttttctaattttccacgtcagtactttgctctgcggaaaatcttaaaacagctgattgccgatgtgaccctggaccccgagacagcccatcctaacctggtgttgtcagaggatagaaagagtgtcaaatttgtcgagacaaggctgagggacctgccggacacgcctcggcgtttcaccttttacccatgcgtgctggccacagaaggatttacgagcgggcgtcactactgggaggtcgaggccgctcactgtgtcctagcccaggaccccgagaatcaagcacttgctaggttttactgttacacagagcggacgatagcaaagaggttagtactgaggagagacccatcagtgaaacgtactctatgccgcggttgtagtagcctgctggtccctggactcacctgtacacagcgccaaaggcggtgtaggggccagaggtggactgttcaaacctgcctcacctgccagagatctcagcgctttctgaacgatccgggtcacctgttgtggggggaccggccagaggcccagttaggctctcaggccgacagtaaacccctccagcctctgcctaacaccgcccattcaatatcagataggcttcccgaggagaagatgcagactcagggcagttcaaaccagtag

SEQ ID NO: 245162 - DNA, 1557 bp, synthetic construct
  misc_feature 1..1557: note = Description of Artificial Sequence: Synthetic coding sequence
  source 1..1557: mol_type = other DNA
atggctgaaacctccttattggaagccggtgcttctgctgcctccacagccgctgcactcgagaacctgcaggtcgaagccagttgttcagtatgcctggagtatcttaaggaacctgtgatcattgaatgcggccacaacttctgcaaagcatgcattaccagatggtgggaggacctggagcgggatttcccatgccccgtgtgccggaaaaccagccgctaccggagtcttagacctaaccgccagctcgggagcatggtggagatagccaaacagctgcaggcagtgaagcgcaaaattcgagatgagagcctgtgcccccagcatcacgaagcgctcagtcttttctgttacgaagaccaagaagccgtgtgcctgatctgtgcaatttctcacactcaccgggctcacaccgtagtgcccctcgatgacgccacacaggagtacaaggagaaacttcagaagtgccttgaacccctggagcagaagctacaggaaatcactaggtgcaaatccagcgaggagaagaagcctggggagttaaaaagattagtggagagcagaaggcagcagatcctcagggaatttgaggagctgcataggcggcttgacgaagagcagcaggtgctgctgtctcgcctcgaagaagaggagcaggacatactgcagagactcagggaaaacgctgctcaccttggcgacaagcgcagggatctggctcacctagccgctgaggtggagggaaagtgcctgcaatcaggctttgagatgctcaaagacgtcaaatcaacactagagaagaatatccctcgaaagttcggtggatctctgtccacgatatgccctagagaccacaaggcccttttgggtttagttaaggaaatcaataggtgcgaaaaggtgaaaacgatggaggtcacatccgtgtctattgaactggagaagaacttcagcaattttcctcgtcagtactttgccctgaggaaaattctgaagcaactgatagcggacgtcactctggaccctgaaaccgcgcaccccaacctcgtcctcagcgaagatagaaagagcgtgaagtttgtggagacgaggttaagagaccttcctgacacccctagaagattcacgttttatccctgtgtcctcgccacagagggtttcacttctgggagacactattgggaagtcgaggtgggggacaagacccactgggctgtcggggtgtgtagagattctgtgtctagaaagggggagctcacccccttacccgagactggttactggcgggtgcgactgtggaacggggacaagtatgctgcaaccactaccccttttacacccctgcacatcaaagttaagccaaagcgggtgggcattttcttggactacgaggccggaactctttctttctacaatgtgacagaccgcagccacatttacaccttcacggatacgttcacagagaagttgtggccgcttttctatcctgggattcgggcagggagaaaaaacgctgcacccctgacaatccgtccacccaccgactgggagtag

SEQ ID NO: 245163 - DNA, 1557 bp, synthetic construct
  misc_feature 1..1557: note = Description of Artificial Sequence: Synthetic coding sequence
  source 1..1557: mol_type = other DNA
atggcagaaacaagtcttctcgaggccggagcctccgcagccagcaccgccgcagccctcgaaaacttgcaagtcgaggcatcctgcagcgtatgtctcgagtacctcaaggagcctgtcatcatcgagtgtggccacaacttctgtaaagcatgcatcacgaggtggtgggaggacctcgagcgtgactttccttgccccgtgtgcaggaagacgtcccgctataggagcctgaggccaaatagacagctgggcagtatggtagaaattgcaaaacaactgcaagctgtgaagagaaagattcgggacgagagtttgtgcccacagcatcatgaagctctatcattgttttgctacgaggatcaggaggccgtatgcctcatctgcgcaatcagccatacgcacagagcccacactgtcgtgcccctggacgacgccacacaagagtacaaggagaagcttcagaagtgtctcgagcccctggaacagaagctgcaagaaattacaaggtgtaaaagcagtgaggaaaaaaaaccaggggagctgaaacgactggtagagtcaagacggcaacagatcctccgcgagttcgaggaactgcaccgcagactggatgaggagcagcaggttttgctgtctagacttgaggaagaagaacaggacattctgcaaaggctgagagaaaatgcagcccatctgggcgataaacgcagggatcttgcccatctcgccgctgaagtggagggaaaatgcttacagtcaggcttcgagatgctgaaggacgtcaagtctaccctcgagaaaaatattcccaggaagttcgggggtagcttgtctacaatttgcccacgggaccacaaagctctgctgggcctagtgaaggaaataaatcggtgcgagaaagtgaaaacaatggaggtgacgagcgtatcaatcgagttagagaagaattttagtaacttcccccgacagtattttgctctgaggaagatactgaagcagctgatcgcagacgtgacattagatccagaaacagctcaccccaacctagtgttatccgaggacagaaaaagcgttaagttcgttgaaacccgcctgagagacctgccagatacccccagaaggttcaccttttacccctgtgtgctggcaacagagggatttacttctggaaggcattattgggaggttgaggtgggagacaagacacactgggccgttggagtatgccgagattctgttagcaggaagggcgaactgacacccttaccggagacgggatactggcgggtcagactgtggaacggagacaaatatgctgcaactaccaccccgttcactccattgcatatcaaagtcaagcccaagcgcgtggggattttcctcgactacgaggctgggacacttagcttctacaatgtcacagatcggagtcacatctacaccttcaccgacaccttcacagaaaaactctggccactgttctacccaggaatcagggctggcaggaagaatgccgctcctctaactataaggccgcctaccgattgggagtag

SEQ ID NO: 245164 - DNA, 1467 bp, synthetic construct
  misc_feature 1..1467: note = Description of Artificial Sequence: Synthetic coding sequence
  source 1..1467: mol_type = other DNA
atggccgaaacatcactccttgaagcaggggctagtgcagcaagcaccgctgcggctttggaaaacttgcaagtggaggcaagttgcagtgtgtgcttagaatacctgaaggaacctgtgatcatcgaatgtggtcataacttttgcaaggcctgcatcacacggtggtgggaagatctggagagagatttcccttgccctgtctgccgaaagacttctcggtaccggtctctgagacctaatcgtcagctgggctccatggtggagatcgctaaacagctgcaggcggttaagcgaaagatccgagatgagtcactgtgcccacagcaccacgaagccttatcgctcttttgctatgaggatcaagaggcagtttgcctcatctgcgccatatctcatacccatcgggctcacaccgtggtgcccctggatgatgccacacaggagtacaaggagaaactgcagaagtgtctggagcccctggaacagaaactccaggagatcactcggtgcaagagtagtgaggagaagaaacccggagaattaaagcgcttagtcgaatcccggaggcaacagatcctccgagaattcgaagagctgcatcggcgactggatgaagaacagcaggtgcttctcagtcgtcttgaagaggaggaacaagacatcctgcagcgactgcgagagaatgcagcacatctgggcgataagagacgggacctggcacatttggccgctgaggtcgagggcaagtgtttacagtcaggcttcgagatgctgaagccggtgttatcagcacgcgaagaatgcgagaaggtcaagactatggaggtaacttcggtgagtatagagctggagaagaacttttcgaacttcccccgtcagtattttgctttgagaaagatcttgaaacaattgatcgccgacgtaaccctggaccccgagacagcccaccctaatctcgttctaagtgaggaccggaagagcgtcaaattcgtggaaaccagattgcgtgacctccccgacacccccagacggttcactttttacccatgcgtgctggccacagaaggttttacttccggccgtcactactgggaagtggaggtcggcgataaaactcattgggctgtgggagtttgcagggactctgtgtccagaaagggcgagctcacaccgttgccagagacagggtactggcgggtcaggctctggaatggcgataaatatgccgctacaaccaccccattcacccctctgcacatcaaagtgaagcctaagagagtcggcatttttttagattatgaggctggcaccctaagtttttataacgtgactgatcggtcacatatctacaccttcactgacacatttactgaaaagttgtggcctctcttctacccagggattagggccggaaggaaaaatgccgcaccactgacaattcgacccccaactgattgggagtag

SEQ ID NO: 245165 - DNA, 1467 bp, synthetic construct
  misc_feature 1..1467: note = Description of Artificial Sequence: Synthetic coding sequence
  source 1..1467: mol_type = other DNA
atggccgaaacgagtctgctagaggccggtgccagcgccgcttcaacagccgctgcgctcgagaatctgcaggtcgaggcctcatgcagcgtgtgtctcgaatacttaaaggaaccggtcatcatcgagtgcggacacaatttttgcaaggcttgcattactagatggtgggaggacctcgaacgagactttccatgcccagtctgtcgaaagacaagtcggtatagatccctccggcctaatcgacagttgggaagcatggtggagattgcgaaacagctgcaggccgtgaagagaaaaattagggacgagagcctgtgcccccagcaccatgaggccctctcactcttctgttacgaggaccaagaagccgtgtgtctcatttgtgcgattagccatacacatcgagctcacacggtggtgcccctggacgacgcaactcaagaatacaaggaaaaactgcaaaagtgtcttgagcccctggagcagaagctccaggagatcactcggtgcaagtcttccgaggagaagaagcccggagagctcaagagactggtggagtcaaggaggcagcagattctgagagagttcgaagaactgcatcggagactagacgaagagcagcaggttctgctctctcggctggaagaagaggagcaggacattctccagcgcttaagggagaatgctgctcacctgggcgataaacgcagggatctggcccatttggcagccgaagttgaaggaaaatgtctccaaagtggattcgagatgcttaagcccgtgttaagcgccagagaggaatgtgagaaagtcaagactatggaggtgacaagtgtctcaatcgaactggagaagaacttttccaatttccctaggcagtatttcgcattgagaaagatcctgaagcagctgatcgctgacgtgacactggatccagagacagcacatcccaatctcgtgttgtcagaggatagaaagagcgtgaaattcgttgagaccagactgcgggacctgcccgataccccgcgacgctttaccttctacccctgtgtgctggctacagagggattcaccagcggtcgacattactgggaggtggaagtcggggataaaacacactgggccgttggtgtttgtcgggatagtgtcagtaggaagggagagctgacacccttacccgaaacaggctattggcgggttcggctatggaatggcgacaaatatgctgccacgacaaccccatttacacctctccatatcaaagtcaagcccaaaagggtgggaattttcctggattacgaggccggaacactctccttttataacgttaccgacaggtcacatatctacaccttcacagacacctttacggaaaagctgtggcccctcttctaccccggtatccgggcaggacggaagaatgccgcaccgctgacgatacgcccacctactgattgggaatag

SEQ ID NO: 245166 - DNA, 1254 bp, synthetic construct
  misc_feature 1..1254: note = Description of Artificial Sequence: Synthetic coding sequence
  source 1..1254: mol_type = other DNA
atggtggagatcgccaaacagctgcaagctgtgaaacgcaaaatccgggacgaatcactgtgtccccaacaccacgaggcactatcgctcttttgctacgaggatcaagaagccgtgtgtctgatctgcgctatctcccacacccacagggcccataccgtggtgcctctcgacgatgccacccaggaatataaggaaaaactgcagaaatgtctggaaccactggagcagaagctacaggagatcactcgatgcaaatcaagcgaagagaagaaacccggagaattgaaacgcttagtggaatcacggaggcaacagattctccgggaatttgaagagctacaccggagactggatgaggagcaacaggtgcttctgtctcgcctcgaggaagaggagcaggacatactgcagcgcctacgggaaaacgcagcacatctcggcgataagcgaagagatctcgcccacttggctgcagaggttgagggcaaatgcctccagtcggggttcgagatgctcaagcctgttctgagcgccagagaggagtgtgagaaggtgaagactatggaggtgacctccgtctctatagaattagaaaaaaatttcagtaattttccaaggcaatacttcgctctccgcaaaattcttaagcaattgatagcggacgtgaccctggaccccgaaactgctcatcctaacctggtgctgagcgaagacaggaagagcgtgaaatttgtggaaacacggcttagagacctacccgatacgccaagaaggtttaccttctacccttgcgttctagctacagagggctttacgagtggcaggcattactgggaggtcgaagcagctcattgtgtgctcgcccaagacccggaaaaccaggccctggcaagattttactgttataccgaacgcaccatagctaaaaggttagtgctccgtcgcgacccgtccgtcaaaaggaccctctgtagaggctgctcctccctgctagtccccggattgacttgcactcagcggcaacgcagatgccgaggtcagcggtggactgtacaaacatgcctgacttgtcagcgcagtcagaggtttttgaacgacccaggacaccttctttggggagatcggcctgaagctcagctcgggtctcaggccgattcaaagcccctgcagcctcttccgaataccgcccatagcatatctgaccgactgccagaagagaaaatgcagacacagggctcttcaaatcagtag

SEQ ID NO: 245167 - DNA, 1893 bp, synthetic construct
  misc_feature 1..1893: note = Description of Artificial Sequence: Synthetic coding sequence
  source 1..1893: mol_type = other DNA
atggccgcagtggctatgacccccaacccagtccagacactgcaggaagaggccgtttgtgctatttgcctggactatttcaccgatcctgtgtctatcgggtgcggacacaatttctgccgcgtctgcgtaactcagctgtgggggggtgaagacgaagaggatcgagacgagcttgaccgcgaagaagaggaggaagacggcgaagaggaggaggtggaagccgtgggggcaggcgcaggctgggacactccgatgagagacgaagactatgaaggcgacatggaggaagaggtggaggaggaagaggagggcgttttctggactagcggtatgagccgaagcagctgggataatatggactacgtttgggaggaggaggacgaagaggaagatctggattactacctgggtgacatggaagaggaagatctgcgcggagaggatgaggaagatgaggaggaggtgctcgaggaggtggaggaggaagatttggatccggtgacaccattgccacctccaccagctcctcgcaggtgttttacttgtcctcagtgccggaaaagcttcccaaggcggtcgttcagacctaacctccagcttgccaacatggtccaagttattcgccaaatgcaccccactccaggtcggggttctagagtaaccgatcagggcatttgtccaaagcaccaagaggcattaaagctcttttgcgaggtcgacgaggaggctatatgcgtcgtgtgtagggagtcaaggagtcacaagcagcattccgttgttccccttgaagaagtggtccaggaatacaaagcaaaacttcaaggccacgtagagcccctgcggaaacatctcgaggcagtacagaagatgaaggccaaggaggaacgaagggtcaccgaactgaaatcgcagatgaagtcggaattagcagccgtggcaagcgagttcggacgcctgacacgcttcctcgcggaggaacaggctggcttggaacgacgcctgagggaaatgcacgaagcccagcttggtagggccggtgcagcagcttccaggttggcagaacaggccgcacagctgtccagactcttagccgaggcgcaggagcggtcccaacaaggagggctgaggctcctccaggatattaaggagacattcaaccgatgcgaggaggtgcaactccagcccccagaggtttggtccccagacccatgtcaaccccatagtcatgacttcctcactgacgcgattgtgcgaaagatgtctcgtatgttctgccaggcggcacgtgtggacctgaccctggatccagacacagcccatccagcgcttatgctctctcccgaccgacggggtgtgaggctagccgaacgcagacaagaggtcgcagaccaccccaagaggttcagcgctgattgctgcgtcctaggggctcagggtttcagaagcggtcggcattattgggaggtggaggttggcggtaggaggggctgggccgtgggtgcagccagagaaagtacacatcacaaggagaaggtgggcccaggtggcagctctgttggatctggggacgcctcgtcgagtcggcaccaccaccgaaggaggcggctgcacttgccacaacagcccttgctgcagagagaagtatggtgtgtcggaaccaatggaaagagataccaggcacagtcctccactgaacagaccttgctgtcgccttctgagaaacctaggagatttggcgtgtatcttgattatgaagcaggtaggctcggattttataatgcagagacactggcccatgtccatacattcagcgccgcattcctcggcgagagagtgtttcctttcttccgagtgttatctaagggaactcgaattaaactctgcccctag

SEQ ID NO: 245168 - DNA, 1557 bp, synthetic construct
  misc_feature 1..1557: note = Description of Artificial Sequence: Synthetic coding sequence
  source 1..1557: mol_type = other DNA
atggctgcagttgctatgaccccaaaccctgtccagacgctgcaagaagaagccgtatgtgcaatctgtcttgactattttaccgaccctgtgtcaattggttgcggccataacttttgtagagtttgcgttacacagctgtggggcggagaggatgaggaggacagagatgagctagaccgggaggaggaggaggaggatggcgaggaggaggaagtggaggcagttggtgcaggtgccggatgggacactcctatgcgggatgaggactatgagggtgatatggaggaagaagtggaggaggaggaagagggtgtcttttggacaagtggcatgtctagatctagttgggacaatatggattatgtttgggaagaagaggatgaggaagaggatctggactactacttgggagacatggaggaagaagacttacggggagaggatgaagaggacgaggaagaagtcttggaggaagtagaagaggaggacctggaccctgtcacgccgctgcctccccctcccgctccccgtcgatgttttacttgcccacagtgtcgaaagtctttcccacgcaggtcattccggcctaacttgcagctggccaacatggtacaagttatcaggcagatgcatcccacgcctggtaggggttcgcgcgttacagatcagggaatttgtcccaaacaccaggaggctctgaagttattttgcgaagttgacgaggaggctatttgcgtcgtgtgtcgcgagagtcggagccataaacagcattctgtggttcctcttgaggaggtggtacaagagtacaaggccaagcttcagggacacgtggaacccctccgcaagcatctcgaggccgtccagaaaatgaaggctaaggaggaacgacgtgtcaccgagttgaaaagccagatgaagtctgagcttgctgcagtggcttccgaatttggtcggctgacacgcttcttggccgaggagcaggccggactggagcgaaggctgagggagatgcatgaagcacagcttggaagggcaggcgcagccgcttcccggctggcggagcaagcagctcaattgagtcggctcctcgctgaggcgcaggagagatcccagcagggtggtctcaggctgttgcaagacattaaagagacattcaacaggtgcgaagaagtccagctccagcccccagaagtctggtctcccgacccgtgccagcctcactcgcacgacttcctgaccgacgctatcgtgagaaagatgtcccgcatgttttgccaagcagccagagtagatcttacgctggatccagacactgcacacccagctctgatgctaagcccagatagacgtggcgtgcggttggcagaacggaggcaagaggttgccgatcaccccaaaagattctctgccgactgctgtgtcctgggcgcacagggattcaggtcaggcaggcattattgggaagaaccaaaagagccttcttggccccctgcacagcccagcttgacctattacgtttgcccaactgaccgtcccgagtttagctttacatag

SEQ ID NO: 245169 - DNA, 453 bp, synthetic construct
  misc_feature 1..453: note = Description of Artificial Sequence: Synthetic coding sequence
  source 1..453: mol_type = other DNA
ctgcaggaagaggcagtttgcgccatatgcttagattattttacagaccccgtgtctatcggctgtggccacaatttttgccgtgtctgcgtaacccagctctgggggagacgcggtggagggagcggaggataccccgtgactccacttccaccacccccagctccccgacgttgcttcacttgtcctcagtgcagaaaatcattcccacgcaggtcatttaggcctaatctccagctggctaacatggtccaagttattaggcaaatgcatcctacccctgggcgtggtagcagagttactgatcagggaatctgccctaaacaccaggaggcccttaagttgttttgtgaggtagacgaagaggccatctgcgtggtgtgccgggagtcccggagccataaacagcacagcgtggtgcccttagaagaggttgtgcaagaatataaatag

SEQ ID NO: 245170 - DNA, 948 bp, synthetic construct
  misc_feature 1..948: note = Description of Artificial Sequence: Synthetic coding sequence
  source 1..948: mol_type = other DNA
atgaaggccaaggaggaaagacgggttaccgaactgaagagccagatgaagagcgagctggctgctgttgcatccgagtttggcagactgacacgtttcctagccgaggagcaagccggactcgagcgcagactacgagagatgcatgaggcccaactggggcgtgccggagccgcagcttcacgactggccgagcaagctgcccagctcagcaggctcctggccgaggcgcaggaaagatcacagcaagggggacttcgccttctgcaacaggatattaaagagacgtttaatcgctacgccatcgtgcgaaagatgtcccgaatgttttgccaggccgctagggtcgatttaactctcgaccctgacaccgctcaccctgctctgatgctgtctccagatcggaggggagtgagactggccgagcggaggcaggaggtcgcggaccaccctaaacggttctccgcagattgctgtgttctcggcgctcagggtttcaggtctggaagacattattgggaggtggaggtcggaggacgcagagggtgggcagtgggagccgctagagagtcaacacaccataaggagaaagtgggacccggaggatccagtgtaggatcaggagatgctagttcatctaggcatcatcataggcgccgacggttgcacttaccacagcaacctttattgcagcgggaggtgtggtgcgtaggaaccaatggcaaacggtatcaagcgcagagctccacagaacagacactgctgagccccagcgaaaaaccacgcaggttcggcgtatacctcgattatgaggccggtaggcttgggttctacaatgcagaaaccctggcacacgttcacaccttcagtgctgcatttttgggtgagcgtgtctttcctttctttcgtgtgctgtcaaagggtacccggattaagctgtgcccctag

SEQ ID NO: 245171 - DNA, 1035 bp, synthetic construct
  misc_feature 1..1035: note = Description of Artificial Sequence: Synthetic coding sequence
  source 1..1035: mol_type = other DNA
atggcctcaggggtgggagcagccttcgaagagttacctcacgacggtacgtgtgacgaatgcgagcctgacgaggccccaggcgctgaggaggtgtgcagagaatgtgggttctgctattgcaggcgacacgccgaggcccatcggcaaaagttcctttctcaccacttggccgagtacgtgcacggctcgcaagcctggaccccacctgccgatggtgagggtgctggcaaagaggaggcggaggtaaaagtggagcaggagcgggagattgagtccgaagcaggagaggaatcggagtccgaagaggagagcgagtctgaggaggagtcagagacagaagaggagtcagaagacgagagtgatgaggaatcagaagaggattccgaagaggagatggaggatgaacaggaaagtgaggcagaagaggacaaccaggaggaaggagaatctgaagccgagggtgaaacagaagccgagagtgaatttgacccagagattgagatggaggcggaacgggtcgccaagcggaagtgccctgaccacggacttgatttatcgacttattgccaagaggatcgacaactaatttgtgttctgtgcccggtgatcggcgcacatcagggacatcagctgtcgacactcgatgaagcattcgaagagctccgcagcaaggattcgggcggactgaaggccgctatgatagaactcgtggagagactcaaattcaagagctccgacccaaaagtgacaagagatcagatgaaaatgtttatccagcaggaatttaaaaaggtccaaaaggttatcgcggacgaggagcagaaagcccttcatctcgtggacatccaggaggcaatggccactgcgcatgttaccgaaatcttggctgatattcagtcgcacatggacagactgatgactcaaatggcccaggccaaggagcagttagacacgagtaacgaatcagcagaacccaaggctgagggagatgaggaggggcctagtggcgcatccgaggaggaagacacatag

SEQ ID NO: 245172 - DNA, 1743 bp, synthetic construct
  misc_feature 1..1743: note = Description of Artificial Sequence: Synthetic coding sequence
  source 1..1743: mol_type = other DNA
atgtccgagaatagaaaacccctgctgggattcgtttcaaagcttacctccggcaccgccctcggtaactccggcaagacacattgtccactttgtctcgggctttttaaagcacccaggctgctcccgtgtttacatacagtgtgtacaacgtgcctcgaacagttagaaccatttagcgtggtggatattagggggggtgactcagatacctctagcgagggttccatattccaagaattgaagccaaggtcactgcagtcccagatcggtattctgtgccccgtttgcgatgctcaggtggatctgccaatggggggagtcaaggctctgaccatagaccacctcgctgtgaacgatgtgatgcttgaaagcctgcgcggagaaggccaaggtctcgtatgtgacctatgcaatgaccgcgaggtggaaaagcgctgtcaaacttgtaaggccaacctctgccatttttgttgccaggcccaccggaggcaaaaaaaaaccacttaccacactatggtggaccttaaagacctcaagggttattcccggattggcaagcccatcctctgccctgtccaccccgcagaagagctgcggttgttttgcgaattctgtgacaggcccgtgtgccaggactgtgttgtcggagaacaccgcgagcacccttgcgacttcactagtaacgtgatccacaagcacggagatagtgtttgggagctgctaaaaggaacacaaccacatgtcgaagccttagaagaggccctagcacagatccacatcattaatagcgctctgcagaaaagagtagaggcagtggccgctgatgtgcgcaccttttctgaggggtacattaaggcaatcgaggagcaccgggataaactactgaagcagcttgaggatatcagagcccagaaggaaaactccctccagctgcagaaagcacagctagagcagctgttggccgacatgcgcacaggcgtggagtttacagagcaccttctgactagcggttcggaccttgaaattctgataacaaagcgggttgtggtagagcgactgcgcaagcttaataaggtgcagtacagcacacgaccaggggtgaacgacaagatccgcttctgtccgcaagagaaagccggacaatgcaggggttacgaaatctatggcaccataaatactaaagaagtggatcccgcaaagtgtgtcctccaaggggaggacctacacagagccagagagaagcaaactgctagttttacacttctatgtaaggacgctgctggtgagataatgggacgaggaggggacaatgttcaggtagccgttgtgcctaaagacaagaaggactcacctgtaaggaccatggtccaagacaacaaggatggcacctattacattagctatacaccaaaggagccaggcgtttacactgtgtgggtttgtatcaaggagcagcacgttcaaggcagcccgttcacagtgatggtgagacggaaacatcgacctcattcaggcgtttttcattgctgcaccttctgctcctcaggcggacagaaaactgcaagatgcgcctgcggcggaacaatgcctgggggttaccttggctgcggccacgggcacaagggccatcctgggcatccccattggtcttgttgtggaaaatttaacgaaaagtccgaatgcacctggacaggaggacagtctgctcctagatcgttgctccgaactgtcgctttgtag

SEQ ID NO: 245173 - DNA, 1572 bp, synthetic construct
  misc_feature 1..1572: note = Description of Artificial Sequence: Synthetic coding sequence
  source 1..1572: mol_type = other DNA
atgctctctggcgtcacactggagggaggaggagccagaagcggtgagggtcggagatcccgcaccgagctcaagcctcgcagcctccagagtcagattggaattttatgccccgtgtgtgacgctcaggtcgatcttccaatgggcggagtgaaggccctgaccatcgatcacctcgccgttaatgacgtcatgctggaatcactgcgaggtgaggggcagggactggtctgtgatctgtgtaatgaccgcgaagtcgagaagcgttgccagacttgcaaggccaacctgtgtcacttttgttgccaggcccacaggaggcagaagaaaactacatatcacaccatggtggaccttaaggacttgaaaggatactccagaataggtaaacccatcctctgtccggtgcatcccgcagaagagctccggctattctgtgagttctgtgatcgcccagtgtgccaggactgcgtggtaggggagcatcgagagcatccttgcgacttcacttcaaacgtgattcataagcacggggatagcgtgtgggaattgctcaaagggactcagcctcacgttgaagctttggaagaggcgcttgctcagatacacattatcaacagcgctctacaaaagagggtagaggctgttgccgctgatgtgcgaaccttctctgagggttatataaaagcgatcgaggagcacagggataagctgctcaagcagctggaggacatcagggcccaaaaggaaaactcacttcagctgcagaaagcccaactggaacagttgctggccgatatgagaacaggtgtagagtttaccgagcacctccttacttcgggctccgacctcgaaatcctcattactaaacgcgtggtcgttgagaggctccgcaaattgaataaggttcaatactccactcgccctggagtgaatgacaagattcgattctgtcctcaggagaaagcaggtcagtgccgcggatatgagatttatggcaccatcaacaccaaggaagtagaccccgctaagtgcgtgcttcagggtgaagacttacatagagccagggagaaacaaacagcaagcttcaccttattatgtaaggacgcggcaggagagatcatgggccgagggggagataacgttcaggtggccgtggtgcccaaagacaaaaaggattcaccggtgcgcacaatggttcaagataacaaggatgggacttattacatctcatacacaccgaaagagccaggggtgtacaccgtttgggtctgcattaaagagcaacatgtgcaggggtcgccctttaccgtgatggtccggagaaagcacaggccacacagcggagtcttccactgctgcaccttctgttcctccggcggacaaaagaccgcgagatgcgcttgcggtggtacaatgcctggaggctacctgggctgcggtcacgggcataaaggccaccctggccatccacattggtcatgctgcggaaagttcaatgaaaaatccgaatgtacatggactgggggacagagcgcacccagatcgctgcttagaactgtggccctctag

SEQ ID NO: 245174 - DNA, 1689 bp, synthetic construct
  misc_feature 1..1689: note = Description of Artificial Sequence: Synthetic coding sequence
  source 1..1689: mol_type = other DNA
atgtcagaaaaccgaaagcctctcctcggattcgtttcaaagctgaccagcggaacagcactgggcaatagtggcaagacacactgtcctttgtgtctgggcctttttaaggctccaagactcctgccttgcttacataccgtttgcaccacttgcctggagcagctggaaccattcagcgtggtggacatccgcggaggagatagtgatactagcagcgagggctcaatcttccaggaactgaaacccaggtcacttcaatcccagattggcatcctgtgccccgtgtgtgatgcacaagtggatctgccaatgggtggggtgaaggcattaacgatcgatcatctggcggtcaacgacgtgatgctggagtcactccggggtgagggccaggggctggtgtgcgacttatgcaatgacagggaagtggaaaaacgctgccagacatgtaaggctaacttgtgccacttttgttgtcaggcccaccgaagacagaagaagacgacctatcacactatggttgacctgaaggatctgaagggttactccaggatcggcaaacccattctgtgtcccgtgcacccagccgaggagctccgcttgttttgcgagttctgtgatcggccagtctgccaagactgcgttgttggcgaacacagagagcatccgtgcgacttcacatcgaatgtgatacacaaacatggcgacagcgtgtgggagcttttgaagggaacgcagccacacgtggaggctttggaggaagctctggcccaaattcacatcatcaacagcgctctgcagaaaagagtcgaggcagttgcagcagacgtccgtaccttcagcgaaggctacatcaaagctattgaggaacaccgtgacaaactcctcaagcagctggaggacatccgcgctcaaaaggagaattccttacagcttcagaaggcccagctggaacaattattggccgacatgcggacaggcgttgagtttaccgaacacctgctgaccagtggttctgatctggagatattaattaccaaacgcgtggttgtagagcggctcagaaaactgaataaagtccagtatagcactcgcccaggggtgaacgacaaaattcggttctgccctcaggagaaagctggacagtgccggggttacgagatttatgatcttcatagagcacgcgaaaaacagaccgctagtttcacgttgctgtgtaaagatgcagcaggggaaatcatgggtcggggtggtgacaatgtgcaagttgccgtggtccccaaagataagaaagactcccctgttcggactatggtccaagacaataaagacggcacctactacatctcatataccccaaaggagcccggagtgtacacagtttgggtgtgtattaaagaacagcatgtgcaggggagccccttcactgttatggtcagaaggaagcaccggcctcatagcggcgtcttccactgctgtaccttctgcagttccggaggccagaagaccgcgcgatgcgcatgtggcggtacgatgcccggagggtatcttggctgcggccacggccataaaggtcatcctggacacccacactggtcctgctgcggaaagttcaatgagaaatccgagtgtacttggactggtggtcagtccgctccccgttcactgctcaggactgtagccctctag

SEQ ID NO: 245175 - DNA, 1917 bp, synthetic construct
  misc_feature 1..1917: note = Description of Artificial Sequence: Synthetic coding sequence
  source 1..1917: mol_type = other DNA
atggacggcagcggtccttttagttgccccatctgtctcgagccacttcgagagcctgtgactctcccatgcggccataacttttgtctcgcctgcctgggcgcactgtggccccataggggggcttctggtgccggagggcctgggggtgcagcccgttgtccgctttgtcaggaacctttccctgatggcttgcagctgaggaaaaatcacacattgtccgaactcctgcaacttcggcaggggtcgggccctgggtctggtcccggtcccgcaccagccctcgcgcctgagccctccgcaccaagcgctctaccaagcgtgcccgagccttcagctccctgcgctcccgagccatggcccgctggagaagaacccgtgcgctgtgatgcctgccctgagggcgcagccctcccagctgccctgtcttgtctgtcctgtctggcctccttctgcccagctcatctgggccctcacgaacgaagtcctgctctccgcggacaccggttggtgccgcctttgcgccgactggaggaaagtctgtgtcccaggcacctgcgtcctttggaacggtattgcagagcagagcgagtctgtctgtgtgaggcatgcgccgctcaagagcatagaggtcacgaacttgtcccactagagcaggagagggctttgcaggaagccgagcagtcgaaggtgttgtccgccgttgaagatcgaatggatgagttgggagctgggatagcacagtcacggagaaccgtagccttgataaagtcagctgccgttgcggagcgagagcgtgttagtcgcctattcgcagatgccgctgcggcattgcagggcttccaaacgcaggtccttggttttattgaggagggagaggctgcgatgcttgggagatctcagggtgacttgaggaggcaggaagaacagaggtctagactgtcgagagccaggcagaacttgtcccaagtgccagaggccgactctgtgtcatttctccaggagctccttgctttgcgactagcccttgaggacggctgcggcccagggcctgggcctcccagggaactgtcctttacaaagtcctcccaggctgtgagggccgtgagagacatgttggccgtcgcctgtgtgaaccagtgggagcagctgcgtggtccgggaggtaacgaagatggcccacagaagctcgactcggaggccgacgctgaacctcaggacctggagtctaccaacctcctggagtcagaagcccctcgagattactttctgaagttcgcttatatcgttgacctcgacagcgataccgctgacaagttcctgcaattgttcggaactaaaggcgtgaagagggtcctttgccccatcaattacccactttcgccaacccgttttactcactgcgagcaggtgttgggggagggcgcacttgaccgtggtacctactactgggaggttgagattatcgaaggctgggtctccatgggcgtaatggcagaggatttttcccctcaagaaccatatgacagaggacgtctggggaggaatgcgcactcatgttgtctgcaatggaacggtagaagtttttcggtgtggttccacgggctcgaggctcctcttccccaccctttttctccaactgtcggagtctgcctggagtatgcggatcgtgccctggccttttacgccgtgcgggacggaaagatgtcactgctgcggagactgaaggcttctagaccgaggcgcggagggattccagcttctccaatagacccttttcagagcagactggattcacacttcgccggactgtttacacacaggctgaagccagctttctttcttgagtctgtagatgcccatttgcagatagggcctctgaaaaaaagctgtatttcagtccttaagagacgctag

SEQ ID NO: 245176 - DNA, 1482 bp, synthetic construct
  misc_feature 1..1482: note = Description of Artificial Sequence: Synthetic coding sequence
  source 1..1482: mol_type = other DNA
atggcctctggcatcctggttaatgtaaaagaagaggtgacctgcccaatttgcctggagctcctgacacagccactatccctggattgtggacatagtttctgccaggcttgcttaaccgccaatcataagaaatcaatgctggacaaaggcgaaagttcctgccctgtgtgccgcatcagctatcagcctgagaatataaggcccaaccggcatgtcgccaacatcgtggaaaagctgagggaagtgaagcttagtcctgagggacaaaaggtggatcactgtgcaaggcacggcgaaaaattgctgctgttctgccaagaagatggcaaggtgatctgttggctatgcgagcgaagtcaagagcaccgcggacaccacaccttcctgactgaggaagtcgcacgagaataccaagtcaagttgcaggcagccctcgaaatgctacggcaaaaacagcaggaggcggaagagctagaggctgacatccgcgaggagaaagcttcgtggaagacccaaattcagtatgataaaactaatgtactggccgatttcgaacagctgagggatattctcgactgggaagagtctaatgagctgcagaaccttgaaaaggaggaagaggatatactgaaatcgctgacaaattccgaaaccgagatggtgcagcagacacagtccctgagggagcttattagcgacttggaacaccgtctgcaaggcagcgtcatggagttgctacagaaagtgtcaggaaagatacttaggactgaaaacgtgacactcaaaaaacctgaaacgtttcccaaaaaccagcgcagggtgtttcgagcacccgacttaaaagggatgctggaagttttccgggaacttacggacgtcagaaggtattgggtagacgtgactgtcgcacccaataacatctcgtgtgcagtaatttcagaagacaagcggcaagtcagttctcccaaaccacagatcatctatggtgccagaggtactcggtaccagacatttgttaatttcaactactgcaccggaatcctcggatctcaatccatcacgagcggtaaacactattgggaggttgatgtttctaaaaagacagcatggattctcggtgtgtgcgcgggtttccagccggatgccatgtgcaacatcgaaaaaaatgaaaactaccagcctaaatatggctactgggtgattggccttgaggagggcgtaaagtgctctgccttccaggatagttccttccacacccccagcgttccgtttatcgttcctctctccgtgatcatatgtcccgaccgcgtgggggttttcctggattatgaggcatgtaccgtgtccttctttaacatcaccaatcacgggtttttgatatacaagttcagtcactgctccttctcccagcccgtgttcccatacctgaaccccaggaaatgcggagtgccaatgaccttatgctctcccagttcgtag

SEQ ID NO: 245177 - DNA, 981 bp, synthetic construct
  misc_feature 1..981: note = Description of Artificial Sequence: Synthetic coding sequence
  source 1..981: mol_type = other DNA
atggcatcaggcatactggtgaacgtcaaggaggaagtgacatgccccatctgcctggaactgctcacccaaccattatctctcgattgcggtcactctttttgtcaagcctgtttgaccgcaaatcacaaaaaatccatgctggacaagggggagagctcatgtcccgtgtgtcggatatcctatcagcccgagaacatcagacctaaccgccatgtagccaatattgtcgaaaagctgcgggaggtgaagttgtctccagaagggcaaaaggtggatcactgcgcaagacacggtgaaaagctcctgcttttctgccaggaagatggcaaggtgatttgctggctgtgtgaaaggtctcaggaacacaggggacatcacacattcctgactgaggaggtggcacgcgaataccaagtgaaactccaggccgctctggagatgcttaggcagaaacaacaggaggccgaggaactcgaggcagacattagagaagagaaagcctcttggaagactcagatccaatacgataaaaccaacgtccttgccgatttcgagcagctgagggacatcctggactgggaagaaagtaacgagctccagaacctcgagaaggaggaggaggatatcttgaagtctctaaccaacagcgagaccgagatggtgcagcagactcagagcctgcgggagctgatatcagatctggagcaccgtctgcaagggagtgtgatggagctgttgcaaggggtggatggagtcattaagcgaaccgagaacgttactttaaagaaaccagagacattcccgaaaaatcagagacgcgtgttccgggctccagatcttaaaggcatgctggaagtgttccgagaattgactgacgtgcggagatattggggctggtccgctatggctagaagcaggtttacggccacctccacttcacaaatccaggctatcctgctgccccagccacccaaatag

SEQ ID NO: 245178 - DNA, 1482 bp, synthetic construct
  misc_feature 1..1482: note = Description of Artificial Sequence: Synthetic coding sequence
  source 1..1482: mol_type = other DNA
atggccagcggcattttggtcaacgtgaaggaggaggtgacctgcccaatctgcctggagttgttaacgcagcccctgagccttgactgcggccacagtttttgtcaggcttgcctgactgccaatcataaaaaatccatgctggacaaaggcgaatcgtcctgtccagtgtgcagaattagttaccagccagagaatatccgtcctaacagacacgttgcaaacatcgtggagaaactgcgggaagtgaaactgtcccccgaaggacagaaggtcgatcactgtgcaagacacggcgagaagctgctcctgttctgccaagaggatgggaaagtgatctgttggctgtgcgagcggtcccaggaacaccgcggtcaccacacattcttgaccgaggaggtcgcacgggaatatcaggtaaagttacaggctgcccttgaaatgctcagacagaaacaacaagaggcagaggaacttgaggccgatatccgcgaggaaaaggccagttggaaaactcagattcagtatgacaagactaacgtcctggccgatttcgaacagttgcgggatattttagattgggaggagtctaatgaacttcaaaatttagagaaggaggaggaggatatcctaaaaagcctgaccaactctgagaccgagatggtacagcaaacacagagcctgcgcgaactaattagtgacctcgaacatagactccaagggagtgtgatggagctgctgcagggcgtcgatggcgtgattaaacgcacggagaacgtcaccctaaagaaacccgagactttcccaaagaatcagaggagagtcttcagagctcctgaccttaaaggaatgctggaggtgttccgcgaattgacagatgtcaggaggtactgggtggatgtcacagtggcccctaataacattagttgtgcagtcatttccgaagataagagacaggtttcaagcccaaagcctcagatcatatacggtgcgagggggacgcggtaccaaactttcgttaactttaattattgcacaggcatcctggggtcacagtccataacctctgggaagcattactgggaagttgacgtttctaaaaaaacagcgtggatactgggcgtatgcgcgggattccagcctgacgccatgtgtaatatagaaaagaacgagaactaccagccgaaatacggctactgggtaattggcctggaggaaggcgtgaaatgtagcgccttccaggatagtagcttccacactcctagcgtgccattcatcgtcccattgtctgtaattatctgcccggaccgcgtgggtgtcttcctcgattatgaggcatgcacagtgtcattttttaacatcactaatcatggatttctgatttacaaattcagccattgtagcttcagccagccagtgttcccttacctgaatcctcggaaatgtggagtccccatgaccctgtgttccccatcatcatag

SEQ ID NO: 245179 - DNA, 1044 bp, synthetic construct
  misc_feature 1..1044: note = Description of Artificial Sequence: Synthetic coding sequence
  source 1..1044: mol_type = other DNA
atggcaagcggtattcttgtcaacgttaaagaagaagtcacttgccctatctgcctggaactactgacacagccactgtctctggactgcggccactccttctgtcaggcatgtcttacagccaaccacaaaaagagcatgctcgacaaaggcgagtcctcctgtcctgtgtgtcgcataagttaccagccagagaacatcaggcctaatcggcacgttgccaatattgtggagaaactgagggaagtcaaactgagccctgaagggcaaaaagtggaccactgcgcgagacacggcgagaaactgttgttgttctgccaagaggatggcaaggtcatttgctggttatgcgagaggagccaggagcacagaggtcatcacacgtttctcactgaggaggtggctagggaatatcaggtcaagctgcaagcagcattggagatgctgcggcagaagcaacaggaagccgaagagctcgaggctgacatccgggaggaaaaggcaagttggaaaacccaaatccagtatgacaaaacaaatgtcttagccgactttgagcagctgcgtgacattctggactgggaagagtcaaatgaactgcagaacttggagaaagaagaagaggatattctaaagagcttaaccaacagcgagaccgaaatggtgcagcagactcaaagtctgagagaactgatcagtgatctcgagcacaggctgcaaggctctgtcatggagcttctccagggtgtggacggggtaattaagagaactgaaaacgtgacattgaagaaaccagagaccttccccaaaaaccaacgaagagtgttccgggcaccagatctgaagggtatgctcgaagttttcagggaacttacagacgtgagaagatattgggggaaggaaaagtcccactaccacaaacctccatgcggcttaagcctcctgctgtccctctcatttcgcattttatgttctctcttagggtcatgttttaaaatctatgatagtccgagcaaaacacacattacttacccgtctctctag

SEQ ID NO: 245180 - DNA, 984 bp, synthetic construct
  misc_feature 1..984: note = Description of Artificial Sequence: Synthetic coding sequence
  source 1..984: mol_type = other DNA
atggccagtggtatccttgtcaacgtcaaagaggaagtgacttgccccatatgcttggaactgctgacgcagcccttgtctctggattgcgggcatagtttctgccaggcatgtctgaccgccaaccacaagaagagtatgctggacaagggtgagagtagctgcccagtgtgtaggatcagctaccagcctgagaacatcaggcccaacaggcatgtggcaaatatagtggagaagcttcgtgaggtgaaacttagtcccgaagggcagaaagtggatcattgtgctcgtcatggggaaaaactccttttattctgtcaggaagatgggaaagtgatttgctggctgtgcgaaaggtctcaggagcatcgcggtcaccatacgttccttacagaggaagtggccagagagtatcaggtaaaacttcaggccgcactggaaatgttgcgccagaaacagcaagaggctgaagaactggaggcagacattagggaagagaaggcctcttggaaaactcagatccagtatgataaaaccaacgtcctggcggattttgagcagctccgtgatatcctggattgggaagagagcaacgagctgcagaacctcgagaaggaggaagaggatatacttaagtcccttactaattcagaaacagaaatggtgcagcaaactcagagcctgcgagagttgatcagtgacttagaacaccgccttcagggatctgtcatggaactgctccaagccggtgtgcagtgtctgatcctgcgcactgaaaacgttacactgaaaaagcctgaaactttccccaagaaccagcgcagggtcttccgggcaccagatctaaagggaatgctggaggtgttccgggaactcactgatgtgaggagatattggggctggagcgccatggcaaggagtaggttcaccgctacctcaacaagtcagatccaggccatcctgcttccacagccgcctaagtag

SEQ ID NO: 245181 - DNA, 981 bp, synthetic construct
  misc_feature 1..981: note = Description of Artificial Sequence: Synthetic coding sequence
  source 1..981: mol_type = other DNA
atggcttcagggatcctggtgaatgtgaaagaggaggtgacgtgccctatttgccttgagttgctcacacaaccactgagtctggattgcgggcactccttctgtcaggcctgtttgaccgcaaaccacaaaaaatcaatgctggataaaggtgagagcagctgccccgtatgccggattagctatcagcccgaaaacataaggccgaacaggcatgtggctaatatcgttgagaagctccgtgaggtgaaactgtctccagagggacaaaaagtggaccattgtgccaggcacggcgagaagcttttgctgttctgtcaagaggatggcaaagtcatttgttggctgtgtgaaaggtcccaggagcataggggccaccacacgtttcttacggaagaagtggcaagagagtaccaggtgaagctccaggccgctcttgagatgttaaggcaaaagcagcaggaagctgaagagctggaggctgacatccgcgaggaaaaagctagttggaaaactcagatccagtacgacaaaaccaacgtgctggctgatttcgaacagttgagggacattcttgattgggaagagtcgaatgaacttcagaatttagaaaaagaagaagaggatatcctgaagtctctcacaaatagcgagacagaaatggtccagcagacacaatctctcagggagttgatttctgacctggagcataggctgcagggttcggtaatggagcttcttcagggcgtggatggagtaatcaaaaggaccgaaaacgtgacccttaagaagcctgaaaccttcccaaagaatcagcgccgagtcttcagagctccggacctcaagggaatgctggaggtgttccgagagctgaccgacgtgcgtaggtattggggctggtctgccatggctcgctcacgtttcacagcgacaagtactagccagatccaggctattctattgccccagcctccaaaatag

SEQ ID NO: 245182 - DNA, 630 bp, synthetic construct
  misc_feature 1..630: note = Description of Artificial Sequence: Synthetic coding sequence
  source 1..630: mol_type = other DNA
atggccagtggaattcttgtgaatgtcaaagaggaagttacctgtccaatttgtctcgagctgctaacccagccgctgtcccttgactgtggacattccttctgccaggcatgccttactgcaaatcacaagaagtctatgctggacaagggagaaagctcctgcccagtatgcaggatttcctaccaacccgagaatataaggcccaatcggcatgtggccaacatcgtggagaagctgagagaagtaaagctgagcccggagggccaaaaggtcgatcattgcgccagacacggggagaagctcctgctgttttgccaggaagatggcaaggtaatctgttggctgtgtgagagatcacaggagcatcggggtcaccatacctttttgactgaggaggttgccagggaataccaagtgaagctgcaggcagcgctcgagatgctgcggcagaagcagcaggaggctgaggaacttgaagcagacattcgggaagaaaaggccagttggaaaacacagatccaatacgacaaaactaatgttttagccgactttgagcagttgcgcgacatcttggactgggaagagtctaatgaattgcagaacttggagaaagaggaggaagactag

SEQ ID NO: 245183 - DNA, 219 bp, synthetic construct
  misc_feature 1..219: note = Description of Artificial Sequence: Synthetic coding sequence
  source 1..219: mol_type = other DNA
atggctagcggaatactcgtgaacgtaaaggaggaggttacctgtcctatctgtttggagctattgacccagcccctgtctctcgattgcggacattccttctgtcaagcatgcctgacagcgaaccacaaaaagtcgatgctcgataaaggggagagctcatgtcccgtctgtcgcatctcctatcaacccgagaacatcaggcccaaccgtcactag

SEQ ID NO: 245184 - DNA, 816 bp, synthetic construct
  misc_feature 1..816: note = Description of Artificial Sequence: Synthetic coding sequence
  source 1..816: mol_type = other DNA
atggcttcaggcattcttgtgaatgtgaaagaagaggtgacttgccccatatgcttagaactcctaacacagcctctgtcgttggattgtggacactcattctgccaggcatgcctgacggccaatcacaaaaagtccatgctggataaaggagaatcatcatgcccagtgtgcagaatcagttatcaaccagaaaacattcgccctaaccggcacgttgctaatatcgttgaaaaactgagggaagtcaagctgtcaccagagggtcagaaagtagaccactgcgcaagacacggtgagaagctgctgctcttttgccaggaggatggcaaagttatttgctggttgtgtgagcgatctcaggagcacagaggacaccatacgtttttgactgaagaagttgcaagggagtaccaggtcaagctacaggctgcgctagagatgctcagacagaaacagcaggaggccgaagaacttgaggccgatattcgcgaagaaaaagcctcatggaagacacagatccagtatgataaaactaatgtgctggcggactttgagcagctacgggacatcctcgattgggaggaatctaacgaactgcagaacctggaaaaggaggaggaggatatcctcaagagtctaactaacagcgaaacagaaatggtccagcagactcagtcattaagggaactgatctcggacctggagcatagactccagggatccgtcatggaactactgcaggatggggagagagacctggaggaggccagaaattttagcaaaaagtcgaaggagtctgtctcttctagttag

SEQ ID NO: 245185 - DNA, 1464 bp, synthetic construct
  misc_feature 1..1464: note = Description of Artificial Sequence: Synthetic coding sequence
  source 1..1464: mol_type = other DNA
atggcatggcaagtatctctcctggagttggaggactggctgcaatgccctatttgcctcgaagtctttaaagagcccctgatgctgcaatgtggccacagctactgcaagggttgtctagtgtcgctgagttgccacttggacgccgagctacggtgcccagtctgtaggcaggcggtggacggatcatcatctctgccaaacgtgtcactggctagggttatcgaagcgctacgactcccaggggatcctgaacctaaggtatgcgttcatcatcgaaatccccttagcctgttctgtgagaaggatcaggaactgatttgcggcctgtgcgggctgctggggtcccatcagcatcacccagtgacacctgtaagtaccgtttattctagaatgaaggaggaactggcggcactcatcagtgagttaaagcaggaacaaaagaaggtggatgaattgatcgcgaagctggttaacaatcggaccagaatagtcaatgaatccgatgtgttcagctgggtgatccggagagaatttcaggaactgcatcatctggtcgatgaggagaaagctaggtgcctggagggtattggcggtcacacacggggactcgtggccagtctggacatgcagctggaacaggcccaaggtacccgggaacgcctcgcccaagccgagtgcgtattggagcagtttggcaatgaggaccatcacaagttcatcagaaagttccactctatggcctcccgggcagagatgccccaggcgagacctctggagggagcattttctccaattagcttcaagcccggtctgcaccaagccgacattaaactgacagtgtggaaacggctttttagaaaggtactaccggctcccgaaccactgaaactcgacccagctaccgcccaccctctcctcgagctctccaagggtaacacagtggttcagtgcggacttttggcacagcggagggcctcccaacctgaacgctttgattacagcacctgtgtgttggcttcaaggggctttagctgcgggcgacattactgggaagtggtggttggaagtaaaagcgattggcgactgggtgtgattaaaggtaccgctagtcgtaagggaaaactaaaccgctctcctgagcacggtgtctggttgatcggtctgaaagaaggcagagtgtatgaagcctttgcttgtcctagagtccccctaccagtcgctggtcaccctcatcgaatcggattatatctacactacgagcaaggagaactgacctttttcgatgctgacaggccggacgatttaaggcctctttatacctttcaagcggatttccagggtaaactctacccaattttggatacttgttggcacgaacgaggatctaactccctacccatggtgctaccgcctccgtcggggcctggaccattatcaccagagcagccgactaaactgtag

SEQ ID NO: 245186 - DNA, 1464 bp, synthetic construct
  misc_feature 1..1464: note = Description of Artificial Sequence: Synthetic coding sequence
  source 1..1464: mol_type = other DNA
atggcatggcaggtgagcctgctcgagctggaagattggcttcagtgtcccatatgtctcgaggtgttcaaagagcctctgatgttgcagtgtggccatagctattgcaagggctgtcttgtgtctctcagctgccacctcgacgccgagctgagatgtccagtgtgtaggcaggccgtggacggtagtagctccctgccaaacgtttcccttgcccgtgtcatagaagccctacgcctacccggagacccggagcctaaggtgtgcgtccaccacagaaacccgctgtccttattttgtgagaaggaccaggaactaatctgcggactttgtggcttgctcggttcacaccagcaccaccctgtgacccctgtaagcacagtttactccaggatgaaggaggaattggccgcactcattagcgagctgaaacaggagcaaaagaaggtggacgagctcatcgcgaaactggtgaacaacaggacacgcattgttaatgagtccgatgttttttcctgggtcatccgtagggaatttcaggagctgcatcacttggtggatgaagaaaaggcacgctgcctcgaaggtatcggcggacacacccgtggtctggttgcttcgctcgatatgcagctagagcaggcacaaggcacgcgagagcgtctggcgcaggctgaatgcgttctggagcaattcggaaatgaggatcaccacaagttcatccgaaaatttcactcaatggccagccgtgccgagatgccccaggctcgacccctggaaggcgcattctcacccatttcatttaagccgggtcttcatcaagccgatatcaaactgactgtgtggaagaggctgttcagaaaggtgttgcccgctcccgagcctctcaagttggaccctgccacggcgcatcccctgctcgaattatccaaagggaacacggtggtgcagtgtggcctactcgcacagaggcgcgcttcccaacccgaacgctttgattatagcacttgtgtactggcctccagagggttttcttgcggccgacactattgggaagtcgtcgttggttcaaaatccgactggcgcctcggagtgattaaggggaccgctagccggaagggcaagctgaatcgtagtcccgagcacggcgtgtggctcattgggctgaaggaagggagggtgtatgaagcatttgcttgccccagagtccccctcccggtggcgggacaccctcataggataggtctctatctccattacgagcagggtgaattgaccttctttgacgccgatcggcctgacgatctgagacctttgtacacattccaagctgacttccagggaaaactctacccaatcctagacacatgttggcacgaacgcggtagcaacagtctccccatggtgcttcccccaccatccggaccaggaccgcttagcccagaacagccgacaaagctgtag

SEQ ID NO: 245187 - DNA, 1467 bp, synthetic construct
  misc_feature 1..1467: note = Description of Artificial Sequence: Synthetic coding sequence
  source 1..1467: mol_type = other DNA
atgacatctcccgtgctcgtagacattagagaggaagtcacttgtcccatctgtctcgaactcctaaccgagcccctaagtattgactgcggtcactcgttttgccaagcctgtatcaccccaaacgggcgtgagtcagtcatcggccaggagggcgaacgcagctgcccagtctgccagacgagttatcagccgggaaacttacgccctaataggcatctcgctaacatcgtgcgcaggctcagggaggtggtgctggggcctggcaagcagcttaaggccgtactttgtgctgatcatggggaaaagctccagctgttctgccaggaggacgggaaggtgatatgttggctgtgtgagaggtctcaggaacacaggggtcaccatactttcctggttgaggaggtggctcaagagtaccaagagaagtttcaggagagtcttaaaaagctcaaaaatgaggaacaggaagcggaaaagttgaccgcttttattagggaaaagaaaaccagttggaagaaccaaatggagccagagagatgcaggatccagaccgagttcaatcagctgcgaaatatcctggacagagtggagcagcgggagctcaagaaacttgagcaggaggaaaagaaggggttgaggatcatcgaggaggcagaaaatgatttggtgcaccagacacagagtctgcgggagctcatttctgatctcgagcggagatgccaggggagcacgatggagctgttgcaggacgtgtcagacgtgactgagcgctccgagttttggaccctgagaaaaccagaagctttacctacaaagctgcgtagcatgtttagagctccagaccttaagaggatgttgcgagtctgcagagagctcacagatgtccaatcttattgggtcgacgtgacgttgaatccccacaccgctaatcttaacttggtactggcaaagaatcggcgtcaggtccgctttgtgggcgctaaggtatctggaccaagctgtctcgaaaaacactacgattgctccgtgctaggaagccaacatttttcctcaggcaaacattattgggaggtggatgtagccaaaaagacggcatggatcctcggggtttgcagcaacagtctggggccaaccttttctttcaaccactttgcccaaaatcattctgcttactcgaggtaccaacctcagtcaggctactgggtgatcggcctccagcataatcatgaatatagagcctatgaagatagcagccccagcttattactgagcatgaccgttccaccaaggcgggtgggggtgtttctggactatgaagccggaacagtttctttttataacgtgacgaaccacggatttcctatatacacattttccaaatattactttcccactactttgtgcccctacttcaacccatgtaactgtgttatccccatgactctgcggcgaccttcaagttag

SEQ ID NO: 245188 - DNA, 1551 bp, synthetic construct
  misc_feature 1..1551: note = Description of Artificial Sequence: Synthetic coding sequence
  source 1..1551: mol_type = other DNA
atgtgtgggtcggaaaggatcctgcaagccggaaatatactggagattcgcgtcggacaggcaggcgctcgcagggtcgcaaccatgacgtcaccagtcttggtggatattagagaagaagtgacctgtcctatatgcctcgaattgctgacagagcccctgagcattgactgcggccattctttttgtcaggcatgtatcactcccaacgggagggagagtgtgataggtcaggagggtgagaggtcatgccccgtgtgtcaaacctcataccagcccggaaacctgagacctaaccgacacctcgccaacatcgtgcgcagactaagagaagttgtgctgggacccggtaagcagctgaaggccgttctctgtgcagaccacggagagaaactccagctgttctgtcaagaggatgggaaggttatatgctggctctgtgaaaggtcacaggaacaccggggacaccacacattcctcgttgaagaagtggcacaggaatatcaggagaagtttcaggagtccctgaagaagctgaaaaatgaggagcaggaggccgaaaagctgactgcctttataagggaaaaaaaaaccagttggaaaaaccaaatggaacccgagcgctgtcgcattcagacagagttcaaccaactccggaatattctggatcgggtcgagcaacgggaacttaagaagctcgaacaggaggaaaaaaaggggctccggatcattgaagaagcagaaaatgatcttgtgcaccagacacagtccctgagggaactaatatccgacctggaaaggcgctgccagggctctactatggaacttctacaggatgtgtccgatgttaccgagaggagcgagttctggacactgcgtaaaccagaggcacttcctacaaaactgcggagtatgtttagggccccagacctcaagcggatgctacgggtgtgcagggaacttaccgacgtgcagagttattgggttgacgtaacgctgaatccacacactgcgaatctgaacttggttttggctaagaacaggagacaggttagattcgtgggcgcaaaagtgagcgggccatcctgcctggagaagcattatgactgctcggtgctcggaagccagcacttctcaagtgggaagcattactgggaggtggatgttgcaaaaaaaacagcttggatcttgggcgtatgcagtaacagcttgggccctaccttctctttcaatcacttcgcccaaaatcatagtgcctacagccgctaccaacctcagtcaggctactgggtgattgggctgcagcataaccatgagtaccgggcatatgaggactctagcccttccctcctgttgagtatgacggtaccaccgagacgggtcggcgtgttcttagactatgaggcaggcacggtatctttttacaatgtcaccaaccatggctttcccatctacacgttttccaaatattattttccaacgaccctttgcccttacttcaacccctgtaactgcgttatccccatgacgctgcgccgtccttccagctag

SEQ ID NO: 245189 - DNA, 1389 bp, synthetic construct
  misc_feature 1..1389: note = Description of Artificial Sequence: Synthetic coding sequence
  source 1..1389: mol_type = other DNA
atgacctccccggtactggtggacataagagaagaggtgacgtgtccaatttgccttgagctactcaccgaaccactgtccatcgactgcggtcattctttctgtcaagcgtgtattacacccaatggccgtgagtcggttattggtcaggaaggagagcggagttgtccagtgtgccagacctcgtaccagccaggaaatctgagacccaaccggcacctggccaacatcgtacgcagactgcgcgaagaggatggtaaagtaatctgttggttatgtgaacgatcccaggagcatcggggacatcacacttttctggttgaggaggtggcccaagaataccaagaaaaatttcaagagagcctcaagaaactgaaaaacgaggagcaggaggccgagaagctgaccgccttcattagagaaaagaagacgtcctggaagaatcagatggaacctgaaagatgcaggatacagacagaatttaatcaactacgcaatatattagacagagtcgagcaacgtgagctcaagaaacttgagcaggaagaaaagaaagggctaagaatcatcgaagaagccgagaatgatcttgtgcatcagacacagtctctccgggagctaatctcagatttggaaaggaggtgccaggggtcaaccatggagctattgcaggacgtgagcgacgttacggaaaggagcgagttctggaccttgcggaagccagaggccctaccaaccaaactgcgttctatgtttcgggcaccagacctaaagagaatgttacgcgtttgtagagaattgacagacgtgcagagctattgggtggatgtgacactcaacccacataccgcgaacttgaacctcgtacttgccaagaataggagacaggtccggttcgtcggcgcaaaagtttcaggtcctagctgccttgaaaaacactacgactgctccgtgctggggagtcagcacttctcaagtggcaaacactattgggaggtagatgttgcaaagaaaacggcttggattctcggcgtatgctccaattcactggggcctaccttttccttcaatcattttgcccagaaccattctgcatacagcagatatcagccacagtctggctattgggtaattgggcttcaacacaaccacgaatacagggcttatgaggattcaagtccatctctgctcctctctatgaccgtgcctcccaggagagttggagtcttcctggattatgaggcgggaacagtgagtttctacaatgtgacaaaccatggattcccaatctacacttttagcaagtattatttccccactaccttgtgtccttatttcaacccttgtaactgtgtaattcccatgacccttcggcgaccctcctcgtag

SEQ ID NO: 245190 - DNA, 1188 bp, synthetic construct
  misc_feature 1..1188: note = Description of Artificial Sequence: Synthetic coding sequence
  source 1..1188: mol_type = other DNA
atgtgtggcagcgaacgaccatggagaaaaacagctgcactgttgtcaggcggttgggaggggcacctgctcgcctgcgagaggagccaggaacaccgcggacaccatacctttcttgtggaggaggttgcacaagagtatcaagagaaatttcaggaaagcttgaaaaaacttaaaaacgaggaacaagaggcagaaaaactgaccgcatttattcgcgagaagaaaacctcgtggaagaaccagatggagcccgaacgttgtcgtatccagactgagtttaatcagttgcgaaatattttggatcgggttgagcagcgagagctcaagaaacttgaacaggaagagaaaaaggggctgcgaattattgaagaggctgagaatgacttggtccaccagacccagtccttacgggagctcataagcgacctggagaggagatgccagggatcaaccatggagctgctacaagacgtgtcagatgtgaccgagaggtctgagttttggactttacggaagcctgaggcactgcctacaaagctgagaagcatgttccgggcaccagacttgaaacggatgctgagagtatgtagagagctgactgacgtgcagtcttactgggttgatgtcacccttaacccccatactgcaaatctgaatctggtactggccaaaaatcggcgtcaagtgcgcttcgtcggcgcaaaggtttcggggcctagctgcctggagaaacactacgattgttctgtgttaggctctcagcacttctcctccggaaagcactattgggaggtcgacgtggctaaaaaaaccgcatggattcttggtgtgtgctccaattcactgggtccaactttttcctttaaccatttcgcccagaatcatagtgcatattccaggtatcaacctcagtcaggttactgggtcatagggctgcagcacaaccacgagtatagagcatacgaggactctagcccgtccctcctgctgtctatgaccgtcccaccgcgacgcgtcggtgttttccttgattatgaagccggaacagtcagtttctataacgtgacaaaccatggttttcctatatatacattttcgaagtattatttccctacgactctctgcccttactttaatccttgtaactgcgtgattcccatgacgttgaggcgacccagtagttag

SEQ ID NO: 245191 - DNA, 942 bp, synthetic construct
  misc_feature 1..942: note = Description of Artificial Sequence: Synthetic coding sequence
  source 1..942: mol_type = other DNA
atggagccggagaggtgccgtatccaaactgaatttaaccagctgagaaatattttggacagggtggaacagcgggaattaaaaaagttggaacaggaggagaagaagggtcttcgcattatcgaggaggccgagaatgaccttgtgcaccagacccagtctttgagagagctgatttctgacttggagaggaggtgccaggggtccacgatggagttgcttcaggacgtgagcgacgtcactgagcgtagtgagttctggactctacgcaaaccagaggctttgccaaccaagttgcgcagtatgttccgggcaccggacctgaaaagaatgctcagagtgtgccgggaactgaccgacgttcaatcctactgggttgacgtgaccctcaatcctcacaccgcaaatctgaacctggtccttgccaagaacagaaggcaggtgcgtttcgtaggagccaaagtttctggcccaagctgtctggagaagcactacgactgtagtgtgcttggcagccagcatttcagctccgggaaacactattgggaagttgacgtggcgaagaaaaccgcttggatccttggagtttgttccaattctctaggaccaaccttcagcttcaaccatttcgcccagaaccactctgcgtatagtagataccagccccagtcaggatattgggtgatcggcctgcagcacaatcacgagtaccgggcatacgaggactcctctccatccctgctcttatccatgacggtacctccaaggagagtcggggtttttttagactatgaagccggaaccgtcagcttttacaatgttacaaaccatggctttcctatttacacttttagtaagtattacttcccgactacattatgtccttattttaacccctgcaactgcgtcatccccatgactttacgcagacccagtagctag

SEQ ID NO: 245192 - DNA, 942 bp, synthetic construct
  misc_feature 1..942: note = Description of Artificial Sequence: Synthetic coding sequence
  source 1..942: mol_type = other DNA
atggagccagagcggtgcaggattcaaacagaatttaaccagctgcgtaatattttggacagagtggagcagagggaactgaagaagctcgagcaagaggagaagaaggggctccgcattattgaagaggctgagaatgacctggtgcatcagacccagagtctgcgagagctgatttctgaccttgagcggcgttgccagggctcgaccatggagctcctgcaggatgtgtctgacgtgaccgaaagaagtgagttctggacgctgcgcaaacctgaggctctccccaccaaacttagatcaatgtttagggctcctgacctcaagcggatgctgcgtgtgtgccgggaattgacagatgtgcagtcctactgggtggacgtgacactgaacccacatacggccaacctgaatctggttctcgcaaagaaccgacgacaggttcgttttgtcggagctaaggtttctggacctagttgtctcgaaaagcactacgattgctctgtgttagggtcacagcacttttcttcgggtaaacactactgggaagtcgatgtggccaagaaaaccgcatggatactgggtgtgtgttccaactctttgggtcccacatttagcttcaatcactttgcgcaaaatcactccgcctattcaagataccagccacagagtgggtactgggtaattggtctgcaacacaaccacgaatatcgcgcatacgaggattcatcgccctcactcctactgagtatgaccgtgccgccaagacgcgtgggggtttttttagattatgaggccggaaccgtttccttctataacgttacgaatcacggtttccccatttataccttttctaaatactacttccctacaactctgtgcccctattttaacccatgtaattgcgtcataccgatgaccctccggagaccgtccagctag

SEQ ID NO: 245193 - DNA, 942 bp, synthetic construct
  misc_feature 1..942: note = Description of Artificial Sequence: Synthetic coding sequence
  source 1..942: mol_type = other DNA
atggagccggagagatgccgcattcagacagagttcaaccagcttaggaacatactggacagggtcgaacagagggaattgaagaagctagagcaggaggagaaaaaggggctgagaatcattgaagaagcggagaacgacttggtccaccagactcaatccttgcgagaacttatctccgacctcgagcgaagatgccaggggtctaccatggagttgctgcaggatgtgtcagacgtgacagagaggagtgaattttggaccttgaggaagccggaagccctgcctaccaagctgcgaagcatgttccgcgctccggacctgaagcgaatgcttagggtatgccgggaactgactgacgtgcaatcttactgggtggatgtcacacttaatccacacacagccaatctaaatctagtactggccaagaaccggagacaggttagattcgttggcgctaaggtatccggtcctagctgtttagaaaagcactacgactgctcagtattgggcagccagcactttagcagcggcaaacattattgggaagtagatgtggcaaagaagactgcttggattctgggagtctgctctaactccttaggccctaccttcagtttcaatcactttgcccagaaccatagcgcctactcccggtatcagccgcagtcaggttattgggtgatcggcctgcagcacaaccatgagtaccgcgcatacgaggattcgtcgccttcactgctgttaagtatgaccgtccctccacggagagtcggcgtgtttctggactacgaggcgggtaccgtttccttctacaatgtgactaatcacgggtttcccatttacaccttcagtaagtactactttccaacaacattgtgcccttatttcaatccatgcaattgcgtcatccctatgaccctccgtagaccttcctcttag

SEQ ID NO: 245194 - DNA, 942 bp, synthetic construct
  misc_feature 1..942: note = Description of Artificial Sequence: Synthetic coding sequence
  source 1..942: mol_type = other DNA
atggagcctgagcgatgtcgtatccagactgagttcaaccagctcagaaatattctggatagagtggagcagcgggagctaaaaaagctggagcaggaagagaaaaaaggcctgaggatcatagaggaagcagagaatgatctggtgcaccagacacagtctctccgcgagctgatctccgacctcgagcgcaggtgccaaggaagtactatggagctgctccaggacgtaagtgacgtaacggagagaagcgagttctggactctgcgtaaaccagaggccttgccgactaagctgcgctcgatgtttcgggctcccgatctgaagagaatgctgcgcgtttgtagggagctcactgatgtgcagagctactgggtagacgtgaccctgaatcctcacactgccaacctgaacctggtattggccaagaatcgtcgtcaagtgcggttcgtgggcgcaaaggtcagcggacctagctgtttggagaagcactacgactgctcggtcctgggctcacagcactttagcagcgggaagcattactgggaagtcgatgtggccaagaagacagcctggatcctgggcgtttgctctaactccctgggcccaaccttcagttttaatcactttgctcagaaccactcggcttacagcaggtaccagccccagagtggatattgggttattggtctccagcataaccacgaatatagagcttacgaagattcgagtcctagcctcctgctgtcaatgaccgttcccccaagaagagtcggggtttttctagattacgaagccggtaccgtctctttctacaacgtcactaaccatggttttcctatttacactttttccaaatactatttccccaccacgctgtgtccgtatttcaatccttgcaactgtgttattccaatgaccttaaggcggccaagctcatag

SEQ ID NO: 245195 - DNA, 3651 bp, synthetic construct
  misc_feature 1..3651: note = Description of Artificial Sequence: Synthetic coding sequence
  source 1..3651: mol_type = other DNA
atggccagaaattgttccgagtgtaaagagaaacgggcagcccatatcctttgcacatattgtaatcgctggctttgctcttcttgtaccgaggagcatagacattcgccggtccctggcggacccttttttcctagagctcagaaagggagtcctggcgtgaatgggggtcccggagatttcacactgtattgcccgttacatacacaggaggtgctgaaattattctgtgaaacatgcgacatgctgacatgccactcctgtttggttgttgagcataaagagcaccggtgtaggcacgtggaagaggtgctgcagaatcagcgcatgcttctggagggtgtcactacacaggtcgcccataaaaaatcgtccctccagacttccgccaaacagatagaagaccgtatattcgaagtgaagcaccagcataggaaggtggagaaccaaataaaaatggctaagatggtgctgatgaatgaactcaacaaacaagctaacggactcatcgaggagctggagggcattactaatgagcgcaaacgcaaattggaacagcagttacagagcataatggtgctgaatagacaattcgagcatgttcagaacttcataaactgggcagtttgttcaaagaccagtgtaccattcctattttctaaagaactgatcgtgttccagatgcagcggcttcttgaaacatcctgtaacacagatcccggaagcccttggtccatacgcttcacttgggagcccaacttctggactaagcaactggcttccttaggatgcatcacaaccgagggcggtcagatgagtagggcagatgcgccagcatatggaggcctccaaggcagttcaccattttaccaaagccaccaatctcccgtggcccaacaggaagcgttgagtcacccgtcccacaagtttcaatcccccgctgtgtgctccagctctgtctgttgctcccactgcagcccagtgtcaccaagccttaaaggccaggtaccacctccctctattcaccctgcgcactccttcaggcagccacctgagatggtgccccagcagctaggtagcttacagtgctcagcccttctccctagggagaaggagctggcttgctccccacacccaccaaaactgctgcagccgtggttggagacccagccccctgtggaacaggaaagtacctcacagcgtctcggacagcagctcactagtcagcccgtctgtatagttccaccccaggatgtgcagcaaggggcacacgctcaacctaccctgcaaaccccttccatccaggtgcagtttggacaccaccagaagctcaagttgtcccacttccagcagcagccacagcaacaacttccgccaccgcctccacctttgccgcacccccctcctccactgccaccaccaccacagcagccgcacccaccgctgcctccttcgcaacatctggcctcctcccagcatgaatcgccaccaggccctgcctgttctcagaacatggatatcatgcatcacaaattcgagctagaggaaatgcaaaaagatctggaattgcttctacaggcccagcagccatccctgcagcttagtcagacaaagtctcctcagcacctgcagcagaccatcgtgggacagatcaattacattgtccgtcagcccgcacccgtgcagtcacagtcccaggaggagactctgcaggccaccgatgagcctcccgcttcacaaggaagcaaacctgccctgcccctcgataaaaataccgctgcagctctgcctcaagcctctggagaggaaacacctctttccgtgcctccagtcgacagcaccatccaacatagcagtccaaacgttgtccggaaacactcaaccagtctgtctattatggggttctccaacacacttgaaatggaactctcgtccacccggctcgagaggccactggagccccagatacagtccgtctcaaatcttactgcaggcgcacctcaagccgtgccatccctactgtctgctcctcccaaaatggtgagcagcctaacaagcgtccaaaaccaagctatgcctagtttgacaactagtcacctgcagactgttccttccctggttcattcaacatttcagtcaatgccgaacctcatttctgattcacctcaggcaatggcttccctcgccagtgatcatcctcaggccggaccttccctgatgtctggacacacgcaggccgtcccctcattagcgacttgccctctgcagtcaatccctccagtgtctgacatgcagcccgaaaccggatcttcatcatcttctgggaggacaagtgggagcctgtgtccccgagatggggctgatccatctctggaaaacgccctgtgtaaagtgaagttagaagaacctatcaatctgtctgtaaaaaagccgcctcttgcgccagtcgtgtcaacaagtaccgcgctacagcagtaccaaaaccctaaggaatgcgaaaacttcgagcagggggctctggaacttgatgccaaggaaaaccaatccatccgggcttttaactctgaacataagattccgtatgtgagattggaaaggctcaagatctgtgccgctagcagcggcgaaatgccagtcttcaaactgaaacctcagaagaatgatcaggacgggagcttcttactcataattgagtgcggaactgagtcctcctctatgtcgatcaaagttagtcaggataggctgtcggaggccacacaagctcccggactggaaggcagaaaagtaacggtcacatcactggccggacaacggcctcccgaagtggaaggcactagcccggaggaacacaggttgatcccacgcacccctggggctaagaagggaccgcctgcccctattgaaaacgaggacttctgcgccgtctgccttaacggcggagagttactgtgttgcgatcgttgccccaaggtattccacctgtcctgccacgtgcccgcactcctgtcctttccgggaggcgagtgggtctgtacactgtgccggagcctgacgcaacccgagatggaatacgactgtgagaacgcatgttacaatcaacctgggatgagagccagtcccggactgtctatgtatgatcagaagaaatgtgaaaagctggtcttgagtttgtgttgcaataatctgtccctgcctttccacgaacccgtatctccgctggcacggcactattatcagatcataaaacgcccaatggacttgagtattatcaggcggaagttgcagaagaaggatccagctcactataccacccctgaagaagtcgtcagtgacgtgagactgatgttctggaattgcgccaaatttaattacccagactctgaggtagcagaagctggtcgttgtctagaagtcttctttgaaggatggctcaaagaaatctatcctgaaaagcggtttgcccagccccgacaagaggactctgactccgaggaggtcagttctgagtcagggtgctcaacaccgcagggcttcccatggcccccttacatgcaagaagggattcagcccaagagacgcagaaggcacatggaaaatgagcgtgccaaaagaatgagcttccgactggccaactctatttcacaggtctag

SEQ ID NO: 245196 - DNA, 1458 bp, synthetic construct
  misc_feature 1..1458: note = Description of Artificial Sequence: Synthetic coding sequence
  source 1..1458: mol_type = other DNA
atggacccaaccgcactggtcgaagccattgtggaagaggttgcctgtccaatctgcatgacatttctgagagaacctatgtccattgattgtgggcatagtttttgtcacagctgtcttagcggactgtgggagataccgggtgagagtcagaactgggggtatacctgtccactgtgcagagctcctgtacagccaagaaacctgcgacctaactggcagctggccaacgtcgtggagaaagtgcgcttactcaggctgcacccaggtatggggctgaagggtgatctctgtgagcgccacggagaaaaactgaaaatgttttgtaaggaggatgttctgattatgtgcgaagcatgctcacagtcacccgagcacgaagcacactccgtggtccccatggaagacgtagcatgggagtacaaatgggaactgcacgaggccctggagcacctgaaaaaagaacaggaggaagcctggaagctggaggtgggtgaacggaagcgtaccgccacatggaagatccaagtcgaaaccagaaagcagagtattgtctgggaattcgagaaatatcagcgcttactggagaagaagcagccacctcatcgccagctgggcgctgaagtcgcggctgcgctcgccagtctccagagagaagctgccgagacaatgcaaaaactagagctgaaccactctgaactcattcagcagtctcaggtgttatggaggatgatcgccgagctgaaggaaaggagtcagcgccctgtacggtggatgctgcaagatatccaggaagtgctcaacaggtccaaatcatggtcgttgcagcaaccagagcccatttctctggagcttaagacagactgcagggtgctcggcctgagggaaattctcaagacctacgccgcagatgtgaggctcgacccagataccgcttactccaggctgatcgtctcagaggaccgcaaacgcgttcattatggggatactaaccagaaactccccgacaaccctgagcggttctatagatacaacatcgttctcgggtcacagtgtataagcagtggtcggcattattgggaggtcgaggtcggagataggagcgagtggggcctcggggtgtgcaagcagaatgtggatcggaaggaagtagtctacctgagtccccactacggcttctgggtgattagactgagaaaaggcaatgagtaccgcgcaggtacagacgagtaccctattttaagccttcccgtgcctccgcgacgcgtgggcatctttgtagattatgaagcacatgacattagcttttacaacgtgaccgactgtggttcccatatttttacttttcctagatatccatttccgggacgcctgctgccctatttttctccctgttacagcatcggaacaaataatacagcacctctagcgatttgtagcctggacggcgaagactag

SEQ ID NO: 245197 - DNA, 621 bp, synthetic construct
  misc_feature 1..621: note = Description of Artificial Sequence: Synthetic coding sequence
  source 1..621: mol_type = other DNA
atgcagaagctggagttaaaaaccgattgtagagtcctggggttaagagaaatcctgaagacctatgcagctgacgtgcgccttgatcccgacaccgcgtatagcaggcttatagtttcagaggaccgtaaacgcgtacactatggagataccaaccaaaagctgccggacaaccccgaacgtttctataggtacaacatcgtgctgggaagtcagtgcatttcttctggtaggcactattgggaggtcgaggtgggggatcggtcggaatggggcttgggagtgtgcaaacaaaatgtcgataggaaggaggtggtgtatttgtccccacactatggtttttgggtgatacgactgcgaaagggcaatgagtacagagccggtacagatgaatatcctatcctttcactgccggttcctcctcgtcgtgtagggatcttcgttgattatgaggcacatgacatttccttttacaatgttacagactgcggctcccatatattcacctttccgagataccctttccccggtagattactgccatatttcagcccatgctatagcattggcacgaacaatacggcgccactggcaatatgttctctggacggcgaagactag

SEQ ID NO: 245198 - DNA, 1536 bp, synthetic construct
  misc_feature 1..1536: note = Description of Artificial Sequence: Synthetic coding sequence
  source 1..1536: mol_type = other DNA
atggccgcagtcggacccaggactggccctggtaccggggctgaggctttggcactcgccgctgagctccaaggcgaggccacctgttccatctgcttggaattattccgcgagcctgtaagcgtggaatgtggccactccttctgccgggcatgtattggcagatgctgggaacgaccaggagccggtagcgtgggggcagccacgagggctccccctttcccactcccttgcccccagtgcagagagccagctagaccctcacagctccggcctaacaggcagctcgctgccgttgctacactactgcgcagattttcccttccagccgctgcccctggagaacatggctctcaggctgccgctgcgcgagctgctgcggcaagatgtggccagcacggcgagccatttaagctttactgccaggacgacggcagggctatatgcgtagtctgcgacagagcccgtgagcaccgagagcatgccgtgctgccgttggacgaggccgtgcaggaggctaaagagcttttagagagccggttgagggttcttaaaaaagagcttgaagattgcgaagttttcaggagcaccgagaaaaaggagtccaaggaactgctcaagcaaatggcggcagagcaggaaaaagtgggcgcagagtttcaagcactgcgcgcttttctggtggaacaggaaggcagactactgggacgcctggaggaactctcgcgggaggtggcacagaaacagaacgagaacctcgcccaattaggtgtcgagatcactcagctgagtaagctttcctcccagattcaggagacagctcaaaagcctgacttagactttttacaggagtttaaatccaccctgtcacggtgtagtaacgtgccaggcccaaaacccacaaccgtcagctccgaaatgaaaaataaggtgtggaacgtgtcactcaaaacattcgtgctcaaggggatgctcaagaagtttaaggaagatctccgtggggaattggagaaggaagagaaagtggagctcacattggaccctgacacagcgaatcccagactgatactttcacttgacctaaaaggggttcgccttggcgagcgggcacaggatctgcctaaccatccctgccgttttgataccaacacaagggttttggcctcctgtggtttttcctccggacggcaccactgggaggtagaggttggcagcaaagatggatgggccttcggagttgcacgagaatctgttaggcgaaagggcctcaccccattcacccctgaggagggggtctgggcactgcaactcaatggcggtcaatactgggctgttaccagccctgaaaggagcccgctctcttgtggccatcttagcagggtaagggtggccctggacctggaggtgggagcagtcagcttctacgccgtggaagatatgagacacctttacacctttcgagttaactttcaggaaagagtttttcccctgttttctgtctgcagtactggaacataccttaggatctggccgtag

SEQ ID NO: 245199 - DNA, 666 bp, synthetic construct
  misc_feature 1..666: note = Description of Artificial Sequence: Synthetic coding sequence
  source 1..666: mol_type = other DNA
atggccgctgttggccctcgaaccggaccaggaacgggagccgaggcactggcactggctgccgaactccagggcgaggcgacctgctccatctgtcttgaactctttcgcgagcccgtatcagtcgagtgcggccattccttttgccgggcttgcatcggcagatgttgggagaggcccggtgctggatcggtcggggctgctacccgcgctcctccattccccctcccgtgcccacagtgccgggagcccgctcgtccatcccagctccgccctaataggcaacttgcagctgtagccacactgctcaggaggttttcccttcctgccgcagccccaggagaacatgggtcacaagccgctgccgctagagctgctgctgccaggtgtggccaacatggggagccgtttaaattatattgtcaagacgatggtagggccatttgtgtcgtgtgcgatcgcgctcgagagcatagagagcacgctgtactgccgttggatgaggcggttcaagaggctaaagaactattagagtctcgcctccgagtacttaaaaaggaactggaggattgtgaggtgtttagatcgacagagaaaaaggagtccaaggaactgcttgtgtctcaggcgcctgccggaccaccctgggacattacagaggcctag

SEQ ID NO: 245200 - DNA, 912 bp, synthetic construct
  misc_feature 1..912: note = Description of Artificial Sequence: Synthetic coding sequence
  source 1..912: mol_type = other DNA
atggctgccgagcaggagaaagtgggagctgagtttcaggctctgagggcattcctcgtggagcaagagggacggctcctgggacggctggaagagctttcccgcgaagtggctcagaagcagaacgagaacctcgcacagcttggagtcgaaataacgcagctctctaagctgtcaagccagatccaagagacagctcagaagcctgatctggacttcctccaggaattcaagagcaccttgtcccgatgcagtaatgtccctggaccaaagccaacaacagtgtcctcggagatgaaaaacaaagtgtggaacgtatctctcaagacattcgtgctgaaggggatgctgaaaaaattcaaggaagatctccgtggggagctggaaaaggaggaaaaagtggagctgacgctggatcccgacacagccaaccctaggctcatccttagcctggatctaaagggtgtccggctgggggagagagcccaagatctgcctaaccacccctgcagattcgatacaaacactagggttctggcaagttgtggcttctccagcggcagacaccactgggaagtcgaggtcgggtctaaggatggctgggcctttggagtcgcccgagagagtgtcagaaggaaggggcttactcccttcacacccgaggagggcgtgtgggccctgcagctgaatggaggacagtactgggccgttacatcccccgaacggagtcccttgtcttgcgggcacctgtctagggtgagggtggccctggaccttgaggtaggcgcagttagcttctatgctgtcgaagacatgaggcacttgtacaccttcagggtcaatttccaggagagggttttccccctgttttctgtctgcagcacaggcacctacctcaggatctggccttag

SEQ ID NO: 245201 - DNA, 912 bp, synthetic construct
  misc_feature 1..912: note = Description of Artificial Sequence: Synthetic coding sequence
  source 1..912: mol_type = other DNA
atggcagctgagcaggaaaaggtgggggctgaattccaggcactcagagcttttctggtggagcaggagggcagactgcttggccgactggaagagctttcacgagaggtggcccagaaacagaatgaaaacctggcccagctgggcgttgagataactcaactgagcaaactgagttcacagatacaggaaaccgctcagaagcccgatctggactttctgcaggaattcaagtccacactgtctaggtgcagcaatgtcccgggaccaaagcctaccacagtttcctctgaaatgaagaacaaggtctggaatgtgagcttaaaaacattcgttctgaaaggtatgctgaagaagtttaaggaggaccttagaggcgaactcgaaaaggaagaaaaagtggaactgaccctcgacccggatacagccaatcctcgcctcatccttagccttgaccttaaaggagtccgcctcggtgagcgcgctcaggatctccccaaccacccctgccgcttcgatacaaacacccgggtactggctagttgcgggttctcttctgggcgtcaccattgggaggttgaagtcggcagcaaggacggatgggcctttggcgtcgcaagggagtcagtccggcgtaagggcttgacccctttcacaccggaagagggcgtgtgggcactgcagcttaacggcggacagtactgggctgtcacatctcctgagaggtcccctctgagttgcggtcatctgagtcgggtgcgcgtggcattagatttagaagtcggggctgtgagcttttacgccgtggaagatatgcggcatctgtataccttcagagtgaatttccaagagagggtattccctctgttcagcgtgtgttctacaggcacctatctccgcatctggccatag

SEQ ID NO: 245202 - DNA, 990 bp, synthetic construct
  misc_feature 1..990: note = Description of Artificial Sequence: Synthetic coding sequence
  source 1..990: mol_type = other DNA
atgactcaagccaccggccagatgctgtgcctccatgtccaggtgcccctacagctcttgctgttaggtcaaaaacagatggccgctgaacaggagaaggtgggcgctgagtttcaggctctgcgggcttttctggttgaacaggagggcaggctcctgggtcgcttggaggaactttcaagggaagtggctcagaagcagaacgaaaacttagcacagctgggagttgagatcactcagctctccaagctatcaagccagatacaagagacagctcagaaacctgatctcgatttcctccaggagtttaaaagtactctgtctcggtgcagtaacgtgcctgggcctaagcctacaacagtcagctctgagatgaagaataaggtgtggaacgtgtcactgaaaactttcgtcctgaaggggatgttgaagaagttcaaagaggacttacggggtgagctagaaaaagaggagaaggtagaattaacactggatcccgacactgccaatccacggctgatactttccctcgatttaaagggcgtgagacttggggagcgggctcaggatctgccaaaccacccttgccgcttcgataccaatactagggtgctggcctcctgcgggttttcctcaggccgacaccactgggaggtggaagtaggttcaaaggacggctgggcctttggagtcgcacgcgagagcgtgagacgcaagggcttaacacctttcaccccagaggaaggagtgtgggctctgcaactcaatggcggacagtactgggctgtcacctcgcccgagcgctcacccctttcgtgtggccatctgtccagagtgagagtagccctggatctggaggtgggggctgtgtcattctacgccgtcgaagatatgcggcacttgtacacgttccgcgtgaattttcaagaaagggtctttccactgttcagtgtttgctctaccggaacatatctgcgcatctggccctag

SEQ ID NO: 245203 - DNA, 912 bp, synthetic construct
  misc_feature 1..912: note = Description of Artificial Sequence: Synthetic coding sequence
  source 1..912: mol_type = other DNA
atggcagccgagcaagagaaggtgggcgctgagttccaagccttgcgcgcttttctggtggagcaagaaggtaggctgctgggcagactggaggagctcagtcgagaagttgctcagaagcaaaatgaaaacctagctcagctgggagtggaaatcacacaactatctaaactttcatcacagattcaggaaacagcccagaaacctgatttagacttcctgcaggagtttaaatctacacttagcagatgctccaatgttccaggcccaaagcctaccaccgtgtcctcggagatgaaaaataaggtctggaacgtctctttgaagacttttgttctgaaggggatgctgaagaaatttaaggaagatttaaggggcgagcttgaaaaagaggaaaaggtagagctaacacttgatcccgatacagcgaatccaaggctcatcctgagcctggatctcaagggagttcggctaggagagcgagctcaagatctgcccaatcacccctgcaggttcgacaccaacacccgcgtgctcgcctcatgtggattcagctccggccgacatcactgggaggttgaggtggggtcaaaggacggatgggcctttggcgttgcccgtgagtccgtgcgtagaaaaggtcttacccctttcacacctgaggagggagtgtgggcactccagttaaacgggggtcagtattgggccgttacaagtcctgaaaggtcccctctctcttgtggccatctgtcgcgcgtccgcgttgctctggatctcgaggtcggagccgtcagcttttacgcagtggaggatatgcggcacttgtacacttttcgcgtcaatttccaggaaagagtctttcccctatttagcgtttgcagcacaggcacatacctgagaatctggccatag

SEQ ID NO: 245204 - DNA, 1434 bp, synthetic construct
  misc_feature 1..1434: note = Description of Artificial Sequence: Synthetic coding sequence
  source 1..1434: mol_type = other DNA
atgagcgccgcacccggacttttgcaccaggaactttcgtgccccctctgtttacaactgtttgatgctcctgtgaccgcagaatgtgggcactccttttgtcgggcatgcctgggtcgtgtagccggagagcccgctgctgatggcactgtgctttgtccatgctgccaggccccaacaaggccacaggccctgagcaccaatctccagctggctagattagtggagggacttgcccaggtcccacagggtcattgtgaagagcatctcgacccactgtccatttactgcgagcaggaccgcgcactcgtgtgtggcgtctgcgcatccctaggcagccatcgtggccacaggctgttgccggctgccgaagctcatgcacggctcaaaactcagctgccccagcaaaagctgcagttgcaggaggcatgcatgcgcaaagagaaaagtgtggccgtactggagcaccagctggttgaggtagaagagaccgtccgtcagttcagaggagcagtgggcgagcaattaggcaaaatgagggtgtttctcgctgccttagaaggttctctcgatcgcgaggcggaacgtgtgagaggtgaggccggagtagccctccggagagagctggggagtttgaactcatatctcgagcagctgcgtcagatggagaaggtgctggaggaggtggccgataagcctcaaaccgaatttctcatgaaatactgtcttgtaacttctcggttacaaaagatcttggcagaaagcccccctcctgcccgactggatattcagctgccaatcatatcagacgactttaagtttcaggtatggcgcaagatgttcagagcgctgatgcccgctctggaggagctgaccttcgaccctagttcagcccacccatcactcgtggtgagttcaagcgggagacgggtcgaatgctccgagcagaaggcgccaccagccggtgaggatcctagacaatttgataaagccgttgctgtcgttgcacaccagcagctctccgagggcgagcattactgggaggtcgatgtgggtgacaaacccagatgggcacttggcgtcatagccgcagaggcgccaagacggggtcggttacatgcagtaccctcacagggtctgtggttgctgggcctcagggaaggcaagattctggaggctcacgtcgaggccaaagagccaagggccctgcgtagcccagagagacggccaacgcgcatcggactttatctgagcttcggggacggcgtcctatccttctacgacgctagcgatgccgatgccctggtgccactttttgcatttcatgaacgcctccccagacccgtgtacccgtttttcgacgtgtgctggcacgataaaggcaagaacgcacaacccctgctgcttgtggggccagagggagcagaagcttag

SEQ ID NO: 245205 - DNA, 753 bp, synthetic construct
  misc_feature 1..753: note = Description of Artificial Sequence: Synthetic coding sequence
  source 1..753: mol_type = other DNA
atggcatggcaggtgagcctgcttgaactcgaagatagactccaatgccccatatgtctggaagtcttcaaggaatctttgatgctgcagtgcggacacagttactgtaaagggtgcctggtatcactatcctaccatcttgacacgaaggtccgctgcccaatgtgttggcaggttgttgatgggagttcgtctctgccgaatgtcagtctagcttgggttattgaggcacttcggctccctggagaccctgagcccaaagtgtgcgtgcaccacagaaatccactgagtctgttctgtgaaaaggatcaggaactcatttgcgggctgtgtgggctgctagggtctcatcagcatcaccctgttacacccgtaagcactgtttgtagtcgcatgaaggaggagctagcagcgctgttttctgagttaaaacaagagcagaagaaggtcgacgagctaatcgcaaaactagtcaaaaatagaacacgaattgttaacgagtcagacgtgttttcttgggttatccggagggaatttcaagagctgcgtcaccctgtggacgaagagaaggcacgatgtctggaaggtatcggaggtcacactagggggctggtggccagcttagatatgcagctagagcaggctcaaggaacacgggagcgtttggctcaagcagagtgtgtgcttgagcagttcgggaatgaggatcaccacgagttcatttggaagtttcacagtatggctagccgctag

SEQ ID NO: 245206 - DNA, 849 bp, synthetic construct
  misc_feature 1..849: note = Description of Artificial Sequence: Synthetic coding sequence
  source 1..849: mol_type = other DNA
atggcatggcaggtaagtctcctggaacttgaagatcggctgcaatgccccatctgcctggaggtcttcaaggaatcgttgatgctgcaatgtggccactcttattgtaaaggatgcctggtcagcttatcctatcacctcgacactaaggttcgttgcccgatgtgctggcaggtagtggatgggtcctcatccctccccaacgtgtcccttgcttgggttatcgaggccctgcgcctgcccggagatcctgaaccaaaagtctgcgtccatcacagaaatcccctatcactgttttgcgagaaggaccaggagctgatttgcgggctgtgtgggctgctgggctctcatcaacaccatccagtgacacccgtaagcaccgtttgttccaggatgaaggaggaactggcagcgttgtttagcgagttaaagcaggagcagaagaaggtcgatgaactgatcgcgaaacttgtgaaaaaccgcactcggattgttaacgagtccgatgtcttcagctgggtgattagacgagagtttcaggagctgagacaccccgttgacgaagaaaaggctaggtgtttagagggtattggaggccatacgagaggtctggtggccagtcttgatatgcagcttgaacaggctcaaggaactcgagagcgcctggcccaggctgagtgcgtgctggaacaattcggaaatgaagaccaccatgagtttatctggaaatttcattcaatggcctcccgtctgactaagacggaagaacttgagaaaaagtggcggaatggactagcagcaagtcactccttgccacagcaggttagaccgcagaggcgcaccccttag

SEQ ID NO: 245207 - DNA, 753 bp, synthetic construct
  misc_feature 1..753: note = Description of Artificial Sequence: Synthetic coding sequence
  source 1..753: mol_type = other DNA
atggcttggcaggtatctctcctcgaacttgaggaccgactgcagtgtcctatctgtcttgaggtatttaaggaatccttaatgctacaatgcggtcactcttactgtaaaggttgtctggtgtcgctgtcttaccacctggacacgaaggtccggtgccctatgtgttggcaggtagtcgacggatcatcgagccttcctaatgttagcctagcttgggtgattgaggcgttgaggctgccaggggatccagaaccgaaggtctgtgtgcaccatagaaatcccttgagcttattctgcgagaaggatcaggagttaatctgcggcctgtgtgggctcttaggctctcaccagcatcaccctgtaacccccgtgagcacagtgtgttcaagaatgaaggaggaactcgctgccctgtttagcgagctgaaacaagaacaaaaaaaggtggatgagctcatcgccaaactcgtgaagaatcgcacacggattgtcaacgaatctgatgttttctcgtgggtaatccggagggaattccaggaactgcgccacccagttgacgaggagaaggccagatgccttgagggcatcggcggacatacaagagggctggtggcctcactggacatgcaactggagcaggcacaagggactcgagaacggctagcccaagcagagtgtgtcttagagcaatttggaaatgaggaccatcacgagtttatttggaaattccactcaatggcttcccggtag

SEQ ID NO: 245208 - DNA, 750 bp, synthetic construct
  misc_feature 1..750: note = Description of Artificial Sequence: Synthetic coding sequence
  source 1..750: mol_type = other DNA
atggcctggcaggtcagcctgctggaactggaagaccgcctgcagtgccccatctgcctcgaggtgttcaaagagagtttgatgctgcagtgcggacattcctactgtaagggctgtctggtttctctttcgtatcatctggacacgaaggtaaggtgccccatgtgttggcaggtggtcgatggatctagctctctccctaacgtgagccttgcatgggtcatagaggcattacggttacccggtgatcccgaacctaaggtttgcgtccaccatcgaaatccgctgagtttattttgcgagaaagatcaagagctaatatgcggcctctgtggtctgcttggctcgcaccagcaccatcctgtgacccccgtgtccacagtttgcagtaggatgaaggaagagcttgcggcactattttcagagctgaaacaggagcagaagaaagtcgatgagctgattgccaaattggtaaagaaccgcaccaggatcgtaaacgaaagtgatgtgttctcctgggtaatccgccgagagttccaagagctgcgacatcccgtggatgaggagaaggcgagatgcctggaaggtataggcggacatactcgcggactcgtggcatctctggatatgcagcttgagcaggctcagggcacaagggagcgacttgcacaagcagagtgtgtcctggaacagttcgggaacgaggaccatcacgaatttatctggtttcactcaatggcctcccggtag

SEQ ID NO: 245209 - DNA, 753 bp, synthetic construct
  misc_feature 1..753: note = Description of Artificial Sequence: Synthetic coding sequence
  source 1..753: mol_type = other DNA
atggcctggcaggtcagcctgctggagcttgaagactggttacagtgcccaatttgtttggaggtcttcaaagaaagtctcatgctgcaatgcgggcacagctattgcaagggctgcctcgtgtccttgtcctatcatctcgacacaaaggtgaggtgtccaatgtgctggcaagtggtggatggatccagtagcctgcccaatgtgagtctggcgtgggtgattgaggcccttcgcctgcctggagacccagaaccaaaagtgtgtgtccaccacagaaaccccctgtctcttttctgtgaaaaggatcaagagctgatctgcggtctctgcgggttgttgggatcccatcagcatcacccggtgacgccggtttccacggtgtgttcccggatgaaagaagaacttgcagccctatttagtgagcttaagcaggaacaaaagaaggtagatgagttaatcgcaaagctggtgaagaaccgtacccggatcgtgaacgaatccgacgttttttcctgggtgatacgtcgtgaattccaggagcttcggcacccagtggacgaggagaaggcccgttgcttagagggcattggaggccacaccagagggctcgtcgcttctctggacatgcagcttgaacaagcccagggcaccagagagcgccttgcccaagccgagtgcgtattggagcaatttggaaacgaggaccaccatgagttcatttggaagttccattctatggcgtccaggtag

SEQ ID NO: 245210 - DNA, 750 bp, synthetic construct
  misc_feature 1..750: note = Description of Artificial Sequence: Synthetic coding sequence
  source 1..750: mol_type = other DNA
atggcctggcaggtatccctgcttgagttggaagactggttacagtgtccgatttgtttagaggtcttcaaagaatcattaatgcttcaatgtggacattcctactgcaaagggtgccttgtcagtttgtcctaccacctggatacaaaagtcaggtgtccaatgtgttggcaagtggtcgatggctctagctcgctaccaaatgtgtcattggcctgggtgatagaagcattgcgattacccggagaccccgagcctaaagtgtgcgtccaccatcgaaatcccttatccctgttttgcgaaaaggatcaggagctgatatgtgggctttgtggcctcctggggtctcatcagcaccacccagtcacaccggtttccactgtgtgcagcaggatgaaggaggaattagcggcactattcagcgaactgaaacaggaacagaagaaagttgatgaacttattgcaaagctggtaaagaataggactcgcattgtgaatgagtcagatgtcttcagttgggtcattagacgggagtttcaggagctccgccatcctgtcgacgaagaaaaagccaggtgcctggagggaattggcggacataccagaggactggtagcctctcttgacatgcagctggaacaggctcaggggaccagagaaaggctagcacaggctgaatgcgtactcgagcaattcggcaatgaggatcaccacgagtttatctggttccatagcatggccagcagatag

SEQ ID NO: 245211 - DNA, 1656 bp, synthetic construct
  misc_feature 1..1656: note = Description of Artificial Sequence: Synthetic coding sequence
  source 1..1656: mol_type = other DNA
atggccgagaactggaagaactgcttcgaggaagagctgatctgtcccatctgtctacatgtctttgtggagcctgttcagcttccgtgtaaacacaatttctgcagagggtgtatcggggaggcgtgggccaaagactctggtctggtcaggtgccccgagtgcaaccaagcatacaatcagaagcctggactggagaaaaatctgaaattaactaatatcgttgagaaattcaatgctttgcacgtggagaaaccacccgctgcacttcactgtgtattctgtcgacggggaccgccactccctgcgcagaaagtgtgtctgcggtgcgaggccccttgttgccagtcccacgttcagacccaccttcaacagccttccaccgccaggggtcatctactggtggaggccgatgatgtccgagcctggtcatgtcctcaacacaacgcttatagattataccattgtgaggcggaacaggtggctgtgtgtcaatattgttgttattattctggagcacaccagggacattcggtgtgtgatgtcgaaatacgtcgaaatgaaatacggaaaatgctgatgaaacagcaagatcgcctggaggaaagagagcaggacatcgaggaccagctctacaagttagagtccgacaagcgcctggttgaggagaaagtgaatcagttgaaggaggaggtgcgccttcagtacgaaaaactccaccagctgttagatgaagaccttagacaaacggtcgaggtcctggataaggcccaggcgaagttttgctccgagaacgctgcccaagcactgcatctgggcgagagaatgcaagaggctaaaaagttactggggtctctgcagctgttgttcgacaaaaccgaagatgtgtccttcatgaaaaatacaaagagcgttaaaatcctcatggataggacacaaacatgcacatcatcctcactctcgcctacaaaaataggccacttgaacagcaaactctttctgaacgaggtggcgaaaaaagagaaacagctccggaagatgcttgaagggccattctctacgcccgtgcccttcctccagtcagtccccctgtacccctgcggggtgtcctcatccggtgcggaaaagagaaagcactctaccgcattccccgaggctagttttctggagacttcgagcggccctgtaggtggccaatatggtgctgcaggtacagcctcaggcgaaggccagtccggacagcctctgggcccttgttcttccactcagcatctggtggcccttcctggcggagctcagccagtgcacagctccccggtgtttcccccatcccagtatccaaatggctcagccgctcagcagccaatgctgcctcagtacgggggacgtaagatcctagtgtgctcagttgacaattgttattgttcttccgtcgctaaccatggcggtcaccagccctaccccagatccgggcatttcccctggacagtaccaagtcaggaatacagccaccccctcccgcctaccccctctgtccctcaaagcttgccctctctggccgtgcgggactggctcgatgcgtcccagcagccaggccatcaggatttctatcgcgtgtacggccagccgtcaaccaagcactatgtcacttcctag

SEQ ID NO: 245212 - DNA, 1653 bp, synthetic construct
  misc_feature 1..1653: note = Description of Artificial Sequence: Synthetic coding sequence
  source 1..1653: mol_type = other DNA
atggcagaaaactggaagaactgctttgaagaggaacttatttgccccatttgtcttcacgtgtttgtggagcccgtacagctgccttgcaagcacaacttttgtcgcggatgcatcggcgaggcctgggctaaagacagcggcctggtacggtgtcccgaatgtaatcaggcatacaaccagaaaccgggattggagaagaatctaaagttaacaaatattgtggaaaaattcaacgccctgcacgtggagaaaccaccagccgcactccactgcgtgttttgtcgcaggggcccaccgctgcccgcacagaaggtgtgtcttagatgcgaggccccttgttgtcagtcccatgtacagactcacctgcagcagccctcaacagcaagggggcacttgcttgtggaggcagacgatgttcgtgcatggagttgccctcagcataacgcctatagactgtatcactgcgaggctgagcaggtcgccgtgtgccagtattgttgttactacagcggagcccaccaaggtcacagtgtgtgtgacgtggaaatcagaaggaatgagatacgtatgctgatgaagcagcaggaccgtttggaggagcgcgagcaagacatagaggaccagctgtataagctggagtcggataaaagactggtagaggaaaaagtcaatcaactcaaggaagaagttaggctccagtacgagaagctgcaccagctgctcgacgaggacctgagacaaaccgtcgaagttctcgataaggcgcaggccaagttttgttccgagaatgccgcacaggcacttcacctcggcgagcggatgcaggaagcgaagaaactcctggggtctctgcagctgctgtttgataagactgaggatgtgtcattcatgaagaatactaagagcgttaagatcctaatggatcgtacccagacatgtacaagctcttccctctccccgaccaagatcggccatctaaatagtaaactcttcctcaatgaagtggccaaaaaggaaaaacagctccgcaaaatgctcgagggaccatttagcaccccggttcccttcctccagtcagttccactgtacccgtgcggcgtgagtagctcgggcgctgaaaagcgaaaacatagtactgccttcccagaggcctcttttctcgagacctcttccggccctgtcggtgggcagtatggagccgcaggcactgcgtcaggagaagggcagagtggacagccactgggaccgtgctccagtacccaacatctcgtggccctccccggtggcgcacaacccgtgcatagttcacccgtgtttccaccctcacagtaccccaacggtagcgccgcacaacaaccgatgcttccgcaatatgggggtcggaaaatcctggtctgtagcgtcgacaactgctactgttctagcgtggctaaccacgggggacatcagccctacccgcgttctggccattttccatggacagtgccgtcccaggagtactctcatccactcccccctaccccaagtgtgccccagtcattgccatcactggcggtcagggattggctcgacgcgtctcagcagccaggccaccaggatttctaccgggtgtacggacaaccatcgactaaacattacgtcacatcatag

SEQ ID NO: 245213 - DNA, 2133 bp, synthetic construct
  misc_feature 1..2133: note = Description of Artificial Sequence: Synthetic coding sequence
  source 1..2133: mol_type = other DNA
atggaagagatggaagaggagttgaagtgtcccgtctgcgggtccttctacagagagccaatcatcttgccatgctcccacaatctgtgccaggcctgcgcaaggaatattctggttcagacaccagaatcagaatccccccagtctcatagagcagcaggttctggagtgtctgactatgattatctggatttggacaagatgtccttatattccgaggccgattctggctatggttcttacggcggatttgcctcagcacccaccacaccgtgccagaaatcacctaatggcgttcgggtgttcccccctgccatgcccccacccgctacccacctgtcacctgcgctggcccctgtacctaggaacagctgcatcacttgtccgcagtgtcaccgaagtttaatcttggatgataggggtttgcggggattcccgaaaaatagggttctcgagggcgtgattgaccgctatcagcagagcaaagccgctgccctgaagtgccaactttgcgagaaggcccctaaagaggcaactgttatgtgtgaacagtgcgatgtcttctactgtgatccgtgtagactgcgctgccacccccctcggggacctctcgcaaaacatcggttggtacctccagctcagggtagggtttctcgacgcctttcaccacgcaaagtgtcaacctgtactgatcacgagctggagaaccactccatgtactgtgtccagtgtaagatgcccgtttgctaccaatgcctcgaggaaggcaagcacagtagtcatgaggttaaagcgctcggcgctatgtggaagctccataaaagccagctgtcacaggctctcaatgggctgtcagacagagcaaaggaggcgaaagagtttctggtgcagctgcggaacatggtacagcaaatccaggagaactctgttgaatttgaagcatgtttagtggcccagtgcgacgccctgatcgatgccctgaatagacgtaaggcccagttgcttgctagggtgaataaagagcatgaacacaaacttaaagttgtgagggaccagatatctcattgcacagtgaaattgaggcaaactacgggacttatggagtattgtttggaggtgattaaggaaaacgaccccagtggctttttgcagatttccgatgctctgatcagacgtgtgcacctgactgaggatcagtggggcaaaggcaccctgactccccgaatgacaaccgatttcgacttgtcccttgataactctcctctgctgcaaagcatccatcaactggactttgtgcaggtgaaggcatcaagcccggtgcccgcaacaccaatcctgcagcttgaagagtgctgcacacacaacaactctgcgacgctctcttggaagcagccgcctctgtccacggttcctgcagatgggtacatcttggaactcgacgatgggaatgggggacaatttcgggaagtttatgtgggaaaagagaccatgtgtacagttgacggattgcactttaacagcacttataacgcaagagtcaaagcattcaataagactggggtgagtccatactccaagacactcgtcctgcaaacatcagaagtcgcatggttcgcatttgacccaggaagcgctcactctgacatcattctcagcaacgataatcttaccgtgacttgttcttcttatgatgaccgggttgttctcggtaaaactggattttcaaaaggtatccactactgggagttaacagtcgacagatacgacaaccatccggaccccgcattcggagtcgctaggatggatgtcatgaaagacgttatgttagggaaggacgataaggcctgggccatgtacgtggacaacaatcgaagctggttcatgcacaacaattctcacacgaatcgaacagaaggcggaattaccaagggggctaccataggtgtgctcctcgacctaaatcgcaagaatctgactttcttcatcaatgatgagcagcagggtcctatcgccttcgataatgttgagggactgttcttccctgcagtgagcctgaatcgaaatgtgcaggttaccttacatactgggcttcctgttcccgacttttatagctctcgggctagcattgcctag

SEQ ID NO: 245214 - DNA, 2409 bp, synthetic construct
  misc_feature 1..2409: note = Description of Artificial Sequence: Synthetic coding sequence
  source 1..2409: mol_type = other DNA
atggaagagatggaggaagaattaaagtgccccgtgtgtggaagtttttaccgtgaacctataatcctgccctgctcgcacaatctttgtcaggcctgtgcgaggaacatcctcgtgcagaccccggagagtgagagtccacaatctcacagggccgctggaagcggtgtgagtgattacgactacctggatcttgataagatgtccttatattccgaagccgattccggctacggctcctatgggggttttgcctctgctcctacgacaccatgtcagaagtcaccaaacggcgtgcgtgtgttccccccagcaatgccaccaccagctactcacctcagccctgccctggccccagtgcccaggaactcctgtataacttgtccccagtgtcaccggtctctgatcctggatgacaggggcctaagaggctttccgaaaaaccgggtgttagagggagtgatcgaccggtaccagcagagtaaggctgctgccctcaagtgccagttatgtgaaaaggctcccaaggaagcaactgtaatgtgtgagcaatgcgacgtgttctactgtgatccatgtcgcttgcggtgtcatccgccaaggggacccctggcgaaacataggcttgttccgcctgcccagggtcgcgtttcacgaagactctctcccagaaaggtctcaacctgcacggatcatgagttagagaaccatagcatgtactgcgtccagtgtaagatgccggtgtgttaccagtgcctggaggaaggtaagcacagctcccacgaggtcaaggcactgggggcaatgtggaaactccacaagtctcaactctctcaggccctaaatggtctttccgatagggccaaagaagccaaggagttcttagtgcagcttagaaacatggtgcaacagatccaagaaaacagtgtcgaattcgaggcctgcttggtggcccagtgtgacgctttaattgatgcccttaatcgccgaaaggcacagttacttgccagggtgaataaggagcacgaacacaagctcaaggtagtgagggatcagatcagccactgcaccgtgaagttacgtcaaactaccgggctaatggagtactgtctggaggtgataaaagagaatgacccttccggctttctgcagatctcagatgccctcattaggcgggtccatctgaccgaggatcaatggggtaagggtaccctgactccgagaatgacgaccgactttgatctctctttggataactctcctcttctccagagtatccatcaacttgactttgtccaggtgaaagtgcctgccaccccaattctgcagctggaggagtgttgtacccataacaacagtgccacgcttagctggaaacaacccccactgtccaccgtgcccgctgatggttatatccttgaattggatgacgggaacggtggtcaatttagagaagtttacgtcgggaaggaaacaatgtgtaccgttgacgggctacactttaactccacatacaacgctcgggtgaaggccttcaacaagacaggcgtatccccctactccaaaactttggtgctgcagactagcgaggacacggatagcgaagagcagactttaccctttcctgtcccgagtgaacgattacccctgcgacgcatgtctcctttctcatccactttgaacttacagccgtcattcccgggaaggtcctacttcgacttccgatcgtccccgcaccagctcagcttgcacagctccctccagtccctcaacgccccaggctgtaatttcgagactcaatcagcgccttactctcagcttgtggacatcaaaaaattactggctgtggcctggtttgcgtttgatccaggcagtgctcacagcgatattatcctgagcaacgataacttgaccgtgacctgcagctcgtacgatgatcgtgtcgtgctgggcaagacagggttctccaagggaatccactattgggagcttaccgttgaccggtacgacaaccatcctgaccccgcattcggagtggccagaatggatgttatgaaggacgttatgctaggtaaagatgacaaggcctgggcaatgtacgtggacaacaaccgatcctggttcatgcacaataatagccacaccaatagaacggaaggagggatcactaaaggggctaccataggcgtgctcctcgatcttaatcggaagaacttgacctttttcattaacgatgagcagcagggacctatagcttttgacaacgtggaggggctctttttcccagcagtatccctaaaccgcaacgttcaggtgtcgacactgcctctccgattaaacagctgttgctggcttcctgtccagcggttgccacgggctgtccaatcaaacagacgagagggcagttag

SEQ ID NO: 245215 - DNA, 1653 bp, synthetic construct
  misc_feature 1..1653: note = Description of Artificial Sequence: Synthetic coding sequence
  source 1..1653: mol_type = other DNA
atggaggaaatggaagaggaacttaagtgtccggtatgcggttctttttacagggaaccaatcattctgccctgttctcataatttgtgtcaggcttgcgcccgaaacatccttgtgcagacccctgaatcggagtctccacagtctcaccgcgcagcaggctccggcgtgtcagattacgactacttagatctcgataagatgtccttgtacagcgaagcagattcgggatacggaagctatggagggtttgcctctgcccctaccacgccttgccagaagtcacctaatggcgtacgtgtgtttccccctgctatgcctcctcctgcaacccatctgtcccccgcactggccccagtcccaagaaactcatgtattacttgcccacagtgccacaggtcactgatcctcgacgatcgcggattacggggtttccctaagaatcgggttcttgaaggggttatagaccgttatcagcagtcaaaagcagccgctcttaaatgccagctgtgtgagaaggcccctaaagaagcgactgtgatgtgcgagcagtgcgacgtcttctactgtgacccgtgtagactgcggtgtcacccacctcgtggacctctggccaaacaccgcctggtcccacccgcacagggccgagtctccaggcggttgagccctcgaaaggtctctacatgcactgatcacgaactagagaatcatagtatgtactgtgtacagtgcaagatgccagtgtgctaccagtgccttgaggagggcaagcactcatcccacgaagtaaaagcgctaggagctatgtggaagcttcataaatctcagctctcacaggcactcaatggactcagcgacagagctaaggaggctaaagagttccttgtccaactgcgtaacatggtccagcagatccaggaaaattctgtggaatttgaagcgtgtttggtcgcccagtgtgacgcgctcattgatgctctcaatcgcaggaaagcacagttactggctcgggtgaataaggaacatgagcacaaactgaaagttgtccgcgatcagataagccactgtaccgttaagctccgccaaactactggtctcatggagtattgcctggaagttataaaggagaatgacccctcagggtttttgcagatcagcgacgctctgattagaagggtgcacctaaccgaagatcaatggggaaagggaaccctcactccaagaatgactaccgacttcgatctgtcactggacaattcacccctgcttcaatccattcaccagctggactttgtccaggtgaaagcatccagtccggttccggcaacccccatcctgcaactggaagagtgctgtactcacaataattccgcaacactgtcatggaagcagccccctttaagcaccgtgccggcagatggatatatcctcgagttagacgatggcaatggcggacagtttcgagaggtgtacgtcggtaaggagacaatgtgtaccgtggacgggctgcatttcaactccacctataatgccagggtgaaagcattcaacaagaccggggtgtccccatactccaaaaccttggtgttacaaacaagcgagggtaaagcactccagcagtatccctctgaacgggagctgagaggaatttag

SEQ ID NO: 245216 - DNA, 3750 bp, synthetic construct
  misc_feature 1..3750: note = Description of Artificial Sequence: Synthetic coding sequence
  source 1..3750: mol_type = other DNA
atggctaccgctgcaacagaagaaccgttcccctttcacgggctgttgcccaagaaggagacgggcgctgccagttttttgtgcagatacccggaatacgatggacggggagtccttattgcggtgctggatacgggggtggaccccggagcccctgggatgcaggtcacgacagacggtaagccaaagattgttgatatcattgataccactggatccggagacgtcaatacagcaaccgaggtggagcctaaggacggagagatcgtcgggctctctggtcgcgtcctaaaaatcccagccagctggaccaacccctccggcaagtaccatatcgggattaaaaacggctacgacttctacccaaaggcgctcaaggaacgtatacagaaggagcgcaaggagaagatctgggacccggtgcacagagtggccctggccgaggcttgccgtaagcaagaggagttcgacgttgctaataatggttcttcacaggctaataaactcattaaggaagaactgcaatctcaggtggagctgctcaatagttttgagaagaagtactccgaccccggacctgtgtatgactgcctcgtgtggcatgatggggaagtgtggagggcttgcattgactcaaatgaggatggagatctgagtaagagcaccgtgctgcgcaactacaaggaggctcaagaatacgggtctttcgggactgctgagatgctcaactactcggtgaatatctatgacgacggaaacctgttgtcgatcgtaacttcaggaggcgctcatggtacgcatgtagcttcaattgcagcgggacacttccccgaggagccagagcgcaacggtgtggcaccgggagcacagattctgtcaatcaaaattggcgatactagattatcaactatggaaaccggtaccgggcttatccgcgcaatgatcgaggtgattaaccacaagtgcgaccttgtgaactacagctatggagaagccacccactggcccaattcagggagaatctgcgaagtcatcaacgaagcagtgtggaagcacaacatcatttatgtgagctctgcagggaataatggtccctgcctctcgactgttgggtgccccggaggaaccacctcctcggtgataggcgttggagcttatgtttcaccggacatgatggtagctgaatatagtctgcgcgaaaagcttccagcaaatcagtatacctggagctcacgcggacctagcgccgatggcgctctcggtgtgtcaatatcagcacctggcggagctattgccagtgtgcccaactggaccctacgtggcacgcagctcatgaatggaaccagcatgtccagccccaatgcatgcggagggatcgccctgattctgtccggcctgaaagccaacaatatagattacactgtccactccgtacggcgagccttggagaataccgcggtaaaggccgacaacatcgaggtatttgcccagggccacggtataatccaggtggataaagcctacgattatctggtgcaaaataccagcttcgctaacaaattggggttcaccgtaacagtggggaataatcgtggcatttatctacgggaccccgttcaggtggctgctcccagcgatcatggtgtgggcatcgagcccgtatttcccgaaaacaccgaaaacagtgaaaaaatatccctgcagctgcacttggcattaaccagcaactcctcctgggtgcaatgcccgtcacacttagaactcatgaatcagtgcaggcacatcaatatccgagtcgatccccgaggcctgagggagggactgcattacaccgaagtgtgtggttacgatattgcctctcctaacgccggtccactgttccgcgtgccaattacagctgtgattgctgcaaaggttaacgaaagcagccactacgatctcgcattcaccgacgtccacttcaagcctggccagattaggaggcatttcatcgaagttccggagggcgctacctgggccgaggtcactgtatgctcttgctcttccgaagtatctgctaaatttgtactccacgccgtacaactggttaagcagcgggcttaccggtcccatgaattctacaaattttgcagcctccccgagaagggcactctgactgaggccttcccagtgctcgggggaaaggccatcgagttttgcatagctcggtggtgggcctctctgtcggacgttaatatagactacaccatctcatttcatgggattgtctgtacagcaccccagctgaacatccacgcaagcgagggcatcaaccgtttcgacgtccagtcgtccctaaaatacgaggatctggccccttgtattacactgaaaaactgggtgcagacactgcgacccgtctccgcgaagactaaacctctcggctctagggatgttctaccaaacaaccgacagttgtatgagatggtccttacatataacttccaccagcctaaaagtggagaagttacaccatcatgcccgttgctttgcgaactgctttacgagtccgagttcgactcgcagctctggatcatttttgaccagaataaacgtcaaatggggagtggtgacgcttacccacaccagtacagcctgaaactggaaaagggcgattataccatcagattgcagatccgtcacgagcagatatcagacctagagagactgaaggatctgccgtttattgtctctcacagactgtccaacaccttgagcctggacatacatgagaatcattcattcgcactcctaggcaaaaagaagtccagtaacctcacccttccgcctaaatacaatcagccgttcttcgttacaagtcttcctgatgataaaattcccaaaggggctggtcccggttgctacctggcaggaagcctcacactcagcaaaacagagctgggaaagaaggctgatgtcatccctgtgcactactatctgattcccccaccaaccaaaaccaaaaacgggagcaaagataaggaaaaagacagcgagaaagagaaggatcttaaagaggaatttacggaggcgctgagggatttaaaaatccagtggatgacgaagctggattcatcagatatctataacgaacttaaggagacatatccgaactatctccccttatatgtggctcgactccatcagttggatgcggagaaggaaaggatgaaacgcctcaatgaaatcgtggatgccgctaatgcagtgatttcccacatcgaccagacagctctggccgtgtatatagcaatgaaaacagatcctcgcccagacgcagctacgatcaaaaatgacatggacaagcaaaagtctaccttagtagatgctctctgcaggaagggttgcgcgttggctgaccatcttctccatacacaggcccaggacggcgcaatttcaactgacgcggagggcaaggaggaggagggcgagtcgcctttggacagtctagctgagacgttttgggagacaactaagtggaccgacctcttcgataacaaggtcttgacattcgcatacaagcatgccctggtgaataaaatgtatggtagaggattgaagtttgctacaaaactagtagaggagaagcctacaaaagagaactggaagaattgcattcaattgatgaagctccttggatggacgcactgcgcatcattcactgagaattggctaccgattatgtatccaccggattattgtgtgttttag

SEQ ID NO: 245217 - DNA, 1791 bp, synthetic construct
  misc_feature 1..1791: note = Description of Artificial Sequence: Synthetic coding sequence
  source 1..1791: mol_type = other DNA
atgctacccagccaagcacagggcctgctctggtgggtttttcccctctttcctgcctcgtctttatcatatccccctgtgtcgtatcgagcggacgggttagccaggaacacatttcttaaagcttgcagtgagtccagcagctcaagtaacatctctacaatgctggtgacccatgactacaccgctgtgaaagaggacgagatcaacgtttaccaaggagaggtggtgcagatcctcgcatccaaccaacagaacatgttcctcgtcttcagagccgcaacagatcagtgccccgctgcagagggttggatcccgggatttgtgctcggccacaccagtgcagtgattgttgaaaacccagatggtactctgaagaagagcacaagttggcacacagccctgcgccttcgaaaaaagagcgaaaaaaaggacaaagatggtaagagggagggcaaactggagaacggctaccgcaagtcacgtgagggtctctcaaacaaggtatccgtgaagctgctcaatccaaactacatctacgacgtgccacctgagttcgtcatcccgctttccgaggtgacatgtgagaccggagagaccgttgtgctgcgatgcagagtgtgcggaagacccaaggctagcataacctggaagggccctgaacacaacactctgaacaatgacgggcactacagcatctcctacagcgatcttggagaggccactctgaagatcgtgggcgtaaccactgaagacgacggaatctacacctgcatagctgttaacgacatgggtagtgctagctcatctgctagtctgcgggtactgggacctggaatggatggtataatggtgacttggaaggataacttcgattccttctattccgaggtggcagaactggggcgtggaaggtttagtgtggtgaaaaaatgtgatcagaagggcactaagagggcagtggccaccaaatttgttaacaaaaaactcatgaaacgagatcaggtgacccacgaactgggaatcctgcagtctctgcagcatcccttactggtcggccttctggacacctttgagacgcccacctcctacattcttgtgcttgagatggccgatcagggcagactgttggattgtgtagtgagatgggggagtttaaccgagggaaagattagggcgcacctgggtgaggtcttagaggcagtgcgctacctgcacaactgcagaatcgctcacctggacctgaaacctgagaacatcttggtggacgaatcactggccaagcctacgatcaaacttgctgatttcggcgacgccgttcaactgaacaccacctactatatccaccagctgctgggcaaccctgagtttgctgccccagagattatcttggggaacccagtgtctctcacatcagacacctggagtgtcggtgtgctaacttacgttctgctgagtggcgtatccccttttcttgacgatagcgtggaggagacctgtctcaacatctgtcgcctcgactttagctttccagacgactacttcaaaggagtgagtcaaaaggctaaagagtttgtatgtttcctccttcaggaggacccagccaagcgtccttctgcagcactcgccttacaggaacagtggctccaggctggcaatggcaggtccacaggcgtgctggacacttcccgccttacttctttcattgagagacggaagcaccagaacgatgttagacctatcaggagtattaagaatttcctccagtctcgcctactacctcgggtctag

SEQ ID NO: 245218 - DNA, 9293 bp, synthetic construct
  misc_feature 1..9293: note = Description of Artificial Sequence: Synthetic coding sequence
  source 1..9293: mol_type = other DNA
atgagcggctcctctggcggtgcagctgccccagccgcatcgagcggaccggcagccgctgcaagcgcagctgggagtgggtgtggtggcggtgctggggagggtgcagaggaggctgctaaggacctcgcggatattgctgctttctttcgctcaggtttccggaaaaatgacgagatgaaggccatggatgtgctgccgattttgaaggaaaaagtggcctatctgtcaggaggcagggacaaaagggggggtcccattcttacgtttccagccaggtcaaaccacgataggatccgacaagaagacctgaggaggttgatctcctatcttgcctgtataccctcggaggaagtgtgcaagagggggttcacagttattgtggacatgcggggaagcaaatgggatagcattaagccccttctcaaaattctgcaggaaagtttcccgtgttgtatccatgtggctctgataataaagccagataacttttggcaaaaacagcgaaccaattttgggagtagtaagttcgaatttgagacaaatatggtgtcgctcgaggggctgacaaaggtagtcgatccttcccagttgacgcctgagttcgatgggtgtctggagtacaatcacgaagaatggatcgagattagggtggcgtttgaggattatatttccaacgcaacccacatgctgtctcggcttgaggaactgcaggacatccttgctaaaaaggaactgccgcaggacctggaaggggctagaaacatgatcgaagagcactcccagttaaaaaagaaagtgattaaagccccaatcgaggacctagacctcgaaggtcaaaagctcctgcagagaattcagagctccgaatcatttccgaagaagaattccggtagcggcaacgcagatctgcagaatttgctgcctaaggtcagcaccatgctggacagacttcatagtacacggcagcatcttcaccagatgtggcatgttcggaaattgaaacttgatcagtgttttcagttaagacttttcgaacaagatgccgagaagatgttcgactggatcacacataataaagggctgtttctcaatagctacacggagattgggacctcccatccacacgcaatggagctgcaaactcagcacaaccattttgctatgaattgtatgaacgtctatgtgaatatcaaccgcatcatgtctgtcgccaaccggctggtcgaaagtggacattacgcctcccaacagattcgccaaatcgccagtcagctcgagcaagaatggaaggcctttgcagctgcccttgacgagcgctccaccctgctggacatgtcctctatattccatcagaaagctgagaaatatatgagcaatgtcgacagttggtgtaaagcctgtggagaggtcgacttgccatccgagctgcaagaccttgaggatgccatacaccatcaccaaggaatttacgagcacattaccttggcctatagtgaagtgtctcaggacgggaagagcctgctcgacaaactgcagaggcctctcaccccagggtcttccgactccctgacggcctctgcaaattactccaaggccgttcatcatgttcttgacgtgattcacgaggtcttacatcaccaacggcagttagagaacatatggcagcacagaaaggtccgcctgcatcaacgcctgcaactgtgtgtgttccagcaggatgtgcaacaagtgctggattggattgagaaccacggggaggcctttctcagtaagcacacaggcgtcggtaagtcactccaccgggcacgtgccctacagaagcgccacgaggacttcgaggaggtcgctcagaatacgtacactaacgctgacaagctgctcgaggcagccgaacagctggcccaaaccggcgaatgtgatcccgaggagatctatcaagccgcacaccagctggaagaccgcatccaggacttcgtacgacgcgtcgagcaacggaagatccttctcgatatgagcgtttccttccatacacacgtgaaggaactgtggacgtggctggaagagctgcagaaagaactcctcgacgacgtatatgcagaaagtgtcgaggctgtacaggatctaattaagcgcttcggtcaacagcagcagactacactccaggtgaccgtgaatgtgatcaaagaaggggaggatctgattcagcagctgcgcgactccgccatttcatccaataagacaccacacaacagctcaattaaccatatagagacagtgctgcagcaacttgacgaagcccagagccagatggaagagctgtttcaagaaagaaagatcaagctggaactgtttctgcagctcagaattttcgagagagacgccattgacattatctctgatctcgagtcgtggaacgatgaactgtcgcaacaaatgaatgactttgacaccgaggatcttacgatcgcagaacagcggctgcagcatcacgcagacaaggccctgactatgaataacctaaccttcgatgtgatacaccagggccaagaccttctccagtacgtaaatgaagttcaggcatccggggttgaactgctttgcgacagggacgtcgatatggcaacgcgcgttcaggatcttctcgagtttctacacgagaaacaacaggagctggacctggccgctgagcagcatagaaagcacctggaacagtgtgtgcagcttcgtcacttgcaagccgaagtgaagcaggtcctgggatggatccgcaacggagagagcatgttgaatgccggactgattacagcaagctcccttcaagaggctgaacagctccagagagaacatgagcagttccagcatgcaatcgaaaagacccatcagagcgccttacaagttcagcagaaagctgaggctatgttacaggcaaatcattacgacatggacatgattagggactgtgcagagaaagtggcctcgcactggcagcagttaatgctgaaaatggaggacaggctgaagttggtgaatgcctctgtcgctttctacaagacgagcgagcaggtttgttccgtgctggagagtctcgagcaggaatacaagcgcgaggaggattggtgtggtggagccgataagctgggaccaaactctgagaccgaccatgtaacccccatgatttcgaaacacctggagcagaaagaagcattcctcaaggcctgtacactcgctagacggaacgctgacgtgtttcttaaatatttacacaggaatagcgtgaacatgcccggaatggtgacgcatataaaggcccctgaacagcaagtgaagaacattctaaacgaactatttcaacgggaaaaccgggtcctgcattattggaccatgcgcaagagacggcttgatcaatgtcaacagtacgttgtcttcgaacgttctgcgaagcaggcactggaatggattcatgataatggagagttttatctgagcactcacacgagcacagggtccagtattcaacacactcaggaactcttgaaagaacacgaggagttccagattactgcaaagcagacgaaggagcgcgtgaagttactcatccagctggctgacggattctgtgaaaaaggccatgcccatgcagcggaaattaaaaaatgcgtgactgccgtcgataagagataccgcgacttcagtcttaggatggaaaaatatcggacctccctcgaaaaggccctcggaatatcatcagattccaacaaatccagtaagagcctgcagctcgatattatcccagccagcatccctggtagcgaggtgaaattaagagacgccgctcatgagctgaacgaagagaaaagaaagagtgccaggagaaaggagtttattatggcagagctcattcaaacagagaaggcatacgtccgggacctgcgggagtgtatggacacttacctgtgggagatgacgtccggtgtggaagaaatcccgccaggaattgtcaacaaggagctgatcatcttcggcaatatgcaggaaatctatgagttccataacaatatattcttaaaggagctcgaaaaatacgagcaattgcctgaagatgtcggtcactgcttcgtcacatgggccgataagttccagatgtatgtgacatattgcaaaaataagcctgatagtactcaactaatcctcgaacacgctggctcctatttcgacgaaatccagcagagacatggattagctaactccatttcaagctacttaattaagccggtgcaaagaattaccaagtaccagctgctactgaaggaactgctgacctgctgtgaggagggtaaaggagaaatcaaagacgggctggaggtgatgctatcagtgccgaagagagctaatgatgctatgcacctctctatgctggagggattcgatgagaatattgagagccaaggcgaacttatccttcaagagagctttcaggtttgggatcctaagactctgattaggaaggggagagaacgccacctgttcttgtttgagatgagtcttgtttttagcaaggaagtgaaagattcctcagggagatcgaaatacctttataaatctaagctgttcacttccgaactgggagttaccgagcacgtggaaggcgacccatgtaagtttgccctctgggtcggacgcacacccacctcagataacaagatcgttctaaaagcaagcagcatcgagaataagcaggactggatcaagcacattcgggaggtgatccaagaaagaaccattcatctgaagggagcgctaaaagagccgatccacatccctaaaaccgccccagctacaaggcagaagggcaggcgcgatggcgaggatctggacagccaaggcgatgggagcagccagcccgacacgatttctatagcgagtagaaccagccagaataccctcgattcagataaactttccggtggctgtgagctgaccgtcgttattcatgatttcactgcctgcaactccaatgaacttactattcgaaggggccagactgttgaagttctggagagacctcatgacaaacccgattggtgcctcgtgcgcacaactgacagaagtcctgcggctgaaggccttgtcccatgcggcagcttatgcatcgcacactcccggagctccatggaaatggagggaatattcaaccataaagattctctcagtgtgagtagtaacgatgctagcccacctgctagcgttgcgtccttgcaaccccacatgattggtgcccagagttcaccaggtcctaagagacccggaaacacgcttagaaagtggctgacctcacctgtccgcagactgtcttccgggaaagcagatggacacgtgaaaaagttagcccacaagcataagaaatctagggaggtgagaaaaagtgccgacgccggatcacagaaagatagcgatgacagcgccgctacaccacaggatgagactgtggaggaacgaggaagaaatgagggcctgtccagtgggacactgagcaagagcagcagctccgggatgcaatcttgcggcgaggaggaaggggaggaaggagctgacgcagtgccgctgcctcctccaatggctattcagcagcatagcctccttcagcccgatagccaggatgataaagcttcatctcgcctgctggttagacccacatctagcgagaccccgagcgctgcagaactagtctcagccattgaggagcttgttaaatccaaaatggccctggaagacagaccttcttcactattggtagaccagggtgattcctcctctccttcgtttaatccatcagataattctctgctgtcttctagttccccaattgacgagatggaggagagaaaaagttcttctttaaagaggcggcattacgtcctacaggaactggtagagactgaaagagattatgtgcgagacctgggctacgtggtagaaggatatatggctctgatgaaggaggatggagtccctgacgatatgaagggtaaggacaaaattgtatttgggaatattcaccaaatctacgattggcacagagatttttttttgggagaattagagaagtgtctagaggacccagagaagttgggttctctgtttgttaaacatgagagaagactgcatatgtatattgcctactgtcagaacaagcctaaatccgagcacattgtgtccgagtacatcgacacattctttgaggacctaaagcagaggttagggcaccgactgcagctcaccgacttgttaattaagcctgtgcaaagaatcatgaaatatcagttactcttgaaggacttcctcaaatactctaaaaaagcttcgctcgatacttccgagctcgagagagccgtcgaggtgatgtgcatcgtgcccaggaggtgcaatgacatgatgaatgtcggtagacttcagggatttgatggtaagattgtagcacaaggtaagctcctgctgcaagacaccttcctcgtgactgaccaggatgcgggattgctgcctcgttgcagggaaagacgaatcttcctgttcgaacagatcgtgatcttttctgagcccctagacaagaaaaaagggtttagcatgccaggtttcctattcaagaattccattaaagtgagttgtctgtgcctcgaggagaatgtggaaaatgatccatgtaagttcgctcttacgtccaggaccggcgatgttgttgagacgtttatcttgcattcaagctctccgagtgttcgacaaacttggattcacgagattaaccaaatcttggaaaaccagaggaatttcctgaatgcgctgacctctccgattgaataccagcgtaatcattcaggcggaggcggtgggggtggatcaggtggcagcggtggaggtggcggatcaggcggtggaggagcccctagcggtggatcaggacacagcggaggtccgtcgtcttgcggaggcgctcccagtacctcaaggagtaggccttcccgcatcccacagccggtccgccatcaccccccagttctcgtgtcgtctgccgcaagctcgcaggcagaagccgataagatgtccggtacgagtaccccgggaccctctctgcccccacctggagccgctccggaagccggaccttccgccccttccagacgaccacccggagccgatgcagagggtagcgagcgagaggcggagcctattcccaagatgaaagttctggaatccccccgaaaaggggctgccaacgctagtggctcttcaccagacgcccctgcaaaagatgctcgtgcctcactcggtaccttgcctctggggaagcctcgtgcgggtgccgcatctccattgaactcgcctctgtctagtgccgttccttccttgggcaaggagccctttccaccttccagccccttgcagaagggcggatccttctggtctagcattcctgcctccccagccagccggcctggcagcttcacgtttccaggagattccgattccctgcagcggcagacccctaggcacgcggctcctggaaaagataccgataggatgtcaacgtgttcctccgccagtgaacagagtgtacagtccacgcagtctaatggttccgaaagtagttccagctctaacattagtaccatgttggtaacacacgactacacagccgttaaagaggacgagattaatgtgtatcagggagaggtcgtgcaaattttggcctccaaccagcagaacatgtttctggtcttccgcgctgcaactgaccagtgccctgccgctgaaggttggatccccggtttcgtgttaggccataccagtgccgttatcgttgaaaatcccgacgggactcttaagaagtcgaccagctggcataccgctctgaggttgagaaaaaaaagcgagaagaaggataaagacggcaaaagagaaggtaagcttgagaatggctatcgaaaaagtcgtgaaggacttagtaacaaggtgtcggttaagctgcttaacccgaattatatttacgatgttcccccagaattcgttatccctttatctgaggtgacgtgcgaaaccggggagactgtggtgcttaggtgtagagtgtgcggaaggccgaaagcctcgatcacctggaaagggccagaacacaacacattaaacaatgacggtcactattcgatttcctatagtgatcttggtgaggccactcttaagattgtgggcgtgactaccgaagatgacggtatctatacttgcatcgcagtgaacgatatgggcagtgcaagctcctccgcgagtctgcgggttctgggacccggaatggatggcataatggttacgtggaaggacaacttcgactccttctattctgaagtggctgaattgggcaggggtaggttctctgttgtcaagaagtgcgaccagaaagggacaaagagagccgtggcgactaagtttgttaacaagaaacttatgaaacgggaccaagtgactcacgagctgggcatcctccagagcctgcaacatcctctgctggtcgggctgctggacaccttcgagacccccactagttatatcttagtgctcgagatggctgatcagggaaggctattagactgcgtcgtgcggtggggatctcttacagaggggaaaattcgggctcacctgggtgaggtcttagaagcagtgcgctatttgcataactgccgcattgcacacctcgaccttaaacctgaaaacattctcgtcgacgagtccctggccaagcccacaatcaaactcgccgattttggtgatgctgtacagctaaacacgacgtattatatacatcagctgctggggaatccagagttcgctgcccctgaaattatcttggggaacccggtaagtctgacctccgatacctggagcgtgggcgtccttacatacgtgttactcagtggcgtgagcccatttctagacgactctgtggaggagacatgcctcaacatttgccgcctggatttctcattccccgacgactactttaaaggtgtgagccagaaggctaaggagtttgtgtgctttctgctccaggaggatccagccaagagaccgtctgcggcactggccctccaggagcagtggttgcaggcaggcaacggaagatctacaggtgtgctggacacgagcagactgacttctttcattgagagacggaaacatcagaacgatgttaggccaattcgcagtatcaaaaactttctgcagagcaggctactgcctagggtata

SEQ ID NO: 245219 - DNA, 7502 bp, synthetic construct
  misc_feature 1..7502: note = Description of Artificial Sequence: Synthetic coding sequence
  source 1..7502: mol_type = other DNA
atgctggacaggctgcactcaactcgacaacatctgcaccagatgtggcatgtgagaaaactaaagttggatcagtgtttccaacttaggctcttcgagcaagacgccgagaaaatgttcgactggatcactcacaacaaggggttattcctgaactcatatacagagattggcacttctcatcctcatgctatggagctgcagacacagcacaatcatttcgcaatgaactgcatgaacgtgtatgtgaacattaacagaattatgagcgtagctaataggcttgtggagtccgggcactatgcctctcagcagatcagacagatagcaagtcaactggaacaggaatggaaagcttttgccgctgcactggatgagagatctaccctgctggatatgagtagtatctttcaccaaaaggccgagaagtatatgagcaacgtggattcatggtgcaaagcttgtggggaagtagatctgcccagtgagctgcaagacctggaggacgccatccatcaccatcaggggatatacgagcatattacgctggcatacagcgaggtgtcgcaggatggtaagagcctcctcgataagctgcagagaccgctcacacctggatccagtgattctctgaccgcaagcgcaaactacagtaaggccgtgcatcacgttctggacgtgatccatgaagtgctgcatcaccagaggcagctggagaacatttggcagcaccgaaaggtgcgcctacaccagagactgcagctctgtgtgttccagcaggacgtgcagcaggttctcgattggatcgaaaaccatggagaggcgttcctcagcaagcacaccggagtaggcaaatccctccatcgggcacgcgctctgcaaaagcgtcacgaagatttcgaagaggttgctcaaaacacatacaccaacgcagataagttgctggaagccgctgagcaattagctcagaccggcgaatgtgatcctgaggaaatttaccaggcggctcaccagctggaggataggattcaagacttcgtcagaagggtcgaacagcgaaaaatcttgttggacatgagcgtgagcttccatacccacgttaaggaattgtggacttggctcgaggaacttcagaaagaactgctcgatgacgtgtacgccgaatccgttgaagccgtgcaagatctgataaagcgatttggccaacagcagcagacaaccctacaggtaaccgtgaacgtgatcaaggagggtgaagatctcatccagcagctccgcgatagtgctatcagctcaaacaagacccctcataatagttctattaaccacatcgaaactgtgcttcagcagttagatgaggctcagtcgcagatggaagagctgtttcaggagcgaaagatcaagctggaattgtttctccaactacggatattcgaaagggatgccattgatatcatttcagacctcgaatcttggaatgatgagctctcacagcagatgaatgacttcgacacagaggacctgaccatagccgaacaacgacttcaacaccacgccgataaagccctgactatgaacaatctgaccttcgacgtgatccatcagggccaggacctcctacagtacgtgaatgaagtgcaggcctctggcgtggagctgctgtgtgaccgcgacgtggatatggccacaagagtccaggaccttctcgaatttctgcatgagaaacaacaggagttggatctggctgctgaacagcatcggaagcacctggaacagtgcgtccagctaagacacctccaggccgaagtgaaacaggttcttggatggattcgaaacggagagtccatgcttaatgcagggctgatcactgcaagctcgttacaggaagccgaacaactgcagagagagcatgagcagtttcaacacgccattgaaaagacacaccagagcgccctgcaggttcagcagaaagccgaggccatgctccaggcaaaccattatgatatggacatgattcgagactgcgccgaaaaagtggctagccactggcagcagctcatgctgaaaatggaggaccggttaaaactggtgaatgccagcgttgccttttacaaaactagcgagcaggtttgctctgtcctcgaaagcctggaacaggaatataaacgcgaggaagactggtgcgggggagcggacaagctaggtcctaattctgagactgaccacgttacccccatgatcagcaaacatctggagcaaaaggaggccttcttgaaagcctgtactctggcaaggagaaacgcagacgtgtttctgaaatatttgcaccggaattctgtgaatatgccgggtatggtaactcatattaaagcccctgaacagcaagtcaagaacatcttgaacgagctgtttcagcgagaaaacagagtgctacattattggaccatgaggaagcggagactggaccaatgtcagcagtatgttgtctttgagaggtccgccaagcaagcacttgagtggatccacgataatggcgagttttacctttccacacacaccagtaccggcagctctatccagcacacacaggaactcctaaaagaacacgaggagtttcagatcacagcaaagcagaccaaagagcgcgtcaagcttctgatccaactagccgatgggttttgcgaaaaaggtcatgcacacgctgcagagatcaaaaaatgtgtgacagccgtggacaagaggtatcgtgatttctcgctgcggatggagaagtaccggacttccctcgagaaagcgctggggatatcgagcgattccaataagtcgtccaagagccttcagctggacattatccctgcatctatcccaggctcggaagtaaagctcagggacgccgctcatgagctaaatgaagagaagcgcaaatcagctagaagaaaagaatttatcatggccgagttgatccaaacagagaaggcctacgttcgggatttacgggagtgcatggacacttatctttgggaaatgacatcaggcgtcgaagaaattccccctgggatcgttaacaaggaactaattatctttgggaatatgcaggaaatttatgagttccataacaacatcttcttgaaggagctcgaaaagtatgagcagcttcctgaggatgttgggcattgcttcgtcacatgggccgataaatttcagatgtacgtgacttattgtaaaaacaagccggattcaacccagcttatattagaacacgcaggttcgtatttcgatgaaatccagcaaagacatggcctcgctaacagcattagtagctatttgatcaaacccgtgcagcgtattacaaagtatcaattgctccttaaagagctgctgacctgttgtgaggagggaaagggtgagataaaagacggcctcgaagttatgctgtctgtgcctaaacgcgctaatgacgctatgcacctgtcgatgctcgaggggttcgacgagaacatagagtcccagggcgaactgatactgcaggagagttttcaggtgtgggatccgaaaaccctcatcagaaaggggagagagcggcacctgttcctgttcgagatgtcattagtcttctctaaggaagtcaaggacagtagcggcagatctaaatatctatacaagagcaaactgttcacatccgagctgggggtgaccgagcatgtggagggggatccttgtaaatttgccttgtgggtgggaagaacacctacatcagataacaaaatagtgctgaaggcctcttctatcgagaacaaacaggactggatcaagcatatccgagaggtcattcaggaacgcaccatccacctgaagggcgctctcaaggagccaattcatatccctaaaactgcccctgcaacacgccagaaagggaggagggatggagaagatctggacagtcaaggagacggcagttctcagcccgacacgatatcgatcgcctcacgtacttcccaaaacaccctggacagcgacaaattgtcaggcggatgcgagctgacagtagtgatccatgacttcacagcatgcaactccaatgaactgactatacgacgaggccaaacagtagaagtgctcgagaggccccacgacaaaccagattggtgccttgtccgcaccacggatcggagccctgccgctgagggcctggttccttgcgggtccctctgtattgcccattcccgctcatcgatggagatggaaggaatcttcaaccacaaggacagcctctcagtttcaagtaacgatgccagcccaccagccagcgtggccagtctccagcctcacatgattggagcccagtccagtccaggtcccaaacggccagggaacacacttagaaagtggctgactagccctgtccgtcgtttgagctcgggtaaggcagatggtcacgtaaagaaactcgcccataaacacaaaaagagtagagaggttaggaagtcagctgatgccggatcgcaaaaggatagcgacgactctgctgcaacccctcaggacgaaactgtcgaggagcggggacgaaacgaaggtctgagctctgggaccctgagtaagagttccagttcagggatgcagagttgcggagaagaggaaggcgaggaaggcgcagacgccgttccactgcctccaccaatggccatacagcagcacagtctcctgcagcctgattcccaggacgacaaggcaagttctcggttacttgtcagaccaacaagtagcgaaactccttccgctgcagaattggtgtctgcaatcgaggagctggtgaagagtaaaatggccttagaggacaggcctagtagcctgttggttgaccaaggcgactcttccagtccatctttcaacccttctgacaattccttactatccagttcttcccccatagatgagatggaagagcgcaagagcagctccttaaagcgcaggcactatgtattacaggaattagtggaaactgaacgcgactacgtcagggacctcggttacgtcgtcgagggctatatggcgctaatgaaggaagatggagttcctgacgatatgaaggggaaggacaagattgtatttggcaacatacatcaaatctatgactggcatagagacttcttcctgggggagcttgagaaatgccttgaggaccccgaaaaattaggtagcttgtttgtcaaacacgagaggaggctccatatgtacattgcctactgccagaataagcctaagtctgagcacatcgtgagtgagtacattgatactttcttcgaagatctgaaacaacggctgggacaccggttgcaactgacagatctgctaataaaaccggtccaacggattatgaagtaccagctcctgctcaaagattttcttaagtattccaaaaaggcctccctggacacgagtgagctggagcgtgccgtagaggtgatgtgcattgtccctcgccgttgcaacgacatgatgaatgtgggccgtctgcagggttttgacgggaagattgtggcacaggggaagctgctgctccaggacacttttctagtcactgatcaggatgcgggactgctccccagatgccgcgaacgtaggatatttctttttgaacagattgtgatcttttcagaaccactcgacaagaagaaaggcttctcgatgcccggtttcttgttcaaaaacagcatcaaagtgtcttgtttgtgtctggaggaaaatgtggagaacgacccctgcaagttcgcgctgacttctaggacaggcgatgtggtggaaacatttatattgcacagttcaagtcccagtgtcagacagacctggatccatgaaataaatcagatcttggagaatcagagaaactttctaaacgccttaacctcccccatcgagtatcagagaaatcactccggcggtggaggcggtgggggaagcggcggatcagggggagggggtgggtccgggggaggaggagccccatctggtggcagcgggcattccgggggtccatcgagctgcggtggcgcaccctccaccagtcgatcgcggccatcgagaattccacaacccgtccgccaccacccaccagtgcttgtttcgtcagccgcttcttctcaagccgaggcggataaaatgtctggaacttctacccccggaccaagtttacccccacctggcgcagcgcctgaggctgggccttcagcacctagccgcagacccccaggagctgacgccgagggctctgaaagagaggcggagcccattcccaaaatgaaggtgctcgagagtcccagaaagggagccgctaacgctagtggctcatcacctgatgcacccgcaaaagatgccagggccagtctcggcacactacccctggggaaacctcgggctggcgctgcctcccctctgaactccccactttcatcagccgttccatccttaggaaaggagccctttcccccttctagccccctacagaaaggcggttccttctggagttccatccctgcgtcaccagcctcccgtcctggctctttcacatttccgggtgactcggactccctccaaagacagactcctaggcacgctgccccaggtaaggataccgatagaatgtctacatgctcgtctgcttccgagcagtcagtacaaagcactcagtcaaatgggtccgaaagtagctcaagcagcaatatcagtactatgctggtgacccatgattataccgcagttaaggaagacgagattaatgtttaccagggtgaagtggttcagatcctggcctctaatcagcagaacatgttcctagtcttcagagcagccactgatcagtgcccagccgcagagggatggatcccaggatttgttctcggacacacctcggccgtgatagtcgaaaatcccgacggaacactgaaaaaatcgacaagttggcacaccgccttgaggttgagaaaaaaatcagagaaaaaggacaaagatggaaagagagagggaaaattagagaacggatatagaaagtctagggaaggtctgtcgaacaaggtgtctgtgaagctgcttaatccaaattatatctacgacgtcccccctgagttcgtcatacctctgagcgaagtgacttgcgaaacaggggagaccgttgtcctgcgctgccgagtgtgcggtaggccgaaagccagcattacatggaagggcccagagcataacacattaaataacgacggtcactactccatcagctacagcgacctgggcgaagctacactgaagattgtcggagtcaccacggaagatgacgggatttacacatgtatagccgtcaacgacatggggtcagctagtagctcagcgagcctcagagttctcggcccaggcatggacggaattatggtgacttggaaggacaatttcgatagtttttatagtgaggtggccgagctcggcagagctaattggaacaactggtccccatatta

SEQ ID NO: 245220 - DNA, 8765 bp, synthetic construct
  misc_feature 1..8765: note = Description of Artificial Sequence: Synthetic coding sequence
  source 1..8765: mol_type = other DNA
atgtcgggctctagcgggggtgcggctgcccctgccgctagttcaggtcctgccgcagccgctagcgcagctgggtctggctgcggtggtggggcaggcgaaggcgctgaggaggctgctaaagatctggcagatatagccgctttctttcggagcggctttagaaaaaatgatgagatgaaagctatggacgtgcttccgattctcaaagaaaaggtggcttacctgtccgggggtcgagacaagagagggggacccatactcaccttccccgctaggtctaatcacgacaggatccgccaggaggacctgcggagacttataagctatctggcatgcatccctagtgaggaggtgtgtaaaaggggcttcacggttatcgtggacatgaggggttctaaatgggacagcattaagcctcttctcaagatcctgcaggagtcattcccctgttgcattcatgttgccttaatcattaagcctgataatttctggcagaaacagcggaccaactttgggagcagtaagttcgagttcgaaacaaacatggtgtctctggaaggcctgaccaaagtagtggacccatctcagctgacacccgagttcgatgggtgtctcgaatataaccacgaggaatggatagagattagggttgccttcgaggattacatctcaaatgcaacacatatgctcagtcggctggaggaactgcaagacatcttagctaaaaaggagctcccacaggacctggagggtgcacggaatatgatcgaggagcatagccagttgaaaaaaaaggtcatcaaagccccaattgaggacctggacttggagggtcagaagctccttcagcggatccagtcctctgagtctttccccaaaaagaacagtggaagtggcaatgctgacctgcagaatctgctccctaaagtttccacaatgttggacagactgcattctactagacagcacctgcaccagatgtggcacgtgcgaaagctgaagctggaccaatgttttcagcttcgcctgttcgaacaggatgccgaaaagatgtttgattggattacccacaacaaaggcctgtttctgaattcttacaccgaaattgggactagtcatcctcacgcgatggaactccagacacagcataatcacttcgccatgaattgtatgaatgtgtatgtgaacatcaacagaattatgagcgttgcaaatagactggtagagtccgggcattacgcctcccagcaaatccgccagattgcctcccagttagaacaggagtggaaagctttcgctgccgctttggatgagaggagcaccctactagacatgagctcgatatttcatcagaaggctgaaaaatatatgtccaatgtcgactcatggtgtaaagcctgtggcgaggtggacctgccgtctgaactgcaagacctggaggacgccatccaccaccaccagggcatctacgaacacattaccttggcgtattccgaggtttcccaagacgggaagtctctgttagacaagctgcagcgaccactgacaccgggttcttcggacagcctgactgcatctgccaactactccaaagccgtgcatcatgttctggatgttatccatgaagttttgcatcaccagcggcaactggaaaatatttggcagcatcgcaaggtccgcctacaccagcgcctccagctgtgcgtctttcaacaggatgtccagcaggttctcgattggatcgagaatcatggggaggcatttctgtccaagcatactggggtgggaaagtccttacacagagcccgagccctgcagaaaaggcacgaagacttcgaagaagttgctcaaaacacatacaccaacgcggacaagctccttgaagccgcagaacagcttgcccaaactggggagtgtgacccagaggaaatttaccaggcagctcatcagctcgaggacagaatccaagattttgtcaggagggttgaacagcgcaaaatccttctggacatgagcgtgtcttttcacacccacgttaaggaactgtggacttggctagaggagctccaaaaagagcttctggacgatgtgtatgcagagtctgtagaagccgtgcaggatttgattaagcggtttggacagcaacagcagacaacgctccaggtgaccgtgaatgtcatcaaggagggagaagatctgatccagcagttgcgcgacagcgctattagttcaaataaaacccctcacaattctagcattaaccacatagagactgttcttcagcagctcgacgaagcccagtctcagatggaggagctgtttcaggagcgcaagataaagctcgaactcttcctgcaactgaggatctttgagcgggatgctatcgacattatttctgacttagagagctggaatgacgaattgtctcagcagatgaacgatttcgacacagaagatctgaccatcgcagagcagcgactgcagcaccacgcagataaagcccttaccatgaacaatcttacctttgacgtgatccaccagggtcaggacctgctacagtacgtgaacgaggttcaggccagcggagtggagcttctgtgtgaccgcgatgttgatatggccacccgagtgcaggacctgttagagttcctgcatgaaaagcagcaggagttggatttggcggcagaacaacaccggaagcatctcgagcagtgcgtccagttgcgtcacctgcaggcggaggtgaaacaggtactgggctggattcgtaacggggagtcaatgctgaacgcaggacttataaccgcctcaagtcttcaggaggctgagcagttgcagcgagagcacgagcagttccaacatgcgatcgaaaagactcaccagagcgcgcttcaggttcagcagaaagctgaggcaatgctgcaggccaaccattatgatatggatatgatccgagattgtgctgagaaggtagcttcccactggcaacagctcatgctgaagatggaagatcgactcaagttagtcaacgccagcgtggccttttacaagacttccgagcaggtctgtagtgtcttggaaagtcttgaacaggagtacaagcgtgaggaagattggtgcggcggtgccgataagctgggtcctaactctgaaaccgatcatgtgacgcccatgatcagtaaacatctcgagcagaaagaggccttcttaaaagcctgcaccctagctcgacgcaacgccgatgtttttctcaaatacctccaccgtaatagtgttaacatgccagggatggtgacccacatcaaagcacctgaacagcaggtgaaaaacatcctcaatgagctgttccagcgtgagaaccgcgtcctgcattattggaccatgcggaaaaggcggctggatcagtgtcagcagtacgtggtgttcgaacgaagtgctaaacaggctctcgaatggatccatgataacggcgagttttacctttctacacacaccagcaccggcagcagcatccagcacactcaggagttgttaaaggaacatgaagaattccagatcaccgcgaaacaaactaaggagcgtgtgaaacttctgatacagctcgctgatgggttttgcgaaaagggccatgcccatgccgctgagattaaaaagtgtgttactgccgtggataagagatatagggacttctcattacggatggagaaataccgaacatcacttgagaaggcccttggcattagctcagattctaataagtcatctaaatcactgcagcttgatatcattccagcttctatcccaggctctgaggtaaaactgagggatgccgcacatgaactcaacgaagagaaacgaaagtctgccaggcgtaaagagttcattatggccgagcttatccaaaccgagaaggcctacgtaagggatctgcgcgagtgtatggacacctatttgtgggaaatgacgagcggcgtcgaggagatccccccagggatagtgaacaaggaattgatcatctttggaaatatgcaagagatctacgaatttcacaacaacatcttcctgaaggaattagaaaagtatgaacaattgcccgaagatgtaggacactgcttcgtgacatgggccgacaagttccagatgtacgtcacttactgtaaaaataagcccgatagtacccagcttattctagagcacgccggttcctacttcgacgagattcagcagaggcatggactggccaattcaatttcgtcttacttaattaaacccgtacagaggatcacaaagtaccagcttctgctcaaggaacttctgacctgctgcgaggagggaaagggcgagatcaaagatggacttgaggtaatgttgtccgtacctaagcgtgccaacgatgctatgcatctcagcatgctggaggggttcgacgagaatatagagagtcaaggcgaactcatcctgcaggagtcgttccaggtctgggaccctaaaacactgatccgtaaagggagggagagacacctcttcctgtttgaaatgtcccttgttttcagcaaagaggtcaaagattcatcaggacgtagcaaatacctttataagagcaagctcttcactagtgaactgggagtgaccgaacacgtcgagggggacccatgcaaatttgccctgtgggtgggtagaactcctactagcgataacaaaatcgttctaaaggcttcttcaatagagaacaagcaggattggattaaacacatccgggaagttatccaagaaaggaccatccatttgaagggagctttgaaagagcccattcacatacccaagacagccccagcaacccgccaaaaaggcagacgtgatggcgaggatctggattcccaaggcgacggaagctctcagcccgataccatttcaattgcaagtcgcacatcacaaaatacgctggactcagataaactgtcaggagggtgcgaattgacagtggtaatccacgactttacggcatgcaactcaaacgaactgaccatacgtcggggacaaaccgttgaagtgctagaacggccacatgataaacctgactggtgtctggtgcgcaccaccgataggtcaccagctgcagagggcctggtgccctgcggttcattgtgcatcgcccattcccgctcaagtatggagatggaaggcatattcaaccacaaggattctctgagcgtgtcctccaacgatgcaagtccgccagctagcgtcgcctccctccagccgcatatgatcggagcacagtccagcccgggacctaaaagaccaggaaatacacttcgcaagtggttgaccagccctgttcgtcgcctctcaagcggaaaggctgatggtcatgtcaagaagttagcacacaaacacaagaaatcacgggaggtcagaaagtccgcagatgccggatcccagaaagactctgatgattcagcagccaccccacaggatgagactgtcgaggagcgtggcagaaatgaagggttgtcatccggcacactatcaaagagctcctcttccggaatgcagtcatgcggggaagaggagggtgaagagggcgcagacgctgtgcctctgcctccacctatggctatccagcaacacagcctgcttcagccagatagccaggatgataaggcgagctctagactgctcgtcaggcctacttcatcagaaacgcctagcgctgctgaattggtgtcggccattgaagaattggtcaagtctaaaatggctttggaagaccgcccatcgtctctccttgtggaccaaggggacagttctagccctagtttcaatccttccgacaacagcttattatcctccagttcaccgattgacgagatggaggagcgaaaatcctcctcactcaagcgacggcactacgtgttgcaagagcttgttgagacagagagagactatgtgcgcgatttgggatatgtggtggaaggatatatggccctgatgaaggaggatggagttcccgatgatatgaagggaaaagataaaatagtgtttggcaatattcatcagatctatgattggcaccgtgacttcttcctcggcgagctggagaagtgtctggaggaccccgaaaaacttggatcattatttgtgaagcatgaaagaaggcttcacatgtacatagcctactgccagaacaaaccaaagagcgaacacattgtgagtgaatatatcgatacctttttcgaagacctgaaacagaggcttggccatagactacagctcaccgacctccttattaaaccagtgcagcggatcatgaaataccagctcctgctgaaagatttcttgaagtatagcaagaaagcttcactggatacttccgagcttgagagggcagtagaggtgatgtgtatcgtgcccaggaggtgtaatgatatgatgaacgtgggcaggttgcagggctttgacggcaagatcgtggcgcagggaaaacttctcctccaggacacatttctcgtaaccgaccaggatgccggactattacctagatgccgggaaagaagaatcttcctgttcgagcagatcgtcattttctccgagcctctggataaaaagaaggggttcagtatgcccggatttctgttcaagaattcaatcaaggtgtcgtgcctgtgtctggaagagaacgtggaaaacgatccttgtaaattcgcactgacctcccggactggtgacgtggtcgagacattcattcttcacagtagctctccttcagttcgccagacatggattcacgagatcaaccagattctagaaaaccaacggaactttctgaacgccctgacatctcctatcgagtaccagcggaatcacagtggagggggtggtggaggcggtagtgggggttccggcggagggggtgggtccgggggaggaggtgctccctcggggggatccggtcattcagggggtcctagtagttgcggcggagcaccatccacctcgaggtccagaccttcaaggattcctcaacctgtgcgccaccatccaccagtcttggtgtccagcgcggctagctcccaggctgaagctgacaagatgtccgagtccgagtcctccagcagttctaacatatcgaccatgctggtcacacacgattacactgctgtgaaggaggatgaaatcaatgtctatcagggcgaagtagttcagatactagccagtaaccagcagaatatgtttctggtctttcgcgctgccactgatcagtgtcccgcagccgaagggtggatcccgggtttcgtactaggccatacatctgccgtgattgtggagaatcccgatgggaccctgaagaaatccactagctggcacacagccctccgcctaaggaaaaagagtgagaaaaaggacaaggacggcaagagagaaggcaaactggagaacggctataggaagtcccgcgaaggtttgtcaaacaaggtgtcagtgaagcttctgaaccctaattatatctacgatgttccaccggagtttgtaatccccctcagcgaagtgacctgcgagaccggtgaaacagtcgtcctgagatgccgggtttgcggtcgcccaaaagcaagcattacttggaaagggccagaacataacacactgaacaacgatgggcactacagtatctcatacagcgacttgggcgaggcaacgctgaagatcgtgggcgtaaccacggaggacgatggaatctatacctgtatcgccgtgaatgacatgggtagcgcatctagttctgcaagcttaagggttctgggaccagggatggatggtattatggttacctggaaagacaacttcgacagtttctattcggaagtggccgaattgggtcgtgggagattcagcgtggtgaaaaaatgtgaccagaaaggcactaagcgtgctgtagccactaagtttgtcaacaaaaaacttatgaagcgggatcaggtgacacacgagctgggaatcttacagtctctgcaacatccactactggtgggactgctcgacaccttcgaaacaccgaccagttacatcttggtcctggaaatggccgatcagggaagattgctcgactgtgtggtgcgctggggatcactcacagaggggaaaattcgtgctcatttaggagaagtcctcgaggcagtaaggtacctccacaactgccgaattgcacacctggacctcaaacctgaaaacatactggtggatgagtctctggccaagccgaccataaagcttgctgacttcggggacgccgtgcaactgaacaccacctactatatacatcagctgctcgggaaccccgagttcgctgccccagaaatcatccttggtaatccagtctctcttacttctgatacctggagcgtgggcgtcctcacttacgttctactttctggggtttctccttttttagacgactcagttgaagagacctgccttaatatctgtcgcctagacttcagctttcctgatgactactttaaaggcgtgagtcagaaggcaaaggagtttgtctgttttctacttcaagaggaccctgctaagaggcctagcgctgccctcgctttgcaggagcagtggttacaagccggtaacggtaggtcaacaggcgtcttagacacaagtagactgacgagctttatcgagaggagaaagcaccagaacgatgtacgacccattcgctctatcaagaatttcttacagagccgcctgctgccgagagtata

SEQ ID NO: 245221 - DNA, 768 bp, synthetic construct
  misc_feature 1..768: note = Description of Artificial Sequence: Synthetic coding sequence
  source 1..768: mol_type = other DNA
atggccttggaagatcgtccttcctcactcctggtcgaccagggggattcatcatccccgagctttaatccttctgacaattcactcctctcttcatcttcaccgattgatgagatggaggagcggaaaagttcctccctgaaacggaggcactatgtcttacaggaactagttgagacagagcgcgactatgtcagggatctgggatacgtcgtggagggatatatggccctcatgaaggaggacggagtgccggatgatatgaaaggaaaagacaagatagttttcgggaacatccaccagatctatgactggcaccgagacttcttcctgggtgagctggaaaaatgccttgaagacccggaaaagctcggctccctcttcgtgaaacacgaacgcagattgcacatgtatatcgcttactgccagaataaaccgaagtctgaacatattgtgtctgaatacatcgacacatttttcgaagacctgaaacagaggctgggccaccgccttcagctgaccgacttacttatcaaaccagttcaaagaatcatgaagtatcagttgctgcttaaggactttctgaaatactctaagaaagcttccctggatacctcagaactggaaagggccgtcgaggtcatgtgtattgtgcccagacggtgcaacgatatgatgaatgtgggcagactgcagggcttcgatgggagagtggtcgcactatgtcataggttcaaggaaactttcagagagatctgttggttctag

SEQ ID NO: 245222 - DNA, 1203 bp, synthetic construct
  misc_feature 1..1203: note = Description of Artificial Sequence: Synthetic coding sequence
  source 1..1203: mol_type = other DNA
atgaacggacagctagatctgagcggcaagctgatcatcaaagcccagttgggggaggatattcggagaataccaattcataacgaagatatcacctatgacgaacttgtgttgatgatgcagcgggtcttcagaggaaagcttctctccaacgatgaggtgactatcaagtataaggacgaagacggggatctgattacgatctttgacagctctgacctgtctttcgccattcaatgtagccggatactaaagcttaccctgttcgttaacggccagccacgtcccctggaatcatctcaggtgaaatatttgcgccgtgaactaatcgagctgcggaacaaggtcaatcgactgctcgactcccttgagccgcctggcgaacctggtcccagcaccaacatccctgagaacgatacggtggatggcagggaggagaagagtgccagcgactcttccggtaaacagagcacccaggtcatggctgcctctatgtcagctttcgatcccttaaagaaccaagatgaaatcaacaagaatgtgatgagtgccttcggcctgaccgacgaccaggtgagtgggcctccctctgcgcctgccgaggacaggtcaggtacccctgactcgatcgcttcttcatcatccgctgcccacccgccaggcgtccagccgcagcagcctccctatacaggggctcagactcaagccggtcagattgagggccaaatgtatcagcagtaccagcagcaggcaggctacggagcacagcagccccaagccccaccccagcagccacagcagtacgggattcagtactccgcttcatactctcagcagaccggcccacagcagccgcagcagttccaggggtatgggcaacagcccacctcccaggcacctgccccagcctttagcggacagccccaacagctgcctgcacaacccccacagcaataccaggcgagcaactacccggctcaaacatataccgctcagacgtcacagcctactaactacacggtggcacccgcatcccaaccaggaatggcaccctcccaaccaggcgcttatcaacccaggccgggatttaccagtttgcctggatcaacaatgactccccctccctccggcccaaacccatatgctaggaacaggccaccgttcggacagggctatacacagcccggacctgggtaccgatag

SEQ ID NO: 245223 - DNA, 1101 bp, synthetic construct
  misc_feature 1..1101: note = Description of Artificial Sequence: Synthetic coding sequence
  source 1..1101: mol_type = other DNA
atgaatggacagcttgatctgtctggcaaactgataattaaggcccagctcggggaagatattcgaaggattcctattcataacgaagatattacctacgatgaactggtgctgatgatgcaacgggtgtttcggggaaaactgctaagcaatgacgaagttacaatcaaatacaaagatgaggacggtgacctgattacaatctttgactcaagcgacctctcctttgccatccagtgctcccgcatccttaaattgacactcttcgtgaacgggcagcctcgtcctctcgaaagcagtcaggttaagtacttacgcagagaactgatcgaactacggaataaggtaaaccgccttctggactcccttgaacctcctggggaacccggaccaagtaccaatatcccagagaatgataccgttgacggacgggaggaaaagtccgcgtctgactcttctggcaagcagtcgacccaagtgatggccgcaagtatgagcgcattcgaccctctcaaaaatcaggatgagatcaacaaaaacgtgatgagcgctttcggactaactgacgatcaggtctctggccctccttccgccccagccgaggaccgtagcgggacccccgattctattgcgtccagctcctccgccgcacaccctcctggggtgcagccccagcagcctccctacaccggcgctcagacccaggctggccaaatgtaccaacagtacagcaatcgcccagcaatggttcatagttcccgacggctgcatctcagttcgttaaactctatggtgtttagcatccagcaggccattgtaagcagactggacctcaataatctgagctcttctcgggacatggcctctaaccaattaccacggcatcaactgcttcctttcctggtgtcactgaacaattgcctgttgtccaggcacagtagcacgcggagagcaattatcctacataaactcaccctccctaaactcctctcgctcctcattatcctgtggctcctaccactcaacttggaatggctgcaggcgaacctaggccctattaatcaagaccaagtcctgctgcactttctggaagtcccctag

SEQ ID NO: 245224 - DNA, 474 bp, synthetic construct
  misc_feature 1..474: note = Description of Artificial Sequence: Synthetic coding sequence
  source 1..474: mol_type = other DNA
atgaacggtcagctagacctctctgggaagttgatcatcaaggctcaacttggagaggacattcggcgaatccccatccacaatgaagacatcacctacgatgagcttgtgctgatgatgcagcgtgtttttcggggaaagctcctgtctaacgacgaagtgaccattaaatacaaagacgaagacggagatctcatcacaatcttcgactccagcgatctgtcattcgccattcagtgctcgagaatactgaagctcaccctattcgtgaacggacagccccgacccttggagtcatctcaggtgaagtacctcagaagggaactgattgagctgaggaacaaagttaacaggctgctggactccctcgaacctccaggagagcctggcccaagcactaatattcctgaaaacgacaccgtggatggccgtgaggagaagtcagccagtgactccagcgggaagcagtcctag

SEQ ID NO: 245225 - DNA, 387 bp, synthetic construct
  misc_feature 1..387: note = Description of Artificial Sequence: Synthetic coding sequence
  source 1..387: mol_type = other DNA
atgaatgggcaactggatttgagcggaaagctcatcatcaaagctcagttgggagaggatattaggcgcatacctatccataacgaggatattacctacgacgagctcgtgctgatgatgcagcgtgtgttcaggggcaaattactgtccaacgatgaggtcacaatcaaatacaaggatgaagacggagatctgataaccatattcgacagtagtgatctgtctttcgctattcaatgcagtcgaatcctcaaattgacactcttcgtcaatgggcagcctaggcccctggaaagtagccaagtgaagtacttacgccgtgaactgatcgaactacgcaacaaggtcaaccgactgctggactctcttgaaccccctggagagtag

SEQ ID NO: 245226 - DNA, 546 bp, synthetic construct
  misc_feature 1..546: note = Description of Artificial Sequence: Synthetic coding sequence
  source 1..546: mol_type = other DNA
atgaatggtcagcttgatctttcgggcaaactgatcattaaggcacagctgggtgaggacatccggagaattcccatacacaatgaagacatcacctatgacgaactcgtgctgatgatgcagcgtgtatttaggggaaaacttctgagcaatgacgaggtaaccatcaaatacaaagatgaagacggggacttgattaccatttttgacagctctgacctatcattcgctattcagtgttcacgtattcttaaactcactctcttcgtcaacggccagcctcggccactagaatcctcccaagttaagtacctgcgtcgagaactgattgagctgagaaataaggttaaccgattattagattctctcgagccacctggggaacccggtccctctaccaacatccccgaaaacgatactgtagatggccgagaagagaaaagcgcgtctgactcctccggaaaacaatcaacacaggtcatggccgcaagtatgtctgccttcgacccgctcaaaaatcaggacgaaattaacaaaaacgtgtag

SEQ ID NO: 245227 - DNA, 1203 bp, synthetic construct
  misc_feature 1..1203: note = Description of Artificial Sequence: Synthetic coding sequence
  source 1..1203: mol_type = other DNA
atgaatggccagctcgatctgtcaggcaaattgatcatcaaggcacagctgggagaagacatccggagaatcccaatacacaatgaggatataacgtatgatgagctagtacttatgatgcagcgtgtctttcggggtaagctgttaagcaatgacgaggtcactatcaagtacaaagacgaggatggagacctgatcaccatattcgactcctccgacctgagctttgccattcagtgtagccgcattctaaaactcacgctgttcgtaaacggacagccccgtccactcgagtcctctcaagttaagtacctcagaagagaactgatcgagctgcggaataaggtcaatcggctcctcgactcactcgagcctcctggagagcctggaccctccacgaatataccagagaatgataccgttgacgggagagaggaaaaatccgctagcgatagttccggcaaacagtccacacaggtcatggccgctagcatgtctgcattcgaccccttgaaaaatcaggatgagattaacaagaacgtgatgtcggcctttggattgacagatgatcaagtgtccgggccaccctccgcgccagcagaagatcggtccgggacaccagactccatcgcgtcatcctcatcagcggctcatccccctggcgtgcagccccagcagccgccttatacaggcgcacaaacgcaggccggacagatagaggggcagatgtaccagcagtatcagcagcaagcgggatatggggctcagcagcctcaagcacctccacaacaacctcagcagtatgggatccagtactctgcttcatactcacagcaaacgggacctcaacagccacagcaatttcagggttacgggcagcagcctacgagccaggccccagcccctgctttttccggccagccgcaacagttgccagctcagccaccccagcagtatcaggcatcaaactacccagcacagacctacactgcacagacttctcagcctaccaactataccgtcgcccctgcctcccagccaggcatggccccatcgcagcccggagcgtatcagcctaggccaggctttactagtttgcccggatccactatgaccccacctcctagtggtcccaatccctacgcccgaaatcggcctcctttcggccaggggtacacgcagccaggtccaggatacagatag

SEQ ID NO: 245228 - DNA, 1191 bp, synthetic construct
  misc_feature 1..1191: note = Description of Artificial Sequence: Synthetic coding sequence
  source 1..1191: mol_type = other DNA
atgaatgggcagctggatctcagcggaaaattaatcattaaagcgcagttgggcgaggacataaggaggatacccatacataatgaggatatcacctatgatgagcttgtcctgatgatgcaaagagtatttcggggtaaactcctgtccaacgacgaggtcaccattaagtataaagacgaagacggcgacctgattaccatcttcgattctagcgacctgagttttgccattcagtgcagcaggattctgaagttaacattattcgtgaatggccagccgagacccctcgagtcgtcacaggtgaaatacctaaggagagaattgatcgagctgcgcaataaggttaatcgtttgctggactcattggagccaccgggagagcctggtcctagtacaaatattccagagaatgatacagtggatggtcgagaagaaaaatctgcctctgacagctccggcaagcaatccactcaggtgatggcagcatccatgtctgctttcgacccgttaaaaaatcaagatgagatcaataagaatgttatgtcggcattcggcctgaccgatgatcaggtgtctggacccccaagcgcgccagcggaggaccgatcagggacacctgatagcatcgcgtcctcgagcagcgccgctcatcctcccggagttcaaccccagcagccaccgtacacaggtgcccaaacacaggcaggtcagatgtaccagcagtatcaacagcaggcgggttatggcgctcagcagccacaggccccacctcagcagccacagcagtacgggatacagtattccgcctcctactcacagcagaccggaccccagcagcctcagcagtttcaggggtacggccagcagcccaccagccaggcccctgccccagctttttccgggcaacctcagcaacttccagcgcagccgcctcaacaatatcaggcttccaattaccccgcacagacttacaccgcccaaacatctcagcccactaattacacagtggccccagctagccagccagggatggcccctagtcagccaggcgcttatcagcccagacccggatttacctcccttcccggatctaccatgaccccgcctccctcggggcctaatccctacgcaagaaaccgtcctccattcgggcagggatacacccaacccggacccggttataggtag

SEQ ID NO: 245229 - DNA, 729 bp, synthetic construct
  misc_feature 1..729: note = Description of Artificial Sequence: Synthetic coding sequence
  source 1..729: mol_type = other DNA
atgggggaagcctcgcctcccgcacccgctagaaggcacctcctggtcctcttgttgctgctttcgacactggtgattccctctgcagcagcgcctatccacgacgccgacgcgcaggagtcttctctgggcctcaccggactacaaagcttgcttcaaggcttcagtagattattcctgaaggggaatctgttgcgaggaattgattcactcttctccgcaccaatggacttccggggactgcccggaaactaccacaaagaggaaaaccaggagcaccagctgggcaacaataccctatcatcgcatctccagattgataaaatgacagataataaaactggggaggtgctgatttcggagaacgtcgtagcttcaatccagcccgctgaagggagtttcgagggcgacctcaaagtgcccaggatggaggaaaaggaggctctcgtgcccatccaaaaagcaacagatagctttcatactgagctccatcccagagtggctttttggatcattaagctgccgcgacgcaggtctcatcaagacgctctagagggtggtcactggctgtccgaaaagcgacatcggctgcaagctatcagagacgggctccgaaaaggaacacataaagatgtgctggaggagggaaccgagtcgtctagtcattctaggctatcaccgagaaagactcatctgctttatattctcagaccctcacgacaactctag

SEQ ID NO: 245230 - DNA, 1980 bp, synthetic construct
  misc_feature 1..1980: note = Description of Artificial Sequence: Synthetic coding sequence
  source 1..1980: mol_type = other DNA
atgcaaggaagctccctgtggctgagcctaacattccggtctgctcgggtcttgtcacgtgccaggttctttgaatggcagagccccggtctacccaatactgctgctatggagaatgggactgggccttatggcgaggaaaggcctcgtgaggtgcaggaaacgaccgtaaccgagggggctgccaagatagcctttcctagcgccaacgaggtgttctataacccagtacaagagttcaaccgtgaccttacatgtgccgtgattacagagttcgcgagaattcagctgggcgctaagggcattcagatcaaggtccccggagaaaaggatacgcagaaagtggtggtggacctgtccgaacaggaggaagagaaagtggagttaaaggagtcggaaaacctggcatctggggaccaaccccgaacggctgctgtgggtgaaatttgcgaggaaggcctccacgtgctggagggcctcgctgcatctggcctgcgctccatcagatttgcactagaggtgcccggattaaggagcgtcgtggccaatgatgcatctaccagagcagtggacttgatcaggcgcaatgtgcaattaaacgatgtggctcacctggtgcagccaagtcaggctgacgctcggatgttgatgtaccagcatcaacgggtgtctgagaggttcgatgttatcgaccttgatccctacggatcgccagcaacattcctcgatgcagctgtgcaagccgttagtgaggggggtctcctttgcgtgacatgtaccgatatggcagttctggccggtaattccggagagacttgctattcaaaatacggcgctatggctctgaaatctcgtgcgtgccacgagatggccttacgtatcgtattgcatagccttgaccttcgggctaattgctatcagaggttcgtggttcctctgctgtcaataagtgccgatttctatgtacgtgtgtttgtgagagtgtttacaggacaggccaaggtgaaagcctcagcctccaagcaggcgctggtctttcagtgcgtgggctgcggcgcatttcacctgcaacgcctgggaaaggcttccggagtcccatcagggagagccaaattcagcgcagcttgtggaccccctgttacacccgaatgcgagcactgtggccagcggcaccagctggggggtccaatgtgggccgagccgatccatgaccttgattttgtgggaagggtgcttgaggccgtgtctgccaatcccggtagattccacacctctgaaagaatcaggggggtcctgtctgtgattactgaagagctgcctgatgtccctctctactacaccctggaccagctgagcagcacaatccactgtaacacgcctagtctgctgcaattgaggagcgccctgctgcacgctgatttccgggtatctctcagccatgcatgtaagaacgcagtgaagactgatgcacccgcatccgcactatgggatatcatgcgctgctgggagaaggaatgccccgtcaagagggagcgcttaagtgaaacatcacctgcattccggattctgtcggtagaacctcgattgcaagccaactttaccattcgagaagatgccaaccctagttcgcgccagcggggacttaagagatttcaggcaaacccagaggctaattggggccctaggcctcgcgctaggcccggaggtaaggcagcagacgaagctatggaggaaagaaggagacttctgcaaaacaagaggaaggagccaccagaggatgttgcacaacgggctgcgcgtttgaagacattcccatgtaaaaggttcaaggaaggcacatgtcagcgcggagaccagtgctgctattcacactcaccccctactcccagggtttcagctgatgccgcacctgactgtcctgagacttctaatcagacgccacccggtcccggtgctgcagctggtcctgggatcgattag

SEQ ID NO: 245231 - DNA, 1980 bp, synthetic construct
  misc_feature 1..1980: note = Description of Artificial Sequence: Synthetic coding sequence
  source 1..1980: mol_type = other DNA
atgcagggatcaagcttatggttaagcctgacgtttcggtccgctcgagtgctctcaagggctcgcttctttgagtggcagtctcctggactgccaaatactgccgctatggaaaatggtacaggaccttatggggaagagagacccagggaggtgcaggagacaactgttacagaaggggcagccaagatcgctttcccctcggccaatgaggtcttctataatccagttcaggagtttaatagagatctgacatgcgcggtgatcaccgagtttgcacggatacagttgggcgcaaaggggatacagatcaaggtcccaggcgagaaagatacgcagaaagtagtggtcgacttgtctgagcaggaagaggagaaggttgaactcaaggagtcggagaatctggcctcaggtgaccaacccaggaccgctgctgtgggggaaatttgcgaggaaggtttacacgtgctggaggggcttgcagcaagtggactgagaagcatacgttttgctctcgaggtgccaggcctgagatctgttgtggcaaacgatgcaagcacccgcgctgtggacctaattcgccgaaacgtccaactaaatgacgtagcacacctcgtgcagccttctcaggccgacgctcggatgctcatgtatcagcaccaacgggtgagtgagaggtttgacgtgattgacttggatccatatggttcacccgcaacatttctcgacgccgctgtgcaagccgtgtctgaggggggtttgctgtgtgtgacttgtaccgacatggcagtgttggccggaaactcaggggagacatgttacagcaagtatggcgctatggcactaaagtcacgggcttgtcacgagatggcactgagaatagtattgcattcgcttgatctgcgggctaattgttatcaaagattcgtggtaccgttactgtccatctcagccgacttctacgtgcgggtgtttgtgcgagtctttaccgggcaggccaaggtgaaagcatcagcgtcaaaacaagcactggtgttccagtgcgtgggatgtggcgctttccacttgcaacggctgggcaaagcgtcaggggtcccctcaggcagagcaaaattttcagctgcctgcggacctcccgtcacccctgagtgtgaacactgtggacagcgacaccagctagggggacctatgtgggcagaaccgattcatgacctggacttcgttggccgagttctggaggccgtcagcgctaatcccggtagattccacacgtctgagcggatccgcggtgtgctgtctgtaataactgaggagttgcctgatgtcccactttactatacattggaccagctctcaagtaccatccattgtaatacacctagcttgcttcaactccgcagtgctctgctccatgccgattttagagtgtccctaagtcatgcatgtaagaacgcagtcaagactgatgcgcctgcaagtgctctctgggacattatgaggtgttgggaaaaggagtgcccagtgaagcgcgaacgcttatccgaaacgagtccagcattcagaatactctcggttgagcccagactccaggcaaacttcaccatccgggaggatgctaacccctcttcaaggcaacgcggacttaagcggtttcaggcaaacccagaagctaactgggggccaaggcccagagccaggcccggaggtaaggccgctgacgaagcaatggaagagagacgtagactgctccaaaacaaaagaaaggaaccaccagaggatgtggctcagcgcgctgcccgactgaagactttcccctgcaagagatttaaagagggcacctgccagaggggcgatcagtgttgctacagccatagtccgccaaccccaagagtatctgcagacgccgcacctgattgtcccgagacttctaatcaaacgccacctggcccaggagccgcagccggacctggcatcgattag

SEQ ID NO: 245232 - DNA, 1878 bp, synthetic construct
  misc_feature 1..1878: note = Description of Artificial Sequence: Synthetic coding sequence
  source 1..1878: mol_type = other DNA
atgagtgaaaacttggacaacgaggggcctaagcccatggagagctgtggccaggagtcctcttccgccctctcctgtcctacagtctccgtgcctcctgcagcccctgcggcactggaagaagtcgagaaagaaggggcaggcgcagctacaggacccggtccccaacctgggctttactcttatattagagatgatctgttcacctccgagatctttaaattggagctgcaaaacgttcccaggcacgctagcttctctgacgtgagaaggtttctgggccgttttgggctgcagccccataagaccaagttgtttggccagccaccgtgtgcattcgtcaccttccgcagtgccgcagagagggacaaagcacttcgggtgttacatggagcgctgtggaaaggacgcccactgagcgtcaggttggctagaccaaaggcagaccccatggctcggaggcgcaggcaggaaggtgagtcagagccccctgtaacccgtgtggcagatgtagtgacgccactgtggaccgtaccatacgcggagcagctcgagcggaagcagctcgagtgtgaacaggtgttacaaaaactcgctaaggagatcggctccactaacagggccctgctgccctggctgctggagcagcggcacaagcataataaagcgtgttgccctttggagggcgtacgacctagcccacagcagactgaatatcggaacaaatgcgaattcctggtgggcgtgggcgtcgatggagaagacaataccgtgggctgccgcctggggaaatataaaggcggaacctgtgccgtcgccgctccctttgataccgtgcacatcccggaggcgactaaacaggtcgtgaaagcctttcaagaatttatacggtctaccccctactcagcatacgatcccgagacctacaccggtcactggaagcagctaacagtcagaacttctcggagacaccaggctatggcaattgcatatttccatccacagaaactgtcacccgaagagcttgccgagctcaagacttccctagcccagcatttcactgccggtccaggccgagcatctggcgttacttgcttatatttcgtggaagaaggccaaaggaagactccgtcgcaggagggattaccccttgagcacgtggccggtgacagatgcatccatgaggatctcctgggccttactttccgcattagcccacatgccttcttccaagtcaatacacccgctgccgaagtcctctatacagtcatccaggactgggcgcagctagacgctggctccatggtactggacgtatgctgtggaacaggaactattggactcgctctcgcaaggaaggtaaagagagtcattggcgttgaattgtgccctgaggctgtagaggacgcccgagttaacgctcaggacaatgaactgtcaaatgttgagttccactgtggaagagctgaagacctggtcccaacgctggtgagccgcctggcctctcagcatcttgtggctattttggacccacctcgggcaggacttcatagtaaagtaatcctggctattaggcgagcaaaaaacctgcggagactcctctatgttagttgcaatccccgtgcggctatgggaaatttcgtggacctctgtcgggcacctagcaacagagttaagggtatccctttccgacccgttaaggcggtggctgtggaccttttcccccagacccctcactgtgagatgttgattctttttgaaagggtggagcacccgaacggaacaggcgtgctagggcctcactcaccgccagctcagcctaccccgggacctcctgacaatactctccaggaaaccgggacctttccatcatcatag

SEQ ID NO: 245233 - DNA, 1878 bp, synthetic construct
  misc_feature 1..1878: note = Description of Artificial Sequence: Synthetic coding sequence
  source 1..1878: mol_type = other DNA
atgtccgagaacttagataacgaaggacctaagccgatggaatcctgcgggcaggagtccagctcagctctcagctgtcctaccgtgagtgtcccaccggctgcgcctgccgcactggaggaggtggaaaaagagggggctggggctgccaccggacccggaccgcagccagggctgtacagctacattcgtgacgatctgttcacaagtgagattttcaagttagaactccaaaacgtgcctaggcatgcttctttcagcgatgtacgcagattcctcggcagattcggtctccaacctcacaagacaaagctattcggccaacctccctgtgctttcgtcacatttagatcagccgctgaacgagacaaggcactccgtgtcttacatggggcactctggaaagggcgacccttgagtgtgcggcttgcacgtcccaaagccgaccccatggcacgtcgaagacggcaggaaggagagtcagagcccccagtgacgagagtggcggatgtggtcacacccctgtggacagtgccttacgccgagcagcttgagaggaaacagttggagtgcgaacaggtgctacagaaactggccaaggaaatcggctctactaatagagccctcctgccctggttactggagcagcgccataaacataacaaagcttgttgccctcttgagggagttaggccctccccccagcaaactgagtaccgcaataagtgcgaattcctggtgggggttggcgtggacggagaagacaacactgtgggttgcaggctgggtaagtataaggggggaacatgcgctgtagctgcaccattcgatacagtccacattccggaagctacaaaacaagtggttaaggcttttcaggaatttattcggtctactccatacagcgcctacgaccccgagacatatactggccattggaagcagctgactgttcggacaagcagacggcatcaggccatggctatagcctattttcacccccagaagctgtctccagaggaactagcagagctcaaaacctccctggcgcagcattttactgcgggtcccggtcgagctagcggtgtaacctgcttgtactttgtggaagagggccagcgtaaaactccatctcaagaaggtctgcctcttgaacacgtggccggagatagatgcatccatgaagacttgctggggctgacatttcggatttccccccatgcatttttccaggtgaatacccccgcagctgaagttctgtacaccgttatacaagattgggctcaattagacgcgggttccatggtgcttgatgtctgttgcgggacaggcacaattggcctcgcactggcaagaaaggtgaaacgcgtcataggggttgagttgtgccctgaggctgtcgaagacgccagggtaaacgcccaagacaacgagctgtctaatgtcgagtttcactgcgggagggctgaagacctggtgcccacgctggtgtcccggctcgcctcgcagcacctggtggccatcctggacccaccccgtgccggtttacactcaaaagtgatcctggccatccgcagggcaaagaatctgaggcgcctgctttacgtttcctgtaacccacgggctgcaatggggaattttgtcgatttgtgtcgcgctccttctaaccgagttaaaggtatcccgttcagaccagttaaggccgttgctgtggaccttttccctcagactccacactgtgagatgttaattctttttgaacgcgtggagcatccgaacggcacgggtgttctagggccacactccccccctgctcagccgactcccggaccccctgacaatacattgcaagagaccggcaccttccccagctcttag

SEQ ID NO: 245234 - DNA, 1689 bp, synthetic construct
  misc_feature 1..1689: note = Description of Artificial Sequence: Synthetic coding sequence
  source 1..1689: mol_type = other DNA
atgtcagagaacttggataatgaggggcctaagccgatggagagctgcggtcaggaatcgtcaagtgccctatcgtgccctactgtaagtgtgccacccgcagccccagcggctctggaagaggtggaaaaggaaggggcaggagccgcaactggcccaggcccacaacctggtttatactcatacatacgcgacgaccttttcacttctgagattttcaaattggagttacagaatgtgccacgacacgcttcattcagcgacgtgcgacggttcctgggcaggtttgggttgcaaccacacaaaactaaactgttcggtcagcctccgtgtgcattcgtgactttccgctctgccgcagaacgggacaaggcactgcgagttttgcatggcgctttgtggaagggaagacccctgtcagtgaggttggctagacctaaggcggaccctatggcaaggcgtcggagacaggaaggtgagtctgaaccccctgttacaagagtggcagacgtggttacaccgctgtggacagtcccgtatgccgaacaactcgagagaaaacagcttgagtgtgagcaagtgttacagaaacttgccaaggaaatcggctccaccaatcgggctctgctgccgtggctcctggagcagcgacacaaacataacaaggcatgttgtccacttgagggcgtccggccttctcctcagcaaactgagtatcgcaataagtgtgaatttctagtgggcgtcggggttgacggcgaagacaacactgttggctgtagactcggcaagtataagggcggtacttgcgctgtcgctgcaccttttgatactgttcatatcccagaagctacaaaacaagtcgttaaggccttccaggaattcatccgcagtaccccttactccgcttatgaccctgaaacatacaccgggcattggaagcagctgacagttcgcacatcacgacgccaccaggcaatggctatcgcatactttcaccctcagaagctttcccccgaggagcttgctgaactgaagacttcccttgcccagcactttaccgcaggaccaggcagagcgagtggcgtgacctgcctgtatttcgtggaagagggtcagaggaagaccccctctcaggaggggctgcctctggaacatgtagcaggggacaggtgtattcacgaagatctactcggcctgaccttccgcatctcaccacatgccttcttccaggttaacactccagcggcagaggtactgtacactgtgatccaggactgggctcagcttgatgcaggttctatggtactcgacgtgtgctgcggcacgggaaccatcgggctggcgctagctaggaaggttaaacgcgtcatcggtgtggaactttgccccgaggcagtggaagatgcaagggttaacgcccaggataacgagctgtctaatgttgaattccactgcgggagggccgaagacctcgtcccaacactggtgtctcgattagcatcccaacacctggtggcaatcctagaccccccaagagccggtttgcactcaaaggtcattctggccatccgcagagccaaaaacctgcgcagacttctgtacgtcagctgcaatccacgcgctgcaatggggaactttgtcgacgccccactgttccctccacagcctttgcagtcccccatctag

SEQ ID NO: 245235 - DNA, 1530 bp, synthetic construct
  misc_feature 1..1530: note = Description of Artificial Sequence: Synthetic coding sequence
  source 1..1530: mol_type = other DNA
atggtgttgtggatattatggcgccctttcggcttctctggtcgattcctgaaactagagagccactccataacagagtccaagagcctgattccggttgcctggaccagcctcacacagatgttgttggaggcgccaggcatatttctcttgggccagcgaaagcgcttttccaccatgcctgaaaccgaaactcacgaacgcgagaccgaactgttcagccccccaagcgatgtccgcggaatgaccaaactggaccgtaccgcatttaaaaaaaccgtgaacatcccggtgctgaaagtgcggaaagaaatagtcagcaaactgatgagaagcctcaagcgggctgccctacagcgcccagggattcgacgagtcatagaggatcccgaggacaaggagagcagactgatcatgcttgatccgtacaaaatcttcacccacgattcattcgagaaggcagaacttagtgtgctcgagcagcttaacgtcagtcctcagataagcaaatataacctggagcttacatacgaacacttcaagtcagaagaaatcttgcgggcagtgcttccagaggggcaggatgtgactagcggcttctcacggatcgggcacatcgcccacctcaacctgcgcgaccaccagctttctttcaaacatctgattggccaggtgatgatagacaaaaacccaggaattacgtcagccgttaacaaaatcaacaacatcgacaatatgtacaggaacttccagatggaggttctttcgggtgaacagaacatgatgacaaaagtacgcgaaaacaattatacttatgaattcgacttcagcaaggtctactggaatccacgcctgagcaccgagcattccaggattactgaactactgaaaccgggtgatgtcctgttcgacgtatttgcaggcgttggacccttcgcaatccccgtggcgaaaaagaactgtacagtcttcgccaatgatctgaaccccgaatctcacaaatggctcctttacaactgcaagctgaacaaggtcgaccagaaggtcaaagtgttcaatctggatgggaaggacttcctgcagggcccagtcaaggaggaactgatgcagctgttgggcctgtctaaagagaggaagccctctgtacacgtggtgatgaatctgcccgcaaaagccattgaatttttgagtgcctttaaatggctactcgatgggcaaccctgcagcagcgagttcctgcctatcgtgcactgctactcattctccaaagacgccaatcctgctgaggatgtgagacagcgagcgggagccgtgctcggcatctcactggaggcctgcagtagcgttcacttggtcagaaatgtggctcccaacaaggagatgttatgcatcacttttcagataccagcctcagtgttgtacaagaaccagactcggaatccagagaatcatgaagatccaccgctgaagcgacagaggacagcggaggcgttttcagatgagaagacccagatcgtttctaacacttag

SEQ ID NO: 245236 - DNA, 1266 bp, synthetic construct
  misc_feature 1..1266: note = Description of Artificial Sequence: Synthetic coding sequence
  source 1..1266: mol_type = other DNA
atgcaagccctgcgccatgtggtctgtgctttaagcggtggagtcgatagcgcagttgccgcactgctgttacggaggagggggtatcaggtcactggcgtgttcatgaaaaattgggactcactagacgagcacggtgtgtgtaccgcagacaaggattgtgaagacgcctatcgcgtctgccagatactggacattccctttcaccaagtctcatatgtgaaggaatattggaacgacgtgttcagtgatttcctgaacgaatacgaaaagggaagaactccgaaccctgacatcgtgtgtaataagcacattaagttttcttgttttttccattatgccgtggataacttgggcgctgacgcaattgccactggacactatgccaggactagtctggaggatgaggaagtatttgagcagaaacacgttaagaagcccgagggcctatttagaaatcgcttcgaagtgcgaaacgctgttaaactattgcaagccgctgactcttttaaagaccagaccttttttctgtcacaggtcagccaggatgccctgaggagaacaatcttcccgctcgggggactgacaaaggagtttgtcaagaaaatagcagcagagaaccgccttcaccatgtgctccagaaaaaagaaagtatgggcatgtgcttcataggaaagcggaatttcgagcattttctcttacaatacctgcagcccagacctgggcattttatcagtatagaggacaacaaggttttgggaacccacaagggctggtttctttatactctcgggcaacgagcaaatattgggggattgagggagccctggtatgttgtagaaaaagattccgtcaaaggtgatgtctttgttgcgcctcgtactgatcatccagccttgtatcgcgatctgctgaggacaagtcgggtgcactggatagccgaggagccaccagccgctctggtccgagataaaatgatggagtgtcacttccggtttcggcatcaaatggctctggtgccatgtgtgctgaccctaaatcaggatgggaccgtgtgggtgacggccgtgcaagcagtgcgggctctggcaaccggccagttcgcggtgttctataaaggggacgagtgtctgggtagcggaaagatcttgcgattgggcccttctgcatacacactgcagaagggccagcggagagcaggcatggcaacagaaagtcccagcgatagtcccgaggacggtcctggcctgagtccacttctgtag

SEQ ID NO: 245237 - DNA, 300 bp, synthetic construct
  misc_feature 1..300: note = Description of Artificial Sequence: Synthetic coding sequence
  source 1..300: mol_type = other DNA
atgcaggccctccgccacgtggtttgtgcactgtccgggggagtagactctgccgttgccgctcttcttctgcggaggcggggataccaggtgactggtgtatttatgaagaactgggactcactcgatgagcacggcgtatgcaccgcggataaagattgtgaggacgcttaccgggtttgtcagatcttggacattccctttcaccaggtgtcttacgtgaaggagtactggaacgatgtatttaggggccgttgccattgccaccgaagcctctgtaaaaatttcccgggtcgctag

SEQ ID NO: 245238 - DNA, 396 bp, synthetic construct
  misc_feature 1..396: note = Description of Artificial Sequence: Synthetic coding sequence
  source 1..396: mol_type = other DNA
atgaagaattgggattccctggacgagcacggcgtctgcacagcagacaaggactgcgaggacgcctaccgcgtctgtcagattttggacatcccattccatcaagtgtcatacgtaaaagaatattggaatgatgtgttctccgactttttaaatgaatatgaaaaaggtagaacccccaatcctgacattgtatgtaacaaacatataaagttcagctgctttttccattacgctgtagacaatctgggcgctgacgctatcgctactggtcattatgctcggacatcactggaagacgaggaagtctttgagcaaaagcatgtaaaaaagcctgagggcctattcagaaatcgcttcgaagtccgcaatgcacggttccctagaatgccttag

SEQ ID NO: 245239 - DNA, 300 bp, synthetic construct
  misc_feature 1..300: note = Description of Artificial Sequence: Synthetic coding sequence
  source 1..300: mol_type = other DNA
atgcaggccctgaggcacgtagtctgcgccctaagtggcggagtggattctgctgtagcagcattactgctcaggcggcgtggatatcaggtgactggagtgtttatgaaaaactgggattcgctggacgagcatggagtgtgcacagccgacaaagactgtgaagacgcttaccgcgtttgccagatattggacatcccattccaccaagtaagttacgttaaggagtattggaatgatgttttcagaggaaggtgtcattgtcacaggagcctctgcaaaaactttccaggacgctag

SEQ ID NO: 245240 - DNA, 300 bp, synthetic construct
  misc_feature 1..300: note = Description of Artificial Sequence: Synthetic coding sequence
  source 1..300: mol_type = other DNA
atgcaggccctcagacacgtcgtctgtgctctgagcggcggtgttgactctgccgttgctgccctcctgttgcggcgtcggggatatcaggtaacgggagtcttcatgaagaactgggactcactggatgagcacggggtttgcacggctgacaaagattgcgaagatgcttatcgcgtgtgtcagatcttggacattcctttccatcaggtctcatatgtgaaggagtactggaatgacgtcttcagaggcaggtgccactgccatcggagcttatgcaaaaacttccctgggaggtag

SEQ ID NO: 245241 - DNA, 300 bp, synthetic construct
  misc_feature 1..300: note = Description of Artificial Sequence: Synthetic coding sequence
  source 1..300: mol_type = other DNA
atgcaggctctaagacacgttgtctgtgcgttatctgggggtgtagactctgctgtcgccgcactgctgttgagaaggagggggtaccaggtgaccggcgtgtttatgaaaaactgggacagcctggatgaacacggggtgtgcaccgctgataaggactgcgaggacgcctatcgggtgtgccaaattctcgatatccctttccatcaagtcagttatgtgaaagagtattggaacgacgtgttcaggggccgatgtcactgccacaggtcactgtgtaagaactttcctggccgttag

SEQ ID NO: 245242 - DNA, 501 bp, synthetic construct
  misc_feature 1..501: note = Description of Artificial Sequence: Synthetic coding sequence
  source 1..501: mol_type = other DNA
atgcaagcattgaggcatgtggtatgtgctctttctgggggagtagatagtgctgtagccgctttgctgttgcggagacgcggataccaggttacaggcgtgttcatgaagaattgggatagtttggatgaacacggagtttgtaccgccgataaggattgcgaagatgcgtacagggtgtgccagattctggacattccattccatcaggtgagttacgtgaaggaatactggaatgatgttttctccgactttttgaacgagtatgaaaaagggagaaccccaaaccctgatatcgtttgcaacaagcacattaagttcagttgtttcttccattacgccgttgacaatctaggagctgacgcaatcgccaccgggcattatgctaggaccagcctcgaagacgaggaggtcttcgagcagaaacacgtgaaaaaacccgagggactgttccgcaatcgctttgaggttcgtaatgcccgattccccaggatgccttag

SEQ ID NO: 245243 - DNA, 1038 bp, synthetic construct
  misc_feature 1..1038: note = Description of Artificial Sequence: Synthetic coding sequence
  source 1..1038: mol_type = other DNA
atggagcccctgcgtgtgctggagttgtactcgggagtcggcggaatgcaccacgctttgcgagagtcttgcatcccggctcaagttgtagctgcgatagatgttaacaccgtcgctaacgaggtctataagtacaacttccctcatacccagctgctggcaaaaactatcgaggggatcaccttggaagagtttgaccgattgtcctttgacatgattctaatgagtccaccttgtcagccgtttacaagggacttgctgatacagaccatcgagaattgtggattccagtaccaggagttcctcctgagccccacctcccttggcatcccgaattcgcggttgaggtacttccttattgcgaagctccaatctgagccactgcccttccaagctcccggacaggtgttgatggagtttcctaaaatcgaaagcgttcaccctcaaaagtatgctatggatgttgagaataagatacaggaaaaaaatgttgaacctaacatcagctttgacggtagcattcagtgctccgggaaggatgctattttgttcaagttggagacggccgaggagatacaccgcaaaaaccagcaagattcagacctttcggtgaagatgttgaaagattttctcgaagatgacaccgatgtgaatcagtatctactgccccctaagagcctgcttagatatgcccttttgttggatattgtgcagccaacatgccgcagaagcgtttgcttcacgaagggctatgggagctatattgagggaacaggtagtgtactccagactgcagaggatgtacaggtcgagaacatttacaagtccctgaccaatctgagtcaggaggaacagattacgaaactgctaatcctcaaactccggtattttaccccaaaggagatcgccaacttactgggctttccacccgagtttggtttccccgagaagattactgtgaaacagaggtaccggctcctggggaatagtttaaatgtgcacgtggtagccaagctcataaagattttgtacgagtag

SEQ ID NO: 245244 - DNA, 216 bp, synthetic construct
  misc_feature 1..216: note = Description of Artificial Sequence: Synthetic coding sequence
  source 1..216: mol_type = other DNA
atggagccactcagagtgctggagctgtatagcggggttggagggatgcaccatgccctgagggaatcttgtatcccggcacaagttgtagccgcaatagacgtcaacacagttgctaatgaggtgtataagtataattttccacatacccagctcctggctaaaaccatagaaattacgaaaatcaccaaggtatattcttttggaaagtgctag

SEQ ID NO: 245245 - DNA, 354 bp, synthetic construct
  misc_feature 1..354: note = Description of Artificial Sequence: Synthetic coding sequence
  source 1..354: mol_type = other DNA
atggagccgttgagagttcttgaactgtactccggggtggggggaatgcaccacgccctgcgagagagttgtatacctgcccaggtggtggcggctatcgacgtcaataccgtggcaaatgaagtctataaatacaatttcccccatacccagttgcttgccaagaccattgaaaggcccctcgataccaataacagaaaactatggctcagcgtgccaagggtcagcatcatatctaatctctcttggcattccaagttcaaagcaaccattttttcttattgtaaggcctccgtcagggccattactctctcctcaccctggtccggcactgatggggtaccccagaactag

SEQ ID NO: 245246 - DNA, 1176 bp, synthetic construct
  misc_feature 1..1176: note = Description of Artificial Sequence: Synthetic coding sequence
  source 1..1176: mol_type = other DNA
atggagccgcttagggttctggaattatattcgggtgtgggcggaatgcatcacgccctccgggagtcctgtatcccagcgcaagtcgttgccgcaattgatgtaaacacagtagcaaacgaagtatataaatacaacttcccccacactcagttactcgcgaaaactatcgagggcattacattagaggagttcgaccgtcttagcttcgacatgattctgatgtcacctccgtgtcagccttttacccgcataggtagacagggagatatgaccgacagccgaaccaatagttttctgcatattctggacatcctgcctagactgcaaaagttgcccaaatatatccttctcgagaacgtgaagggatttgaggtatcaagtacgcgtgatctgcttatacagaccatagagaactgcggattccaatatcaagagtttcttctatcacctactagtctgggcatcccaaactccagattgcgctacttcctaattgcaaaactccaatctgagcccctgcccttccaggccccagggcaggtgctcatggagtttcccaagatcgagtctgtccaccctcagaagtacgccatggacgtagagaacaagattcaggaaaaaaatgtggaacctaatatcagcttcgatgggagcattcagtgctcagggaaggacgcgatcctgttcaagcttgagacagccgaggaaattcatcgcaaaaatcagcaagactctgatctcagcgtgaaaatgttgaaggactttttagaggacgacacagatgtaaaccagtatctgctgcctcccaaatctttgctgagatacgccctcctgctggatattgttcagcccacttgccgaagatcggtctgttttactaagggatacggcagttacatagaggggacagggagcgtgctgcaaaccgccgaagatgttcaggttgagaacatctataagtcactgacaaacttgtcgcaggaagaacagattactaagctgctgattctgaaactacggtactttactcccaaggaaatcgccaatctgctgggttttcctccagagttcggatttcctgagaaaatcactgttaagcaacgataccgtctacttggtaactccttgaatgtgcacgtggtcgccaaattgatcaaaatcctgtacgaatag

SEQ ID NO: 245247 - DNA, 1104 bp, synthetic construct
  misc_feature 1..1104: note = Description of Artificial Sequence: Synthetic coding sequence
  source 1..1104: mol_type = other DNA
atggagccgctgagggttctggaactgtatagtggcgtcggtggcatgcatcatgctttgagagaatcttgtatcccggctcaggttgtggccgcaatcgacgtcaacactgtcgcaaacgaggtgtacaagtataacttcccacatacgcagttgcttgccaagacaattgagggaattacattggaggaattcgaccggcttagcttcgacatgatattaatgagccccccatgtcagccattcacgcggttgcaaaaattgcccaaatacatactactggaaaatgtgaagggattcgaggtgagcagtacgcgggacttacttatccagactatcgagaactgcggttttcagtaccaagaatttctgctctcccctacctcactcgggatcccaaactctcgcctgcgctatttccttattgcaaaattgcagtccgagcccctcccattccaggcccctggacaggtgttaatggagtttcccaaaattgaatctgttcacccccagaaatatgctatggatgtggagaacaagatccaggagaagaacgtcgagccaaatatcagttttgacggctcaattcaatgcagtggaaaagacgcaattttgttcaaactggaaacagcagaagagatccaccgtaaaaaccagcaggatagcgatctgtcagttaagatgttaaaggacttcctggaggatgataccgatgttaaccagtacttattgccacccaagtccctcctcagatatgctttgctattggatatagtccagcccacctgccgacgaagcgtctgcttcacaaaggggtatggtagttacatcgaaggcaccggatcagtattacagactgcagaagacgttcaggtcgaaaatatatataaatcacttacaaacttgtcccaagaggagcagattacaaagcttttaatccttaaactgcgctacttcacgcccaaagaaatagctaacctgctggggtttcctcctgaatttggtttcccagaaaaaatcacagttaagcagcgttaccgtctcctgggcaatagcctgaatgtgcacgttgttgcaaaattaatcaaaatcctgtatgaatag

SEQ ID NO: 245248 - DNA, 933 bp, synthetic construct
  misc_feature 1..933: note = Description of Artificial Sequence: Synthetic coding sequence
  source 1..933: mol_type = other DNA
atgtctactttgtccctcatgaaatacactagtatcatattcctcacccacagttacctccctagacgattgaagattggtcgtcagggtgatatgaccgacagccgaacgaacagttttctgcatatacttgacattctccccagggatctgctcatccagaccatcgaaaactgtgggtttcagtaccaagagttcctactaagccctacttctctggggattcctaactctagacttcgatacttcctcattgcaaaactgcaatccgaacccttgccttttcaagcaccagggcaagtactcatggagttccctaagatagagagtgtccatccccagaaatacgccatggacgtggaaaataaaatccaagagaagaatgtggaaccaaacatttcattcgacgggagtatccagtgtagcggaaaggacgctatccttttcaagcttgagaccgcagaagagatccatcgcaagaatcagcaagacagtgatctctccgtgaagatgcttaaggattttctcgaagacgataccgatgtgaaccagtatttgctgcccccaaagtcactgctgaggtatgcactgcttttagatattgtgcagccgacttgccggaggtcagtttgttttactaaaggatatggaagctacatagagggcaccggaagcgtgctgcaaactgcagaggacgtgcaggtggagaatatatacaaatctctcacgaatttgtcccaggaggaacagattactaaattgttaatcctgaagttgaggtatttcacaccaaaagagattgctaatcttctgggattcccacctgagtttggtttcccagaaaaaatcaccgtcaagcaacgatacagactgcttgggaacagtctgaatgtgcatgtcgtggcaaaactgatcaaaattctatatgaatag

SEQ ID NO: 245249 - DNA, 1305 bp, synthetic construct
  misc_feature 1..1305: note = Description of Artificial Sequence: Synthetic coding sequence
  source 1..1305: mol_type = other DNA
atgctgagatgcctttatcactggcaccgccctgtcttaaatcggagatggagccgtttatgtcttccaaagcagtatttattcacaatgaaattacaatctcccgaattccagtccctgttcactgaggggttgaagagtctcaccgaattgtttgtgaaggaaaaccatgaactgcgcatagcagggggtgctgtccgggatctgcttaatggggtgaagccacaggatatcgactttgctaccactgcaacccctacccagatgaaggaaatgttccagagcgctggcatacgcatgatcaacaaccgcggtgaaaagcatggcacaatcacggctcgccttcacgaggaaaattttgaaattactacactgagaatcgatgtgacaactgacgggaggcacgcggaagtggagtttactacagattggcaaaaagacgctgagagacgggacttaacaatcaacagcatgtttttgggctttgatggcacgctctttgactattttaacggatatgaggatctgaaaaataaaaaagttagattcgttggtcacgcaaagcagagaatccaagaagattacctgcgcatcctgcggtacttccggttttacggaagaattgttgataaacccggagaccacgacccagagacactggaggcaatcgccgaaaatgccaaaggtctggccggtatatcgggcgaaaggatctgggtggaacttaaaaaaattcttgtgggcaatcacgttaatcacctgattcacctgatttatgatctcgacgtggccccatacattggcctgcctgccaacgccagtcttgaggagtttgacaaagtttccaagaatgtggacggtttctctcctaagcctgttacccttctcgcttcactctttaaagtccaggacgacgttaccaaactcgatctgcggctcaagatagctaaagaagaaaaaaacctgggcttgttcatcgttaagaatcgcaaggacctgatcaaagcaactgacagcagcgacccactgaaaccgtaccaggactttatcatcgactctcgggagcccgacgcgaccacccgcgtatgcgagctactgaagtaccagggcgagcattgcctgctaaaggagatgcagcagtggtccattccaccttttccagtgagcggccacgacattcggaaggttggcatctccagcgggaaagagatcggagccctattgcagcaattacgggaacagtggaaaaaatcgggatatcaaatggagaaagacgagctgttgtcttatatcaagaaaacctag

SEQ ID NO: 245250 - DNA, 1245 bp, synthetic construct
  misc_feature 1..1245: note = Description of Artificial Sequence: Synthetic coding sequence
  source 1..1245: mol_type = other DNA
atgctcaggtgtctttatcactggcacagaccggtgcttaatcgcagatggtcaaggctgtgcctaccaaaacagtacctgtttactatgaagttgcagtctcctgagtttcaatcacttttcaccgaaggactgaaaagtctgaccgaactattcgtaaaggaaaatcatgagctgagaattgcaggcggagccgtgcgagatttgctgaacggtgtcaaaccgcaggacattgacttcgcaacaacagccacccccacccaaatgaaagagatgtttcagtctgctggcatacggatgattaataatcgcggagagaagcatgggacaatcacagcccgtctccatgaggaaaacttcgagattactacactcaggatagatgtcactactgacggcagacatgctgaggtggaatttactaccgattggcaaaaggatgccgagcgacgagatctcacaattaactcaatgttcctgggatttgacgggaccctgttcgattatttcaatgggtacgaagacctcaaaaacaagaaggtgaggtttgtgggccacgctaaacagcgcatccaagaggattacctgcgcattctgcgatacttcaggttctacggccgaatcgtcgacaaaccaggagatcacgatcctgaaacacttgaagctatagccgagaacgctaaaggtttggctggcataagcggtgagcgtatttgggtggaacttaagaaaattctggtgggtcttccagcaaacgcatccttggaagaatttgacaaagtttcaaagaatgtcgatggattcagcccaaagcccgtcactctgttggccagtctgttcaaggtacaggacgatgttactaagcttgacttgcgacttaagattgcgaaagaggaaaaaaatctggggcttttcatcgtgaaaaaccggaaggatttaattaaagccaccgattcctccgaccctttaaagccctaccaagatttcatcatcgatagccgggagcccgacgctacgacccgagtgtgtgaactgctcaaatatcaaggggagcactgcctcctgaaggagatgcagcaatggtccataccccctttccctgtgagcggacacgacatacgtaaggtgggcatttccagcggtaaggagatcggcgcactgttacagcaactgagagagcagtggaaaaagagcggatatcagatggagaaggacgagctattgtcatatatcaagaaaacatag

SEQ ID NO: 245251 - DNA, 174 bp, synthetic construct
  misc_feature 1..174: note = Description of Artificial Sequence: Synthetic coding sequence
  source 1..174: mol_type = other DNA
atgctgcggtgtctttaccactggcaccgtcccgtgctgaacaggaggtggtcgcggctgtgcctgcctaagcagtatctatttaccatgaaactgcaatctcccgagtttcagagcctttttacagagggactgaagagtctgactggcataaatgcatttcatgagaactag

SEQ ID NO: 245252 - DNA, 174 bp, synthetic construct
  misc_feature 1..174: note = Description of Artificial Sequence: Synthetic coding sequence
  source 1..174: mol_type = other DNA
atgctgaggtgtctgtaccattggcatcgcccagtattaaatcgcagatggtcccgtctttgtttgcctaaacagtacctgtttactatgaagctgcagtcccctgagttccagtcactttttacagaaggactgaaatctctcactggaatcaacgctttccatgagaattag

SEQ ID NO: 245253 - DNA, 189 bp, synthetic construct
  misc_feature 1..189: note = Description of Artificial Sequence: Synthetic coding sequence
  source 1..189: mol_type = other DNA
atgctgcgttgcctgtaccattggcaccggcctgtcctgaacagacgttggtctcgtctgtgcctgcccaagcagtacctgttcaccatgaaactgcagagtcctgaattccagagcctgttcacagaaggcctgaagtcacttacggagctgttcgtgaaagagaatcacgaacttcgcattgcctag

SEQ ID NO: 245254 - DNA, 174 bp, synthetic construct
  misc_feature 1..174: note = Description of Artificial Sequence: Synthetic coding sequence
  source 1..174: mol_type = other DNA
atgctcagatgcctgtatcattggcaccgtccggtgcttaatagacggtggtcccgcctgtgtttaccaaagcaatacctgttcaccatgaagctccaatcccccgagttccagagcctctttaccgagggcctcaagagtttgacaggcatcaacgcctttcacgagaactag

SEQ ID NO: 245255 - DNA, 1305 bp, synthetic construct
  misc_feature 1..1305: note = Description of Artificial Sequence: Synthetic coding sequence
  source 1..1305: mol_type = other DNA
atgctccgctgcctctatcattggcatcgacctgtattaaataggagatggagcaggttgtgcctgcccaagcaatacctctttaccatgaaactgcagagccccgaatttcagagtctgttcacagaggggctgaaatctcttacagagttgtttgtgaaagagaatcacgagctgcgtatagcgggaggtgcagtccgagacttgttaaatggagtgaagcctcaagatatcgacttcgccacaacggccacccctacccagatgaaagaaatgttccaatctgccggaataaggatgataaataatagaggtgagaagcatggcactattactgcacggctgcatgaggagaatttcgagatcactaccctcaggattgacgtgaccaccgacggtcgtcacgcagaagttgagttcacgacagattggcagaaggacgctgagaggcgagatttaaccattaattccatgttccttggcttcgatggaaccttgtttgactatttcaatggatacgaggacctgaagaacaaaaaggtacgattcgtgggccacgccaaacagcggatccaggaagactaccttagaatacttcgatacttccgcttctacggcagaattgtggataagccaggggatcatgatcccgagaccctggaagcaatagccgagaacgctaaagggctcgccggaatcagtggggaacggatttgggtagagctcaaaaaaatccttgtgggcaaccacgtgaaccacctgatccatctgatctatgaccttgacgtggcaccatacatcgggctgccagctaacgcaagccttgaggagtttgacaaagtctctaagaacgtggacgggttttcgccaaagcctgtgacgctcctcgcttcactctttaaggtgcaagacgacgtgaccaagctggacctccggctaaagatcgccaaagaggagaaaaacctaggactgtttatcgtgaagaacaggaaggacctcatcaaggccacagactcgtcagaccccctaaaaccttaccaggattttattatcgatagtcgagagcctgatgctacaacccgggtttgtgaactcctgaagtaccaaggggagcactgtctactcaaggagatgcaacagtggagtatccctccgtttcctgtgtccggacatgatatccggaaggttggtattagtagcggtaaggaaattggggctctgctgcagcagctgcgcgaacagtggaaaaaatcaggttaccagatggaaaaggatgagcttctatcctatattaaaaagacgtag

SEQ ID NO: 245256 - DNA, 762 bp, synthetic construct
  misc_feature 1..762: note = Description of Artificial Sequence: Synthetic coding sequence
  source 1..762: mol_type = other DNA
atgaatttctcaggcggaggtcgccaggaagccgcaggtagccggggacgtagggctccccgacctagggagcaggaccgcgacgtgcagttaagtaaggcactgagttatgctctgcggcacggtgccctgaagctcggcttacccatgggcgcagatgggttcgtgccgctggggaccttgctgcaattgccccaattccgcggatttagcgctgaggacgtgcagagggttgtggatacaaaccggaagcagcggtttgctctccagctgggagatcctagcaccggactgctcatccgcgctaaccagggtcacagtctgcaggtgccaaaactcgagctcatgcccctcgagacaccgcaggccttgccaccaatgctggtccacggtactttctggaagcactggccttccatcctgctgaaaggcctgtcttgtcaggggaggacccatatacatctagcaccgggactgcccggtgatcctggcattatctccggcatgcgatcccattgtgagattgctgtgttcatcgacggccctctggccctggccgatggcatcccatttttcagatctgctaatggagtgatcctcactcctggcaatacagatgggttcctgctgccaaagtattttaaggaggctttacagctgcgaccaacccggaaacccctttctttagccggtgatgaggagaccgaatgccaatccagcccaaaacactccagccgggaacgaagacgtatccaacagtag

SEQ ID NO: 245257 - DNA, 768 bp, synthetic construct
  misc_feature 1..768: note = Description of Artificial Sequence: Synthetic coding sequence
  source 1..768: mol_type = other DNA
atgaacttcagtggcggtgggagacaggaggcagctggaagccggggaagacgggctcccaggcccagggagcaagatagagatgtgcagctgtccaaggcactgtcatacgcgctacggcatggagcattaaagttagggctccccatgggcgcagatgggtttgtgccccttgggaccctattacagctgccccagtttcggggttttagtgcggaggacgttcagagggtcgttgataccaaccgtaagcaacgcttcgccctgcagctgggcgacccaagtacaggactgctcattcgcgcaaaccagggacactcactgcaggtcggggtgcccaagctggagttgatgcctctggagacaccccaagccttgccccctatgctggtacatggtacattctggaagcactggccaagcatcttgttgaaggggttgtcctgtcagggacgcacccatatccaccttgcccctggacttccgggagatcctgggattatttccggcatgagaagccactgcgagattgccgtcttcatcgacggtccactcgcactggctgatgggattccattcttcagaagtgcaaatggtgtgatcctcacccctggcaacaccgatggattcctgctccctaagtacttcaaggaggcactgcagctgagacctactcgtaagcctctgagtttggctggtgacgaggagacagagtgccaatcatccccaaagcactcctcacgggaacgccgtcggatccaacagtag

SEQ ID NO: 245258 - DNA, 615 bp, synthetic construct
  misc_feature 1..615: note = Description of Artificial Sequence: Synthetic coding sequence
  source 1..615: mol_type = other DNA
atgggagcagatggttttgtgccactggggactctgctgcaactgccccagttcaggggattcagcgcggaagatgtgcaacgcgtagtggataccaatcgaaagcagcgattcgcacttcaactgggggaccccagtacgggcctcctcatcagggcaaaccagggtcattccctgcaggttcccaagctagagctaatgccactggagacgccacaggccctgcctcccatgttggttcacggtacattctggaagcattggcccagtattctgctgaaagggctgtcctgtcagggtcggactcatatccatctggcacccggactgcccggagacccagggatcatcagcggtatgcgctctcactgtgaaatcgcagtatttattgacggaccactggcacttgctgacgggatccctttctttcgctccgccaacggggtgatcctgacccccggtaatacagacggtttcttgctgcccaagtacttcaaagaggcattgcagctgcggcctactagaaagccattaagcttagccggagatgaggagaccgaatgtcaaagttcccccaagcattcatccagggagcgacgtaggatccagcaatag

SEQ ID NO: 245259 - DNA, 651 bp, synthetic construct
  misc_feature 1..651: note = Description of Artificial Sequence: Synthetic coding sequence
  source 1..651: mol_type = other DNA
atgaacttctctggagggggacgccaagaggcggcaggaagcaggggacgccgagctccacgccctagagagcaggaccgtgacgtgcagctgagcaaggccctgagttatgcccttcgccacggcgcattaaaacttggccttccgatgggggcagatggattcgtgccactgggcaccctgctccagctgcctcagtttagggggttttctgcagaagacgtgcagcgcgttgtcgacacaaatcggaagcagagattcgcactccagcttggtgatccatctaccggtctgcttatcagggccaaccagggccatagtctgcaagtgcccaaactcgaactgatgccccttgagacccctcaggccctgccaccaatgcttgtacacggcacgttctggaaacattggccaagcatcttattaaaaggtctctcttgtcaggggagaacacatatccacttagctcctgggctcccaggggaccctggaattatttccgggatgaggtctcattgtgagattgctgtgttcatcgacggaccactagccctggctggcaaaccactgagcctagccggtgatgaggaaactgaatgtcagtctagtcccaagcactcgtccagagagcgacgacgcatacagcagtag

SEQ ID NO: 245260 - DNA, 504 bp, synthetic construct
  misc_feature 1..504: note = Description of Artificial Sequence: Synthetic coding sequence
  source 1..504: mol_type = other DNA
atgggcgcagacgggttcgtgccactggggacactgctgcagctgcctcagtttcgtgggttttcagccgaggatgtacagagggttgtcgatactaacagaaagcagaggttcgccttgcaacttggcgacccctccactggactcctaattcgagctaaccagggacactccctccaagttccaaagctagaactaatgcccctggaaaccccacaagcacttccaccaatgttagtacacgggacattctggaagcattggccttctattttactcaaaggtctgtcatgccagggacgcacccacatccatctagcgcctggcctgccaggagaccctggaattatctctggcatgagatcccattgcgagatagcagtgtttatagacggcccactggccctggcagggaagcctctttctctggccggagacgaggagaccgagtgccagagttcccccaaacattccagtcgggaacgcaggagaatccagcagtag

SEQ ID NO: 245261 - DNA, 516 bp, synthetic construct
  misc_feature 1..516: note = Description of Artificial Sequence: Synthetic coding sequence
  source 1..516: mol_type = other DNA
atggaagagcgcggagactccgaacctacacccggttgttctgggctgggcccaggaggggtgagagggttcggggacggaggaggcgcaccatcctgggctcccgaagatgcatggatggggacacacccaaaatatttggaaatgatggagctagacattggggatgctactcaggtgtatgtggcatttttagtctacctggacttgatggagtccaaatcctggcatgaagttaactgtgtgggtcttccagaactccagctgatctgcctagttggcactgagatcgaaggagaagggctccagacagtcgtgccgacgcccatcacagcatccctttcacataatagaattcgcgagattctgaaggcttcccggaaactgcagggggatcccgacttgcctatgagtttcacccttgccatcgtggagagtgactccacaatagtgtactacaagctcactgatgggtttatgctacctgatccccagaacatctcactccgcagatag

SEQ ID NO: 245262 - DNA, 390 bp, synthetic construct
  misc_feature 1..390: note = Description of Artificial Sequence: Synthetic coding sequence
  source 1..390: mol_type = other DNA
atggaggagagaggagattcagagccaacacctggctgctcaggtctgggtcccggaggggtccgaggcttcggcgacggaggcggtgcacccagttgggcccctgaggacgcctggatgggtactcatccgaagtatcttgaaatgatggagctcgacataggcgacgctacgcaagtttacgtcgccttcctggtgtacctagatctcatggaaagcaagagctggcacgaggtcaactgcgtggggctgcctgaactgcagctcatttgtctggtcggcaccgaaatcgagggcgagggcctgcagacagtagtcccaactccgattacggctagtttgagccacaacaggatcttcctgctcgaagatgacatacatgtctcttag

SEQ ID NO: 245263 - DNA, 1398 bp, synthetic construct
  misc_feature 1..1398: note = Description of Artificial Sequence: Synthetic coding sequence
  source 1..1398: mol_type = other DNA
atggctgaagccgtgttccatgcgccaaaacgtaaaagaagagtgtacgagacgtatgaatcccccctccctatcccatttggtcaggatcacggacccttgaaggaattcaagatctttagggcagagatgatcaacaataatgtcattgtgcggaatgcagaggacatcgaacagctgtatggcaaaggatacttcggaaaaggaattttgagcagaagccgcccatcatttacaatcagtgatcccaagttggtggccaaatggaaagacatgaaaacaaatatgccgattatcactagtaagcgataccaacacagtgtggaatgggcagctgaactcatgcgcaggcaaggccaggacgagtcaacggtccgacggattctaaaagattatactaagccattagaacatcctccggtgaagcgcaatgaggaagctcaggttcacgataaacttaatagcggtatggtgagtaatatggagggcacagctggtggggaacgtccttcggtagtgaacggtgatagtggaaagagtggtggtgttggcgaccctagagaacctttgggctgccttcaggagggctctggctgccaccccactacggaaagttttgaaaagtcagtcagggaagatgcgtcacctttaccacatgtatgttgttgtaaacaggatgctttgatcctgcaacggggattgcaccatgaggacgggtctcaacatattgggctcctccaccccggagatcggggtccagatcacgagtatgtgctcgtcgaggaagccgagtgtgctatgagtgagagggaagcagcaccaaatgaagagctggtacagagaaatcggttgatctgtcgtaggaacccatatcgcatttttgagtatctccaactgtcactggaagaggccttctttctggtatacgctttaggctgcctctctatatactatgagaaagagcccctgaccattgtgaagttgtggaaagcctttacggtggtccagcctacattccgaacaacctatatggcatatcattattttagatcaaaaggatgggtccccaaggtagggctcaagtacggtaccgaccttctgctgtaccggaaaggtccacccttctaccacgcgagctacagcgttatcatagagcttgtagatgatcacttcgagggttcccttaggcgtcccctcagctggaagtcactcgccgcactgtcccgtgtgtcagttaatgtaagtaaggaacttatgctgtgctatttaatcaaaccctccacaatgacagataaggaaatggagagccccgaatgtatgaaaagaatcaaggttcaggaggttattctctcccgctgggtgtcttcccgggaaaggtccgaccaggatgacctgtag

SEQ ID NO: 245264 - DNA, 1320 bp, synthetic construct
  misc_feature 1..1320: note = Description of Artificial Sequence: Synthetic coding sequence
  source 1..1320: mol_type = other DNA
atggctgaagcggttttccacgcccctaaacgaaaacgcagggtgtacgagacatatgagtctcctctcccaattcctttcggtcaagaccacggcccacttaaagagtttaagatctttagagctgagatgattaataataatgttattgtcagaaacgccgaagacattgagcaattatatggcaaaggatactttggaaaaggcattctatcacgcagccgaccttctttcaccatctccgatcctaagctggttgcaaagtggaaggacatgaagactaacatgccaataattaccagcaagcggtaccagcatagcgtggaatgggccgctgaactgatgcggcgacaagggcaggacgaaagcacggttcggcgaatcctgaaagattataccaaaccactcgagcacccgccagtgaaacgaaacgaggaagcacaggtgcatgacaaattaaactcaggcatggtgtcaaatatggagggaaccgctggcggagaacgtccatctgtcgtgaacggtgactcaggcaaaagcggcggagtaggggaccccagggagcccttaggctgtttgcaagaaggctcgggatgtcaccctacgaccgagtctttcgaaaaatctgtgagggaagatgccagccctctaccccacgtttgttgctgcaagcaggacgccctcattctccagcgagggctccaccacgaagacggctcccagcacatcgggctcctgcacccaggagatcgtggccctgatcacgagtatgtattggtggaggaagctgaatgcgccatgtcggagagagaggctgcacctaatgaggaggcattttttctagtctatgccctggggtgcctgtccatctactacgaaaaagagcccctaactattgttaaactgtggaaagcttttaccgtcgtccagcctactttccgcacaacctatatggcgtatcactactttagatctaagggttgggtcccaaaggtgggtctcaaatacggcaccgatctattgttgtatcggaagggtccaccattctatcacgccagctacagtgttattatcgagctggtggacgaccattttgagggctccctccgcagacccctgagttggaagtccttagccgctctgtctcgcgtgtcagtgaatgtctctaaggagctcatgctctgctatttaatcaagcctagcactatgactgacaaagaaatggaatctccagagtgtatgaaaaggatcaaggtccaggaggtaatactaagtcggtgggtaagctccagggagcggtccgatcaggatgacctgtag

SEQ ID NO: 245265 - DNA, 1347 bp, synthetic construct
  misc_feature 1..1347: note = Description of Artificial Sequence: Synthetic coding sequence
  source 1..1347: mol_type = other DNA
atggcagaggcagtatttcatgcacccaagcgcaagaggcgcgtttatgagacatacgagagtcctttaccgattccctttggccaggaccacggccctcttaaggaattcaaaatcttcagggctgagatgataaacaataatgtgatagtgcgaaatgccgaagatattgagcagctgtatggcaagggttatttcgggaagggaattttgtcacgcagtagacccagttttactattagcgatccaaaactcgtagccaaatggaaagacatgaaaaccaatatgcctatcattacatctaagaggtatcagcattctgtggaatgggcggctgaactgatgcgtcggcagggccaggacgaatccacagtgcggaggattctgaaagactatactaaacctctcgagcatccgcctgtgaaacgtaatgaagaagcccaggtacacgacaaactgaattcggggatggtgagcaacatggagggcaccgcaggcggagaaaggcccagtgtggtgaacggtgatagtggaaagtcaggtggcgtcggtgatcctagagaacctctcggctgtctgcaggagggatccggctgtcatcccacaaccgaaagttttgaaaagtctgtgcgcgaagatgcgagtccactgccgcatgtgtgttgctgtaagcaagacgctctgatcctgcaaagaggactgcaccatgaagacggcagccagcatatcggattattacaccctggcgacaggggcccagatcatgaatatgtcctggtggaagaagctgagtgcgctatgtcagagagagaagctgcccctaacgaggaactagtgcagcgcaatcgcctcatttgtcgacgcaatccttataggatttttgaataccttcagctttccttggaggaggagcccctgactatagtgaaattatggaaagctttcactgttgtacagccaaccttccggacaacgtacatggcatatcactactttcgcagcaagggatgggttcccaaagtgggacttaagtatggtactgacttgttgctttacagaaaagggcctccattctatcacgcaagttacagcgtgatcatagaattagtggatgatcatttcgaaggatcgctgaggcgacccctgtcttggaagtctctcgctgcgctgtcacgggtatccgttaatgtcagtaaggaactgatgctgtgttacttaatcaagccctccacaatgaccgacaaagaaatggaaagccctgagtgtatgaagagaatcaaagtccaagaggtaatactttccaggtgggtgtcctctcgggagcggagtgatcaagacgacctctag

SEQ ID NO: 245266 - DNA, 1398 bp, synthetic construct
  misc_feature 1..1398: note = Description of Artificial Sequence: Synthetic coding sequence
  source 1..1398: mol_type = other DNA
atggccgaagccgttttccatgcgccaaagcggaagcgacgcgtttatgagacatacgagtccccccttccaataccgtttgggcaggaccatgggccactcaaagagtttaaaatcttccgagcagagatgattaataacaatgtcattgtccgtaatgcagaggatattgagcaattatatggaaaaggctacttcggtaagggaatcctatccaggtcccgcccaagttttaccatcagcgaccctaaacttgttgccaaatggaaggatatgaaaaccaacatgccaattattacctccaagcggtatcagcactcagtggaatgggctgccgagctcatgcggagacagggacaggatgagtcaacagtccggaggatactgaaagactataccaaaccactcgaacatccacctgtcaaacggaatgaggaggctcaggtgcacgacaaattgaactctgggatggtttccaatatggagggtactgctggaggggaaagaccctcagttgtgaatggtgacagcggcaaatcaggtggggtgggagaccccagggagccactaggatgcctgcaggaaggcagcggctgtcaccctaccacagagtcctttgagaagagtgtgcgcgaggatgccagccccttgccccacgtgtgttgctgcaaacaggacgccctcattctccaacggggactgcaccacgaggacgggagccagcatattgggcttctgcaccccggtgatagaggacctgaccacgaatacgtgttggtggaagaagccgagtgtgcgatgagcgaacgagaggcagcccctaacgaggaacttgtccagagaaatcggctcatatgccggaggaacccttaccggatcttcgagtatctccagctgagcttagaagaggcgtttttcctggtttacgccctgggttgcctatcaatttactacgaaaaggaaccgctgacaatcgtgaaactctggaaggcatttaccgtggtccagccaacattcagaacgacttatatggcctatcattatttccgcagcaagggttgggtgcctaaagtgggccttaagtatggcacagacctgctgttatatcgaaaaggccctcctttctatcacgcgagttacagtgtgattatcgagctggtggacgaccacttcgagggctcccttcgacgccctttgagttggaagtccctggccgctttgtcgcgcgttagcgtgaacgtgagcaaagagctgatgctgtgttatctgataaagcccagtacaatgaccgataaggagatggagtccccagagtgcatgaagcgaataaaggtccaggaggtgatcctgtccagatgggtcagctcaagagagcggtcagaccaggacgatttatag

SEQ ID NO: 245267 - DNA, 1320 bp, synthetic construct
  misc_feature 1..1320: note = Description of Artificial Sequence: Synthetic coding sequence
  source 1..1320: mol_type = other DNA
atggcagaagccgtgtttcacgctcctaaacggaaaaggagagtgtacgaaacctacgaatcacccctgcccatcccttttggccaggaccacgggcctctcaaggaattcaagatattcagagccgaaatgattaacaataatgttatagttagaaacgccgaagatatcgagcagctgtacggtaaagggtacttcggaaagggaatcctttcgaggtctagaccctccttcaccataagtgacccaaagctcgtggcaaaatggaaagacatgaaaacaaatatgccaataattacttcaaagagataccaacattccgtggagtgggcggcagagctgatgagacgccagggccaagacgagagtacagtcaggcgcatcctgaaagactatacaaagcctctggaacaccctcctgtgaagcgaaatgaggaggcgcaagttcatgacaagctcaattcaggcatggtctctaatatggagggcacagcagggggagaaaggccgtcagtggttaacggggatagcggaaagagcggcggagtgggagatccacgcgagccgctcgggtgccttcaggaaggaagcgggtgtcatcccaccaccgaatcatttgaaaaaagcgtgcgtgaagatgcatcccccctgcctcacgtctgctgctgcaagcaggatgctctgatcctgcagagagggcttcatcacgaggatggatctcaacatatcggactgttacatccgggagaccggggtccggatcatgaatatgtgttggtcgaagaggcggagtgcgccatgagcgagagagaggcagcccctaacgaagaagccttcttcctggtgtatgccctagggtgtttgagcatctactacgagaaagagccactcaccattgtcaagctctggaaggccttcactgtcgtgcagcctacgttcaggacaacttacatggcttatcactacttccgtagcaaaggatgggtgcccaaagtcggactgaaatatgggacagacctgctgctctatagaaagggacccccattttatcacgctagctattctgttatcatagagcttgttgatgaccacttcgaaggctctttacgccgtcccctgagctggaagagcctggctgctctgtctcgtgtctctgtgaatgtaagcaaggagctgatgttgtgttatctgataaagcccagcaccatgaccgacaaggaaatggaaagccctgaatgcatgaagcgtatcaaggtgcaagaggtaattctctccagatgggtgagctctagagagcggtcagatcaagatgatctctag

SEQ ID NO: 245268 - DNA, 1209 bp, synthetic construct
  misc_feature 1..1209: note = Description of Artificial Sequence: Synthetic coding sequence
  source 1..1209: mol_type = other DNA
atggccgaggcggtctttcacgctcccaagcgaaagcgccgagtgtacgaaacgtacgagtcacccctccccattcccttcggccaggaccacgggccactcaaagagttcaaaattttccgcgcagagatgatcaacaacaacgtcatagttagaaacgcggaggacatcgagcagttgtacgggaaaggctatttcggcaaagggatcctgtcccgttcacgcccttccttcactatttctgacccaaagctggtcgcaaaatggaaagacatgaagactaacatgcctattatcacatccaagcggtaccagcatagcgtcgaatgggccgctgaactaatgaggagacagggacaggacgaatccaccgtgcggagaatcctgaaagattacacgaagccactcgagcacccaccggtgaagcgaaacgaggaggcccaggtgcacgacaagctcaattcaggtatggtctcaaatatggaagggacggccggtggtgaaaggccctccgttgtaaatggcgattccggaaagtccggaggcgtgggcgacccaagagagcctctgggttgcttgcaagaagggtcaggctgccacccaactaccgaatccttcgagaagtccgtcagagaagatgcttcacccctgcctcacgtttgttgttgcaaacaggatgccctgatccttcagagggggctgcaccatgaggatggatcgcagcacattggcctgctccatccaggcgaccggggacccgaccacgaatatgtcttggtggaagaggcagagtgcgctatgtccgagcgagaggctgcacctaatgaggaagctttcttcctggtgtacgcacttgggtgtttgagtatctactacgagaaggaaccactgaccatcgtgaagttatggaaggcctttacagttgtacaacctaccttcagaaccacatatatggcttaccattacttccggtccaaaggctgggtcccaaaggtcggcctcaaatatggtacagatctgctcctgtacagaaaaggtccccctttctaccacgcgagttacagcgtgattatcgagctagtggatgatcacttcgagggatccctccggaggccactctcgtggaagtcactcgcagccctctctcgcgtttctgtgaatgtgtctaaagttacccaacatcagctctgccactggtcagtcacctag

SEQ ID NO: 245269 - DNA, 1137 bp, synthetic construct
  misc_feature 1..1137: note = Description of Artificial Sequence: Synthetic coding sequence
  source 1..1137: mol_type = other DNA
atggccgaggctgttttccacgcccctaagagaaagcgcagagtgtacgagacctatgaaagccccctgccaatcccattcgggcaagatcatgggcctctgaaggaattcaagattttccgcgcagagatgatcaacaataacgtaattgtcagaaacgcagaggatattgagcagctgtatggcaagggatacttcggaaaggggatcctcagtcgctccagaccaagtttcacaatctccgatccaaagttggtggcaaaatggaaggacatgaagacgaacatgcccatcattacatcgaaaaggtaccagcactcagtggagtgggccgcagagttgatgaggcggcagggccaggacgaaagtacggttcgacggattttaaaggattacacaaagcccctcgagcaccccccagtaaagcgaaacgaagaagctcaggtgcacgataagctcaactctggaatggtctccaatatggagggaacagctggtggcgaacggccttccgtggtgaacggagacagcggcaagtcaggaggtgttggagatccgagggaacctctggggtgccttcaggagggtagcggctgtcaccccaccaccgagtccttcgaaaagtccgtgcgcgaggacgcctcacctctcccccatgtgtgttgttgcaagcaggacgcgctcatacttcagcgaggtcttcatcatgaagacgggagccaacatattggcctactgcaccctggggatcgcggaccagaccacgaatatgtgctcgtggaagaggccgagtgtgctatgtccgagcgagaggccgctccgaacgaggagctggttcagagaaatcgacttatttgtcggaggaatccttaccgaatcttcgagtacttacaacttagcctggaggaggcgttcttcctcgtatacgctctaggttgtctgtcgatttattatgagaaggagcccctgacaattgtaaagctgtggaaagccttcacggtcgtgcagcctacgtttaggaccacatacatggcctaccactactttcgaagtaagggctgggttcccaaagtgggccttaagtatggcacggatctgctgctgtatagaaagggacctcccttctatcacgcgtag

SEQ ID NO: 245270 - DNA, 1317 bp, synthetic construct
  misc_feature 1..1317: note = Description of Artificial Sequence: Synthetic coding sequence
  source 1..1317: mol_type = other DNA
atggccgaggcagtgttccatgctcccaaacggaagcgccgagtttatgagacctacgagtcccctcttccgatccccttcggccaggatcatggccctctgaaggagttcaagatattccgggctgagatgatcaacaacaacgttattgtccgcaacgctgaggatattgaacaactttacgggaaagacatgaagacaaatatgcctattattacctcgaagcgctaccagcattccgttgagtgggccgcagagctcatgaggcgtcaaggtcaggacgaatcaaccgtgagacgaatactcaaggattatacaaagccactagaacaccctcctgtaaagaggaatgaagaggcccaagtgcacgacaagctcaatagtggaatggtgagcaatatggaaggcaccgctggcggtgaacggcctagtgttgttaacggagactctggcaagtctggtggtgtaggagacccaagggagcctctcggctgcctccaggaaggatctggatgtcacccaactactgagagcttcgagaaatcggtacgagaagacgcttctcctcttccgcacgtatgctgttgtaaacaggatgctctgatcctgcagcgcggtcttcaccacgaagatggaagtcagcatatcgggctgttacaccctggcgatagagggcctgaccacgaatacgtcctcgtcgaggaggccgagtgtgcaatgtcagagagagaagccgctccaaatgaagaacttgtgcagcgaaaccggttgatatgccggcgaaatccttatcggattttcgagtacctgcagctatcgctcgaggaagcctttttcctcgtttacgcattgggctgtttaagcatttattatgaaaaagagccactcaccatagttaagctgtggaaggcttttactgtagttcagccaacatttcgaactacgtacatggcataccattacttccggagcaagggctgggttcctaaagtgggcctgaaatacggcaccgatctgctgctctataggaagggccctccgttctaccacgccagctactctgtaataatcgaactggtcgacgatcatttcgagggctcgcttagacgtcccctgagctggaagtcactcgcagcattaagccgcgtgtcagttaacgtctccaaagaactcatgctttgctacttgattaagcccagtacaatgacggataaggagatggagtcccctgaatgcatgaaacggattaaagtccaagaggtgattctctcccgctgggtttcatcaagggagcgatcggaccaggacgatttgtag

SEQ ID NO: 245271 - DNA, 1221 bp, synthetic construct
  misc_feature 1..1221: note = Description of Artificial Sequence: Synthetic coding sequence
  source 1..1221: mol_type = other DNA
atggcagaggcggtgttccacgcacccaagagaaagcgacgggtttacgaaacgtacgagtcccccttacctataccttttggacaggaccatggccctttgaaagagttcaagatcttccgggcagaaatgatcaataacaacgtaatagttaggaacgctgaggatatcgagcagctttatgggaaaggctacttcgggaaagggattttgtcacggtctcgcccaagttttacgatctctgacccaaagctggtcgccaaatggaaggacatgaagacgaatatgccaattataacaagcaagagataccagcatagtgtcgaatgggctgctgagcttatgagaaggcagggacaggatgaaagtacagtgcgccgtattctgaaggactacactaagccactggagcatcctcccgtcaagcggaacgaggaagctcaggtgcatgacaagctgaattccggaatggtaagtaacatggaaggaaccgccggaggagagaggccaagcgtgcgaggtctgcatcacgaggacgggagccagcacattggtttactgcaccctggagaccgagggccagaccatgaatacgtgctggtggaggaggccgagtgcgcgatgagcgaacgtgaggctgcgcctaacgaggaacttgtgcagcggaatcggctaatatgccgcaggaatccttaccgaatctttgaatacctgcaactgtcactggaagaggccttctttctggtgtacgcccttggttgtcttagcatatattacgagaaagagccccttactatcgttaaactttggaaggcctttactgtcgtccagcccactttcagaacaacttatatggcataccactactttcggagcaagggatgggttcccaaggtgggtctgaagtatgggactgatctcctgttgtataggaaaggccctccattctatcacgccagctattccgtcattattgagctggtggatgaccatttcgaggggtcgctacgccgtccactgtcctggaagagcctagcagcactgtccagggtgtcagtgaatgtgtccaaggagctaatgctatgttatttgatcaagccttctactatgacagacaaggaaatggagtcacctgaatgcatgaaacgaatcaaggtacaagaggtcatcttatctaggtgggtgtcttctagagaacgttctgatcaagacgatctttag

SEQ ID NO: 245272 - DNA, 933 bp, synthetic construct
  misc_feature 1..933: note = Description of Artificial Sequence: Synthetic coding sequence
  source 1..933: mol_type = other DNA
atgctcgtcgttgaagttgctaatgggcgttccctggtgtggggggctgaggccgtgcaagccctgagagaacgcctgggggtgggcggtcgcacagtcggtgcattaccacgcggacctagacagaatagcagactgggattgccactgttacttatgccagaggaggctcgcctattggcggagataggcgctgtcaccttagtgtcagcccctcgccctgattccaggcatcactcattggcgctgacctctttcaagcgccagcaagaagagtcgttccaggaacagagtgcacttgctgcggaggcacgggagaccagaaggcaagagctgttggaaaagattactgagggccaagccgctaaaaaacagaagctagaacaggcctcaggtgccagctcctcgcaagaggccggttcttcacaagcagcgaaagaggacgagacctcagacggacaggcttctggggaacaggaggaggccggaccatcctcttcacaggcagggcctagcaatggtgtggccccactccccagatctgcactgctcgtccagctggcaacggcgaggccacggcctgtcaaagcaaggcccctggactggagagtccaaagcaaagattggccccacgctggaagaccagcgcacgagcttaggtacagcatctatcgcgacctgtgggagcgcggattttttctgtctgcagcaggaaaatttggcggagacttcctcgtgtaccctggagaccccctcagattccacgctcactatatcgcccagtgctgggcacccgaggataccatccctcttcaggacctcgtggccgctgggcgactcgggaccagcgttcggaaaaccttgctgctgtgttccccccaacccgacggaaaggttgtgtatacatcgctgcagtgggctagtttgcagtag

SEQ ID NO: 245273 - DNA, 933 bp, synthetic construct
  misc_feature 1..933: note = Description of Artificial Sequence: Synthetic coding sequence
  source 1..933: mol_type = other DNA
atgctcgtcgttgaggtcgccaacggcaggtccttggtttggggcgcagaagcagtccaagcacttcgtgaacggctgggcgtgggcggtcgcacagtcggcgctcttccccgaggaccaagacagaactcccgcctcgggctcccactgctcctcatgcctgaggaggctcggcttcttgccgaaattggagcagttacacttgtttccgcaccaagacctgattcccgccaccactccctggccctgacctcgtttaaaagacagcaagaggagagtttccaagagcagtccgccctggctgccgaagcacgggaaacccggcgtcaagagctactggagaaaattactgagggacaagcagcgaaaaagcagaagttagagcaggcctcaggcgcatcgagctcccaagaagcaggttctagccaggccgcaaaggaagacgaaacctctgatggccaggccagcggggagcaggaagaggctggccctagcagctcacaggcagggccttctaacggagtcgcccctttgcctcggtctgccttgctggtccagctcgctacggccaggcctcgccctgtcaaggcacgtccactggactggagagttcagtccaaggattggccacacgctggccgtccagcacacgagcttcggtacagcatctaccgagatttgtgggaacgcggattctttctctctgctgcaggtaagttcggaggtgattttctcgtttaccccggagatcctctgaggttccacgcacattacattgcacagtgctgggctcctgaggacacaatacctctccaggatctggtggcagccggacggctgggaaccagtgtcaggaagaccctgctactttgctctccccagcccgatggtaaggtagtgtatacgtccctgcaatgggcctctcttcagtag

SEQ ID NO: 245274 - DNA, 933 bp, synthetic construct
  misc_feature 1..933: note = Description of Artificial Sequence: Synthetic coding sequence
  source 1..933: mol_type = other DNA
atgttggttgttgaggtggccaatgggagaagccttgtctggggggctgaggcggtgcaagcactaagggaacgcttgggcgtggggggacgaacagtcggggctctcccacgtggcccacggcagaattccagattaggactgccattgttgctgatgccggaagaggcccgactgctggctgagatcggcgctgtcacgctggtctcagcccctcgtccggattcaaggcatcactcactcgcactaacctcgtttaaacgtcaacaggaggagtcttttcaggagcagagtgccctggcagcagaagccagggagacgagacgacaagaattactagagaagatcacagaagggcaggctgccaagaagcaaaaactcgagcaggccagcggtgcctcttcaagccaggaagctggatcgtctcaagccgcaaaagaggatgagacgagtgatggacaagccagcggcgagcaggaagaggctgggccaagtagctcccaggctggacccagtaatggtgtagcacctcttccgcgttccgctctgttggttcaactcgccacagctaggcccaggcccgtgaaggctagaccccttgactggcgggtgcagagtaaggattggccgcacgcgggaagacccgctcatgaattacgatatagtatttatcgcgacctttgggagagaggattctttctgagcgctgcaggcaaatttggcggtgatttcctggtctatcctggcgaccctttacgcttccacgcccattacatagcacaatgttgggctcccgaggacacaatcccactccaagacttggtcgccgctgggagactgggcacatcagtgcgaaagacgctactactgtgctcgcctcagccagacggcaaggttgtctatacaagtctacaatgggcctctctccaatag

SEQ ID NO: 245275 - DNA, 939 bp, synthetic construct
  misc_feature 1..939: note = Description of Artificial Sequence: Synthetic coding sequence
  source 1..939: mol_type = other DNA
atgctcgtggtggaggtcgccaatgggcgttccctggtgtggggggctgaggccgtccaagccctgagagagcggctgggcgtcggaggcaggactgttggagcactgcctcggggtccccgtcagaatagccgactgggcctgcctctgttgttgatgcctgaagaggcaagactacttgctgaaattggcgcagttactctagtgtccgctccgaggcctgactctcggcaccatagtctcgcactgaccagcttcaagaggcagcaggaagaaagctttcaggaacagtccgctctggcagcagaggccagagagacgagacggcaggaactcttggaaaagatcacagagggccaggccgctaaaaaacagaaactcgagcaggcgagtggagccagctctagccaggaggcaggaagttctcaggcggctaaagaagacgaaacctccgacggacaggcatcaggcgaacaagaggaggctggacccagtagctcccaggcaggtccatctaatggcgtcgctcctttgccgcgatccgcccttctggtacaactggccaccgcaagacctagacctgtaaaagcgcgacccctggactggagggtgcagagcaaggactggccccacgccggtagaccagcccacgaactgagatactctatttatcgagacctatgggaacgagggttttttctgagcgccgcaggtaaatttggcggtgacttcctcgtgtacccgggagatccgctgagattccatgcacactacatcgcccagtgctgggcaccagaggatactatccctcttcaggatctggtggccgcaggacgtctgggtacctctgtgagaaagacattgctgctatgttctccacaaccagatggatttaagagtcaggaagtgtccataaatctagtgtacaagtgtagttag

SEQ ID NO: 245276 - DNA, 729 bp, synthetic construct
  misc_feature 1..729: note = Description of Artificial Sequence: Synthetic coding sequence
  source 1..729: mol_type = other DNA
atgcttgtggtggaagtggcgaacggaagatcgcttgtatggggtgccgaagcagttcaggctctaagggagcgactcggcgtgggcggtcgcaccgtaggggcactcccaaggggcccaagacaaaattctcggctcggcctcccactgctgctgatgcctgaagaggccagattgctggctgagatcggagctgttacgctggtcagtgcacctcgaccagattcaaggcatcactccttagcactaactagctttaagaggcaacaagaggaatctttccaggaacaatctgctcttgcagccgaggctagggagacacgccgtcaggaactcctggagaagatcacagaaggccaggctgccaagaagcagaaactggagcaggcatccggcgcaagctcgagccaggaagccggtagttcacaggcagccaaagaggatgagactagtgacggacaggccagcggagaacaggaagaggccggaccctcgtcctcccaggccggaccctccaacggcgtcgctccactgcccaggtcagccttgctcgtacaactcgcaaccgctaggcccaggcctgtaaaagccaggcctctggattggcgcgtccaaagtaaagattggcctcacgccggaaggcctgcacatgagctgagatattcaatatatcgggatctctgggagcgagggttctttctttcggccgcaggaaaatttggcggatag

SEQ ID NO: 245277 - DNA, 1581 bp, synthetic construct
  misc_feature 1..1581: note = Description of Artificial Sequence: Synthetic coding sequence
  source 1..1581: mol_type = other DNA
atggaaccggaaccagagcctgcagccgtggaagtgccagccggtagggtcctatcagccagggaactgttcgccgctcgctctaggtcccagaagctgcctcaacgaagccacggtcctaaggacttcttgccagatggctcagccgctcaggccgagaggctgcgacgctgccgagaagagctgtggcagcttttagccgaacaaagagtggagcgcctgggctccctggtcgccgctgagtggcgccctgaggaagggttcgtagaactgaagagcccagccggaaaattttggcagacgatgggtttctctgagcaaggcaggcaacgcctccatcctgaggaggcgttatacttgcttgaatgtggtagcatacacctctttcaccaggacctgcccctatcaatccaggaggcctaccagcttctgttaactgaccataccgtaactttcctgcaataccaagtcttttcacacttgaagaggctgggttatgtagtccggcgttttcagccttccagcgtcctctcaccttatgagagacagctaaacctggacgcgtcagtgcaacacctcgaagacggcgacgggaagaggaaaaggtctagctcctctccgaggtcgattaataagaaagccaaggcgctggataacagtctgcagccaaaatccctggcagctagctcccctcccccatgctcacagccttcacagtgtcccgaggagaagccacaggaaagcagccctatgaagggtccagggggtccctttcagctgctcgggtccctgggtccaagccctggccctgctagggaaggtgtgggatgctcctgggaaagcggtagggcagagaacggagtgactggtgccggaaagcggaggtggaatttcgaacagatatcttttcccaacatggcctctgactcccggcatacccttctcagggcacccgcacccgagctacttccagccaatgtggcaggtcgagagactgacgccgaaagttggtgtcagaagcttaaccagaggaaagagaaacttagccggagggaacgtgaacatcacgctgaagctgctcagtttcaagaggatgtaaatgcggacccagaagtccagagatgttccagctggcgggaatacaaggagctgctacagagaaggcaggtccaacgtagtcagcgccgtgcccctcacctatggggacagcctgttacgcctctcctttctccagggcaggcttccagtcctgcagttgtcctgcagcatatctccgtactgcagaccactcacctccccgatggaggtgccagactgctagagaagtccggtggcctggaaatcatttttgatgtttatcaggcagacgctgtggcaactttcaggaaaaacaacccgggtaagccctacgcaagaatgtgcataagcggttttgacgagcccgttcccgacttgtgcagcctaaagaggctatcttatcaatctggcgacgtacccctgatctttgcactcgtcgaccatggtgatatctccttttatagtttccgggattttactttgccccaggacgtgggccactag

SEQ ID NO: 245278 - DNA, 594 bp, synthetic construct
  misc_feature 1..594: note = Description of Artificial Sequence: Synthetic coding sequence
  source 1..594: mol_type = other DNA
atgggattcagcgaacaaggcaggcagcggctccatcctgaggaggccttgtatcttctggagtgtggaagcatccacctgtttcaccaagacctgcccttgagtattcaggaggcctatcagttactacttaccgatcataccgttacattcctgcaataccaagtgttctcccacttgaagcgactcgggtatgtggttcgccgtttccagcccagctccgtgttgagcccttacgagaggcagcttaacctggatgcctcagtccagcacctggaggatggtgatggcaagagaaagcggagttcatcttccccaagatcaatcaacaagaaagctaaggccttagataacagcctccaacccaaatctctggccgctagctcaccaccctccggaacctcccgctgtcctagaatgtggggcactgatctaactgccttgcagagaatggaactggctcccggtgatagagattgcctcttctctggcactattagcgcagcctcgtgtactcagacactgacttgttcattccgcggacaatctggtccgtggccttgggtgagcgatactcaccgtgtgaagctgtag

SEQ ID NO: 245279 - DNA, 534 bp, synthetic construct
  misc_feature 1..534: note = Description of Artificial Sequence: Synthetic coding sequence
  source 1..534: mol_type = other DNA
atggaacctgaacctgagccggcagctgtggaggtgccagccggtagggtgctgtctgcccgagaactctttgccgcacgaagccggtcccaaaagctgccgcagcgctcccatggacctaaggactttctcccagatggaagcgcggcacaagcagagaggctgcgaaggtgcagagaggagctctggcaactgttggccgagcagagagtcgagaggttgggttctttggtcgccgctgagtggcggccagaggaagggtttgtggagctgaaaagtccagcagggaaattttggcagaccatggggtttagcgaacaggggaggcaaagactgcacccagaggaggccttgtatctcctggagtgcgggagcatccatctctttcaccaagatctgcccctttcaatccaagaggcctatcagctgctgcttaccgaccataccgtcacttttctgcagtaccaaccgccagaggaggtgggcttgtgtggctccactatacccactaagctgtgcccagtaccagtgtag

SEQ ID NO: 245280 - DNA, 4296 bp, synthetic construct
  misc_feature 1..4296: note = Description of Artificial Sequence: Synthetic coding sequence
  source 1..4296: mol_type = other DNA
atggatcgcaggaacgactacggttatagagtgcccctgttccagggtccgctccctcctccgggttccctgggtctcccgtttcctcccgacatccaaacagagaccactgaagaggacagcgtgttgctgatgcacacgttgcttgccgctacaaaggatagcctcgccatggacccccctgtcgtgaaccggcctaaaaagtctaaaacaaagaaagcaccaatcaagaccatcacaaaggctgcccctgccgcacctcccgtacccgctgccaacgagattgccactaataagcctaaaatcacctggcaggccctcaatttacccgtgattacgcagatatctcaagcgctgcccaccaccgaagttacaaatacccaggcatctagcgtgaccgctcaacccaagaaagccaacaaaatgaagcgtgtgactgccaaagccgctcagggtagccagtccccaactgggcacgagggcggaaccattcagctaaaatccccactccaagtactgaagctgcccgtgatttctcagaatattcacgcgccaattgccaacgagagcgcttcctcccaggctctgattacgagtatcaaacccaaaaaggcaagcaaggctaaaaaagctgccaataaagccatcgcctccgcaaccgaggtgagcctcgctgcgactgctacccatacagccacgacccaaggtcagatcaccaacgagactgcctcaattcacaccacggctgcctctattcgtaccaagaaggcttctaaggcacggaagactatcgccaaagtgataaatacagatactgagcacattgaagcactgaatgtaactgacgctgcaacccggcagatcgaagcctccgtagtcgcaatcaggcctaaaaaaagtaaagggaagaaagcagcctcccggggacctaattcggtttctgagatttccgaggctcctttagcgacgcaaattgtcacaaaccaggcgcttgcagctacattaagagtgaagaggggatctagagcgagaaaggccgcaacaaaggcccgtgctactgaaagtcagactcccaacgcggatcagggggctcaggctaagattgccagcgcccaaacgaatgtatccgcccttgagactcaggtcgcggctgcggtgcaagctttggctgatgactatttagcgcagctgagcttggagccaaccacgcggactcgtggtaaaaggaacagaaagtccaaacacctaaatggagatgaacggtcaggcagcaattaccgaagaatcccgtggggaagacgtcccgcacctccacgggatgtggccatccttcaggagagagccaataagctagtgaagtatctactcgtgaaagaccagactaagatacccattaaaagatcagacatgttgagggacgtgattcaagagtatgatgagtacttccccgagatcatcgagagggcgtcttacactctggagaaaatgttcagagtcaacttaaaggaaattgacaaacaatcgtccctgtacatattgatcagcacacaggaatccagtgctggcatattgggaacaactaaggataccccgaaacttgggttactgatggtgatcctgagtgtcatttttatgaacggcaataaggcctccgaggcggtgatttgggaagttctgcggaagctcgggctcagacctggagtgcgtcacagcttgtttggcgaggtccgaaagctgattacggacgaattcgtgaaacaaaagtatttagaatacaaaagagtgcctaacagcagacctcccgaatacgaattcttctggggcctacgtagttatcacgaaaccagcaagatgaaggtgcttaagttcgcctgccgagtgcagaagaaggatcccaaagattgggccgtacaatacagggaagccgtagaaatggaagtgcaagctgcggcagtggccgtggctgaggctgaggcgagggccgaagcgagagcgcagatgggcatcggtgaagaagcggtagctgggccatggaattgggacgacatggacatcgactgtcttacacgagaagagctgggggacgacgcccaggcttggtctcgcttctcatttgaaatcgaggctcgcgcacaggagaatgctgacgcaagcacaaacgtgaatttttctagaggcgctagcacacgcgcaggtttttctgacggtgcaagcatttctttcaacggtgccccttcctccagcggaggtttctccggcggacctggcataaccttcggggttgccccttcaacctctgcctcattcagtaatacagcctctatcagcttcggaggcacgctgtccacctcatcatcgtttagttcagccgcttctatctcatttggttgtgcacattcgacgagcacctccttttcctccgaggcgtcgatttccttcggaggaatgccatgtaccagcgccagtttctctgggggtgtgagtagttccttttccggaccactgagcacttcagctacgttttctggaggtgcatcctccgggtttgggggaacgttgtccaccaccgccggtttctcaggagtgctgagcacatcaacatccttcggttcggcccctaccacaagcacagtgttcagttcggctctgtctacctctaccggattcggaggtatcctgtcaacatctgtgtgtttcgggggtagtccctcttcatccggttccttcgggggaaccctgtccacatcaatctgcttcggagggtcgccttgcacatcaactggcttcggtggaacgctgtccaccagcgtctcattcggtggctcctcgagcacttcagcgaactttggaggaacgctgagtacttctatctgttttgacggaagtcctagtacaggggctgggtttggtggcgctctgaatacaagtgcatcattcggatcagtgttaaacacctccactggatttggaggtgctatgagtactagcgcagatttcggcggtaccctgagcacctctgtctgtttcggaggaagcccaggaacttccgtcagtttcggctccgccctcaatactaatgccggatatgggggtgcagtttccacgaacaccgatttcggcggtaccctgtccaccagcgtatgcttcggtggatctcctagtaccagtgccggttttggaggagcactcaacactaacgcaagctttgggtgcgcagtctccacgagtgcaagcttctccggcgctgtctcaacatccgcgtgtttttccggggcaccaatcacaaatcccggatttgggggtgctttctccacatctgccggattcggaggcgctctctcaacagctgcggattttggcggaaccccttctaatagtataggattcggggcagctccctctacatccgtgtcattcggaggggcacatgggacctcactgtgcttcgggggagctcccagcacatcactttgctttggaagcgccagcaatacgaatctctgctttggcggacccccatctacttccgcatgtttctccggggcaacatcccccagcttctgcgacgggccaagcacctctaccgggttcagctttggtaatggcctgtccaccaacgcaggtttcggaggaggtttgaacacttctgctggattcggaggtggcctcggcacgtcggctggtttctcaggtgggttatccaccagcagcggcttcgatggcggacttggcaccagcgctggctttggtggaggacccggaaccagcacgggcttcggcggaggcctgggcacaagtgctggtttctccggcggtctcgggactagcgcagggttcgggggaggtttagttactagcgacggtttcggcggtggcctgggcactaacgccagtttcggcagcaccttgggaacctccgcgggtttcagcggagggctcagtactagtgatggattcgggtctagacccaacgcctctttcgaccggggactcagtaccatcatcggatttggaagcggttctaacacctccaccgggttcacaggagaaccaagcactagtaccggcttcagctccggaccttcatctattgtaggtttctctggcggacctagcactggtgtcggtttctgttccgggccaagcactagcggttttagtgggggacctagcactggggctggctttgggggaggcccaaatacaggcgcaggatttgggggaggaccatccacaagcgccggtttcggaagcggcgctgcgtcacttggagcgtgtggattctcatacgggtag

SEQ ID NO: 245281 - DNA, 2121 bp, synthetic construct
  misc_feature 1..2121: note = Description of Artificial Sequence: Synthetic coding sequence
  source 1..2121: mol_type = other DNA
atggacagacggaacgattatggctatcgcgtgcccctgttccaagggcctctcccacctccaggcagcctggggctgcccttcccccctgacatccagactgagactaccgaggaagatagcgtgttactgatgcacacgttactagctgctaccaaggacagtctggctatggatcctccggtggtgaataggcccaagaagagcaagacaaagaaggcaccaatcaagacaattactaaagctgcaccagctgcaccgccagtccccgcagcaaatgaaatcgccacgaataagccgaaaattacctggcaagcactgaacctcccagtgatcacccagatctcccaggctctcccaacgacggaagtgactaatacacaggcatcttctgttactgcacagccaaagaaagcaaataaaatgaagagggtgaccgcgaaagctgcgcaaggctcacagtcccccaccgggcatgaaggtggcaccatccagttaaaatccccactccaggtcctgaaactgcccgtaatcagccaaaacatacacgccccaatcgccaacgagtccgctagttcacaggctttgatcacatcaatcaaacccaagaaggcctccaaggccaaaaaggccgctaataaagctatagccagtgccaccgaggtaagcctagctgccacggcaacccatacggcgacaactcagggccagatcaccaacgaaactgcaagcattcataccacagctgctagcattcgcaccaaaaaggcctctaaggccaggaaaactatcgctaaggtcatcaacactgacacagaacatatagaggcacttaacgtgaccgatgctgccacccgccagattgaagcctcggtggtcgctataagaccaaagaagtctaagggtaagaaggcggcatctcggggtcccaatagtgtgtcagaaatcagcgaggccccattagctacacaaattgtcaccaatcaggccctggcggctacactgcgagtgaagcgaggtagtagagcccgtaaggccgcaaccaaggccagagctactgagtcccagactccaaacgcagatcagggcgctcaggccaagatcgcttccgcacagactaatgtaagtgcccttgaaacccaagtcgctgctgccgtgcaggccctagctgatgattatctagctcagctgtcccttgagcctactacacgcacccgcggtaagagaaaccgcaaaagtaaacacttgaatggggatgaaaggtccgggtccaactatcgtcgaatcccatggggaaggcgtccggcacctccgagggatgtggccatcctgcaagaacgagccaacaaactggtgaaatatctactcgtcaaagatcagaccaagatcccaattaaaagaagtgatatgctgagggacgtgattcaggaatatgacgaatattttcctgagattatcgaaagagcatcatatactctcgaaaagatgttccgcgtaaacctgaaggaaatagacaaacagagttcgctttacattctaatctcgacccaggaatcttcagcgggaatcctaggaacaaccaaggacacaccaaaactaggtctgttgatggtgattctatccgtcatcttcatgaatgggaataaggcaagtgaagccgtgatatgggaggttctgcgtaaactgggattaaggcccggagttaggcattccctcttcggcgaagtgaggaagctgattaccgacgagttcgtgaaacagaagtacctggagtataaacgcgtaccaaactccagaccacccgagtatgagtttttttggggcctcagaagttaccatgaaacaagcaagatgaaagtgctgaagtttgcgtgccgagtgcagaagaaggatccgaaggactgggcagtccagtatcgtgaggctgtcgagatggaggtgcaggcagcagcggttgcggtcgccgaagccgaagccagagccgaaatatattcaccttgtctgcaaattccactcattaactgtagttcccccagccacggagcaaaggtccatccttggaacctttgccctcacagtagccaggggagttacggacagtcagccgagggagtcatgtag

SEQ ID NO: 245282 - DNA, 1074 bp, synthetic construct
  misc_feature 1..1074: note = Description of Artificial Sequence: Synthetic coding sequence
  source 1..1074: mol_type = other DNA
atggacaggagaaacgactatggctatagagtccctctcttccagagcaaacacctgaatggcgacgagaggtccgggagtaattatcgacgaatcccatggggaaggcggcctgcccctccgagggacgttgcaatcctgcaagagagggccaacaagctcgtcaagtacctgctggtcaaggaccaaaccaagatacccatcaaaagatccgatatgctgagagatgtgatccaggaatatgacgagtatttccctgaaatcatcgagcgcgcttcgtacacattggagaaaatgttccgcgtcaatctgaaggagatcgacaagcagtcatcactctacattctcatctccacgcaagagagtagtgccggaatcctgggcacaacaaaggacacccccaagctaggcctcctaatggtgattttaagcgtgatcttcatgaatggtaataaagcctctgaagcagtgatctgggaggtcttgagaaagctgggcttgaggcctggagtgaggcactcgctgttcggcgaggttagaaaactcataacggacgagtttgtgaagcagaaatatctcgagtacaaaagggtaccaaacagcaggcctcccgaatacgaattcttttggggcctgcggagttaccatgagacctctaagatgaaggtgcttaaatttgcctgtagggttcaaaaaaaggatcctaaagactgggccgtccagtatagggaagctgtagagatggaggtccagttgcagctgtggctatggcttcggctcaagcccggattatccggctcaaatacctccactgggtttacaggggagccttcaacctcaactggcttcagttctggcccatcatccatcgtggggttttcaggtggcccaagtacaggcgtcgggttctgttccggtccgtccacgtcgggattttctggtggcccatcaacaggcgcagggtttggaggcggacccaataccggtgctggttttggcggtgggccttcaacatccgctgggtttggctcaggtgctgcatctcttggagcttgcggattttcttacggctag

SEQ ID NO: 245283 - DNA, 2121 bp, synthetic construct
  misc_feature 1..2121: note = Description of Artificial Sequence: Synthetic coding sequence
  source 1..2121: mol_type = other DNA
atggacagacggaatgactatggctatcgcgtccctctgttccagggcccattaccgcctcccggttccctcggcctgccctttcctcctgatattcaaacagagactaccgaggaggactccgttctgctgatgcacacactcctggctgcaaccaaagactctctcgccatggatcctcccgtggtcaaccggccaaaaaaatcgaagacgaagaaagctcccataaagactattaccaaggccgcaccagcagctccccctgtgcctgcggctaacgaaattgctactaataagcccaaaatcacctggcaggccttaaatttaccagtcattactcaaatctcccaggcgctgccgaccacagaggttacgaacactcaggcctcatctgtgacagcccagccgaagaaagcaaataagatgaaacgagtcactgccaaggctgcacaggggtcacaatcccctacaggtcacgaaggaggcactatccagctcaagagccccctccaggtcctgaagctgccagtgattagccagaatattcacgcacccatcgcaaacgaatctgctagcagccaggcactcataaccagcatcaaacctaagaaggcttcaaaggccaagaaggccgcaaacaaggccattgcctctgccactgaagtctcattggccgcaacagcaacacacaccgcgaccacacagggtcagataaccaacgagacagcctccattcacactacagcagctagtatccggacaaagaaggccagcaaagcacggaagactattgccaaggtgattaataccgatactgagcacatcgaggccctgaatgtgacggatgccgcaacaaggcaaatagaggcctccgtagtcgccatccgcccaaaaaaatctaagggaaagaaagccgcttcaagggggccaaactcagtgtcagaaatttccgaggcacccctggccacccagattgtcaccaatcaagcactagccgctactttacgagtgaagcgcggtagccgggctcgaaaagcggcaactaaggccagagcaaccgaaagccagactccaaatgccgatcagggggcacaagccaaaattgcctccgcacagactaatgtctccgcactggagacccaagtggcagctgccgtgcaggccctggccgacgattacctggctcagctgtctttggaacctaccacacgcacccggggaaaacgcaacaggaagtctaaacacctgaacggagatgagcgcagcggctctaactacaggcgcattccctgggggaggcggcctgctcccccacgcgacgtggcaatactacaggagagggccaacaagctcgtaaagtacctcctggtgaaggatcaaaccaagatccctattaaacggagcgatatgctccgcgatgtcatacaggaatatgatgaatatttccccgagatcattgagcgagctagttacactttggagaagatgttccgggtcaatctaaaagagattgacaagcagagttctctttacattttgatatccacgcaagagtcatcagccggtattctggggaccaccaaagatacgcccaagctgggcctactgatggttattttatcggtgatctttatgaacggcaacaaggcaagcgaagcagttatttgggaagtgctgcggaagctggggttgcgaccgggagtaaggcactcactctttggggaagtgaggaaattgattaccgacgagttcgtgaaacagaaatacctcgaatataaacgggtgcccaacagccgcccacctgaatatgagttcttttggggattacggtcataccacgagacttcaaaaatgaaggttttgaagttcgcctgcagagtccagaagaaagatcccaaagattgggccgtccagtacagagaagccgtcgaaatggaggtgcaagcagcagccgtcgccgtggctgaagccgaggccagggccgagatatacagcccctgcctccagatacctctcataaactgttctagtccgtcccacggagccaaggtacacccttggaatctgtgtccccacagttcccagggctcgtacggccaatctgccgagggtgtaatgtag

SEQ ID NO: 245284 - DNA, 3105 bp, synthetic construct
  misc_feature 1..3105: note = Description of Artificial Sequence: Synthetic coding sequence
  source 1..3105: mol_type = other DNA
atggaccgtcgtaatgattacggttatcgcgtgccgctgttccaaagcaaacatcttaatggggacgaaaggtctgggtcaaattacagacgaatcccctggggcagacggccagcgcctccacgcgatgtcgcgattctccaggagcgagctaataagctggtcaagtatctgctagtcaaagaccagaccaagatcccaatcaaacgttcggatatgctgagggacgtgattcaagaatatgacgagtactttcccgaaatcattgagagagcctcatatactcttgagaaaatgtttcgagttaatctcaaggaaatagacaagcagagcagtctgtacatactgattagcactcaggaatcatcagcaggcattctggggacaacaaaggatactcccaagctcggtctgttaatggtgattctttctgttatctttatgaacggcaacaaggcctctgaggccgtgatatgggaggttcttcgcaaactgggactcagacccggtgtgagacactcattgttcggcgaggtgcgtaagctaattaccgacgagttcgtcaaacagaagtacctggagtacaagcgagtacctaactcgcgtccgccagaatacgagttcttctggggacttagaagctaccacgaaactagcaagatgaaggtcctgaaattcgcttgtcgagtgcagaagaaagaccccaaagactgggccgtacagtacagagaagccgtggagatggaggttcaggctgccgctgtggcagtggccgaggcagaggccagagccgaggcaagggcccagatgggcataggcgaggaagcagtggccggtccttggaactgggacgacatggacatcgattgcctaactagagaggagctaggtgatgacgctcaggcgtggtcaaggttcagctttgagatcgaggccagagcacaagagaacgcagacgcatctactaacgtcaatttctctcgcggtgcctctacacgggcaggcttctccgacggcgctagtattagcttcaacggcgcaccctcctcttcaggcggattctctggcggacccggtatcacatttggggtagctccttccacatcagcttccttctccaatactgcatcaataagctttggaggtaccctgtcaactagcagttcattctccagcgctgcctctatctcctttgggtgcgcgcacagtacatcaacctccttttcctcagaagccagcatcagcttcgggggtatgccctgcacaagcgcgtcgtttagtggcggtgtatccagttccttcagtggaccattatccaccagtgctacattcagcggcggtgcttccagcggattcggaggtacattgtcaactactgcaggcttcagcggagtgctctcaacatccacttcctttgggtctgcccctaccacttccaccgtatttagttcagccctgagcacatccactggcttcggtggaatcctgagtacatccgtgtgttttggaggctctccttcttccagcggctcatttggagggacactgtccacttctatctgcttcggaggcagcccctgtacatctaccggctttggtgggactctgtctacctccgtgagctttggcggaagcagctcgacatccgcgaattttgggggaaccctcagcacgagtatttgcttcgatggatccccatcaaccggagccggattcggtggcgctctcaacacttcagcctctttcggtagcgtgctgaatacgagcactggtttcggcggagctatgagcaccagtgcagattttggaggcacgctctcaacctccgtgtgctttggcggttctcctggcacttctgttagtttcggcagtgccctgaatacaaatgcagggtacggtggtgcggtcagtactaatactgacttcggcggaacactctccacaagtgtttgctttggtggctcaccatccacaagcgctggattcggcggagcacttaataccaacgcaagttttggatgcgccgtatccacatccgcaagctttagtggggctgtctcaacaagtgcctgttttagcggcgctcccatcaccaatcccggtttcggaggagctttcagtacttcagcgggatttgggggtgcactcagtaccgcagcagattttggcggtaccccgtctaactcaatcgggttcggggcagccccttcaacgagtgtgagtttcggaggcgctcatggcactagcctctgcttcgggggagccccatcaacatcgctctgtttcgggagtgccagcaataccaacttatgtttcgggggtccgccatctacaagtgcctgtttctcgggggctacgtcacctagcttttgtgatggtccatctaccagtactggttttagcttcggcaatggactgagcaccaacgctggcttcggtggtggcttaaacacatcggctggcttcggcggtggtctgggtacaagcgctggttttagcgggggactttcaacctcatcaggattcgatggcggattaggtacttcagcgggtttcggcggaggtcctgggactagcacaggattcggtggtggcctgggcacatcagctgggttctctggaggactcggtaccagtgccggatttgggggaggcttggttacgtcggacggattcggcggtggtctggggaccaatgcctcatttggctccactcttgggactagtgcgggtttctctggtggcctatccacctctgatgggtttgggagtagacccaatgccagcttcgaccgtggactcagcactatcataggatttggctcaggatcaaacacttctaccggattcactggcgagcccagcacttccaccgggttcagcagcggacctagtagcatcgtcggcttctcaggcggacccagcaccggcgttggtttttgcagtgggccatctacgtcagggttctcaggtggaccaagtactggcgctggcttcggcggtgggccaaacacaggagccggttttggcggagggccaagcactagcgcaggctttggtagtggcgcagcgtccctcggtgcctgcgggttttcctacgggtag

SEQ ID NO: 245285 - DNA, 693 bp, synthetic construct
  misc_feature 1..693: note = Description of Artificial Sequence: Synthetic coding sequence
  source 1..693: mol_type = other DNA
atgcacaccctcttagctgcaacaaaggacagcctggctatggatcccccagtggtcaataggcccaagaagtccaagacaaagaaagctccaataaagacaattaccaaggcggctcctgccgctcctcctgtccctgcagccaatgagatcgctactaacaaaccaaaaatcacctggcaggcgctcaacctgcccgttatcactcagatttctcaagccttgccgaccacagaagttacgaacacacaggcgtctagcgtcaccgctcaacccaagaaggccaacaagatgaagcgagtgaccgctaaagccgcacagggatcgcagagcccaactgggcacgaaggaggtaccattcagctcaagtcacctttgcaggtactcaagcttcctgtcatctcccaaaatatacatgctcctatcgccaacgaatcagcatccagccaggctctcatcactagcatcaaacctaagaaagcatctaaggccaaaaaagccgctaataaggccatcgcctccgctaccgaggtgtctctcgccgcaactgcaacccacacggcaacaacgcagggccaaataaccaacgagaccgcaagcattcacaccacggctgccagtatccgcaccaagaaggcttctaaggcaaggaagaccatcgcaaaggtgattaataccgacaccgaacactag

SEQ ID NO: 245286 - DNA, 510 bp, synthetic construct
  misc_feature 1..510: note = Description of Artificial Sequence: Synthetic coding sequence
  source 1..510: mol_type = other DNA
atggaccgcaggaatgattacggatatagggttcctcttttccaaggacctctccccccacccggtagccttggtttaccgttccctccggacatacagactgaaaccaccgaagaggactctgttcttttgatgcacaccctgctggctgccactaaggactctttggccatggaccccccagtcgttaacaggccaaagaagtcaaagaccaagaaagcaccaattaaaaccatcactaaagcggcacctgcagcccctcccgttcctgcagccaatgaaattgccacaaataaaccaaaaattacttggcaggctttgaacctgcctgttattactcagatttcgcaggcattacccacaaccgaggtcacgaatacccaggcctcgagcgtcaccgcccagccaaagaaggcaaacaaaatgaagagggtgaccgccaaagccgcacaagggtctcagtcaccgaccggtcatgaagggggtactatccagctcaaaagtccttag

SEQ ID NO: 245287 - DNA, 2889 bp, synthetic construct
  misc_feature 1..2889: note = Description of Artificial Sequence: Synthetic coding sequence
  source 1..2889: mol_type = other DNA
atgttacgcgatgtcatccaggaatacgacgagtacttcccagagatcattgagcgtgccagttacaccctggagaaaatgttcagagtcaatctgaaagagatcgacaaacaatcttccctatatatactcatttccacccaggaaagcagcgccggaattctcggaacaacgaaggatactcccaaactaggactgttgatggtgatactctccgtgatttttatgaacggcaacaaggcatccgaagcagtgatctgggaagtgctgaggaagcttggcttgcgcccaggagtgaggcacagcttgtttggcgaagtgcgcaaactgatcactgatgaattcgtcaagcaaaagtatctcgaatacaagagagtgccaaactcacgccctccagagtatgagtttttctggggtctccgttcttatcacgagacttccaagatgaaggttctgaaatttgcttgccgggtccaaaagaaagatccaaaggactgggcagtgcaataccgcgaggccgtcgagatggaggtgcaagcagcagctgtggcagtggcggaggcagaggcacgagcagaggctcgtgcccagatgggaatcggggaagaagcggtggcaggcccttggaattgggacgacatggatattgattgtctcactcgcgaagagttaggtgacgacgcacaagcttggtctaggttctcttttgagatcgaggccagagcacaggagaatgccgatgcaagtacaaacgtcaacttctcaaggggcgcatccactcgcgctggattcagcgatggagcctccatttcattcaacggcgctcctagctcatctggaggttttagtggaggacccggtataacatttggggtggccccaagcacttccgcttccttctcaaacacagcgagtatcagttttggcggaaccctgtccacctctagctcattctcatcggctgcaagcatttccttcggctgtgcgcatagcacatcaacttctttctcatccgaggcctctataagcttcggaggcatgccttgcacctctgcctcgttttcaggcggagtgagcagcagcttctctggacccctcagcacctccgcgacgttcagcgggggagcatccagcggattcggtggaaccctgagcacaaccgcagggttctcaggagttctctccacttcgaccagctttgggagtgcacctacaactagtacagtgtttagtagcgctctttccaccagcactgggtttggtggcatcctctctacatctgtttgttttgggggatctccctccagcagcggttcttttggcggtaccctttccacctctatttgtttcgggggatccccgtgtaccagcactgggttcggcggaacactttctacctcagtcagttttggcggtagcagttctactagcgctaattttgggggtaccttgtcaactagcatttgtttcgacgggtctccttctaccggcgcaggcttcggtggtgctcttaacacctccgcctcgttcggctcggtattaaatacgagtaccgggttcggcggagccatgtccacatccgcagatttcgggggtacccttagtacaagcgtctgtttcggaggctctcccggtacttctgtgtcattcggctccgctctcaacaccaatgccggatacggcggtgccgtctcaactaacaccgatttcggcggtaccctgagtacctccgtgtgctttggaggtagcccttcgacttcagcgggattcggcggagcactgaatacaaatgcctcattcggttgcgctgtatccactagcgcgtcattcagtggcgctgtgtccacaagcgcctgtttttccggtgcaccaattacaaaccctgggtttggtggggcattcagcacttctgccggttttggaggagcgctcagcaccgctgcggacttcggcggaacgccatctaatagcattggtttcggggcagcgcctagcacctcagtttcctttgggggtgcacatggtacctccctgtgctttggcggagcccctagtacctccctgtgcttcgggtcagcatcgaacaccaacttgtgttttgggggtccgccatcaacatccgcatgttttagtggcgctacgagcccctccttttgtgacggaccttctaccagcacgggcttctcgttcggtaacgggctgtcgactaacgcaggctttggaggcggtctcaacacctcagcaggatttggcggtggtctggggacgagcgctgggttttctgggggactgagcacttctagcgggtttgatgggggactgggtaccagtgctgggtttgggggtggcccaggcacaagtacaggtttcggcggaggtctcgggacatccgcaggcttcagcgggggtcttggaacatctgcgggattcggcggaggcttggtgacctcagacggctttgggggaggcctcggaaccaacgcctccttcggctccactctggggaccagcgcgggattttcgggtggcctgtccaccagtgacggatttggatccaggccgaacgcatcttttgatcgcggtctgagcacaattatcgggtttggcagcggatcaaacacttccactggcttcactggcgagccgtcaaccagtaccggattttctagcggaccgagttctatcgtgggtttctctggtgggccaagtacaggcgtggggttctgctcaggtcccagtacgtccggattctcaggaggccctagcactggggcaggctttggagggggacccaacactggcgctgggttcggtgggggtcccagcacatcagctggatttgggtctggagccgcatcccttggggcttgcggcttttcatacggctag

SEQ ID NO: 245288 - DNA, 366 bp, synthetic construct
  misc_feature 1..366: note = Description of Artificial Sequence: Synthetic coding sequence
  source 1..366: mol_type = other DNA
atgcacacccttctggcagccaccaaggattcactcgctatggacccacccgtggtgaaccgacctaaaaagagcaagactaagaaagcacccatcaagactattacgaaagcggcacccgctgcccctcctgttccagctgctaacgagattgcgactaacaagcccaagatcacatggcaggccttaaaccttcccgtaattacccagatctcccaagcattgccgacaactgaggttacgaatacgcaagcatcctctgtcaccgcccagcccaagaaggccaataaaatgaaaagggtgacagcaaaggccgcacagggctcacagtcccccaccggccacgagggcggtaccatccagtag

SEQ ID NO: 245289 - DNA, 579 bp, synthetic construct
  misc_feature 1..579: note = Description of Artificial Sequence: Synthetic coding sequence
  source 1..579: mol_type = other DNA
atgcacacactactggctgcaaccaaagactcactcgccatggatccccctgtggtgaataggcccaagaaaagcaaaaccaagaaagcacctatcaagaccatcacaaaagcagccccagccgcaccacccgtgccggctgccaacgagatagcgacaaataaacccaagatcacctggcaggccctgaatctccctgttattacacaaatctcccaggccctccccaccacggaggtcaccaacacgcaggcctcatcagtaacagcccagcccaagaaagccaataaaatgaaaagagtgacggctaaggcagcgcagggaagccagagtcctaccggtcatgagggaggcacaatccagttaaaaagccccctgcaggtgctaaagctgcctgttatctctcaaaacattcacgccccaatcgcaaacgaatctgctagctctcaggccctgatcacatcaattaaacccaagaaggcaagcaaagcaaaaaaagctgccaataaagcaatcgcatccgctacagaggtgagtctggctgctactgctacacataccgccaccacgcagggctag

SEQ ID NO: 245290 - DNA, 531 bp, synthetic construct
  misc_feature 1..531: note = Description of Artificial Sequence: Synthetic coding sequence
  source 1..531: mol_type = other DNA
atggaccgtagaaacgactacggctatagggtgcctctgttccagggaccactacccccacctggttccctcggtctccctttcccgcctgatattcagactgagaccaccgaggaggattccgtcctgctgatgcatacccttctggctgcgacaaaggactctctggcgatggatccgcctgtggtaaatcggcctaaaaagtccaagaccaagaaagcaccaataaagaccataacaaaggccgcacccgctgcccctcctgtgcccgcagccaatgaaattgccacaaataagccaaaaatcacctggcaggcactcaacctgcctgtgattactcagatcagtcaggccctccccaccacggaagtaactaatacacaagcctcttctgtcactgctcagcctaaaaaagccaacaaaatgaagagggtgacagccaaggccgctcagggttctcagtcaccaaccggccatgaaggagggaccattcagctgaaatcccctttacaagtgctgaaacttccttag

SEQ ID NO: 245291 - DNA, 507 bp, synthetic construct
  misc_feature 1..507: note = Description of Artificial Sequence: Synthetic coding sequence
  source 1..507: mol_type = other DNA
atggatagacgcaatgattacggttaccgagtgccactatttcagggcccattgccgcctcccggttctttggggctcccctttcccccagatatacaaacagaaacaacagaagaggactctgtcctgctcatgcacactctcttggccgctaccaaggatagtttagctatggaccctccagttgtaaacagacctaaaaaatcaaaaactaaaaaagctcctattaaaaccataacaaaggccgctcccgctgcccctcctgttcctgctgccaacgaaattgcaactaacaaacctaaaatcacttggcaggcccttaacctccctgtgatcacacaaatctcacaagcactgcctactacagaggtgacgaacacacaggcaagctccgtgaccgctcagcccaaaaaagctaacaaaatgaagagagttacagccaaagctgcacaaggaagccagtcgccaacaggccacgaagggggtacaatccaattgaaatcatag

SEQ ID NO: 245292 - DNA, 2046 bp, synthetic construct
  misc_feature 1..2046: note = Description of Artificial Sequence: Synthetic coding sequence
  source 1..2046: mol_type = other DNA
atggacaggcgcaatgactatgggtatagagttcctctgtttcaaggcccactgcctccccctggttcactcggcttgccatttcctccagatattcagacagagactacagaggaagattccgtgctcctgatgcatacgctgctcgccgcaaccaaggactcccttgctatggatcctcctgtggtgaacagaccaaaaaaaagcaagaccaaaaaggccccaattaagaccataacgaaggcagccccagcagctcccccagtgccagctgccaacgaaattgccaccaacaagcccaaaatcacatggcaggccttgaatcttcccgtcatcacacaaatctcccaggcactccccactacagaagtgaccaacactcaggccagtagcgtcaccgctcaacccaaaaaagccaataaaatgaagagagtgactgcaaaggctgcacaagggtctcagagccccacagggcatgagggaggtacaatccagttgaagtcaccactccaggtgctgaagctcccagtcatatcccaaaatatacatgctccaatcgcaaacgaatctgccagctcacaggctctgattaccagtattaagccaaagaaagcctctaaggcaaagaaggcagctaacaaggcgatcgccagtgctaccgaggtgagcctggccgcaacagcgacacacacagccacgactcagggtcagatcactaatgaaacagcctcaattcatacaacggcagcgagcatcaggacaaaaaaggcatccaaagcgaggaagacgattgctaaggtgattaacacggacacggagcatatcgaggcgctcaacgtgacggacgccgctaccaggcagatcgaggcctctgtggttgccataagacccaaaaagtcaaagggaaaaaaggcagctagcagaggtccgaactctgtgagtgagatttctgaggctcctctggcaacgcagatcgttacaaatcaggctctggcagccactttacgagtcaaaagaggcagcagggctaggaaggccgctacaaaagcacgcgcaactgagagtcagactccaaatgcggaccagggggctcaggctaagatcgcctctgcacagactaacgtgagcgccctggaaactcaggtggcagctgccgtgcaggcgttggccgatgactatcttgcacagctgagccttgaaccaactacacggactaggggaaagaggaatcggaaaagcaagcatctcaatggtgacgaacgaagcggctccaactacagacgtatcccatggggcaggaggcccgcaccgccacgagacgtggccatcctccaggagcgcgcaaacaagttggtgaagtatctgctggtgaaagatcagacaaaaattccgattaaacggtccgatatgctcagggatgtgattcaagagtatgacgaatacttcccagagatcattgagcgcgctagctacacactggaaaagatgtttcgcgtaaaccttaaggaaattgacaagcagagctccttgtatatcctcatatccacacaggagtccagtgcgggaatcctgggcacaactaaagatactccaaagctgggtctgctgatggtgattctgagtgtcatattcatgaatggtaataaagcttccgaggcggttatctgggaagtattaaggaagctcggattgcgccctggagttagacacagcctgtttggcgaggtccgaaagcttatcaccgacgagtttgtgaagcagaagtacttggagtacaagcgcgtgcccaattcaaggcctcccgaatacgagttcttctgggggctgcggagttatcacgagacttcaaagatgaaagtgcttaagtttgcctgcagggtccagaagaaagaccctaaggattgggctgtgcagtaccgggaagcggttgagatggaggtacaggcagcggcagtcgctgtggcagaagcagaagctcgcgcagaatggttccaacaccaacattggctctactggcggacgcagcatcagcacggtttacagtag

SEQ ID NO: 245293 - DNA, 372 bp, synthetic construct
  misc_feature 1..372: note = Description of Artificial Sequence: Synthetic coding sequence
  source 1..372: mol_type = other DNA
atgcacaccttgctggctgctactaaggacagcctggctatggatcccccagtggtcaacagaccaaagaaatcaaaaactaagaaagccccaatcaagactatcactaaggcagcacccgcagcgcctcccgtgccagcagctaatgagatagcaacaaataagccaaaaatcacgtggcaagccctaaacctgcctgttattactcagatatctcaggctctgcctacaacagaggtgactaacacacaagcttctagtgttacagcacagcctaagaaagctaacaagatgaagcgcgtgacggctaaggccgctcagggaagccagtcccccaccggccacgagggcggtactattcagctgaagtag

SEQ ID NO: 245294 - DNA, 216 bp, synthetic construct
  misc_feature 1..216: note = Description of Artificial Sequence: Synthetic coding sequence
  source 1..216: mol_type = other DNA
atgcacaccctgttggctgctaccaaagacagcctggctatggacccccctgttgtgaaccgacctaagaagagtaagacaaaaaaggcacccattaaaacaatcacgaaggccgctcccgctgccccaccagtccccgctgcaaacgaaatcgctacaaataagccaaagatcacttggcaggcccttaatctgcctgtgatcactcaaatttag

SEQ ID NO: 245295 - DNA, 195 bp, synthetic construct
  misc_feature 1..195: note = Description of Artificial Sequence: Synthetic coding sequence
  source 1..195: mol_type = other DNA
atgcatacacttcttgctgccactaaagactctctggcaatggatcctccagtggtcaatcgccctaagaagagcaaaacaaaaaaggcccctatcaaaactatcactaaagcagcccctgcagcccctcccgtgccggcagctaatgaaatcgcaaccaacaagcccaagattacctggcaggcactgaattag

SEQ ID NO: 245296 - DNA, 930 bp, synthetic construct
  misc_feature 1..930: note = Description of Artificial Sequence: Synthetic coding sequence
  source 1..930: mol_type = other DNA
atggaccgtaggaatgactatggataccgcgtacctttgttccaaagcaaacaccttaacggagacgagaggagcggatcaaactatcggcgaattccttggggtagaaggcctgctcccccacgagatgtcgctatcctgcaggaaagggctaataaattggtgaagtacctactggtcaaagatcaaaccaaaatcccgataaagagatcggatatgttaagggacgtcatacaggaatacgatgagtattttcccgagataatcgagagagcaagttacaccctggaaaagatgtttagagtgaatttgaaggagatagacaagcaatcctcactgtacatcttgatatccacacaagagtccagtgccggaatcctggggacgactaaggacacacccaagttggggctgttgatggtaattctcagcgtcatttttatgaacggcaataaggcatcagaggctgtgatttgggaggtgttacgaaagttaggcctgagacctggagttagacattcactgttcggggaggtgaggaagctgatcactgatgaatttgttaagcagaaatatctggaatataagcgcgtgcctaattctagacctccagagtatgaattcttctggggtttgaggtcttatcacgaaacatcaaaaatgaaggtgctgaaattcgcctgccgcgtgcagaagaaggaccccaaggattgggctgttcagtaccgcgaagccgtggagatggaggtccaggcggcagccgttgctgtggcagaagcggaagctcgggcagaaatttacagcccttgcttgcagatccctcttatcaattgcagtagcccttcccatggggctaaggtacacccctggaatttgtgccctcactcatcacaaggatcatatggacagtccgccgagggtgtgatgtag

SEQ ID NO: 245297 - DNA, 1263 bp, synthetic construct
  misc_feature 1..1263: note = Description of Artificial Sequence: Synthetic coding sequence
  source 1..1263: mol_type = other DNA
atgccgggtggctgttctcgaggtcccgctgcaggcgacggaagattacggctggcccgtcttgctctggttctcctggggtgggtctcttcgagctcccccaccagcagcgcgagttcctttagttccagcgctccctttctcgcctctgccgtctctgcccagccacctctgcccgatcagtgccccgcactgtgcgagtgcagtgaggcagctcgcacggttaagtgcgtcaaccgcaacctgacagaagtgcccaccgatctgcccgcttatgtccgcaacctcttcctgaccggcaaccagttggcagtgcttcctgcaggagcttttgctaggcgaccccctcttgcggagctcgccgctttgaacctctccggatccagactggacgaagtccgcgcaggcgctttcgagcatcttccatcgctgagacagctggatttgtctcataacccgctagccgacctgtcgccttttgcgttttccggcagtaacgcctctgtgagtgctcccagcccactagtggaactaatccttaaccacatcgtaccccctgaagatgagcgtcagaacaggtccttcgagggtatggtggtggcggctttgctggcagggagagctttgcagggattgcgtcgcttagagcttgcgtccaaccattttctttatctgccacgggatgttcttgcccaactcccaagtttgagacatttagatctatctaacaacagtcttgtttcccttacttacgttagcttcaggaacctcacccatctagaatccctacacctcgaagataacgctctgaaggtgctccataatggaacactggcagagttacagggactccctcatattagggtctttctagacaataacccatgggtttgtgattgccacatggcagacatggtcacgtggctgaaggaaacagaggtggttcagggcaaagatcggctaacctgcgcatatccggaaaagatgcggaatcgagtcctgctagagttgaacagcgccgatctggactgcgaccctatactgccaccctctctccagacatcttacgtgttcctcggcatcgtactggcactgataggcgcaattttcctcctggttctctatttaaacaggaaagggatcaagaaatggatgcacaatatccgggatgcctgtcgggaccatatggaaggctatcactaccgatacgagattaacgctgatcctcggttgacaaacttgagtagtaattccgacgtgtag

SEQ ID NO: 245298 - DNA, 1263 bp, synthetic construct
  misc_feature 1..1263: note = Description of Artificial Sequence: Synthetic coding sequence
  source 1..1263: mol_type = other DNA
atgcctggtgggtgtagcaggggtccggctgctggcgatgggcgtcttcggctggccaggcttgctctggtcttactcgggtgggtgagctcttcatcacctacaagcagcgccagcagcttttctagcagcgcgccattcttagcgtctgccgtgtctgcccagccccctctgcccgatcagtgtcctgccctctgcgaatgttccgaggctgcgaggacagtaaagtgcgtcaaccgtaatctgacagaagtgcctacagacctgcccgcttatgtgaggaacctcttcctgacaggaaatcagctcgcagtcctacctgcaggcgcattcgccaggcggcctcctctcgcagaactcgccgctcttaacctttctggttcgaggttggatgaggtgcgagccggtgccttcgaacatctcccgagtctccgccagctggacctttctcacaaccccctagcggatctaagtccattcgcgttttccggatctaatgcatcagtctccgctccttctcctctcgtggaactcattctgaatcatatcgtgcccccagaagacgagcgccagaataggagcttcgagggtatggttgtcgcggcacttctcgccggacgcgcactccagggactacggagactcgagctagcttctaaccactttctctatctgccaagggatgtactggcgcaactgcctagccttcgtcatttggacttgtccaacaacagtctggtcagtctgacatatgtgtcattcagaaacctgacccatctagaatctctacacctcgaggataatgctctgaaggtactccacaatgggacccttgcagagttgcagggcctcccccatatccgtgtcttcctggacaataatccatgggtgtgtgactgccacatggctgacatggtcacatggctgaaagagaccgaggtggttcagggaaaagaccggctaacatgcgcttaccccgagaagatgcgaaaccgggtgctgctggaactgaattccgctgacctggactgtgatcctattttaccaccttccctgcagacgagctacgtattcctaggtatcgtactcgcactaatcggtgccatctttctgctggtgttatacttgaacagaaaaggtattaaaaagtggatgcacaacattagggatgcctgccgtgaccacatggagggctaccactacaggtacgagatcaacgcagatcccaggctaacaaacctcagttccaacagtgacgtgtag

SEQ ID NO: 245299 - DNA, 1263 bp, synthetic construct
  misc_feature 1..1263: note = Description of Artificial Sequence: Synthetic coding sequence
  source 1..1263: mol_type = other DNA
atgcctggaggttgctcacgcggtcccgcagccggtgatggcagactccgcttggctcggctggccctggtgctgctaggttgggtgtcctccagttccccaacctcgagtgctagttctttttctagcagcgcacccttcctggcctccgctgtgagtgcacaaccaccactgcccgaccagtgtcctgccctctgtgagtgctcagaggcagctcgtacagtaaaatgcgtaaatcggaatctcactgaggtccctacggacctgcccgcttatgtgcggaatcttttcctgaccggcaaccagctcgcagtgctgccagcgggagccttcgcccgacgcccaccactagccgagttggccgcacttaatctgtccggaagtcgactcgatgaggtccgagccggtgcgttcgagcaccttcctagcttgcgccagctcgacttgtctcacaatcctttagcagatctttcaccctttgcttttagcgggagcaacgcctcagtttccgcgccatccccattggtggagttgattcttaaccatatagtaccgcctgaagacgaacgccagaacaggagcttcgaggggatggtagtcgccgcactcctcgctggaagggccttgcaggggctccgaaggctcgagttggcttcaaaccactttctttacttgcccagggatgtactggctcagcttccttcgctgaggcacctggacctctctaataatagcttagttagccttacgtacgttagctttcggaatttgacccatttggaatcccttcacttggaggataatgctctgaaggtcctgcataacggaactctagctgaactacagggattaccccacatccgcgtgtttctcgataacaacccatgggtgtgcgattgtcatatggcagacatggtaacttggctgaaggaaactgaagtcgtgcagggaaaagaccgactgacatgcgcatatccagagaagatgcgcaacagggtccttttggagcttaacagcgccgatcttgattgtgacccaatacttccaccttccttgcagaccagctacgtgttcctgggaatagtgcttgctctcataggcgctatttttctcctggtgctctacctgaacagaaagggcataaagaagtggatgcacaacatcagagatgcgtgtcgggatcatatggagggatatcactatagatatgaaatcaacgcggacccacgccttacgaacctgtcaagcaacagtgatgtctag

SEQ ID NO: 245300 - DNA, 1056 bp, synthetic construct
  misc_feature 1..1056: note = Description of Artificial Sequence: Synthetic coding sequence
  source 1..1056: mol_type = other DNA
atggctctgcctttccaaaaggaacttgagaaatataagaatattgacgaagatgaattactaggaaagctgagcgaggaagagcttaagcagctcgagaacgtcctggatgacctcgaccctgagagcgccatgttgcctgctggctttcgacagaaagaccagactcagaaggccgctaccggacccttcgaccgcgaacaccttttgatgtacctggagaaagaggccctcgagcagaaggacagagaggattttgttcctttcaccggagagaagaagggaagggtgtttattcccaaagagaagcctattgagacaaggaaggaggaaaaagtgacactcgaccccgaactagaagaagcacttgcttcagcctctgatacagaactctacgaccttgccgcagtcttgggggttcacaacctactgaacaaccctaaattcgacgaggagaccgctaacaataagggaggtaagggtcctgtgaggaacgtagtgaaaggggaaaaggtgaagccagtatttgaggagcccccaaatcccaccaatgtggagatctcattgcagcaaatgaaggctaatgatccatcactccaagaagtgaacctgaataatatcaaaaacatccctatccctactctccgcgagtttgccaaagcattggagacaaatacccacgtgaaaaaattcagtctcgcagccacgagaagcaatgatccagtggcaatcgcattcgcggatatgttgaaggttaacaaaaccctcacgtccttgaacattgaatccaacttcatcacagggaccggtatacttgccctcgttgaggctctgaaagagaacgatactctgacagagatcaagatcgacaatcagcgacagcagctgggcactgcagtcgagatggaaattgcccagatgcttgaagagaactctcgcattctgaaattcggttaccagtttactaaacagggaccccgtacacgggttgctgctgccattaccaagaataacgacctggttagaaaaaagagggtcgaggctgaccgacgttag

SEQ ID NO: 245301 - DNA, 948 bp, synthetic construct
  misc_feature 1..948: note = Description of Artificial Sequence: Synthetic coding sequence
  source 1..948: mol_type = other DNA
atggccctgccctttcagaaggaactggagaagtacaagaacatcgatgaagacgagttgctgggcaaactctccgaagaggaacttaaacagctcgaaaacgtcctagatgacctggatcccgaaagcgccatgctccccgcaggttttagacaaaaggatcagacacaaaaagcggcaacaggacctttcgacagagagcatctgttgatgtatctggaaaaggaggcactcgagcagaaggaccgcgaagacttcgtccctttcacgggtgaaaaaaaagggcgagtctttatccctaaagagaagccaattgaaacccgcaaggaagagaaagttaccctggatccagagctagaggaagccctggcctctgcctcggatactgagctatacgacctggcagccgtgctgggagttcataatttgctcaataatcccaagttcgacgaggaaacagccaataataagggcggaaagggacctgttcggaacgtggtgaagggggaaaaagtcaagcccgtgttcgaagagccaccaaaccccaccaatgtggagatcagcttgcagcagatgaaagctaatgatccctctttgcaagaggtaaatctgaataatatcaaggccttcgcagatatgctgaaggtgaataagaccttaactagcttgaacattgagtctaatttcataacagggaccgggattctcgctttagttgaggccctaaaggagaacgataccttgaccgagataaagattgataaccagcggcagcaacttgggacagcagtggagatggagattgcccagatgttagaagagaattctcgaattctgaaattcggttatcagtttacgaaacaggggcctagaactcgggtcgcggctgccattaccaaaaataatgacctcgtacgcaagaaaagagttgaggctgacaggagatag

SEQ ID NO: 245302 - DNA, 1059 bp, synthetic construct
  misc_feature 1..1059: note = Description of Artificial Sequence: Synthetic coding sequence
  source 1..1059: mol_type = other DNA
atggcgctaccatttcgtaaagatcttgaaaaatataaggatctggatgaggatgaacttctcgggaacctgtcagaaacagagctaaagcaacttgaaacggtccttgacgacctggaccccgaaaacgccttactacctgcaggctttcggcaaaagaatcaaacgtctaagagcacaactgggccattcgaccgagaacatctgcttagctatctcgagaaggaagcactcgaacacaaggacagggaagattacgtcccgtacactggtgaaaaaaagggaaagatatttatccctaaacagaagccagtgcaaacattcacagaggagaaagtatctctggaccccgagctggaggaagcattgaccagcgcctctgacacagagctatgcgacctcgctgccatcctgggcatgcacaatctgataactaacactaaattttgtaatattatgggaagtagcaatggagtcgaccaggaacacttttctaacgtggtgaagggagagaaaattctcccggtgttcgacgagcccccaaaccctacaaacgttgaggagtctctcaagagaacgaaagaaaacgatgcccacttagtcgaagtgaaccttaacaatattaaaaatatccctatccccacgctgaaagatttcgccaaggcactcgagaccaatacacatgtaaagtgcttctccctggccgcaacccgatctaacgaccctgtcgcgactgcattcgctgaaatgctcaaggtgaacaagacgctgaagagtctcaacgtggaaagcaatttcatcacaggcgttggcatcctggccctgatcgatgcacttcgcgacaacgaaacccttgctgaactcaagattgataaccagcgccaacaacttggtactgcggtggagctggaaatggcaaagatgctggaagagaacaccaacattctgaagtttggataccagttcacccagcaggggcctagaacgcgtgctgccaacgcaataactaagaacaatgacctggtgcgcaagcgccgagtagagggggatcaccagtag

SEQ ID NO: 245303 - DNA, 1059 bp, synthetic construct
  misc_feature 1..1059: note = Description of Artificial Sequence: Synthetic coding sequence
  source 1..1059: mol_type = other DNA
atggcattgccatttcggaaagatctcgaaaagtataaagacctagacgaagatgaactgctcgggaacctgtctgagacagaactgaagcagctggagacggttctagacgatttagatccagaaaacgctcttctgccagcaggcttccgccagaagaatcaaacatcaaagtcaacaacaggcccttttgaccgggagcacttgctgtcttacctggagaaggaggcgctggagcacaaggaccgagaagattatgtgccatacaccggggagaagaaaggaaagattttcatccccaaacaaaaaccggtgcagacatttacggaggagaaagtttccctggaccctgagctggaggaagctctaaccagcgcgtctgataccgaactgtgtgacctggccgcaatcctgggaatgcacaacttaataactaataccaagttctgtaatataatggggagtagtaacggagtagaccaggagcatttctccaacgtagtcaaaggcgagaaaattctgcctgtgttcgatgaacccccaaaccccacaaacgtggaggagtccctaaagcgaacaaaggaaaatgatgctcaccttgtggaagtgaatcttaacaacatcaagaatatccccatccccacccttaaggatttcgcgaaagcacttgagaccaatacccacgtgaagtgttttagtctggcagctactcgctcaaatgacccagtagcaacagcttttgcggagatgctcaaagtgaataagacgctaaagtctctgaacgtggaatctaacttcattacgggcgtcggcatcctggcactcatcgatgcactgcgggacaatgaaactctggcagagctcaagatcgacaatcagcggcagcaattggggaccgccgtagaactggagatggctaagatgctcgaggagaacaccaacatcctgaaattcggatatcagttcactcaacagggacccagaacccgcgcagccaatgctataacaaaaaataacgacctggttcgtaaacgtcgcgtcgaaggcgatcaccagtag

SEQ ID NO: 245304 - DNA, 102 bp, synthetic construct
  misc_feature 1..102: note = Description of Artificial Sequence: Synthetic coding sequence
  source 1..102: mol_type = other DNA
atggcgctgccattccggaaagatttggagaaatataaagatttggacgaggatgaactcctagggaatctctcagaaacggagcttaagcagcttgaatag

SEQ ID NO: 245305 - DNA, 1038 bp, synthetic construct
  misc_feature 1..1038: note = Description of Artificial Sequence: Synthetic coding sequence
  source 1..1038: mol_type = other DNA
atgagctcatatcagaaggagctagagaagtatagagacatcgacgaggacgagattcttcgaaccctaagcccggaggaactcgagcaactcgactgtgagttacaggagatggatcccgagaacatgttgttgccagctggtctcagacagagggatcagacgaagaagtcccccacgggccctttggatcgggaggctttgcttcaatacttggaacagcaggcccttgaagttaaggaaagagacgacctggtgccatttacaggcgaaaaaaagggaaaaccctacattcaaccaaagcgggaaatcccagccgaagagcagattaccctcgaaccggagctggaggaagcgctcgcccacgcaaccgacgccgaaatgtgcgatatcgcggctattttggatatgtacacactcatgtccaacaagcagtactacgatgccttgtgttcgggcgaaatttgcaatacggagggcattagcagcgtggtgcagcctgataaatacaaacccgtaccggatgaacctccaaaccctaccaacattgaggaaatattgaagagagtgagatccaatgataaggagctcgaggaagtcaatttgaataacatccaagatattcctatccctatgttaagtgagttgtgtgaggcaatgaaggcaaacacctacgtacgcagcttcagtcttgttgccactagaagcggtgacccaatcgctaatgccgtcgctgacatgctcagagagaaccggtccttacagtccctgaacatcgaaagcaacttcatcagttccacaggactgatggccgtgttaaaggccgtaagagaaaatgcaactctcacagagttgagggtcgataatcagcgacagtggcctggcgacgctgtcgagatggagatggctacggtgctggagcagtgcccgtctatagtgagatttggatatcattttacacagcaaggacccagagcccgagcggcacaggctatgacgcgcaataacgagctgcggagacagcagaagaagcggtag

SEQ ID NO: 245306 - DNA, 831 bp, synthetic construct
  misc_feature 1..831: note = Description of Artificial Sequence: Synthetic coding sequence
  source 1..831: mol_type = other DNA
atgtcttcctatcagaaggaattagagaaatatagggatatcgatgaagacgaaatccttcgcacgctgagtcctgaggaactcgaacagctggattgcgagttgcaagaaatggacccagaaaatatgctgctgccagcaggcctccgacagagggatcagacaaagaagagtcccacgggccctttggaccgggaggcacttcttcaatatctggagcagcaggcacttgaagtaaaagagagggatgatctggtaccctttaccggggaaaagaagggcgtagtccaaccagataaatataaaccggtcccggatgaaccacctaaccccaccaacatcgaagagatacttaaacgagtgcgcagcaacgacaaggagttagaggaagtgaatttgaacaacattcaagacattcctatacccatgctgtcagagctctgtgaagccatgaaagcaaacacgtatgtccgcagcttttcactggttgctactcgctccggcgatccgattgcgaacgctgttgccgacatgcttcgcgaaaatcggtcactgcagtcactgaacatcgagagcaattttatcagctcaaccggtctgatggccgttctgaaggcagttcgtgaaaatgccacccttaccgaattgcgcgtcgataatcagcgacagtggcccggagatgccgtagagatggagatggctaccgtgcttgaacagtgcccatcaatagttagattcggatatcatttcacacagcagggtccaagagccagagcagcccaggccatgactcgcaacaacgaactccgccgtcaacaaaagaaacgttag

SEQ ID NO: 245307 - DNA, 429 bp, synthetic construct
  misc_feature 1..429: note = Description of Artificial Sequence: Synthetic coding sequence
  source 1..429: mol_type = other DNA
atgagctcataccagaaggaattggagaagtaccgggatattgacgaagacgaaattctccggactctgtctcccgaggaattggaacagctcgactgtgagctccaggaaatggaccccgagaacatgctgctgcccgcaggtcttcgccagcgagaccagactaaaaagtcacccaccggacccctcgaccgggaggcattgctacagtatcttgagcaacaggcgctggaggtgaaggagcgggacgacctggtacccttcaccggcgaaaaaaaaggcaaaccctacatccaaccaaaaagggaaattccagccgaagagcagataacactggaacctgagctcgaggaagcacttgcacatgccactgacgcagagatgtgcgatatagccgcaatcctggacatgtatacactgatgtcatag

SEQ ID NO: 245308 - DNA, 855 bp, synthetic construct
  misc_feature 1..855: note = Description of Artificial Sequence: Synthetic coding sequence
  source 1..855: mol_type = other DNA
atggacgctattaagaaaaagatgcaaatgctcaaattagataaggagaacgcactggatagagctgaacaagctgaggctgacaagaaggccgctgaggatcggagtaaacagctggaggaggacatcgccgctaaggagaaactgctgagggtgagcgaagatgaacgagaccgagtcttggaggagctccataaggctgaggactctctcctcgcagctgaggaggccgctgccaaggccgaggctgacgtcgcttctttaaatcgtcggatccagttggtcgaagaggagcttgacagagcgcaggagcgcttagcgacagcactccagaagttagaggaagccgagaaggcagctgacgagagtgaacgcggtatgaaagtgatcgagtcacgggctcaaaaggacgaagaaaaaatggagatacaggaaatccagttgaaggaagcaaagcatattgccgaggatgccgatcgtaaatacgaggaagtggcaaggaagctagtgattatagagtcagaccttgagcgggctgaagagagagcagaattatcagaggggaaatgtgctgaactcgaggaggagcttaagaccgtgaccaataatttgaagtccctcgaggctcaggctgaaaagtactctcagaaagaggacaggtatgaggaagagatcaaggtactgtccgacaagttgaaggaagctgaaactcgagccgaattcgctgagcggtcagtgacgaagctcgaaaagagtatagatgacctggaagagaaagtcgcgcacgctaaagaggagaatctgtcaatgcaccagatgctagatcagaccctcttagaactgaataacatgtag

SEQ ID NO: 245309 - DNA, 855 bp, synthetic construct
  misc_feature 1..855: note = Description of Artificial Sequence: Synthetic coding sequence
  source 1..855: mol_type = other DNA
atggatgccatcaagaagaaaatgcagatgctcaaactggataaggagaacgcccttgatcgagcagagcaagcagaagccgacaaaaaggcagccgaggaccgctcaaagcaattagaggacgaactggtttccttgcagaagaaactgaaggggaccgaagacgaactcgacaagtacagcgaagccctaaaggatgcgcaagagaagctggagcttgcggagaagaaggctactgacgcagaagctgacgtcgcctcacttaacaggcggattcagctggtggaggaggagctggatcgagcccaggagcgcttggcaaccgccttacagaaactagaagaggcagaaaaggctgcagatgaatcagagcggggtatgaaggtgatcgagtcccgggcacagaaagacgaggagaagatggaaatccaggagattcagctgaaagaagcaaagcacatcgcggaagatgcggaccgtaagtacgaggaagtcgcccgtaagcttgtgatcatcgagtcagatctggagcgtgccgaggagagggcagaactttcagaaggccaggttagacaattagaagagcagctgcggattatggaccagactttgaaagccctgatggccgcagaagacaagtattctcagaaagaggaccgctatgaggaagaaattaaagtcttatccgataagctgaaagaggctgagactcgggcagaattcgccgagcgaagtgtaaccaaactggagaaatcgattgatgacctcgaggatgagctctacgcccagaagcttaagtacaaagcaatctcagaagaactggatcacgctctgaatgacatgaccagtatgtag

SEQ ID NO: 245310 - DNA, 738 bp, synthetic construct
  misc_feature 1..738: note = Description of Artificial Sequence: Synthetic coding sequence
  source 1..738: mol_type = other DNA
atggctgggtcttcaagcctcgaagccgtcagacgcaaaatcaggtccctgcaggagcaggccgatgcagctgaggaacgggctggcacacttcagagggagttggatcacgagcggaagctccgtgagactgccgaggccgacgtagcgagcctgaaccggagaatccagcttgtcgaggaagagctcgacagggcgcaagaacgcctggccacggcattgcaaaaactcgaggaggcggaaaaagccgctgatgaatctgagcgaggtatgaaagtaatcgagagtcgggctcaaaaagatgaagaaaaaatggagatccaggagattcaattgaaggaggccaagcacatagcagaagacgccgatcgaaagtatgaggaagttgcacgcaagctggtgatcatagagtctgacttggagcgcgctgaagagcgagccgaactgagcgaagggaaatgcgccgaacttgaggaagagctaaagaccgtcacaaacaaccttaaatctctggaagcccaagcagagaagtattctcagaaggaggacaggtacgaagaggagatcaaagtgctgagcgacaaacttaaagaagctgagactcgggctgaatttgcggaacggtctgtgaccaagcttgaaaagtcgatcgacgatcttgaagatcagctgtaccagcagctggagcagaacaggaggcttacaaacgaactaaaacttgccctcaatgaggactag

SEQ ID NO: 245311 - DNA, 981 bp, synthetic construct
  misc_feature 1..981: note = Description of Artificial Sequence: Synthetic coding sequence
  source 1..981: mol_type = other DNA
atggacgccattaaaaaaaaaatgcagatgctcaaactggacaaagagaacgccctggacagagctgagcaggctgaagctgacaagaaggcagcggaggaccgaagcaagcagctcgaagaggacattgctgctaaggaaaaacttctgcgtgtaagtgaagacgaaagggaccgggtcttggaggagcttcataaagcagaagacagtctgctggccgcagaggaagcggctgcgaaattggaagatgagttggtgtcccttcagaagaagctgaagggaaccgaagatgagctggataagtacagcgaggccctcaaggacgcccaggagaagcttgaactggcggaaaagaaagccaccgacgcagaggccgatgttgcaagcttgaacaggagaatccagctagtagaggaggagctcgatcgggcacaggagcggttggctacggccctgcaaaagttggaagaagccgagaaggcagcggatgaatccgaacgtggtatgaaagtgatagagtctagggcacagaaggacgaggaaaagatggaaattcaagagatccagctcaaggaggctaagcatattgctgaagacgccgacagaaagtacgaagaagtggcaagaaaattagtaatcattgaatccgacctagagcgcgcagaagagagagccgaactctcagaaggcaagtgcgcagagttagaagaagaactgaagaccgtcactaataatctcaagtccctggaagcccaggcagaaaagtacagccagaaggaggaccgttacgaggaagagattaaggttctgagtgataaactcaaggaagctgaaaccagggcggagtttgcagagcggtctgtgacaaaattggaaaagtcaattgacgacctggaggagaaagtcgcccatgccaaggaagaaaatctttctatgcatcagatgctggaccagaccctcttggaactgaacaatatgtag

SEQ ID NO: 245312 - DNA, 855 bp, synthetic construct
  misc_feature 1..855: note = Description of Artificial Sequence: Synthetic coding sequence
  source 1..855: mol_type = other DNA
atggatgccattaaaaagaagatgcagatgctgaagctcgacaaggaaaacgccctggacagggcagaacaggctgaagcagacaaaaaggccgcagaagataggtccaagcagctcgaggatgaactcgtgagtctacagaagaagttgaagggtaccgaagacgaactcgacaaatattccgaggccttgaaagacgctcaggaaaagctggagcttgcagagaagaaggcgacagacgcggaggctgacgtggcatctcttaacagacgaattcagctagttgaggaggagcttgaccgggcacaggagcgactggccaccgccctgcagaagctggaggaggctgaaaaggccgctgacgagtcagaaagggggatgaaagtgattgaaagtcgggctcagaaggacgaggaaaaaatggaaatacaggagatccagctcaaggaagcaaaacatattgccgaggacgctgaccgcaaatacgaggaagttgcccgaaaacttgttatcattgagtctgacttagaaagagcagaggaaagggcagagctttctgaaggccaggtgagacagctggaagagcagctgcgtataatggaccagaccctgaaagcactgatggccgcagaagacaaatacagccaaaaagaggaccgatacgaggaggaaatcaaggtactctccgacaagctgaaagaggcggagactagggcggaattcgccgagagaagtgtgaccaaactagagaagtccatagatgatctggaagagaaagtggctcatgccaaagaagaaaatttatctatgcaccagatgcttgaccagacactgcttgaactcaacaatatgtag

SEQ ID NO: 245313 - DNA, 855 bp, synthetic construct
  misc_feature 1..855: note = Description of Artificial Sequence: Synthetic coding sequence
  source 1..855: mol_type = other DNA
atggacgccataaaaaaaaaaatgcagatgcttaagttggataaggaaaacgcactggatagagctgaacaagccgaggccgacaaaaaagcggctgaagatagaagcaaacagctggaggacgaactggtctccctgcagaagaaactcaagggaacggaagacgagctggacaaatattcagaggctctgaaggatgcccaggaaaagctggaattggccgagaagaaagccacggatgcagaggccgacgtggcatcactgaaccggcgtattcagctagtggaagaagaactggacagggcccaagaacgactagccaccgccttgcagaaattggaggaggctgaaaaggccgcagacgagtccgagagaggaatgaaggtgattgaatctcgggctcagaaggatgaagaaaagatggagatacaggaaatccagctcaaggaggccaagcatatcgcagaagacgctgaccggaagtacgaagaggtggcgcgaaagctagttataatagagtctgacctggagcgggctgaggagcgcgctgagttatccgagggaaagtgcgccgagttggaggaagaactaaagacagtaacaaataaccttaagtcactggaggcccaggccgaaaaatacagccagaaagaggatcgatacgaagaagagataaaggtgctgtccgataaactcaaagaggcggagacacgtgcagaatttgcagaaaggagcgttacgaagttagaaaaatctatagacgaccttgaagatgaactctatgcgcagaaactcaaatataaagctatttcagaagaactcgatcacgccctaaacgatatgacatccatttag

SEQ ID NO: 245314 - DNA, 855 bp, synthetic construct
  misc_feature 1..855: note = Description of Artificial Sequence: Synthetic coding sequence
  source 1..855: mol_type = other DNA
atggacgcaataaagaagaaaatgcaaatgctgaagctggacaaggaaaacgctttggatcgggctgaacaagcagaggcagacaaaaaggccgctgaagaccggtcaaaacagctcgaagaggatatcgccgctaaggagaagctcctacgagtgagtgaagatgagagagacagggtcctcgaagagttacacaaagcagaggactctctgctggccgcagaggaagccgctgccaaggccgaggctgacgtggcctcgcttaatcgaaggatccaattggtggaagaagagctggatcgcgcacaggagcgcttggcaaccgctctgcaaaagttggaagaagcggagaaagccgcagacgaatcagagcgagggatgaaggtcatcgagagtcgcgctcagaaagacgaggaaaagatggagattcaggaaattcagctgaaggaagctaagcatatcgccgaggatgctgacaggaagtacgaggaggtcgcgagaaaactagtcatcatcgaatctgatctggagagagccgaggagagggcggaactgagcgaggggcaggttaggcagttggaggaacagctacgcatcatggatcagacactgaaggctctcatggctgccgaagataaatactcccagaaagaagacaggtatgaggaggaaataaaggtactaagcgataaactaaaggaagcagagacgagggcggagttcgcagagaggagcgttactaagctcgaaaaatccattgacgatctggaagagaaggtggctcacgcaaaggaggaaaatttgtcgatgcatcagatgctggaccagacgctgttggagctgaataatatgtag

SEQ ID NO: 245315 - DNA, 855 bp, synthetic construct
  misc_feature 1..855: note = Description of Artificial Sequence: Synthetic coding sequence
  source 1..855: mol_type = other DNA
atggacgcaatcaaaaagaaaatgcagatgttaaagttggacaaggagaacgctttagacagggccgaacaagccgaggccgacaaaaaggccgcagaggataggagcaaacagctggaagatgaactcgtgtctctgcagaagaagctcaaaggcacagaagacgagctagataagtatagtgaagcactgaaggacgcccaggagaagcttgagctggccgaaaaaaaagccaccgacgccgaagcagacgtagcatcacttaatcggagaatccagctggttgaagaggagttggacagggcacaggagagattggcaactgccttgcaaaaacttgaggaggccgagaaggccgctgatgagagcgagcgcggaatgaaggtgatagagtccagagcccaaaaggatgaggaaaaaatggaaattcaagagattcagctgaaggaggctaagcatattgcggaggatgctgacaggaaatatgaggaggtggccagaaagctggtcatcatcgaatctgatctggagcgcgctgaggagcgcgcagaactgagcgaggggaaatgcgcggagctcgaggaagagttgaaaaccgtgacaaataacctgaaatctctagaagctcaggctgagaaatactcccagaaggaagacagatatgaggaagagatcaaggtgttgagcgacaagctgaaagaggcagagactagggcagaattcgcagaaaggagtgttacaaaactcgaaaagtcaattgacgaccttgaggaaaaggtggcccacgcaaaggaagagaacctgtctatgcaccaaatgctcgatcagaccctcttagagctgaacaacatgtag

SEQ ID NO: 245316 - DNA, 798 bp, synthetic construct
  misc_feature 1..798: note = Description of Artificial Sequence: Synthetic coding sequence
  source 1..798: mol_type = other DNA
tgacgtgcagagcaagctgaggccgataagaaggcagctgaggacaggagcaagcagctagaggacgagcttgtctcacttcagaagaaactgaagggcaccgaagacgaattggacaaatacagtgaggcactcaaggacgctcaggagaagctcgagttggccgaaaaaaaggcaaccgatgccgaggcagatgtcgccagcctgaatagacgtatccagctggtggaggaagaactcgaccgggcacaggaacggttggcaactgcccttcagaagctggaagaagccgaaaaagccgctgacgaaagcgaacgaggaatgaaggtaatcgaatccagagcccagaaagacgaagagaagatggaaattcaagaaattcagttaaaggaagccaagcatatcgcagaggatgccgaccggaaatatgaggaagtggcacgcaaactggtgatcatagaatctgacctggaaagggctgaagagcgcgctgagctgtccgaaggcaagtgcgctgaactggaagaagagctcaaaactgtgaccaacaatttgaagagtctggaggcgcaggctgaaaaatacagtcagaaagaggaccggtacgaagaggaaatcaaagtactcagcgataagttgaaggaggctgaaacgcgtgcagagttcgctgaacgcagcgtgactaagctggaaaagagtatcgacgatttggaggacgagctgtatgctcagaaactcaaatacaaggccatctctgaagagctggatcacgccctgaatgacatgaccagcatgtag

SEQ ID NO: 245317 - DNA, 855 bp, synthetic construct
  misc_feature 1..855: note = Description of Artificial Sequence: Synthetic coding sequence
  source 1..855: mol_type = other DNA
atggatgccattaaaaaaaagatgcaaatgctgaaactggataaagaaaacgcaatcgatcgggctgagcaagccgaagcggataagaaacaggctgaagacagatgcaaacagctggaggaggagcaacaagccctgcagaagaagctgaagggtaccgaggatgaagtggaaaagtactctgaatctgttaaagaggcgcaggagaagctggagcaggccgagaagaaggcaaccgatgccgaagcggatgtggccagtctaaacagaagaatccaacttgtcgaagaagagcttgacagagcacaggaaaggctcgccactgctcttcaaaaactggaggaggcagagaaagctgcggacgagagtgagaggggtatgaaagttatcgaaaatcgtgcgatgaaggatgaagagaagatggaactccaagaaatgcagctcaaggaagctaagcatatcgctgaggatagcgaccggaagtacgaggaggtcgcgaggaagctggtcatccttgagggcgaattggaacgatctgaggaacgggctgaagtcgctgagtcaaagtgcggtgatcttgaggaggaattaaagatcgtcaccaataatttaaagagtcttgaagcccaggccgacaaatattcaacaaaagaagacaagtacgaggaagagattaagcttctggaggagaagctcaaagaggccgagacccgagccgagtttgcagaacggagcgtcgcgaagctcgagaagacaatagacgacctggaggaaacgctggcttctgctaaggaggagaatgtggaaattcatcagacgctggaccagactctcctagagctgaacaacctgtag

SEQ ID NO: 245318 - DNA, 855 bp, synthetic construct
  misc_feature 1..855: note = Description of Artificial Sequence: Synthetic coding sequence
  source 1..855: mol_type = other DNA
atggatgctattaaaaaaaaaatgcaaatgcttaaactggataaggaaaatgctatcgatcgggctgagcaagccgaagcagacaaaaaacaggctgaggatcgctgtaaacagcttgaagaagaacagcaggcccttcagaaaaagcttaaggggaccgaggacgaggtagaaaagtacagtgaaagtgtgaaggaagcacaggaaaaactcgagcaagctgaaaagaaggccaccgacgcagaggccgacgtcgcctccctcaaccgccgaatccagctggtggaggaggagctcgacagggcacaggagagacttgctactgccctacaaaagttagaagaagccgagaaggccgcagacgaaagcgaacgcggaatgaaggtcatcgagaatagggccatgaaggacgaggagaaaatggagctgcaggaaatgcaacttaaggaggccaagcacatcgccgaggatagtgaccgtaagtacgaagaagtggcaagaaagctagtgatactcgagggagagttggaacggtccgaggagcgcgctgaagtggccgaatctaagtgcggcgatctggaggaggagctgaagatcgtgacaaataatttgaagtctttggaggcgcaggctgataaatactctacaaaggaggataaatacgaggaggagatcaagcttcttgaggagaagctgaaggaggcagaaaccagagcagaattcgccgagaggtctgtggccaagctggagaaaaccattgatgatctggaggacgaggtttatgctcagaaaatgaaatacaaggcaatcagcgaagagctcgacaacgcgctgaatgacatcacatctttgtag

SEQ ID NO: 245319 - DNA, 855 bp, synthetic construct
  misc_feature 1..855: note = Description of Artificial Sequence: Synthetic coding sequence
  source 1..855: mol_type = other DNA
atggacgcaatcaaaaagaagatgcagatgctgaagcttgataaggagaacgccattgatagggcagaacaggcggaggcagataaaaagcaggctgaagaccgctgtaaacagcttgaagaagaacagcaggctctgcagaaaaaactgaagggaacggaggacgaagttgaaaagtactccgagagcgtaaaagaggcacaggagaagctagagcaagctgagaagaaagccaccgacgccgaggcagacgtagcatccttgaatcgcaggatccagctggtggaggaagaactcgatcgcgctcaggaacgtctggctaccgcacttcaaaaactggaggaagctgagaaggccgctgatgaaagcgagcggggaatgaaagtcattgagaacagggccatgaaagatgaagagaagatggagctgcaggagatgcagctgaaggaggcgaaacacattgctgaggactcggatcggaaatacgaggaggttgcacgcaagctggttatcctcgagggtgagctcgagaggagcgaggagcgcgctgaagtggccgagtccagggccaggcagctggaggaggagctgcggaccatggatcaggcactcaagagtcttatggcctctgaggaggagtatagtacaaaggaggacaagtatgaagaggaaatcaaacttttggaagagaagctcaaggaggccgaaaccagagcagaatttgcggaacgatcagtggctaagttggagaaaactattgacgatctggaagaaacactagcctccgctaaggaagaaaacgtggagatccaccagacactggaccagacactgctagaactgaacaacctgtag

SEQ ID NO: 245320 - DNA, 969 bp, synthetic construct
  misc_feature 1..969: note = Description of Artificial Sequence: Synthetic coding sequence
  source 1..969: mol_type = other DNA
atggacgctatcaaaaagaaaatgcaaatgctcaagctggacaaggagaatgctatagaccgcgctgaacaggccgaggctgataagaaacaggccgaggacagatgtaagcagctcgaagaagaacaacaagctctgcagaagaagctcaaagggactgaggacgaggtcgaaaagtacagtgagtccgtgaaagaggcccaggagaaactggaacaggctgagaaaaaagcaacggacgccgaggctgacgtcgcctcactcaatcggcgaatccagctggtagaagaggaactggatcgggcacaggaacgcctggccactgcactccagaagctagaagaggcggagaaagctgcagatgagagcgagcgcggaatgaaagtcattgagaaccgggctatgaaggacgaggagaaaatggagctccaagaaatgcagttgaaggaggctaagcacatcgccgaggattccgatagaaaatacgaggaagtcgcgagaaagctagtaattcttgagggagaactggagagatccgaggagcgagccgaagtggcggagagtaagtgcggggatctcgaggaggaactgaaaatagtgactaataacctgaagtccctggaggcccaggctgacaagtactcaaccaaggaagataagtatgaagaggaaataaaactattagaagagaaactgaaagaggcagagacccgggctgagtttgcggaaaggagcgtcgcaaaactcgaaaaaaccatagacgatttggaggaatccacttcaattgcaactactgaacattggtttacccctgatacgcttgcacttacagataccccttctccttgtactgaaccaacccacaaaaccccctggccaaccttaaaacctctgtgcacagggactccttggctcagtctctccgatagccccttgcacgtgggtacgtgtggcccaattaagccatag

SEQ ID NO: 245321 - DNA, 858 bp, synthetic construct
  misc_feature 1..858: note = Description of Artificial Sequence: Synthetic coding sequence
  source 1..858: mol_type = other DNA
atgatggaagctataaagaaaaaaatgcagatgctaaaactggataaggagaatgctctcgatagggccgagcaagcagaggcagagcagaagcaggcggaagagcgttctaagcagctcgaagacgagctggcggcaatgcagaagaagctcaagggcactgaagacgagttggataagtacagtgaggccctgaaagatgcccaggaaaagcttgagctggccgaaaaaaaggcggcagatgccgaggctgaggtggcctcactgaatcgcagaatccaacttgtggaagaggagctggacagggcccaggaacggctcgccactgcgcttcagaagctagaagaagctgaaaaggcggctgacgaaagcgagcgcggtatgaaagtcattgagaaccgggctcttaaggacgaggaaaaaatggagttgcaggaaattcagctaaaggaggcaaagcacatcgcggaagaggcagaccgcaagtatgaggaggtggcgcgaaagctggttattattgaaggggatctggaaagaaccgaggaacgggcagagctagcagagtcgcgatgtcgcgaaatggacgagcagatcaggctcatggatcagaacctaaagtgtctctcagctgccgaagagaaatatagtcaaaaggaggataagtacgaggaagagatcaagatcctgaccgataaattaaaggaggccgagacacgcgctgaattcgcagaacgatctgtcgctaagttagagaaaacgattgatgacctagaggacaagctgaaatgcactaaggaggagcatctgtgtacgcagcggatgctcgaccaaacattgttggacttgaatgaaatgtag

SEQ ID NO: 245322 - DNA, 744 bp, synthetic construct
  misc_feature 1..744: note = Description of Artificial Sequence: Synthetic coding sequence
  source 1..744: mol_type = other DNA
atggccggaattacaactattgaggctgtgaagaggaaaatccaggtgctccagcagcaagccgacgacgcggaggaacgcgcagaacgcctgcagagagaggtggagggcgaacgcagagctagagagcaggctgaagcagaggtggcatccctgaatagacgcatccagctggtagaagaagagcttgatcgcgctcaggagcggctcgccacggccctccagaagctggaagaggcagaaaaagccgctgatgaatccgaaagggggatgaaagtgattgagaatcgcgctctcaaggacgaggaaaaaatggaactgcaagagatacagctgaaagaggctaagcatatcgccgaagaggccgatcggaagtatgaagaggttgccaggaagctggtcatcatcgagggagacctggagcgcaccgaggaacgagctgaacttgccgagagtaaatgttctgagctggaggaagaacttaagaatgtaaccaacaatttgaagtccctagaggcccaggccgagaagtacagccaaaaagaggacaagtacgaagaagaaattaaaatcttgaccgacaagttgaaagaagctgaaacaagagctgaatttgctgagcgatcggttgccaaactcgagaaaacgattgatgatctagaagagcgattatactcccagctggagaggaatcggttactgtccaacgaactgaaactgactttgcacgatctctgtgattag

SEQ ID NO: 245323 - DNA, 747 bp, synthetic construct
  misc_feature 1..747: note = Description of Artificial Sequence: Synthetic coding sequence
  source 1..747: mol_type = other DNA
atggcaggcatcactaccatagaggccgtaaaacgcaagatacaagtcttgcagcagcaggccgacgacgccgaagaacgggctgaaagattgcagagagaagtggagggagaaagaagggcaagggaacaggctgaggcagaagtagcttccctgaaccgcagaattcaattagtggaagaagaactggaccgtgcccaggaacggttagctacagctctgcagaagctagaggaagctgaaaaggctgccgatgagtcagagagagggatgaaggtcatcgagaatcgggctctcaaggatgaagaaaagatggaactccaggaaattcagcttaaggaggcaaagcacattgcagaggaagccgacagaaaatacgaggaagtggcacgcaagctggtgattattgagggggacctggagcggactgaggagagagctgaactggcagaaagtcggtgtagagagatggacgaacaaattcgtctcatggaccaaaacttaaaatgcctgagcgcggctgaagaaaaatacagtcagaaagaggacaagtacgaggaggagatcaagatcttgacagacaaacttaaagaagctgaaaccagagccgaatttgctgagcgctcagtggctaagctcgagaagactattgacgaccttgaggacgaactgtacgcacagaagctgaagtataaagcaatttctgaagaactggatcacgccctgaatgatatgaccagcatctag

SEQ ID NO: 245324 - DNA, 747 bp, synthetic construct
  misc_feature 1..747: note = Description of Artificial Sequence: Synthetic coding sequence
  source 1..747: mol_type = other DNA
atggcgggtatcaccacaattgaggcggttaagcgaaagattcaggtcctgcagcagcaagcagacgacgctgaagaaagagccgaaaggcttcagagagaggtggaaggtgaacgtagggctagagaacaggccgaggccgaggtagcttccctcaaccggcgtattcagttggtcgaggaagagttagatagagctcaagagcgcctggctacagcactccagaaactggaagaggccgagaaggccgctgatgagtcagaaaggggtatgaaggtgattgagaaccgggcactcaaggatgaggagaagatggagctgcaggaaatccagttgaaggaagccaagcacattgctgaggaggcagatcgcaagtatgaagaagttgccagaaaattggtcatcattgagggtgacttagaaaggaccgaagagagagccgaacttgctgagtctaaatgcagcgagctggaggaagagcttaaaaatgttactaacaacctgaaatccttagaagcccaagcggaaaaatatagccagaaggaggataagtacgaggaagaaattaagattctgactgacaagctgaaggaagccgaaacacgagctgaatttgccgaacggtcggtcgcaaagttagagaaaaccatagatgatcttgaagataaactgaagtgtacaaaggaggagcacctgtgtacacaacgcatgctagatcaaactctactggatttgaatgagatgtag

SEQ ID NO: 245325 - DNA, 675 bp, synthetic construct
  misc_feature 1..675: note = Description of Artificial Sequence: Synthetic coding sequence
  source 1..675: mol_type = other DNA
atggccggaattacaacaatcgaggccgtcaagagaaaaatacaggtccttcagcagcaggccgacgatgccgaggagcgcgctgaaaggttgcaaagggaggtcgagggcgaacgcagggctcgagagcaacgattagctactgcgctgcaaaaactggaagaggccgagaaagcggcagacgagagcgaacgcggaatgaaggtgattgagaatagagctctgaaagatgaggagaagatggagcttcaagaaatacaactcaaggaagctaagcatattgccgaagaggccgatagaaaatacgaggaggttgctaggaaactcgtcattatcgagggcgacctagagcgtacagaagagcgcgcagagttggccgaatcccgatgtagagaaatggacgagcagattagactgatggatcagaacttgaagtgcctcagtgctgctgaggagaagtatagccaaaaagaagacaagtacgaggaggagatcaaaatcctgactgacaaactgaaagaagcagagacaagagccgagtttgccgaaagaagcgtagccaaactcgagaaaacaattgacgacctggaggacaaactcaaatgtacaaaggaggagcatctgtgcacccagagaatgctggaccagactctcctggatctgaacgagatgtag

SEQ ID NO: 245326 - DNA, 858 bp, synthetic construct
  misc_feature 1..858: note = Description of Artificial Sequence: Synthetic coding sequence
  source 1..858: mol_type = other DNA
atgatggaggccatcaagaagaaaatgcagatgctgaaattagacaaggaaaacgccctggatcgagccgagcaggccgaagccgagcagaagcaagcagaggagcggagtaaacaacttgaggatgagcttgcggcaatgcagaaaaaactgaagggtacagaggacgagctagataaatattctgaagcactgaaagacgctcaggaaaaactggaactggccgagaagaaggctgcagacgcggaagccgaggtcgccagcctgaaccgcagaatccaattagtggaggaagagctggaccgggcacaggagaggctcgctacggccctgcaaaagttggaggaggccgaaaaggccgcagatgagagcgaacggggaatgaaagtcattgagaatagggcgctcaaagatgaagagaagatggagctgcaggaaattcagttaaaagaagccaaacacatcgcagaggaagcagacagaaagtacgaagaggtagccaggaagctcgtaatcattgagggcgatctggagcggaccgaggagcgcgctgaactggctgaatctaaatgtagcgagcttgaggaagaattgaaaaatgtgaccaacaacctcaaatctctggaggcacaagccgaaaaatatagtcagaaggaagacaagtatgaggaagaaatcaaaatactgacagataaactgaaggaggccgagacccgagccgagtttgctgagcgtagtgtcgcgaagctggagaagactatcgacgacctggaagacgaattatatgcccagaaactgaagtacaaggccataagtgaagagctagaccacgctcttaacgacatgacgtctatttag

SEQ ID NO: 245327 - DNA, 744 bp, synthetic construct
  misc_feature 1..744: note = Description of Artificial Sequence: Synthetic coding sequence
  source 1..744: mol_type = other DNA
atggccggaataacaacaatcgaggccgtcaagcgcaagatccaggttcttcaacagcaggcagatgacgctgaagagagggcggagcgcttgcagcgtgaggtcgaaggggagcggagagcccgtgagcaagctgaggcagaagtggcatctcttaaccgtagaatccagctggtggaagaagaactcgacagggcccaggagcggcttgcaaccgccctccagaaactggaagaagctgaaaaagcggctgatgaatccgaacgtgggatgaaggtgatagagaatcgtgctctgaaagacgaagaaaagatggaactgcaagagatccaactgaaagaggcaaagcacattgccgaggaggccgaccggaagtacgaagaggtagccaggaagttagtaataatagagggcgacctagagcggactgaggagcgcgctgagcttgccgagagcagatgcagagagatggacgagcagatcaggctgatggaccagaatctgaagtgtttgagcgctgcggaagagaagtatagccagaaggaagataagtacgaagaggaaatcaagatccttaccgacaaattaaaggaggcagagactagggccgaattcgcagagaggtctgttgccaaacttgaaaaaacgatcgacgatctcgaagagcgtttgtattctcagttagaacgcaatcgtttgttatcaaacgaactgaaactcacactgcacgacctttgcgattag

SEQ ID NO: 245328 - DNA, 747 bp, synthetic construct
  misc_feature 1..747: note = Description of Artificial Sequence: Synthetic coding sequence
  source 1..747: mol_type = other DNA
atggctggaattactactattgaggccgtgaagcgtaaaattcaggtgttgcaacagcaggccgatgatgccgaggaacgcgctgagcggctccagagggaagtagagggggaacgcagagctagggagcaagcagaggccgaggtagctagcttgaaccgacggattcagctcgtggaggaagagctggaccgggcacaagaacggctagcaaccgcactacagaaactggaagaagcagagaaagccgctgatgagtcagagcgcggaatgaaggtcattgaaaacagggcacttaaagacgaggaaaaaatggagctgcaggagatccaactgaaagaggcgaagcacatcgccgaagaggccgatagaaagtatgaggaagtggccaggaagcttgtaattatagaaggcgatctcgagagaaccgaggaacgcgctgagctggccgaatcacgctgcagggagatggacgaacagattcggctgatggaccagaacctgaagtgcctatccgctgctgaagagaaatacagccaaaaagaagacaaatacgaagaggagatcaagatcctcacagataagctgaaagaagccgagacacgggcagagttcgccgaacggagcgtggcaaagctggagaagacaattgacgatctggaagataaactgaagtgtaccaaagaggagcatctctgcacccagcgaatgttagaccaaacactgctggatctcaacgagatgtag

SEQ ID NO: 245329 - DNA, 228 bp, synthetic construct
  misc_feature 1..228: note = Description of Artificial Sequence: Synthetic coding sequence
  source 1..228: mol_type = other DNA
atgatggaggccatcaagaagaagatgcagatgctaaaactcgacaaggagaacgcactggacagggctgagcaggccgaagccgaacagaagcaagccgaggaacgctcaaaacaactggaagacgaactggccgcaatgcagaagaaactcaaaggaacggaggatgagctggacaagtatagcgaggctctaaaggatgcccaggaaaaactggagcttgcctag

SEQ ID NO: 245330 - DNA, 747 bp, synthetic construct
  misc_feature 1..747: note = Description of Artificial Sequence: Synthetic coding sequence
  source 1..747: mol_type = other DNA
atggctggtcttaactccctggaggccgtgaagaggaagatccaggctctccagcagcaagccgacgaagccgaggaccgcgctcagggcctccagcgcgagctcgacggcgagcgcgagcggagggagaaggcagagggcgatgtagccgctctaaaccgaaggatccagctcgtcgaagaggagctcgacagggcccaggaaaggctcgccaccgctttacaaaaattggaggaagcagaaaaagccgctgacgagagcgaaagggggatgaaggtaatcgaaaatagagcgatgaaagatgaggaaaagatggagattcaggaaatgcagctcaaagaggccaaacacattgccgaagaagcagaccgtaagtacgaggaggtcgccaggaagctggtcatcctagagggagagctggaaagggctgaggaaagagctgaggtgtcggaacttaagtgtggcgacctggaggaggaactgaagaatgtgaccaacaatctgaagagcctggaggcagccagcgagaagtactccgaaaaggaggacaagtacgaggaagaaatcaagctgctctcagacaaactaaaagaggcagagactcgcgctgagttcgccgagcggactgttgccaagctcgagaagactatcgacgatctggaagagaagctcgcacaggcgaaggaggagaatgtgggcttgcaccagacattggaccagactctgaatgaacttaactgtatctag

SEQ ID NO: 245331 - DNA, 855 bp, synthetic construct
  misc_feature 1..855: note = Description of Artificial Sequence: Synthetic coding sequence
  source 1..855: mol_type = other DNA
atggaggccattaagaagaaaatgcagatgttaaagctagacaaagagaatgccatcgaccgggctgagcaggccgaagcagacaaaaaagccgctgaggacaagtgcaagcaggtggaagaggagctgacacatctgcagaagaagctcaaagggacagaagatgagctggataagtattctgaggatctcaaggacgcccaggaaaagctagagctgacggaaaagaaggccagcgatgccgagggtgacgttgccgctctgaatcgccgaattcagctggtggaagaggagctggaccgcgctcaggagagactggcaactgctctgcaaaagctggaggaggccgaaaaagcagctgacgagtcggagagaggaatgaaagtaattgaaaaccgagccatgaaggacgaggagaagatggaaatccaggaaatgcagttgaaagaggccaagcatatcgcggaagaagccgatcggaaatatgaagaggtggcccgaaagcttgtgatactcgagggggaactggaacgcgctgaagagagagccgaggtgtccgaacttaagtgcggcgatctggaggaagagctcaaaaatgttacaaacaaccttaagagcttggaggctgcaagcgagaaatatagtgagaaggaggacaagtacgaggaagaaattaaactgctaagcgacaaactgaaggaagctgagacacgagccgaatttgccgagcgtactgtcgctaagctggagaaaactatcgacgacttggaggagaaactggctcaggctaaggaggagaatgtggggctgcaccagaccctggatcagacactaaacgagttaaactgtatctag

SEQ ID NO: 245332 - DNA, 855 bp, synthetic construct
  misc_feature 1..855: note = Description of Artificial Sequence: Synthetic coding sequence
  source 1..855: mol_type = other DNA
atggaggctatcaagaaaaagatgcagatgttaaagctggataaagaaaatgcaatcgatagggccgagcaggccgaggcggacaagaaggcagctgaggataagtgcaaacaagtggaggaggaactgacccatctgcagaagaagttgaaaggcactgaggacgaactggataaatattcagaggaccttaaggatgcccaggagaagctagaattaacagagaagaaagcttcagacgccgaaggggacgttgcagccctcaaccgcagaatacagctggtggaggaggagctggacagggcacaggaacgcctggcaacagcgttgcagaagttggaggaggccgagaaagccgcagacgaaagtgagagggggatgaaagtgattgagaatcgcgcaatgaaagacgaggagaagatggagatacaggaaatgcagcttaaggaggcgaagcacatagccgaagaggccgacagaaagtacgaagaggttgccaggaagctcgtcatcctcgagggggaactcgaacgagctgaggagagggccgaggtctctgagctgaagtgcggggatctagaggaggaactgaagaacgtcaccaacaacctgaaaagcctcgaggctgcgtccgaaaaatactcggaaaaggaagataaatatgaagaagaaattaagctgctgtcagacaagcttaaggaagctgagaccagagccgagtttgccgagagaaccgtggccaagctggaaaaaacgattgatgatctggaagaaaaactagcacaagctaaggaggagaatgtgggcctgcatcagacgcttgatcaaacgctgaacgaactcaattgcatttag

SEQ ID NO: 245333 - DNA, 2244 bp, synthetic construct
  misc_feature 1..2244: note = Description of Artificial Sequence: Synthetic coding sequence
  source 1..2244: mol_type = other DNA
atgggtcgcttaaatgagcagcgactattccaacctgatctctgcgacgtcgacttggtgctcgtgcctcaacggagcgtcttcccagctcataagggggtgctggctgcatactcacagttttttcattcgctgtttacacagaataaacagctgcagcgtgtggaacttagtctcgaggccctggccccaggaggcctgcagcagatcttgaactttatatacacaagcaagctgctggtcaacgcggctaacgtccacgaagtgttatcagctgcttccctgctccagatggccgatatcgcagccagctgccaagaactgttggatgccagaagccttggaccccctggaccgggaacagtcgcactcgcccagcctgctgccagctgcactcctgctgcaccaccatattactgtgatatcaagcaagaagccgatacccctggcctccctaaaatttatgccagggagggtcccgacccctattcagtcagggttgaagacggcgcaggaaccgctggaggcacagtgcctgctacgatcgggcctgctcagcccttcttcaaggaggagaaggaggggggagtcgaggaggcgggaggaccacccgcttcactctgtaaacttgaagggggtgaagaattggaggaggaactgggcggtagcgggacctacagcaggcgagaacaatctcagatcatcgttgaggtcaatctcaacaatcaaacactccacgtgtccacaggacccgaaggcaaacccggtgccggaccgtcacccgctaccgtcgtgctcggccgagaagacggacttcagcgccactccgacgaggaagaggaagacgatgaagaggaggaagaagaagaagaagaagaggagggtggcggttccggcagggaagaggaggaagaggaggagggaggaagccaaggtgaagaggaagaggaggaagaggacgggcacagtgagcaagaggaggaagaggaggaggaagaggaagaggggccatctgaacaggatcaagaaagctccgaagaagaggagggcgaggagggcgaggccggaggtaagcaggggccacgcggttcccggagctcccgagctgaccctcccccacacagccatatggccacacgcagcagagagaatgccagacgacgcggtacgcccgagcccgaggaggctgggaggcgtggaggaaagcggccaaagccaccacccggtgtagcttccgccagtgctagaggccctccagctacagatggactgggtgccaaggtaaagctggaggaaaaacagcatcacccatgccaaaaatgtccacgcgtctttaacaatcggtggtatctggaaaaacatatgaatgtgacgcattccagaatgcagatctgcgaccagtgtgggaagcgattcctgctggagagcgagttgctcctgcaccgccagacagactgtgagagaaatattcagtgtgtgacatgtggcaaagccttcaagaagctgtggtctctgcacgagcacaataagattgtgcatggatacgcagaaaagaagtttagctgcgaaatctgcgaaaaaaaattctacaccatggctcacgttcgtaaacatatggtggcccacacaaaagacatgccctttacctgcgagacctgcggaaaatccttcaaaaggtctatgagtctcaaggtccactcccttcaacactccggcgaaaaacctttcaggtgcgaaaactgcaacgagagatttcagtataaatatcagctcagatctcacatgagtatccacattggacataaacaattcatgtgtcagtggtgcggaaaagactttaacatgaaacagtacttcgatgaacacatgaagacccacacgggggagaaaccttacatctgcgaaatctgcggaaaatcgttcacaagccgtcctaatatgaagcgccatcgccgaactcatacgggagagaaaccctatccctgcgacgtttgtgggcaaaggttccgtttctcgaatatgctcaaggcgcacaaggagaagtgctttagggtctcccacacattggccggagatggggttcccgcagcacctggactgcccccaactcagcctcaggcgcatgcactgcctttgttaccagggctgcctcaaactctgcccccacccccacatctccctccgccaccccctctgttcccaactacagcctcccctggtggacgaatgaatgccaacaactag

SEQ ID NO: 245334 - DNA, 483 bp, synthetic construct
  misc_feature 1..483: note = Description of Artificial Sequence: Synthetic coding sequence
  source 1..483: mol_type = other DNA
atgaccgatcagcaagctgaggccagatcctacctctcagaggaaatgatagcggagtttaaagctgcgtttgacatgttcgacgccgacggaggcggagacatttcagttaaggaactgggaaccgtgatgcggatgctcggccagacacctactaaggaagagcttgacgcaattatcgaggaagtcgacgaagatggaagcggtaccatcgactttgaagaattccttgttatgatggtcaggcagatgaaagaagacgcaaaaggcaagagcgaggaggaattggcagagtgctttcgaatattcgatcgcaatgcggatgggtacattgatcctgaggagctcgctgaaatcttcagagccagcggagagcacgtcacggatgaggagattgaatccctcatgaaggatggagacaaaaacaacgacggtcgaatcgattttgacgaattcctgaaaatgatggaaggtgtccagtag

SEQ ID NO: 245335 - DNA, 438 bp, synthetic construct
  misc_feature 1..438: note = Description of Artificial Sequence: Synthetic coding sequence
  source 1..438: mol_type = other DNA
atgattgctgaatttaaagccgcttttgatatgtttgacgcagatggcggaggagacatatctgtcaaggaactgggaaccgtgatgcggatgctcggacagacccccaccaaggaggagctcgatgcaatcatcgaggaagttgacgaagatggcagcggaacaatcgattttgaggaattccttgttatgatggtgagacagatgaaggaggatgccaagggcaaatcagaggaagaactagccgagtgcttcagaatctttgaccggaacgcagatggctacattgaccccgaggaattggccgagatattcagggcttccggagaacacgtgacggatgaggaaatagaatccttgatgaaagatggcgataagaacaacgacggccgaattgattttgacgagttccttaaaatgatggagggggtgcagtag

SEQ ID NO: 245336 - DNA, 564 bp, synthetic construct
  misc_feature 1..564: note = Description of Artificial Sequence: Synthetic coding sequence
  source 1..564: mol_type = other DNA
atgcctgaggtagaaagaaagccaaagattacagcatctcgaaaactgctactgaagtctcttatgcttgcaaaggctaaagaatgttgggaacaggagcatgaggaaagagaggccgagaaggtaaggtatctcgcggaacggatccctaccctgcagacccggggtctgagcctcagcgcactgcaagacctgtgccgggagctccatgccaaggtggaggtcgtcgatgaagaacgatatgacatagaagccaaatgcctgcataacaccagagagatcaaggatcttaaactgaaggttatggacttaaggggcaaatttaaacggcctccactgcgcagagtccgcgtaagcgcggatgccatgctaagagctctgcttgggtccaaacataaggtgtctatggaccttagagcaaacttgaaatccgtaaaaaaagaggacaccgagaaagagagacccgtggaggtgggcgactggcgcaagaacgttgaagctatgagcggcatggagggtcggaaaaagatgttcgatgcagcaaaatcacccacctcccagtag

SEQ ID NO: 245337 - DNA, 564 bp, synthetic construct
  misc_feature 1..564: note = Description of Artificial Sequence: Synthetic coding sequence
  source 1..564: mol_type = other DNA
atgcctgaggtacagcgcaagcccaaaatcactgcctcccggaagttactgctgaaatctctgatgctggccaaggcgaaagagtgttgggagcaggagcatgaggaaagagaagctgagaaggtgagatatctggccgagaggatcccaactctgcagactcgaggcctaagtctgtccgccctacaagatctgtgtcgcgaacttcacgccaaggtcgaagtcgtggatgaagagaggtatgatatcgaagctaaatgtcttcataatacccgcgagatcaaggaccttaagttaaaggtgatggatctaagaggcaagttcaagcgtccaccgttgcggagggttagagtttcagccgacgccatgctgagagcacttctggggtctaagcacaaagtcagtatggacctgcgagccaatcttaaaagtgtcaagaaagaggatacagagaaagagcgccctgtggaggttggcgattggagaaaaaatgtggaggctatgtccggtatggagggccgtaaaaagatgttcgacgccgctaaaagtcctacctctcagtag

SEQ ID NO: 245338 - DNA, 564 bp, synthetic construct
  misc_feature 1..564: note = Description of Artificial Sequence: Synthetic coding sequence
  source 1..564: mol_type = other DNA
atgccggaggtagaacggaaacctaaaattactgccagccggaagctcctcctgaagtccctgatgctggcgaaggcgaaggagtgttgggagcaggagcatgaggaaagggaagccgagaaagttcgctatctggctgagagaatacctaccctccagaccagagggctgtctctatccgccctgcaggacctttgcagagaactgcacgctaaggtcgaagtagtggacgaagagcggtacgacatcgaggctaaatgcttgcacaatactcgcgagatcaaggatctgaaactgaaagtcatggatcttcgcggaaagttcaaacgccctcccttaaggagagtacgggtgtccgccgatgctatgctgcgcgcactgctgggatcaaagcataaagtatccatggacctgagagccaacctgaagtctgttaagaaggaagacacggagaaggagcgacctgttgaagtgggtgattggagaaagaatgtggaggccatgagcggtatggagggacggaagaagatgtttgacgccgcaaagagcccgactagtcagtag

SEQ ID NO: 245339 - DNA, 564 bp, synthetic construct
  misc_feature 1..564: note = Description of Artificial Sequence: Synthetic coding sequence
  source 1..564: mol_type = other DNA
atgccagaagtcgagagaaagcccaaaatcactgcatcacggaaactgttgttaaaaagcctgatgctggccaaagcgaaggaatgttgggagcaggaacacgaagagcgcgaggccgaaaaggtcagatatctggcggagcgcattccaacacttcaaaccagagggttgtcgctgagtgccttgcaggatctatgtagagagcttcatgccaaggtcgaggttgtcgacgaggagcgttatgacatcgaggctaagtgcctacacaatacccgcgagatcaaagacctgaagcttaaagtgatggacctaaggggcaagttcaagcggcctcccttacgcagggtcagagtctcggcggatgccatgcttagagccctcctgggatcaaagcacaaggtgtcaatggatctgcgcgcaaatctgaagtctgtcaagaaggaagacacagaaaaggagagacctgtggaagtgggggattggaggaagaatgtcgaggcaatgtccgggatggaaggcaggaagaaaatgttcgacgcggctaaaagccctacaagtcagtag

SEQ ID NO: 245340 - DNA, 564 bp, synthetic construct
  misc_feature 1..564: note = Description of Artificial Sequence: Synthetic coding sequence
  source 1..564: mol_type = other DNA
atgccagaagtgcaacgaaaaccaaaaatcaccgcatcacgcaagctgctcctcaaatcactcatgctcgccaaagccaaggagtgttgggaacaggagcacgaggagcgagaggcagagaaggtgcggtatctggccgagagaattcccactttacaaaccagggggctgtcactgagtgccttgcaggacttgtgcagggaattgcacgcgaaagttgaggtggtggatgaagagagatacgacatcgaagctaagtgcttacataatactcgtgaaatcaaggatctgaaactcaaggtaatggacctacgcggtaagtttaagagaccacccctccggagggttcgcgttagcgccgacgctatgctccgcgcattgttaggatcgaaacacaaggtcagtatggatttgagagccaacctaaaaagtgtgaagaaagaggacaccgagaaggaaagacccgttgaggtcggcgactggcggaagaacgtggaggctatgagcgggatggagggacgtaagaagatgtttgatgccgctaagagtcctacatcccagtag

SEQ ID NO: 245341 - DNA, 414 bp, synthetic construct
  misc_feature 1..414: note = Description of Artificial Sequence: Synthetic coding sequence
  source 1..414: mol_type = other DNA
atgccagaggttgagcggaagccaaaaataactgcgtctcgtaaattgcttctgaaatctctgatgcttgctaaagccaaagagtgctgggaacaagaacatgaagagcgcgaggctgagaaagtccggtaccttgccgaacgcatcccaactctacaaacgagggggctgtccctgagcgcccttcaggacctgtgtagagagcttcacgctaaggtcgaagtggtggatgaggagcgttacgatatcgaggccaagtgcctccataacacacgagagatcaaggatctaaaactgaaggtgatggacctgagaggcaagttcaagcggccacccttgcggagggtgagggtgtctgcggatgctatgctgagggctctgctgggttctaagcacaaggttagtatggactag

SEQ ID NO: 245342 - DNA, 549 bp, synthetic construct
  misc_feature 1..549: note = Description of Artificial Sequence: Synthetic coding sequence
  source 1..549: mol_type = other DNA
atgtcacagtgcaagaaacggaatagagctatcactgcgagaagacagcatcttaaaagcgtgatgctgcaaattgccgctacagagctagaaaaggaggaatcccgtcgggaggctgaaaagcagaattatcttgccgaacattgccctcctcttcatatccctggctccatgtccgaggtgcaggaactctgcaaacagctgcatgcgaagatagacgccgcagaagaggagaaatacgatatggaggtaagagtacagaagacctcaaaggaactggaagacatgaatcaaaaactcttcgatttgcgcggtaaatttaagaggcctccccttcgccgtgtgcgcatgagtgcggacgcaatgcttaaagccctactaggaagcaagcataaggtgtgcatggacctccgggctaatctgaagcaggtgaagaaagaggatacagaaaaggagcgggacctgcgcgacgtgggggactggaggaagaacatcgaggagaaaagcggaatggaagggaggaagaaaatgtttgagagcgaatcatag

SEQ ID NO: 245343 - DNA, 549 bp, synthetic construct
  misc_feature 1..549: note = Description of Artificial Sequence: Synthetic coding sequence
  source 1..549: mol_type = other DNA
atgggggacgaagagaagcggaaccgggcaattaccgccaggagacagcacctaaaaagtgttatgctccaaattgcagccaccgagctggaaaaggaggaatcaaggagggaagctgagaaacaaaattacctagccgagcattgccctcccttgcatataccaggctctatgagcgaggtccaggaactgtgcaaacagctccatgcgaaaatagatgccgcagaagaagagaagtacgatatggaagtgagggtacaaaagacatcgaaagagctagaagatatgaaccagaagctgtttgacttgaggggcaagtttaaacgcccacccctgcgcagggttcgaatgagcgccgatgcaatgctgaaggccttactgggttccaaacacaaggtgtgtatggatctgagggctaacctaaagcaagttaaaaaggaagacactgaaaaggagcgcgatctccgcgatgtgggagattggcgcaaaaacattgaggaaaaatctggaatggaaggccgtaagaaaatgttcgagtcagagtcttag

SEQ ID NO: 245344 - DNA, 549 bp, synthetic construct
  misc_feature 1..549: note = Description of Artificial Sequence: Synthetic coding sequence
  source 1..549: mol_type = other DNA
atgggtgatgaggagaaacggaatagagccattacagccagaaggcaacatctgaaaagcgtgatgcttcagatcgcggctaccgaactcgagaaggaagagagcagacgcgaagccgagaagcagaactacttggctgagcactgcccacctctgcatattccagggagtatgagcgaagttcaggagctttgcaagcagttgcacgcaaagatagacgcagcggaggaagaaaagtatgatatggaggtgcgtgtacaaaagacaagtaaggaactggaggacatgaaccagaagctgttcgatctgcgcggaaagttcaagaggccacctctgcgtagggtacgcatgagcgccgatgcgatgctaaaagccctgctgggcagtaagcacaaggtctgcatggacttgagagctaatctgaaacaggttaagaaggaagacaccgaaaaggagcgagatttacgggacgtgggagattggcggaagaacattgaagaaaaatccggtatggaaggcaggaagaaaatgttcgagagtgagagttag

SEQ ID NO: 245345 - DNA, 549 bp, synthetic construct
  misc_feature 1..549: note = Description of Artificial Sequence: Synthetic coding sequence
  source 1..549: mol_type = other DNA
atgggggatgaggaaaagcgcaaccgggcaatcacggctaggagacaacacctcaaatccgttatgctccagatagccgcaacggagcttgagaaggaggaatcgagaagagaagccgagaagcagaattatctagcggagcattgtccacccctccacatcccagggtcgatgtctgaggttcaggagctgtgtaagcagctacacgccaagatcgatgcggcagaggaagagaaatacgatatggaagtgagagtacagaagacttctaaggaactggaagacatgaaccagaagctgtttgatctccgcggtaaatttaaacggcctccacttcgccgagtgcggatgtctgccgacgcaatgctgaaggctcttttgggaagtaagcataaggtgtgtatggatctcagagccaatcttaagcaggtgaaaaaggaagacacagagaaagagcgagacctgcgcgacgttggggactggcggaagaacattgaggagaagtctgggatggagggtcgaaagaagatgttcgagtcagagagttag

SEQ ID NO: 245346 - DNA, 633 bp, synthetic construct
  misc_feature 1..633: note = Description of Artificial Sequence: Synthetic coding sequence
  source 1..633: mol_type = other DNA
atggctgacggatctagcgatgcggcaagggagcccagaccggcacccgcacccatacgaaggcgaagtagcaactatcgcgcatacgccactgaaccacacgccaaaaaaaagagtaaaatatctgcaagcaggaaacttcagctgaagaccctccttctgcagatagccaagcaggaattagaacgggaggctgaggagcgccgtggcgagaagggtcgggctttgtctaccagatgtcagccgctggagttagccggactcggattcgcagagctacaagatctttgccggcaattgcatgcgcgagtcgacaaagtggacgaggagcggtacgatattgaggctaaagtcacgaaaaacattactgaaatcgcggacctcacccagaaaatctttgaccttagaggtaaatttaagaggcctacgctgcgtcgcgttcgaatttccgctgacgctatgatgcaagcattgctcggcgcacgcgcaaaagagagcttggacttgagggcccatctgaagcaagtgaagaaagaggacacagagaaggaaaacagagaagtgggagactggcggaagaacatcgacgctctttctggaatggaagggcgtaagaagaagttcgagagttag

SEQ ID NO: 245347 - DNA, 837 bp, synthetic construct
  misc_feature 1..837: note = Description of Artificial Sequence: Synthetic coding sequence
  source 1..837: mol_type = other DNA
atgtctgacacagaggaacaggagtatgaagaggaacaaccggaggaagaggctgccgaagaagaagaagaggctccggaggagcctgagcccgtcgctgaacctgaagaggagaggccaaaaccaagtagacccgtcgtccccccactaatccctccaaagattccggaaggggaaagggtcgactttgacgacattcatcggaagaggatggaaaaagacctgcttgagcttcaaacactgatagacgtccacttcgagcagcgcaagaaggaagaagaggaactcgtagcattaaaagagaggattgaacggagaaggagcgagagagccgagcagcagagattccggacagagaaggaacgcgaacgtcaggcgaaactcgcagaggagaagatgagaaaagaggaagaagaggcaaagaagagagccgaggatgacgccaaaaagaaaaaggtcttatccaatatgggcgcacatttcggaggttatctcgtcaaggccgaacaaaaacgaggcaaaagacagaccggacgcgagatgaaggttaggattctgtctgaaagaaaaaagcctctggatatcgattacatgggggaggaacagctgcgcgctcgtagtgcctggctaccaccaagccaaccctcatgtcctgcgagagagaaggcacaggagctgtctgactggatacaccagctggaaagcgagaagtttgatctgatggccaaactgaaacaacaaaagtatgaaatcaatgtactgtacaatagaatctctcacgcgcagaaattccgaaagggagccggtaaagggagggtagggggtcggtggaaatag

SEQ ID NO: 245348 - DNA, 837 bp, synthetic construct
  misc_feature 1..837: note = Description of Artificial Sequence: Synthetic coding sequence
  source 1..837: mol_type = other DNA
atgagcgatactgaagagcaggagtacgaggaggaacagcccgaggaagaggccgctgaggaggaagaagaggcaccggaggagcccgaacccgtggcggagcccgaagaagagcggccaaagcctagtagacccgtggtccctcctctgataccacccaaaatccccgagggcgagcgcgtggactttgacgacattcacagaaaacgcatggaaaaggacctgcttgagctacagactttgattgacgtacacttcgagcagagaaagaaagaagaggaggagctcgtggctctaaaggagcgcattgagaggcgaagaagcgaaagggccgagcaacaacgctttaggacagagaaggagagagaacgccaggccaaactcgccgaagagaagatgagaaaggaagaggaggaagcaaagaagagggccgaagacgacgctaagaagaaaaaggtgctttctaatatgggcgctcactttgggggataccttgtgaaggccgaacagaagcggggaaaaagacagaccggcagggaaatgaaagtgaggatcctctccgaaagaaagaaacctctagatattgattacatgggggaggaacagctccgcgctcggagtgcctggctgccacctagtcagcccagttgcccagcgcgtgaaaaggcccaggagttgagtgactggattcatcagttagaaagtgagaagttcgatctcatggctaagctgaaacagcagaagtacgaaattaatgttctctacaatagaatatctcacgcgcaaaagttcaggaaaggcgcaggcaaaggacgagttggcggacggtggaagtag

SEQ ID NO: 245349 - DNA, 756 bp, synthetic construct
  misc_feature 1..756: note = Description of Artificial Sequence: Synthetic coding sequence
  source 1..756: mol_type = other DNA
atgagtgacaccgaagagcaggagtatgaggaggaacagcctgaagaagaggcggctgaagaggaagaagaagaggaagagcggcctaagcccagcaggccagtggttccccctttgatcccccctaaaattcctgaaggagagagggtcgacttcgacgacattcaccggaagcgcatggaaaaggacttgctggagttgcagacactgattgacgtgcacttcgaacaacggaaaaaggaagaagaagagctggtggcactgaaggaaagaatcgaacgtcgccgaagcgaacgcgcagaacagcagcggtttcgcacagaaaaggagcgcgagcgacaggccaagctggctgaagagaaaatgcgcaaggaagaggaggaggccaagaagagggcggaggatgacgctaagaaaaagaaggtcctgtctaatatgggagcgcatttcgggggttacttagttaaggcagaacagaaacgcggaaagaggcaaacaggtcgggagatgaaggtgcggatcttgtctgaacgaaaaaaacccctggacattgattatatgggggaggaacagctccgagaaaaggcacaggaacttagtgactggatacatcagcttgagtccgaaaaatttgatcttatggccaaacttaagcagcagaaatacgagatcaatgtgttgtacaatagaatcagccacgcccaaaaattccggaaaggtgcagggaagggtagagtcggcggtaggtggaaatag

SEQ ID NO: 245350 - DNA, 522 bp, synthetic construct
  misc_feature 1..522: note = Description of Artificial Sequence: Synthetic coding sequence
  source 1..522: mol_type = other DNA
tctaaagcgcagccgcaggactcacaacatctgcggcattcactcgggcgtacccgcatgtcagacacggaagaacaagaatacgaagaagagcagcccgaagaggaagcagcagaggaggaagaggaaggcgaggtccctgattcggcagaagaagagagacctaaaccgagcaggcctgtggttccccctctcattcccccaaaaattcccgagggcgaacgggtggattttgatgacattcacaggaagagaatggagaaggatctactggagctgcagactcttatcgatgtgcatttcgagcagcggaagaaggaggaggaggaacttgtcgcgcttaaggaaagaatcgagaggaggcgcagcgaacgggctgagcaacagaggtttcggactgagaaggaacgggaaaggcaggctaagctggcggaagaaaagatgcgcaaagaagaagaggaagctaaaaagcgtgccgaggacgacgctaaaaagaaaaaaaaaaaaaaaaagaaaaaatag

SEQ ID NO: 245351 - DNA, 756 bp, synthetic construct
  misc_feature 1..756: note = Description of Artificial Sequence: Synthetic coding sequence
  source 1..756: mol_type = other DNA
atgagcgacactgaagaacaggaatatgaggaggagcagcccgaggaagaagcagctgaggaggaggaagaagctcctgaagagcctgagccagttcgccctgtagtgcctcctctcatccccccaaaaatccccgaaggcgaacgcgtggattttgacgacattcaccgcaagcgcatggagaaggacttgcttgagctgcaaactttaatcgacgtccatttcgagcagcgcaagaaagaagaagaggagctcgttgcgctgaaagaacgcatcgagagacgcagaagcgagcgtgctgaacagcagagatttcggactgaaaaggaacgggaacggcaggctaaactcgccgaggagaaaatgcggaaggaggaggaagaggcgaaaaagcgcgctgaagacgatgccaaaaaaaaaaaggtgctttccaacatgggggcacattttggcggatatctagtgaaggcagaacaaaagcggggtaaaagacaaactgggagagaaatgaaagtaagaatattaagtgagcggaaaaagccactagacatagattacatgggagaagagcagctgagagaaaaagcccaggagctgtctgactggatacaccagcttgagagcgaaaaattcgacctaatggccaagctgaaacaacagaagtacgagattaatgtgctgtacaatcgcatctcacatgcacagaagttccggaaaggagctggtaaggggagggtgggcggacgatggaaatag

SEQ ID NO: 245352 - DNA, 579 bp, synthetic construct
  misc_feature 1..579: note = Description of Artificial Sequence: Synthetic coding sequence
  source 1..579: mol_type = other DNA
atggagaaggacttgttggagctccagaccctgattgatgtacactttgaacaacggaagaaggaagaagaggagctcgtcgctcttaaggaacgaatcgagcgcagacggagtgagagagccgagcaacaacgtttcaggacagagaaagagcgcgaacggcaggccaagctcgccgaagagaaaatgcgtaaggaggaagaagaggcaaaaaaacgggctgaggatgacgctaagaagaaaaaggtgctgagcaatatgggtgctcactttgggggttatctggttaaggccgaacagaaacggggaaagcgccaaacagggcgagagatgaaagtgaggattctgagtgagcgcaagaagcccctggacatcgattacatgggcgaagagcagctacgggaaaaggcccaggaattatcagattggatccaccaactcgaatctgagaagttcgacttgatggcgaagttgaagcagcagaaatatgagataaatgtgctgtataaccggattagccatgctcaaaaattccggaaaggtgcaggcaagggacgcgtgggcggtcggtggaagtag

SEQ ID NO: 245353 - DNA, 882 bp, synthetic construct
  misc_feature 1..882: note = Description of Artificial Sequence: Synthetic coding sequence
  source 1..882: mol_type = other DNA
atgtctgatatcgaggaggtggtcgaagagtacgaagaggagcacccagaggaagaggaggattggagggaggatgaggacgagcaggaagaggccgctgaagaggacgccgaggcagaggccgagaccgaggagacccgcgctgaagaagacgaggaagaggaagaagccaaagaggcggaggatggacccatggaggagagcaaaccaaaacccagaagctttatgcccaacctggttccaccgaaaatcccggacggagagcgagttgatttcgacgacattcaccgcaaacgcatggaaaaggatcttaatgaactgcaggccctgatagaggcccattttgagaacagaaaaaaagaggaggaagagctcgtgtctctcaaagatcgcatagagcgcaggagagctgaaagggccgaacagcagagaatacggaatgagagggaaaaggaacggcaaaataggttagcagaagagagggcccgtcgagaggaagaggaaaaccgcagaaaggctgaggatgaggctcggaaaaagaaagcattatctaatatgatgcattttggcggatacatccaaaaacaggcgcaaacggagagaaaaagcggaaagcggcagaccgagagagaaaaaaagaaaaagatcctggcggagcgcaggaaggtcctcgcaatagatcacctgaacgaggatcagttgcgggagaaggcgaaggaattgtggcagagtatttataatctggaggccgagaaatttgatctccaggagaagttcaaacagcagaaatatgaaattaatgtgctccgtaacaggataaacgataaccaaaaggtctcaaaaacaagagggaaagcaaaggttacgggaaggtggaagtag

SEQ ID NO: 245354 - DNA, 600 bp, synthetic construct
  misc_feature 1..600: note = Description of Artificial Sequence: Synthetic coding sequence
  source 1..600: mol_type = other DNA
atgtcagatattgaggaggtggtggaagagtatgaagaagaaatggcggctccccaacatcaggaagaagccgctgaagaagatgccgaagctgaagccgagacagaagagacccgggctgaagacgaagaagaagaggaagccaaggaagcggaagacggaccaatggaagagagcaagcctaagccaaggtcctttatgcctaatctggtgcctccaaaaattcctgacggcgaacgtgttgatttcgatgacatacaccggaagaggatggagaaagacctgaatgaactccaggcactgatagaggcccatttcgagaacagaaagaaggaggaggaggagctcgtctctctgaaagataggatcgaacgtagaagagccgagagagcagaacagcaaagaatcaggaacgaaagggaaaaggagcggcagaataggctggcagaggaaagagcaagaagggaagaagaagagaatcgcaggaaagcagaggacgaggcgcgaaaaaagaaggcactgagcaatatgatgcactttggtggctatatccaaaagcatccacccgaccgagctgagaaatgggaggaggctgactag

SEQ ID NO: 245355 - DNA, 852 bp, synthetic construct
  misc_feature 1..852: note = Description of Artificial Sequence: Synthetic coding sequence
  source 1..852: mol_type = other DNA
atgagtgacatcgaggaagtggtggaggaatacgaggaagaggcgaagctcgaacaggaagaggccgctgaagaggatgccgaggcggaggctgagactgaggaaacccgagccgaagaggatgaggaggaagaggaggcgaaggaggctgaggacggcccaatggaggagtccaaaccaaagccaagatcctttatgcctaatcttgtacctcccaaaatccctgacggcgagcgagtggactttgacgacatacacaggaaacggatggagaaagatcttaacgaactgcaggcactaattgaagctcacttcgagaaccgcaagaaggaagaagaagaacttgtctccctgaaggatagaatcgaaaggaggagggccgagcgcgctgagcagcagcggatacgcaacgagagggagaaggagcggcaaaatagattagccgaggaacgcgctcggagggaagaagaggagaacagacgtaaggcagaggacgaggcgcgaaagaagaaggccctgtccaacatgatgcatttcggcggttatatccaaaaacaagcccaaaccgaacggaaatctggtaagagacaaactgaaagagaaaaaaaaaaaaaaattctagcggaaaggagaaaggtactcgcgatcgatcacttaaatgaggatcaactgcgggagaaagctaaagagctgtggcagagtatttacaatctggaggcagagaagtttgacctgcaggaaaaatttaagcagcaaaagtacgaaattaatgtactgcgcaatcgaattaatgacaaccagaaagtttccaagacacgcggaaaggcaaaggtcaccggtcggtggaaatag

SEQ ID NO: 245356 - DNA, 858 bp, synthetic construct
  misc_feature 1..858: note = Description of Artificial Sequence: Synthetic coding sequence
  source 1..858: mol_type = other DNA
atgagcgacatcgaagaagtcgtggaggagtatgaagaggaggagcaagaggaagccgctgttgaggagcaggaggaagccgcagaagaggacgcagaggcagaggccgaaactgaagaaacccgggcagaggaggacgaagaggaggaggaagctaaagaagcggaggacggacctatggaggaatcaaagccaaagccaaggtccttcatgccaaacctcgtgccccctaagattcccgacggggaacgggtcgactttgacgatattcaccgcaaaaggatggagaaggacctgaatgaactacaggctctcatcgaggcccacttcgaaaatcgcaagaaagaggaggaagagctggtgtcactaaaagatcgcattgaacgcaggcgggcagaaagggccgagcagcagagaatacgtaacgagcgcgaaaaggaaaggcagaaccggctggccgaagagcgagcaagaagggaagaagaagagaacagaagaaaagccgaagatgaggccaggaaaaagaaagctctgtctaacatgatgcacttcgggggttatattcagaagactgagagaaagtcaggtaagagacaaaccgagcgagaaaagaagaaaaagatactggctgaaagaaggaaggtactagcgatcgatcatcttaacgaagaccaattaagggagaaggcaaaggaactgtggcagtccatatacaacctagaggccgaaaagttcgacctgcaggaaaagtttaagcagcagaagtacgagatcaatgtgctgagaaatagaattaatgacaatcaaaaggtgtctaagaccaggggaaaggcaaaagtgacaggacgctggaagtag

SEQ ID NO: 245357 - DNA, 867 bp, synthetic construct
  misc_feature 1..867: note = Description of Artificial Sequence: Synthetic coding sequence
  source 1..867: mol_type = other DNA
atgagcgatatcgaggaagtggttgaagagtacgaagaagaagagcaagaggaggcggcagtcgaagagcaggaagaagccgcagaagaggacgcagaggccgaggctgagaccgaggaaacaagggccgaagaggacgaagaagaggaggaggctaaggaagctgaggatggtcccatggaggagtctaaacctaagccacggagttttatgcctaacttggttcccccaaagatcccggacggggagagggtggacttcgatgatatccacagaaaaagaatggagaaggacctgaatgagcttcaggcgctgatagaggcccactttgagaaccggaaaaaggaggaggaggaactggtctcacttaaggatcgcattgagaggagaagggcagaaagagccgagcagcagcggataaggaacgaacgagagaaagaacgccagaataggttggcggaagagcgggctcggagggaggaggaggagaaccgtcgaaaagccgaggacgaagctcggaagaaaaaggctttaagcaacatgatgcatttcgggggatacatacaaaaacaagcccaaacagaaaggaagagcgggaaacggcagaccgagagggagaagaaaaaaaagatacttgctgagagaaggaaggttctggccatcgaccacctaaatgaggatcagttgcgcgaaaaagccaaggagctttggcagagtatctacaatctcgaggctgagaaatttgacctacaggagaagttcaaacagcagaagtatgagattaacgtgttgaggaacaggatcaacgacaaccaaaaggttagcaagaccagggggaaggctaaggtgaccgggaggtggaaatag

SEQ ID NO: 245358 - DNA, 867 bp, synthetic construct
  misc_feature 1..867: note = Description of Artificial Sequence: Synthetic coding sequence
  source 1..867: mol_type = other DNA
atgtccgacatcgaggaagtagttgaggagtatgaggaagaggagcaggaggaagccgcagtagaggagcaggaagaggcagctgaagaggatgctgaagctgaagccgagaccgaggagactagagccgaggaggacgaagaagaagaggaagcaaaggaggccgaagatggtcctatggaagagtcaaagcccaagccacgctcattcatgcctaacctggtgccaccaaagatccctgacggcgagcgggttgatttcgacgacatacatagaaaacggatggaaaaagacttgaatgagttgcaggcactgatcgaagcgcatttcgaaaataggaagaaagaagaggaagaactagtgtctctgaaggatagaattgagaggaggcgagcggaaagggccgagcagcagcggatccgaaatgaaagggagaaggaacgccagaatcgtcttgctgaagaaagagcacgaagggaggaggaagaaaatcgcagaaaggcagaagatgaggcccgtaagaagaaagctctgtccaatatgatgcactttggaggctacattcaaaagcaggctcagacggaaagaaaatcagggaaaagacagacggagcgggaaaaaaagaaaaagattctggctgaaagaaggaaagtcctggccatcgaccacctgaatgaagaccagctgcgggagaaagccaaggagctctggcaaagcatatacaatctagaggcagaaaagttcgacctgcaggaaaagtttaagcagcaaaagtatgagatcaacgtgctccggaaccgcattaacgacaaccagaaagtttcaaagacccgaggaaaggctaaggttactggaaggtggaaatag

SEQ ID NO: 245359 - DNA, 681 bp, synthetic construct
  misc_feature 1..681: note = Description of Artificial Sequence: Synthetic coding sequence
  source 1..681: mol_type = other DNA
atggaagaatccaagccgaaacctcgcagcttcatgccaaacctggtgccacctaaaatacccgatggtgaacgcgtcgacttcgacgacatacatcgtaaaagaatggaaaaggatctgaatgagcttcaagccctgatcgaagcccacttcgagaacagaaaaaaagaagaggaggagctcgtgtcacttaaggataggatcgaacgccgtcgcgctgaaagagcagagcagcagcgtattagaaacgagcgtgaaaaagagaggcagaacaggctggccgaggaaagggcacgaagggaggaagaagaaaatagacggaaagccgaggatgaagctaggaagaaaaaggccctctccaatatgatgcacttcggaggatatatccagaagacagaacggaagtcaggtaaaaggcagactgaaagggagaagaaaaagaagattctggccgaaaggagaaaagtgctggccattgatcacttgaatgaggaccagttaagggagaaagctaaggagctgtggcagagcatctacaacctggaagccgagaagttcgatctgcaggagaagttcaagcagcagaagtacgaaattaacgtgttgaggaaccggattaacgacaatcagaaagtctccaagacaagggggaaggctaaagtcaccggcagatggaaatag

SEQ ID NO: 245360 - DNA, 858 bp, synthetic construct
  misc_feature 1..858: note = Description of Artificial Sequence: Synthetic coding sequence
  source 1..858: mol_type = other DNA
atgtctgacattgaggaggtggtggaagagtatgaagaggaggaacaggaagaagcagccgtcgaagagcaagaagaagccgcagaggaggacgccgaagcagaagccgaaaccgaggaaactcgcgctgaagaagacgaggaggaagaagaagcaaaagaagcagaagacggtcctatggaagagagtaagccaaagcctcgctcctttatgcccaatttggtacccccaaaaattccagacggcgaaagagtggacttcgacgatatccacagaaagcggatggagaaagacttaaatgagctccaggccctgatagaagctcactttgagaaccgtaagaaggaggaagaagaactggttagcttgaaagaccggattgagcgtcgacgcgctgagcgtgcggagcagcagcgtatccgtaacgagcgggagaaagaaagacagaatcgcctggccgaggagagagcacggagagaggaggaagaaaatcggcgaaaagctgaagatgaggcccgaaagaaaaaggcacttagtaatatgatgcatttcggtggctacatccagaagacagagcggaaaagcggcaaaagacagaccgagcgcgaaaaaaaaaagaaaatccttgcagagcgcaggaaggtgctggcaattgaccatctaaatgaagatcagctacgcgaaaaggcaaaggagctatggcaaagcatttacaatcttgaggccgaaaagtttgatctgcaggaaaaatttaaacagcagaagtacgagatcaacgtcctgcgcaatcgtatcaatgacaatcagaaagtctctaaaacaagaggaaaggccaaggtgactggtaggtggaaatag

SEQ ID NO: 245361 - DNA, 876 bp, synthetic construct
  misc_feature 1..876: note = Description of Artificial Sequence: Synthetic coding sequence
  source 1..876: mol_type = other DNA
atgtccgacattgaggaggttgtggaagagtatgaggaggaatatctggagcacgccgaagcagcagtcgaggagcaggaagaggccgctgaggaagatgcagaggccgaggctgagaccgaggagactcgggctgaagaagacgaggaagaggaggaagctaaggaagctgaggacggacctatggaggaaagcaagcccaaacccaggtcattcatgcccaacctggtgcccccaaaaatcccagatggcgagagggtcgactttgatgatattcaccgcaagcgcatggaaaaagatttaaacgagctgcaggccctgatcgaggcccacttcgagaatcgcaagaaggaagaggaggaactggtcagcctgaaggaccgtattgagaggcggagagcagagagagcggaacagcagcgcatcaggaacgaacgggagaaggagcgccagaaccgcctggctgaggagagggcccgtagggaggaagaggagaaccggcgaaaagcggaagatgaagctcggaaaaaaaaggccttaagcaacatgatgcactttgggggttatattcagaaacataccctgcagacagagaggaaatcaggcaaaagacagaccgaaagggagaagaaaaagaagatcctggccgaacgcaggaaggtcctggccatcgaccatctcaatgaggaccagctaagagagaaggccaaagagctctggcagtccatctataacctggaggcggagaagttcgatttgcaagagaaatttaaacaacagaaatacgagattaacgtgctacgtaatcgaataaatgacaaccagaaggtgagcaagacaaggggtaaagccaaggttacagggcgatggaagtag

SEQ ID NO: 245362 - DNA, 894 bp, synthetic construct
  misc_feature 1..894: note = Description of Artificial Sequence: Synthetic coding sequence
  source 1..894: mol_type = other DNA
atgtccgatatcgaagaagtggtggaggagtatgaggaggaatatctggagcatgctgaggccgctgtggaagaggaagaggattggcgcgaagacgaagacgagcaagaggaagctgccgaggaggacgctgaggccgaagctgaaactgaagaaactcgcgctgaagaggacgaggaagaagaggaggctaaggaggcagaggacggtcccatggaagagtcaaagccaaaacctcggtcattcatgccgaatctagttccgccaaagattccagacggggaaagagtggacttcgatgatatccacagaaaaaggatggaaaaagacctaaatgaactccaggccctcattgaagcacacttcgagaataggaaaaaggaggaggaggagttggtctctctcaaggacagaatagagcggagacgggctgaacgcgcagaacaacagcgtattagaaacgagcgcgagaaggagcggcagaaccggttagcagaggaaagggcccgtcgggaagaggaggaaaataggagaaaagcagaggatgaggctagaaagaagaaagccctgagcaacatgatgcacttcggaggatacattcaaaaaactgagcgcaaaagcggcaagcgacagaccgaacgagagaaaaaaaagaaaatactcgctgagcggagaaaggtgttagctatcgatcacttaaatgaggaccagttaagagaaaaagcaaaggagctgtggcagtccatctacaacctggaagcagaaaaattcgatctacaggagaagttcaagcaacaaaagtacgagatcaacgtgcttagaaataggatcaatgacaaccagaaggtgagcaaaacgagaggcaaagcaaaggttaccggtcggtggaaatag

SEQ ID NO: 245363 - DNA, 867 bp, synthetic construct
  misc_feature 1..867: note = Description of Artificial Sequence: Synthetic coding sequence
  source 1..867: mol_type = other DNA
atgtcggatatcgaagaggtcgtcgaagaatatgaggaggaggagcaggaggaagcagctgtggaggagcaggaggaggccgcagaagaggatgccgaggccgaggcagagacagaagaaacccgcgctgaggaggatgaagaggaggaggaagcaaaagaggccgaagacgggcctatggaggaatccaaacccaaaccacggagctttatgcccaacttagttcctcccaaaatacccgatggcgagcgcgtggattttgacgacatccatcgcaaaaggatggagaaagacctgaatgagctgcaggccttgatcgaggcacacttcgagaacaggaagaaggaggaggaagagctcgtgagtcttaaggacaggatcgagcgacgacgcgctgagcgggctgaacagcaaaggatccggaacgagagagaaaaggaaagacagaacagattagcagaggagagagccagacgagaagaggaagagaacaggagaaaagccgaagatgaggccaggaagaaaaaagcattgtccaacatgatgcatttcggcggttacatacagaaacaggctcaaactgagcgcaagtcagggaagcggcagacagaacgtgagaaaaagaagaaaatcctcgccgagcgacgaaaagtcctcgccatagaccacctgaacgaagatcagctcagggaaaaagctaaagagctttggcagtccatatataacttagaggctgagaaatttgatttgcaggagaagttcaagcaacagaagtacgagatcaacgtcctgaggaataggataaatgacaaccagaaagtgtctaaaactcgaggcaaagccaaggtgacggggcgatggaagtag

SEQ ID NO: 245364 - DNA, 771 bp, synthetic construct
  misc_feature 1..771: note = Description of Artificial Sequence: Synthetic coding sequence
  source 1..771: mol_type = other DNA
atgagcgatgaggaagtggaacaggtggaggagcagtatgaagaggaggaggaagcacaggaggaagctgccgaagtgcacgaggaagtccacgagcccgaagagaagccccgacccaagctgaccgcacccaaaataccagagggagagaaagtcgatttcgatgacatacagaagaaaaggcagaataaggacttaatggagctacaggccctgatagactcacacttcgaagctagaaagaaggaagaggaagagttggtggctctgaaggagaggatcgaaaaacgcagagctgaacgggctgagcaacagagaattagggcagaaaaagagagggaaagacagaataggctagcagaagagaaagctcgccgagaggaggaagacgctaagcggagggccgaggacgatcttaaaaaaaagaaggccctctcctccatgggcgctaattactctagctacctcgcgaaggcagatcagaagagagggaaaaaacaaacagcgcgagagatgaagaagaaaatcttggcggagcggagaaaaccgctgaacattgatcatctgggtgaagacaaactacgcgacaaagcgaaagagctctgggagaccctacaccagcttgaaatcgataagttcgaattcggcgagaagctcaagcggcaaaagtacgacatcaccactctgcggtcacggatcgatcaggctcaaaaacactccaagaaggccggaactcctgccaagggcaaagtaggcggtcggtggaagtag

SEQ ID NO: 245365 - DNA, 777 bp, synthetic construct
  misc_feature 1..777: note = Description of Artificial Sequence: Synthetic coding sequence
  source 1..777: mol_type = other DNA
atgtctgatgaggaagtcgaacaggtcgaggaacagtacgaggaagaggaagaagcccaggaagaagaggaagtgcaggaagatactgccgaggaggatgccgaagaggagaaacctcggcctaagttaacggcccctaaaatccctgagggtgagaaagtggacttcgacgacatacagaagaaaagacagaataaagatttaatggagctccaagcactgatcgattctcatttcgaagcacgaaagaaggaggaagaagaattggttgctttaaaggagagaatagagaagcgcagagcggaaagagccgagcagcagcggattagagcagaaaaagagcgtgaaaggcagaaccggcttgccgaggaaaaggctcggagggaggaggaagacgccaagagacgagctgaggacgatctaaagaagaagaaggcactgagctcaatgggcgctaactacagtagctatctggctaaagcagatcaaaaaaggggtaagaaacagaccgccagagagatgaaaaagaagatattggctgaacggagaaaaccattgaacatagaccatctgggcgaagacaaactacgcgataaggccaaagaattgtgggaaaccctgcaccagctcgagattgacaaatttgagttcggtgaaaagcttaagcggcagaaatacgatatcactacactccgttcccggatcgatcaggcccaaaagcattccaagaaagccggaactccggctaaaggaaaggttggaggcaggtggaaatag

SEQ ID NO: 245366 - DNA, 738 bp, synthetic construct
  misc_feature 1..738: note = Description of Artificial Sequence: Synthetic coding sequence
  source 1..738: mol_type = other DNA
atgtcagacgaggaagtcgagcaggtcgaggagcagtatgaggaagaggaagaggctcaagaggaagaggagaagccgaggcctaagctgaccgcacccaaaattccagaaggagagaaagtcgacttcgatgacatccagaaaaagcgacagaataaagacctaatggaactgcaggcactaattgactcccacttcgaagccagaaaaaaggaggaggaagagcttgtggccctgaaagagagaattgagaaacgcagagcagaacgggcagagcaacagcgaattagggctgaaaaggagagagagagacagaaccgactggctgaggaaaaggcgcgacgcgaggaggaagatgcaaagcggagggcagaggacgatctgaaaaagaagaaggctctatcgtctatgggagccaactattcttcatatttggcaaaagcagatcagaaaagaggtaaaaaacagaccgctcgggagatgaaaaaaaagattctggctgagcggcgtaaaccattgaacatcgaccatctaggcgaagataagcttcgcgataaggccaaggaactgtgggaaactttgcaccaactggagatcgataaattcgagttcggggaaaaactaaagcggcaaaagtacgacatcactacccttcggagtcgaattgaccaggctcagaaacatagcaaaaaggctggaactccagcaaaagggaaagtcgggggaagatggaagtag

SEQ ID NO: 245367 - DNA, 759 bp, synthetic construct
  misc_feature 1..759: note = Description of Artificial Sequence: Synthetic coding sequence
  source 1..759: mol_type = other DNA
atgagtgatgaggaggtggagcaggtggaggagcaatacgaggaggaagaagaggcacaggaggaggccgctgaggtgcatgaggaagaggagaagccacgccctaaactgaccgctccaaagattcccgagggtgaaaaagttgatttcgacgacatccaaaagaaaagacagaataaagatctgatggagttgcaggctttaattgattctcatttcgaggccaggaagaaggaggaggaggagctcgtagcccttaaggaacgcatagagaagagacgtgcagaaagagcggaacagcaacggattcgcgcagaaaaggaaagggagcgtcaaaaccgcctcgcagaagagaaggcgagacgggaggaggaagatgctaagcgacgggctgaggacgacctgaaaaaaaagaaagccctgtcttcaatgggagctaattattcaagctatttggcgaaggcggatcagaaaagagggaagaaacagaccgctagggaaatgaagaaaaagatcctcgcggaaagacgtaagccactgaatatcgaccacttaggcgaggacaaactccgcgataaagctaaagaactctgggagacgctccaccagctggagattgacaagtttgagttcggcgagaaactgaagagacaaaagtacgacatcatgaatgtgagagcacgcgtccagatgttggcaaaattttccaagaaggcaggaacacctgccaagggcaaggtgggtgggagatggaaatag

SEQ ID NO: 245368 - DNA, 783 bp, synthetic construct
  misc_feature 1..783: note = Description of Artificial Sequence: Synthetic coding sequence
  source 1..783: mol_type = other DNA
atgagcgacgaggaggtcgagcaggtggaagaacagtatgaggaggaggaggaagctcaggaggaggctgcagaagtgcacgaggaggataccgccgaggaagacgcagaggaggagaaacccaggccgaagctgaccgccccaaaaatccctgagggagagaaggtagactttgatgatattcaaaaaaagagacagaataaagaccttatggagctgcaagccctaatcgattctcatttcgaagccagaaaaaaggaagaggaagagctcgttgcactcaaggaacgcattgagaagcggagggctgagagggctgagcagcagcggatacgtgcggaaaaagagagagagaggcaaaaccgcttagccgaggagaaagctcggagggaagaggaggatgccaagcgaagagctgaagacgatctcaagaaaaagaaggccctgtcaagcatgggcgcaaattattctagttatttggccaaagcagaccagaaacggggtaagaagcagaccgcaagagagatgaaaaagaagatcttggcggagcgtcgcaagcctctgaacattgaccatcttggtgaggataaactccgggacaaggctaaggagttgtgggagacacttcaccagctggaaattgacaaattcgaatttggtgagaaactgaagcgtcaaaagtacgatattacaacactgagaagccgaatagatcaggcccagaaacatagcaaaaaagcagggactcctgctaagggaaaagttggcggaagatggaaatag

SEQ ID NO: 245369 - DNA, 753 bp, synthetic construct
  misc_feature 1..753: note = Description of Artificial Sequence: Synthetic coding sequence
  source 1..753: mol_type = other DNA
atgagcgacgaggaggtcgagcaagtggaagagcaatacgaggaggaggaagaggcccaagaggaggaggaagtgcaggaagaagagaagcccagacctaaactcactgctcccaagatacccgagggcgaaaaggtggactttgacgatattcagaaaaagaggcagaacaaagacctgatggagctgcaggcactgatcgattcacacttcgaggccagaaaaaaggaagaagaagagcttgtcgcactgaaggaacgcattgaaaagcgcagagccgagagagccgagcaacagaggattagagccgagaaggagagagagaggcagaatcgtttagctgaggaaaaggcccgaagggaagaggaggacgcaaaacgacgggcagaggacgacctgaaaaaaaaaaaagcacttagttcaatgggagctaattacagctcctacctggccaaagcagatcagaagagaggcaagaagcagaccgcaagagagatgaaaaagaaaattctggctgaaaggagaaagccactgaacattgaccacctcggagaggacaagttacgcgacaaggcaaaagaactgtgggaaaccctccaccagttggagatcgacaaattcgagttcggggagaagctgaaaagacaaaaatatgacataaccacactgcggtctcggatcgaccaggcgcaaaaacatagcaagaaagccggaaccccagcaaaggggaaagtaggcggaaggtggaaatag

SEQ ID NO: 245370 - DNA, 786 bp, synthetic construct
  misc_feature 1..786: note = Description of Artificial Sequence: Synthetic coding sequence
  source 1..786: mol_type = other DNA
atgtcagacgaggaggtggaacaggtggaggagcagtacgaagaagaggaggaggcccaagaggaagccgcagaggtacacgaagaaggaatgagaacccaggacttcttccacgaggagaagccccgtcccaaattaactgcccctaagatccccgaaggggaaaaagtggactttgatgacatccagaagaagagacagaacaaggacctgatggagctccaggctctgatcgactcccactttgaagcgagaaagaaagaagaggaggagcttgttgctctcaaggaaaggatcgaaaaaagacgcgcagagcgtgctgagcagcagcggatcagggccgaaaaagaaagggagcggcagaatcgcttagccgaggagaaggcccgacgcgaggaggaggacgcgaaaaggagagcagaagatgatcttaaaaaaaaaaaggccctgtcaagtatgggggcaaactactcatcctacctggcaaaggccgaccagaaaaggggcaagaaacagactgcgagggagatgaagaaaaagattcttgccgaaaggcggaagccactcaatattgaccatctcggcgaggacaaactcagagataaggcaaaagagctttgggagacgctgcaccagttagagattgacaaattcgaatttggagagaagctcaaacgtcaaaaatatgacatcactactttgagaagccgcattgaccaggcacaaaagcattctaagaaagccggtacacctgcaaaaggcaaggtgggcggacggtggaagtag

SEQ ID NO: 245371 - DNA, 786 bp, synthetic construct
  misc_feature 1..786: note = Description of Artificial Sequence: Synthetic coding sequence
  source 1..786: mol_type = other DNA
atgtccgacgaagaggttgaacaggtcgaggaacagtacgaggaggaagaggaggctcaggaagaggccgcagaagtccacgaagaagtccacgaacccgaggaggtccaagaagaggagaaaccccgaccaaaactgaccgcaccaaagatcccagagggggagaaagtcgacttcgacgatatacaaaagaagcgccagaataaggacctgatggagttgcaggccttaattgatagccattttgaggcgaggaaaaaagaggaggaggagctggtggcgctgaaggagcggattgagaagcgtcgggctgagcgtgctgagcagcagagaatacgggctgagaaagagcgagaacgccagaaccgcctcgctgaggagaaggcaaggagggaggaggaggacgccaaaaggagagctgaggacgacctgaaaaagaaaaaagcattgtcttccatgggagcgaattattcctcatacctggccaaagcagaccaaaagaggggaaagaagcagacagcacgggagatgaagaagaaaatcttagccgagagacgaaaaccactcaatatcgatcaccttggcgaagacaaattacgcgataaggcaaaggagctgtgggaaacacttcaccagctggagatagataaattcgagtttggagaaaagctcaagagacaaaagtatgacattacaacacttcgctccagaatagaccaggctcagaaacatagcaagaaggccggaacacccgcaaaggggaaagtcggaggaaggtggaagtag

SEQ ID NO: 245372 - DNA, 753 bp, synthetic construct
  misc_feature 1..753: note = Description of Artificial Sequence: Synthetic coding sequence
  source 1..753: mol_type = other DNA
atgtcagatgaagaagtcgagcaggtcgaagagcagtacgaggaggaggaagaagcccaggaggaagaggaggtacaggaggaagagaagccccgtcctaaactgactgcccctaaaattccagaaggcgaaaaggtggacttcgacgatatacagaagaagagacagaataaggacctcatggagctgcaagctctcattgatagccatttcgaagcccgaaagaaggaggaagaagaactggtagctctaaaggagaggatagagaaaaggcgggctgagcgggcagaacagcagaggattcgggcagaaaaggagcgcgagaggcaaaatcgcttggcagaagaaaaggcgagacgtgaggaggaagatgccaagcggagggctgaggacgacctgaagaaaaaaaaggctctctcatccatgggtgcaaactactcgtcctacctggccaaggctgatcagaagcgcggtaaaaagcagaccgcaagagagatgaaaaagaaaattctagcagagagacggaagccactgaacatcgatcacctgggggaggataaacttagagacaaggccaaggaactgtgggagaccctgcaccaacttgagatcgataagtttgagttcggcgaaaaactgaagcggcagaaatacgacatcatgaacgttagagcccgagtccaaatgctcgccaagttcagtaagaaggcaggtacacccgcaaaagggaaagtgggaggccgatggaagtag

SEQ ID NO: 245373 - DNA, 810 bp, synthetic construct
  misc_feature 1..810: note = Description of Artificial Sequence: Synthetic coding sequence
  source 1..810: mol_type = other DNA
atgagcgacgaggaagtggaacaagtcgaagagcaatatgaagaagaggaagaggcacaggaggaagcggcagaggtgcacgaggaggtccacgagcctgaagaggtgcaggaggacacggcggaagaagatgctgaagaggagaagcctagacctaagctgacagcgcctaaaatccctgagggagaaaaagtagattttgatgacatacagaaaaaacgccaaaataaggacctgatggagttgcaggccctgattgactcacactttgaagcacggaagaaagaagaggaggaactggttgctttaaaagaaaggatagagaaacggcgtgccgaacgggcagagcagcagagaatccgagccgaaaaggaacgcgaacggcagaaccgcctcgcagaggagaaagccaggcgggaggaggaagatgccaaacgacgggcagaggacgatctaaagaaaaaaaaagccctgtcttccatgggcgcaaactattccagttatctagccaaagccgaccagaagagaggcaaaaaacagactgctcgggagatgaagaagaaaattctcgccgaacgccgtaaacctctgaacatcgaccaccttggcgaagacaaattaagagataaagctaaagaactctgggagacactgcaccagcttgaaattgacaaattcgagttcggagaaaaactaaaacgccaaaagtatgatattacaactctgcggagccgaattgatcaggctcagaagcatagcaagaaggccggtacccccgctaaaggaaaggttggagggaggtggaaatag

SEQ ID NO: 245374 - DNA, 813 bp, synthetic construct
  misc_feature 1..813: note = Description of Artificial Sequence: Synthetic coding sequence
  source 1..813: mol_type = other DNA
atgagtgatgaagaggttgaacaagtggaggagcagtacgaggaggaggaggaagctcaggaggaggccgctgaagtgcacgaagaggcccaccctggagaggagagcgtacgggaagataccgcagaagaggatgcagaggaagagaaacccaggccaaagctcacagccccaaaaatcccagaaggagagaaggtggatttcgacgacatccagaagaaacgacaaaacaaagatctgatggagttacaggcattaatcgactcacatttcgaagcgagaaaaaaggaggaggaggagttagtggcgctgaaagagcgaatcgagaagaggagggcagagagggccgagcaacagcggattcgggctgaaaaggagcgtgaacgtcaaaaccgactcgccgaagagaaagctaggcgtgaggaggaggatgcgaagagaagagctgaagatgatctcaagaagaaaaaagccctgtcttccatgggcgcaaattattcttcttaccttgcaaaggctgaccaaaagaggggtaaaaagcagactgccagggagatgaaaaagaagattctagctgagagaaggaagcccctcaatattgaccacctcggcgaggacaagctgcgagataaagcaaaagaactgtgggagactctccaccagttggaaattgataaatttgaattcggagagaagctgaaaagacagaagtatgacattaccactttgcgatcccgaattgatcaggctcaaaaacattccaaaaaggcgggaacacccgcaaagggaaaggttggtgggaggtggaagtag

SEQ ID NO: 245375 - DNA, 435 bp, synthetic construct
  misc_feature 1..435: note = Description of Artificial Sequence: Synthetic coding sequence
  source 1..435: mol_type = other DNA
atgagtgacgaggaggtggaacaagttgaggagcagtacgaagaagaggaggaggctcaggaggaagctgctgaagtacatgaggaggagcgccgagctgaggacgacctgaaaaaaaagaaggcgctctcttccatgggtgcaaattactcgtcgtacctggccaaggcagaccaaaagcggggtaaaaagcagaccgcgagggaaatgaagaagaaaatccttgccgaacggcgaaaacccctgaacattgaccacttgggagaggacaaactccgcgataaagcaaaagaattatgggagccccctcagtcttgccagggactaccagatagtcccggaggtggggaagccattcctggcaggcctcccagactttgcccttgttgtctgcatccactcggtcctgttaacaaagctgcggaaccaccatag

SEQ ID NO: 245376 - DNA, 1617 bp, synthetic construct
  misc_feature 1..1617: note = Description of Artificial Sequence: Synthetic coding sequence
  source 1..1617: mol_type = other DNA
atggaagagtctgtcaaccagatgcagccgctgaatgagaagcagatcgcaaattcacaggacggctacgtatggcaagtgacggacatgaaccgcctgcacagattcctgtgcttcggaagtgaagggggaacgtactacatcaaagagcagaaattgggcttggagaatgcagaagcgctgattcgcctgatagaagatggcagaggatgcgaggtgatccaggaaatcaaatcgtttagccaggagggtaggaccacaaaacaggagccaatgctttttgctctcgcgatctgcagtcagtgcagcgatatctcaaccaagcaggccgctttcaaagctgtgtctgaggtgtgcagaatcccaacccatctgttcacattcatccagttcaaaaaagacctcaaggaaagtatgaaatgcggaatgtggggaagggccctgagaaaggcaatcgctgactggtataatgagaaggggggtatggccctcgcattagcagttactaaatataagcagagaaacggctggtcccacaaggatctacttaggctgagccacctgaaaccgagctccgagggcctggctatcgtcactaaatacatcaccaagggttggaaagaggtgcacgagttgtacaaggagaaggcgcttagtgtggaaactgagaaactgctaaaatacctggaggcagtcgaaaaggtgaagaggaccagggatgaactcgaggtcatccaccttattgaggaacaccggctggtgcgcgaacacctgctcactaatcaccttaagtcaaaggaagtctggaaggccctgctccaggagatgcctctcaccgctttactgcgtaacctcggtaaaatgacagccaactcggtcctggaaccaggcaactccgaagtaagtttggtgtgcgagaagttatgcaatgaaaagctcctgaagaaggccaggattcatcccttccatatccttatcgcactcgaaacctacaagaccggccacggtcttagaggaaagctgaaatggcgccctgatgaggaaatcctaaaggctctcgatgccgctttctacaagaccttcaagactgtcgagcccaccggaaagcgctttctgctcgcagtagacgtgagcgcgtcgatgaaccagagggttctggggtcaattctcaatgcgagtacagttgctgccgcaatgtgtatggttgtgactcggacagaaaaggattcgtacgtcgttgcattttctgacgagatggtcccgtgcccagtcacgactgacatgacgctgcagcaggttttaatggctatgagtcagatccctgcaggagggacggactgcagccttcccatgatctgggctcagaaaacgaacactcccgctgatgtgttcattgtcttcacagataatgagacttttgccggtggagttcaccccgctatcgcgttgagagagtaccggaagaaaatggacattccagctaaactcatcgtgtgcggtatgacttccaatgggttcactatcgcagaccctgatgatagggggatgctggatatgtgcgggttcgatacaggcgctcttgatgtgatcaggaactttacgctggacatgatctag

SEQ ID NO: 245377 - DNA, 1557 bp, synthetic construct
  misc_feature 1..1557: note = Description of Artificial Sequence: Synthetic coding sequence
  source 1..1557: mol_type = other DNA
atggaggagtccgttaaccagatgcaacccctgaatgagaagcagatcgccaatagtcaggatggctacgtgtggcaggtgacagatatgaacaggctccataggttcctgtgctttgggagcgaaggcggtacctactacatcaaggagcagaaactaggactggaaaacgcggaagcactgatccgcctgatcgaggatggtaggggctgtgaggtgattcaggagatcaaaagttttagccaggaaggaagaaccacaaagcaggagcccatgctcttcgcactagctatatgttcacagtgctcagatatctctaccaaacaagccgcttttaaggccgtgagcgaagtatgtagaatccctacacacctgttcacgtttatccaattcaagaaagacctgaaggagtcgatgaagtgtggtatgtggggcagagcattacgcaaagcaattgctgattggtacaatgagaaaggcggtatggcactggcccttgcggttacaaagtacaagcaacgtaatgggtggagtcataaggacttgctgcgcctaagccacttgaaaccctcctccgaggggctggctatcgtgaccaaatatataactaagggctggaaggaggttcacgagctgtataaagaaaaggccctctccgtggaaaccgagaaactgctaaaatatctggaggctgtggagaaagtcaagagaactagagacgagctggaagtaatacatctcatcgaagaacatcgcttagtgcgagagcacctcctgactaatcacctgaagagtaaggaagtttggaaagccttgctgcaggagatgccgttaacagctctattaaggaatctggggaaaatgaccgccaacagcgtgctggaaccaggtaactccgaggtctcattagtttgcgagaaattgtgtaacgaaaagctcctgaaaaaggctaggatccatcccttccatattcttatcgcgctagagacctacaagactggacacggcctgcggggaaagctgaagtggagacccgacgaagaaatcctcaaagctctggacgctgcgttttataagacgtttaagactgtggagcctacagggaaacggtttctgctggctgtggatgtaagcgcttcaatgaaccagcgtgtgctcgggtccattttgaatgcatctacagttgctgccgctatgtgtatggtggtgacacggaccgaaaaggacagctacgtggtcgctttctccgacgaaatggtgccctgcccagtgacaaccgatatgactctccagcaagttttaatggccatgagtcagattcccgcaggcggaacagactgcagtctgcccatgatctgggctcagaagacaaatacccccgctgacgtcttcattgtattcacagacaatgaaactttcgccggtggagttcatcctgccattgcattgcgcgaataccgaaaaaagatggatattcctgccaagctgatcgtctgcggtatgaccagtaatggattcaccatcgcggatccggatgaccgtgatactgtgaagtag

SEQ ID NO: 245378 - DNA, 1578 bp, synthetic construct
  misc_feature 1..1578: note = Description of Artificial Sequence: Synthetic coding sequence
  source 1..1578: mol_type = other DNA
atggaagaatccgtgaaccagatgcagccactgaacgagaagcagattgccaactcccaggatggttatgtgtggcaggttacagatatgaataggctgcaccggtttctatgtttcgggagtgaaggaggaacatactacattaaggagcagaagctggggcttgagaacgcagaggcattaattagactcattgaggatggccgaggatgcgaggtcatccaggagattaaatctttttctcaggaggggcgaacgactaaacaggagcccatgctattcgccttagcaatttgtagccaatgcagcgacatctcgacaaaacaggccgcttttaaggctgtctctgaggtgtgtaggatccccacacatctgttcacatttattcagttcaaaaaggacctgaaggagagcatgaagtgcggtatgtggggtcgagcactgcggaaggccatagccgactggtacaatgaaaaaggaggaatggccctagccttggccgtgacaaagtataaacagcggaacggatggtcacacaaggatttgttacgactgtcccacctcaaaccttctagcgaaggtctggcaattgtaactaagtacattactaagggttggaaagaagtgcatgagctgtacaaagagaaggccttgtccgtggagacagagaagctgctgaagtatcttgaggcagtcgagaaggtgaagcgaacccgtgatgagctcgaagtcattcatttaattgaagaacacagattggtacgcgagcatctgcttacaaatcatctgaagtccaaggaagtgtggaaagctctcctgcaggagatgccactgacggctcttctccgaaatctcggaaagatgaccgcaaattccgttctggaaccaggcaactcagaggtgtctctggtgtgcgaaaagctgtgcaatgagaaactacttaaaaaggcccgtatccaccctttccatattctgattgctctcgaaacctacaagaccggacatgggctgagagggaagcttaagtggcgacctgatgaggagatcctgaaggccttggatgctgcattttacaagacattcaagaccgttgagcccaccggcaaacgctttctgttagccgtggatgtgtccgcgtctatgaatcagcgcgtcctgggctctattctgaatgcttctaccgtggcggcagcgatgtgcatggtggtgactaggactgaaaaagatagctatgtggtggctttcagtgacgagatggtgccttgccccgtgacaacagacatgaccctgcagcaagtgttgatggccatgtctcagatcccagcagggggaacggactgtagtctccctatgatctgggcccagaaaaccaacactcctgccgatgtattcatcgtgttcaccgataatgaaacatttgccggtggtgtccaccctgctatcgcactccgtgagtacagaaagaaaatggacattcctgccaaactgattgtgtgtggcatgacttctaatggctttaccattgctgacccagatgatagggcactccagaatacccttctgaacaagtctttctag

SEQ ID NO: 245379 - DNA, 1605 bp, synthetic construct
  misc_feature 1..1605: note = Description of Artificial Sequence: Synthetic coding sequence
  source 1..1605: mol_type = other DNA
atggaggagtccgtgaatcagatgcagcctctcaatgagaaacaaatagctaatagtcaggatggttacgtctggcaggtcaccgatatgaaccgtcttcacagattcctgtgtttcggatccgaagggggaacctactatattaaggagcaaaagttgggcttggagaacgccgaggctttgattagactcattgaggacggaagaggctgtgaagtgattcaggaaatcaagagcttctctcaggagggcaggaccaccaagcaggaacccatgctcttcgccctggccatatgcagtcaatgctcagacatatcaaccaaacaggcagcttttaaagcagtgagcgaggtgtgccggattccaactcacctatttacgttcatccagtttaagaaggacctgaaggaatccatgaaatgcggcatgtggggccgtgctctccggaaggcaattgccgattggtacaatgagaagggcggtatggccttggcgttggcagtaactaaatacaagcagagaaatggttggagtcacaaagatctgctgagattgagtcatctgaagccaagttcagaaggtctcgccatagtgacaaagtacattaccaaaggatggaaggaggtgcacgaactctacaaggagaaggctctctcggtggagacggaaaagctgctaaagtacctggaggccgtggaaaaagtgaagagaacgagggacgagttggaggtcatccaccttatcgaagagcaccgtctcgtgcgggaacacctactgacaaaccacctaaagtctaaagaagtgtggaaggcccttctgcaggagatgccactaactgcgctcctgagaaacctgggtaaaatgactgctaactcagttcttgaacccggaaactctgaggtttccctggtgtgcgaaaagctgtgtaacgagaaactgcttaaaaaagctagaattcacccattccacatcttgattgctctggaaacctacaagaccggacacggactccgtggcaagctgaaatggcgtcctgacgaagagattctcaaggctcttgatgctgctttctacaaaacttttaagactgttgaaccaaccgggaagaggttcctcctggcggtggatgtgagcgcctcaatgaatcagcgggtgctgggctcgattttaaatgccagcacagtggcagcggcaatgtgtatggtggtcactcgcacagagaaagattcctatgtcgtggcttttagcgacgagatggtgccctgcccagtgacaacagatatgaccctccaacaagtgctcatggctatgtcgcagattcctgcaggcggtactgattgcagcctgcctatgatctgggcgcagaaaacgaacacaccagcagacgtcttcattgtctttacggacaatgagactttcgcaggcggagtccatccagccattgccctgagagagtataggaaaaagatggacattccagcgaagttgatcgtgtgtggaatgacaagcaatggctttaccattgccgatcctgatgatagaggtatgctcgacatgtgtggcttcgacacaggcgctctggatccttgtaaaataccctattag

SEQ ID NO: 245380 - DNA, 1617 bp, synthetic construct
  misc_feature 1..1617: note = Description of Artificial Sequence: Synthetic coding sequence
  source 1..1617: mol_type = other DNA
atggaggagtcagtgaatcaaatgcagcccctaaatgagaaacagatcgctaactctcaggatggctatgtgtggcaggtaacagacatgaacaggctgcaccggtttctatgtttcgggagtgaagggggtacatactacattaaagagcagaagcttggactcgaaaatgcagaagccctgatccggctcatcgaggacggaagggggtgcgaagtcatccaggagattaagagtttcagccaggagggaaggaccaccaagcaggagcccatgctgtttgccctggctatttgttctcagtgctctgacatcagcacgaagcaggctgcctttaaggccgtgtcagaggtgtgcaggattcctacacacctcttcacattcatacaattcaaaaaggacctaaaggagtctatgaaatgtggaatgtggggccgtgctctccgcaaggcaattgcagactggtataacgagaagggtggcatggccttggctctggctgttactaagtacaaacagcgaaatggctggtctcacaaagacctgcttcggctctcccatctcaagcctagctccgaagggctcgctatcgtgaccaaatacatcacgaaggggtggaaagaggtgcacgaactgtataaggagaaagcacttagcgtggaaacagagaagttgctgaagtaccttgaagctgttgagaaggtgaaaaggactcgcgacgagctggaggtgatccatttgattgaggaacaccgcctggtccgcgagcatcttctcacaaatcacctgaagagcaaggaggtgtggaaggcattactgcaggagatgccattgacggcactcctgcgtaaccttggcaaaatgacagccaattccgtcctggaaccgggaaacagcgaggtaagccttgtctgtgagaagctgtgcaacgaaaaattgctgaagaaagctcgcatccacccatttcacattctgatcgcgcttgagacctacaagactggtcatggtctgagagggaagttaaaatggcggcctgatgaggaaatcttgaaagctcttgatgccgcattctataaaacctttaaaactgtagagcccacaggtaagaggtttttactggctgtggatgtgagcgcgagtatgaaccagagagtactgggctcaatcctcaatgccagtactgtggccgctgcaatgtgcatggtggtcacaaggaccgaaaaggactcttacgtggtggccttctcggacgagatggtgccttgcccagtgacaaccgacatgacactgcaacaggtgcttatggctatgagccagatccccgcaggcggaaccgattgtagtctgcctatgatatgggctcagaaaaccaatacccccgctgacgtgtttattgtcttcactgacaacgaaacttttgcaggcggtgtgcaccctgctattgctctcagggagtataggaaaaaaatggacataccagcaaagctaatcgtttgcggtatgaccagtaacggattcaccattgcagatccagacgacagggggatgctcgatatgtgtgggttcgacaccggtgctctggatgtgattcgcaatttcacattggacatgatttag

SEQ ID NO: 245381 - DNA, 1617 bp, synthetic construct
  misc_feature 1..1617: note = Description of Artificial Sequence: Synthetic coding sequence
  source 1..1617: mol_type = other DNA
atggaggagtctgttaatcagatgcagcccctgaacgaaaaacagatcgccaattcacaggatggatacgtctggcaggtgacggacatgaataggctgcaccgcttcctgtgttttggctccgagggcggtacctactacataaaagagcagaaactcggactcgagaatgcagaggcgctcattcggcttattgaggacggcagaggatgtgaagtgattcaagagatcaagtcattctctcaggagggtagaactaccaagcaggagcccatgctgttcgcgcttgctatttgctcgcagtgtagcgacatctctacaaaacaggccgcttttaaggccgtctccgaagtgtgcaggatccccactcatctcttcacattcatccagttcaaaaaggatctgaaggagtccatgaagtgtggcatgtggggaagagctttgcgaaaagcaatcgcggattggtataatgaaaaggggggaatggctctggccttggccgtaactaagtataagcagaggaacggatggtctcataaggacctgttacgtctctcacacctgaaaccttcttcagagggcctcgcaattgtgacaaaatacataactaagggatggaaggaagttcacgagctttataaagagaaggcactgagtgtggagaccgaaaaactgctgaaatatctcgaggccgtggaaaaggtgaagcggacgcgggacgagcttgaggttattcatcttattgaagagcatagactggtgcgggaacacctcttgacaaaccatcttaagagtaaggaagtctggaaagccttactccaagaaatgcccttgactgctctcctgagaaacctgggaaaaatgacggctaacagcgtgcttgaacccggtaatagcgaagtttctctggtctgcgagaaactgtgtaacgagaagttgctgaagaaggctaggattcatccctttcacatcctgatagcactggagacctataagactgggcacggcttaaggggcaaacttaaatggcggcctgatgaggagattctaaaggcacttgacgccgctttttacaaaacatttaagacagtggagccgactggcaagcgcttcctgcttgctgtggatgtcagcgcctctatgaaccagcgggtgctaggaagcattctgaacgcatcaactgtagcagccgctatgtgcatggtggtcacgagaacagaaaaggacagttacgtggtggcattttcagatgagatggtcccatgccctgtcactacggacatgactcttcaacaggtgctgatggcaatgtcccagatcccagctggaggcaccgattgttcgctgcccatgatctgggctcaaaagaccaacactcctgccgacgtttttattgtgttcacagataacgagacatttgccggtggcgtccacccggcaattgcactacgcgagtaccggaagaaaatggatatcccagcaaaactgatagtctgtgggatgacatcaaacggcttcaccatcgcggacccagatgacagaggaatgctcgacatgtgcggatttgacacgggagcccttgatgtgatacggaatttcaccctcgacatgatttag

SEQ ID NO: 245382 - DNA, 792 bp, synthetic construct
  misc_feature 1..792: note = Description of Artificial Sequence: Synthetic coding sequence
  source 1..792: mol_type = other DNA
atgcctttgacagctctcctgcggaacctgggcaagatgaccgctaacagtgtgttagagcctggcaattcagaggtgagcctcgtgtgcgagaaactgtgtaacgagaaattactcaagaaggcacgcattcacccattccacattttgatcgccctcgagacatataaaacaggacacggactgcgtgggaagctgaagtggcgacctgatgaggaaattctgaaggcattggatgccgcattctataaaacattcaagactgtggagccaactggcaagcgtttcctccttgccgtcgacgtgtcggcgtccatgaaccagcgcgtgttaggttctatcttaaatgccagtacggtcgccgcagctatgtgtatggtggttacaagaacagaaaaggactcatacgtcgtggcattttcagacgagatggtcccttgtccagtaaccacagatatgacactgcaacaggtgctgatggctatgtctcagatccccgcaggaggcacagactgctcccttccaatgatctgggcccagaaaaccaacacacctgccgatgtgttcatagtctttacagataacgaaactttcgctgggggagtccatcccgcaatcgccctgcgggagtacaggaagaagatggatataccagcgaaactcattgtgtgtgggatgactagcaacggcttcaccatagctgacccagatgacagaggcatgctagacatgtgtgggtttgatacaggggcactggatgtcatcagaaatttcaccctcgacatgatatag

SEQ ID NO: 245383 - DNA, 126 bp, synthetic construct
  misc_feature 1..126: note = Description of Artificial Sequence: Synthetic coding sequence
  source 1..126: mol_type = other DNA
atggaggagtccgtgaatcaaatgcagccactgaatgagaagcagattgccaattcacaggacgggtacgtttggcaagtgacagacatgaaccggctgcatcgtttcctgtgttttggatcgtag

SEQ ID NO: 245384 - DNA, 1050 bp, synthetic construct
  misc_feature 1..1050: note = Description of Artificial Sequence: Synthetic coding sequence
  source 1..1050: mol_type = other DNA
atggctgctagtgaggctgctgtggtctctagcccctcactcaagacggataccagtccagtccttgaaacggcagggaccgttgccgcaatggccgctactccaagtgctagggcagccgctgctgtggtggcggctgccgctcgcactggctctgaagcacgagtctcaaaagccgctctggcaactaagcttttgtccctgtccggtgtcttcgcggtccacaagcccaaggggccaacaagtgctgagcttctaaaccggttgaaggagaaacttttggccgaggcgggtatgccaagccccgagtggactaaaaggaaaaagcagaccctcaagatcggccacggcggaacactagacagcgctgctcgtggagttttggttgtgggcattggcagtgggacgaaaatgttaacgtccatgttgtcagggagcaagaggtataccgctattggcgaactggggaaggcaacagacaccctcgattcgacgggaagagtgacagaggagaaaccctacgataaaatcacccaggaagacatcgaaggcatactgcaaaagttcaccgggaatattatgcaggtacctccactgtattcagccctgaaaaaagatggacagagactttccacccttatgaaaagaggggaggtggtagaagcaaagcccgctcgtccagtgacagtgtactctatttctctccaaaaattccaaccgccatttttcacactagatgtggagtgcgggggagggttctacattagaagtctggtgagtgacattggtaaggaattgtcctcatgtgcaaacgtgctggagctgacacgcaccaaacagggcccttttacgctcgaagagcacgctttacctgaagataagtggaccattgatgacatagctcagagtcttgagcattgttcatcactattccctgccgagctcgctctcaagaaaagtaagccagaatctaatgaacaagtcctgtcctgtgagtatatcactctgaatgaacctaagagagaggacgacgtaattaagacatgctag

SEQ ID NO: 245385 - DNA, 996 bp, synthetic construct
  misc_feature 1..996: note = Description of Artificial Sequence: Synthetic coding sequence
  source 1..996: mol_type = other DNA
atgggttcggctggattatcaagattacatgggcttttcgcggtgtacaagcctccagggctcaagtggaaacatttgagggatactgtggaactccaattgctgaaaggactaaacgccagaaagccaccagcacccaagcagagggttagatttctcttagggcctatggaaggaagtgaggagaaggaactgacgctgacggctacatcagttccatcctttattaatcatccactggtgtgtggacctgctttcgctcatctaaaagtaggcgtcggacaccgactggatgctcaggcctcaggagttcttgtcctgggcgtaggacatggctgtcggctgctgacagatatgtataatgcccatctgactaaagactacaccgtgagaggccttttgggaaaggcaaccgatgatttccgggaagatggacgactagttgaaaagacaacttatgaccacgtgactcgagaaaagttggaccgcattctggctgtgattcaaggatctcatcagaaggcactggttatgtatagtaatctcgatcttaagactcaggaagcttatgaaatggcggtacgtgggttaatccggcctatgaacaagagtccaatgctgataacaggaatcaggtgcctgtattttgcgcctcctgagttcctgctggaagttcagtgcatgcacgagacccagaaagagctgcggaaactggtgcacgaaatcggtctcgaacttaaaactactgccgtctgtacccaggtccgccgaacccgcgatggcttctttacgcttgattcagccctgctccgaacacagtgggacttgactaatattcaggatgccatcagagccgctacaccacaggtggctgcagaattagaaaaaagccttagccccggattagacacaaagcagctgccaagccccggttggagctgggatagccaaggaccttcatcaacactcggcctggagagaggagccggacagtag

SEQ ID NO: 245386 - DNA, 828 bp, synthetic construct
  misc_feature 1..828: note = Description of Artificial Sequence: Synthetic coding sequence
  source 1..828: mol_type = other DNA
atggagggctcagaagaaaaggagcttaccctgaccgctactagcgtgcccagcttcatcaatcacccgttggtctgcggccctgccttcgcccacctgaaagtcggggtaggccatagactcgacgcccaagcttccggtgtgctagtgctcggcgtggggcacgggtgcagacttctcactgacatgtataatgcccacttgactaaggactacaccgtgagaggactgctggggaaggcaaccgacgatttcagagaggacgggcgactggtggaaaaaacgacgtatgatcatgttaccagggagaaactggatcgtattctggctgttatccagggttctcaccagaaggccctggtcatgtactccaacctcgatctcaagacgcaggaggcctatgagatggctgtgcgaggccttatacgtcctatgaataagtcccccatgcttatcacaggaattagatgtctatacttcgctcctcctgaattcttgctggaggtgcagtgtatgcatgagacccagaaggaacttagaaagcttgtgcacgaaataggcttagaactgaagacaactgcagtgtgcacacaagtgcgaaggacacgcgatgggtttttcacgctggatagtgctttactccgcacacaatgggatctgactaacatccaagatgccattcgagccgctactccccaggttgcggctgagctggagaagagtcttagccccggattggacaccaagcaacttccctctccaggctggtcttgggatagccaggggccaagtagcaccttggggctggaacgcggtgccggtcagtag

SEQ ID NO: 245387 - DNA, 1701 bp, synthetic construct
  misc_feature 1..1701: note = Description of Artificial Sequence: Synthetic coding sequence
  source 1..1701: mol_type = other DNA
atgagacggcagtggggctcagcaatgcgggctgcggagcaagctgggtgcatggtctcagcctctcgggcagggcagcccgaggctgggccttggtcctgcagcggagtcatactctcccggtcaccaggcctcgtgctatgccacgggggaatctttgtgccatttttacgagcaggaagcgaagtactgacagcggcaggggctgtttttctccctggcgatagctgtagagacgatttgcggctgcatgtgcagtgggcccctaccgccgctggtcctgggggtggcgcagaaagaggacgaccaggtctctgtacacctcagtgcgcttccctggaacccggaccaccagctccatctcggggacgacctctccaacctcggctgccagcggagctgctgctgttgctgagctgtccagcgttttgggcccatttcgctcgattgtttggcgatgaagcagcagagcagtggaggttttcttccgccgcaagagatgacgaggtgtctgaggacgaagaagccgatcagttgcgcgctctgggttggtttgccctgctcggcgttaggctggggcaggaggaagtcgaagaggaacggggacccgctatggctgtgagccccctgggcgcagtccctaaaggtgctccactgctggtctgtggcagcccctttggcgcattttgccccgacatcttcctgaacacactgtcttgcggagtgctcagtaatgtcgctggccctcttctccttacagatgccagatgcttgcccggaactgagggaggcggagtgttcaccgcccgaccagccggtgcactggtggcgctggttgtggccccactgtgttggaaggcaggagagtgggttggttttaccctgctctgtgctgccgctccactgttccgggctgcacgtgatgcgctgcaccgtctgccccactccacagcagcactcgccgcactgctcccacctgaggtgggggtgccatggggcctgccccttagggattctggtcctctgtgggcggcagccgctgttctggtggagtgcggaaccgtgtggggctccggcgtggctgtggcgcctagactcgtggtgacatgcagacacgtttctccacgagaggcagctcgggtcttagtgcggtctaccacgccaaagtctgtggcaatttggggccgagtagtcttcgccactcaggaaacatgcccctatgatatcgccgtcgtctcacttgaagaggatttggatgacgtgcctatccctgtccctgcagaacattttcacgagggcgaggcagtatccgtggtcggatttggggttttcggtcagtcatgtggaccatccgtgaccagtggcatcttgtcagcagtggtgcaagtgaacggaaccccggtcatgctgcagaccacttgtgccgtgcatagcgggtcatccgggggacctctcttctcgaaccactcgggaaatctcttgggcataattacctccaacacgagagataataacaccggagccacatatccacacttgaatttcagcatccctattacagtcctgcagcccgcattacagcagtacagccaaacccaagatctggggggactgcgcgagctggacagagcagccgagcctgttcgggtggtgtggcgacttcagaggccgctggctgaggcccctcgtagcaagctatag

SEQ ID NO: 245388 - DNA, 1197 bp, synthetic construct
  misc_feature 1..1197: note = Description of Artificial Sequence: Synthetic coding sequence
  source 1..1197: mol_type = other DNA
atgagacggcagtgggggtccgcgatgcgggctgccgagcaggctgggtgcatggtttcagcctcaagggcaggccagcctgaagcaggcccatggagctgcagcggagtcatcctgtcaaggagtccaggcctagttctctgccatgggggtatctttgtccctttcctcagggctgggagtgaggtcctcacagccgctggtgcagtcttcctacccggtgactcctgtcgggatgacctgagacttcacgttcagtgggcccctaccgcagcagggcctggtggaggagcagaacgaggaaggcctggcctctgtactccccagtgtgctagcctggagcccggacctccagctccctcaagggggagaccccttcagccgcgactccccgctgagctgctgctacttctttcctgccctgccttttgggcccattttgctcgcctgtttggggatgaggcagctgagcaatggaggtttagtagtgctgctcgggatgacgaagttagcgaggatgaagaggctgatcagctaagagctctgggctggttcgctctgctgggcgttcgcctcggccaagaggaggtcgaagaggagcgcggtccagccatggctgtatccccactgggagcggtcccaaaaggtgcccctcttttggtgtgtgggagccccttcggggctttctgccccgacatctttttaaataccctgagctgcggagtgctgagcaatgtcgctggacccctactcctaacagatgcccgatgcctgccaggcactgaaggtgggggtgtttttactgcaaggcctgctggggcactggtcgcacttgtagtggctcccttgtgttggaaagcaggtgagtgggtcggatttaccctgctctgtgccgctgccccattatttagagccgcacgcgacgctttgcaccgactgccacatagtaccgcggctttggccgcattactaccccctgaggtgggcgttccttggggtctgcctcttcgcgactccggcccactctgggctgccgcagcagtcctggttgaatgcgggactgtgtggggcagtggtgttgccgtggctccaagactggtggtaacctgcaggcacgtgtctcccagagaggccgctagagtcctcgtccggtcaacaactccgaaacacaatcatcagcagcatcctggtcagtag

SEQ ID NO: 245389 - DNA, 828 bp, synthetic construct
  misc_feature 1..828: note = Description of Artificial Sequence: Synthetic coding sequence
  source 1..828: mol_type = other DNA
atgttaaatcttctgcttctcgcgttaccagtcctcgctagtcgcgcttatgccgctcccgctcctggccaagccctgcagcgggtgggaattgttgggggtcaggaggcgccacgatccaaatggccttggcaggtcagtctgcgagtgcatggcccatattggatgcacttttgcggcggatcgctgattcatccccagtgggtgctcactgcagcacactgcgttggccctgacgttaaggatttggctgccctgcgcgtgcaacttcgggagcagcatctgtactatcaggatcagctgcttccagtctctagaattattgtccatcctcagttctacacggcacagattggtgctgacattgccctgctcgaactggaggaacctgtcaacgtgtcctcccatgtgcacactgtcaccctgcccccagcgagcgagaccttccctcctgggatgccttgctgggtcacagggtggggtgacgttgacaatgatgaaaggttgccccctccctttcctttaaagcaagtgaaagtgcctattatggaaaaccatatctgcgacgcgaaataccatctgggcgcttatacaggggatgatgtccgaatagtacgcgacgacatgctctgcgcaggaaataccagacgcgattcttgccagggcgattcgggcggaccgctggtgtgcaaagtaaatggtacctggctgcaggctggcgttgtgagctggggcgaggggtgcgctcagcctaaccgcccaggcatctacactagagtcacgtactatttggattggatccaccattatgtgccgaagaaaccttag

SEQ ID NO: 245390 - DNA, 849 bp, synthetic construct
  misc_feature 1..849: note = Description of Artificial Sequence: Synthetic coding sequence
  source 1..849: mol_type = other DNA
atgttgctcttggcccctcagatgctcaacctcctgctgttagcactgcccgtactggccagtagagcgtacgctgctcctgccccagggcaagcccttcagcgggttgggatcgtgggtggtcaggaagccccaaggtcaaagtggccatggcaggtgtctttgagggtgcatgggccatattggatgcacttttgcggtggctcactgatccacccccaatgggtattgaccgctgcgcactgtgtcggaccggatgtgaaggacctggcagctctgcgggtgcagttgcgcgagcaacacttgtactaccaggatcagctcctgccagtctctcgcattatcgtgcatcctcagttctacaccgctcagataggcgctgacattgccctgcttgaactggaagagcccgtaaacgtgtcatcgcacgtccacaccgtgactctgccccctgctagcgagactttcccccctggtatgccctgttgggtgacagggtggggggacgttgacaatgatgagcgcctcccacctccgtttcctcttaagcaggtcaaagttccaataatggagaatcatatatgcgatgcaaagtaccatcttggcgcttatactggcgatgacgtaagaattgtcagagacgatatgctgtgcgcaggaaatacacgcagggattcttgccagggtgattccgggggacccctggtatgcaaggtaaatggcacatggctgcaagctggagtggtctcctggggggagggttgcgcccagccaaacaggccaggcatctatacacgcgtaacatactacctcgactggattcatcactacgtgccaaaaaaaccatag

SEQ ID NO: 245391 - DNA, 2532 bp, synthetic construct
  misc_feature 1..2532: note = Description of Artificial Sequence: Synthetic coding sequence
  source 1..2532: mol_type = other DNA
atgtgggggcgactgtggcccttacttctctccatattgacggccaccgccgtgccaggtccttcgttgcggaggccatcccgcgagctggacgccaccccgaggatgacaatcccttatgaggaactcagcggcactcggcacttcaaaggacaagcgcagaattattccaccttgttgttggaggaagctagcgcaagactacttgtaggggcacgcggtgctctgtttagccttagtgccaatgacataggagacggagctcataaagagattcattgggaggcgtcacctgagatgcaaagcaaatgtcaccagaagggaaagaataatcagaccgaatgttttaaccacgtacggttcttgcagcgcctcaacagtacccacctatatgcttgcggaacacatgcctttcagccactatgcgcggctatcgatgccgaggctttcaccctcccaacgagctttgaagaggggaaggagaagtgtccctacgatcccgctcgaggattcaccgggctgattattgatggcggactgtatacggccaccagatatgagtttcggtccatccctgatatccggagatccaggcatccccattctctgagaactgaagagacccccatgcactggctcaacgatgcagagtttgtgtttagtgtgctggtgagagaatctaaggcttcagccgtcggcgacgacgacaaggtttactatttcttcaccgagcgcgctactgaggagggaagcggctcctttactcagtccaggtccagccaccgagttgctcgcgtcgcacgagtctgcaagggggatctgggcggaaaaaaaattctacaaaagaagtggaccagctttctgaaagctagattaatttgtcatatccctctctacgaaactttacgtggtgtctgcagcttggacgctgaaaccagctcgcgaacgcacttttatgcagctttcaccctctctactcagtggaagaccctcgaggccagcgctatttgtcgttacgaccttgcagaaatccaggctgtcttcgctgggccttatatggaatatcaggacggctccagacgctggggaagatacgagggtggcgtgcctgaacctagaccgggaagttgtatcaccgattctctgcgctcacaaggttacaactccagccaggatttaccatctctagtgctcgactttgtcaagctgcatcctctgatggcgagaccagttgtgcctactcggggtagacctctcctgctcaaacggaatatcaggtatactcatctgaccggcaccccggtgactacccctgctggccctacgtacgacctgctgtttcttgggaccgctgacggctggattcacaaggcagttgtgctgggcagtggtatgcacatcatcgaggaaactcaggttttcagggagagtcagagcgtagaaaacctggtcattagcctgctgcagcacagcttgtacgtgggggctccgtccggggtgattcagctaccactgtcttcgtgctcccgatataggagttgttacgactgtatcctggcacgagacccctactgcggatgggaccccggaacccacgcctgcgcagcagccactaccattgcaaaccgaagccagggctcccgaactgccctgatccaggacattgagagggggaaccgtgggtgcgagagctccagagatactggacctccccctcccttaaagacacggagcgtactcaggggggacgatgtcctgcttccctgtgaccagccgtccaaccttgcaagagctttatggcttctcaacggatccatgggtctcagcgatggccagggcggatacagagtgggagttgatgggctgcttgttacggacgctcagcctgaacattcaggcaactatgggtgttatgctgaggagaatggcctgagaactttgctggcatcatattctctgactgttaggcccgctacacctgccccagcaccaaaagcccctgccacaccaggggctcagctggctcctgacgtgcgcctcctctatgtgttagcgattgccgctctcgggggtctgtgcctgattcttgctagtagcctgttgtacgtcgcctgcctccgagagggcagaagggggcgtcggcgaaagtactcactgggtagggctagtcgcgctgggggaagcgcggtgcagctgcagactgtgtccggacaatgtccaggcgaggaggacgaaggcgatgatgaaggcgctggcggtttagagggctcctgtctccagattatccccggtgagggtgcacccgcaccgcctccaccaccccctcctccacctccggcagaattaacaaacggtctggtggccctgcctagcagactgagacgcatgaatggcaactcatacgtgcttctgcgtcaaagtaacaacggcgttccagccggtccatgttcattcgccgaagagctctcaaggatcctggaaaagcgtaaacacactcaactagtggaacagttggacgagtcctccgtgtag

SEQ ID NO: 245392 - DNA, 708 bp, synthetic construct
  misc_feature 1..708: note = Description of Artificial Sequence: Synthetic coding sequence
  source 1..708: mol_type = other DNA
atgctgagcctcctgttattagctttacccgtcttggcgagtcccgcatatgtggcgcctgctcctggtcaggctcttcagcagactgggatcgtgggcggacaagaggctccgcgttctaaatggccttggcaagtgtcattacgcgtgcgtgggccttactggatgcacttttgcggcggaagcctaattcatcctcagtgggtactgactgccgcacactgcgtggaaccagacatcaaagatttagctgcgttgagagtgcagttgagggaacagcacctgtactaccaggaccaattgctgccagtctctcgaatcatcgtgcaccctcagttctacattattcagaccggggcagacatcgcactgcttgagctggaagaaccggttaacatatcttcccatatccacaccgtgacactgcctcccgcatctgagacatttccccctgggatgccctgttgggtaaccggttggggggacgtggacaacaatgttcatctgccgccaccctatcccctgaaagaggttgaagtccccgtggtggaaaaccatctgtgcaatgccgaataccacacaggtctacataccggacattcctttcagatagtgcgagatgatatgctatgtgccggttccgagaatcatgactcctgtcaaggggatagtggtggaccacttgtgtgtaaggtgaatggtacttag

SEQ ID NO: 245393 - DNA, 4281 bp, synthetic construct
  misc_feature 1..4281: note = Description of Artificial Sequence: Synthetic coding sequence
  source 1..4281: mol_type = other DNA
atgcactcctctaaccccaaagtgagatcctcaccctccggtaatacacagtcttcacctaagagcaagcaggaggttatggtgaggccaccaactgtgatgtccccctcaggcaatccccaactggattcaaagttcagcaaccagggaaaacagggaggctcagcgtctcagtcccagcctagcccctgcgatagtaaatcaggagggcatacaccgaaggccctgcctggcccaggtggctccatgggactcaagaacggcgcaggtaatggagcgaagggcaagggcaagcgggagaggagcatttcagccgactcgttcgaccaacgggatccgggtacccccaacgacgactccgacattaaggagtgcaactcagctgaccacattaagagtcaagatagtcaacacaccccgcattcgatgacgcctagcaatgctaccgcccctagatcttcgactccatcacatgggcagacaaccgccacggaaccgaccccagcccagaagactcctgctaaggtagtttacgtgttcagtaccgagatggcaaacaaggccgctgaggcagtcctaaaagggcaagtggagacaattgtctcattccatatccaaaatatcagtaacaacaagacagagagatcaaccgcaccgctgaatacacagatttccgcattacggaacgaccctaaacccctcccccagcaaccgcctgccccagccaatcaggatcaaaatagcagccagaacacacggttgcagccaacacctcccattccggctcctgcacccaagcctgctgctcccccacgtcctctagaccgagaatccccaggggttgagaataaactgattccttccgtcggatctcccgcttccagcactcctctgcctccagacgggacaggacccaattctacccctaataacagagctgtcacacctgtgagtcaaggtagcaattctagctccgcagatccaaaagctccacctccaccaccggtgtcctccggggaaccccctacgctgggcgagaaccctgacgggctgtcacaagaacagctggagcaccgcgagcgctcactccagacgctacgagatatccagcgaatgctgttcccagatgaaaaggaattcacaggtgcccagtccggaggacctcagcagaatcccggtgtcctggacggcccacagaaaaagcccgaggggccaattcaggccatgatggcccagagtcagtctttaggcaaggggccaggccctcgcacggacgttggagccccttttggcccacagggccatcgcgacgttcctttctctcctgatgagatggtaccgccatccatgaactcccagtccggcacgattggtccagatcatctggatcacatgactccggagcagattgcctggctgaagctgcagcaggagttttacgaagaaaaacgacggaagcaggagcaggtggtggtgcaacaatgcagccttcaggatatgatggttcaccagcacgggcctagaggcgtcgttaggggtccaccacccccataccagatgactccgagcgaagggtgggcacctggagggactgaacccttcagcgatggcatcaatatgccccactcgctgccgcctagaggaatggcaccacaccctaatatgccaggctcacagatgcggctgccaggcttcgcaggtatgatcaattcagaaatggaggggccaaacgttcccaaccccgcaagccggccagggctgtcgggcgtgagctggcctgatgacgtccctaagattccagatggcagaaattttccgccaggacaggggatcttctccggcccaggcagaggagaacgattccctaaccctcaggggctgagcgaagagatgtttcagcaacagctggctgagaaacagctggggttgcctcctggcatggctatggaggggatcagaccgagcatggaaatgaatcggatgatcccaggtagccagcgtcatatggagcccggaaacaacccaatttttcctcgcattccagttgaaggtcctctttccccaagtcgcggagacttccctaaaggtataccaccccagatgggacctggacgcgagctagaattcggcatggtgcccagcgggatgaagggggacgtcaacctcaacgtaaatatggggagtaactcacagatgattcctcagaaaatgcgggaggccggagcagggccagaggaaatgctcaaattaaggccaggaggcagcgacatgctgcccgcacagcaaaaaatggtgccacttccgtttggcgagcatccacaacaggagtacggaatgggtcctcggccatttcttccaatgtctcagggcccagggtcaaacagtgggctccgaaatcttagagagcctataggacccgatcaaaggaccaattctaggctctcgcacatgccccctctgccattgaacccaagttctaatccaaccagcttaaacacggctcctcccgtgcaaagagggctcggaaggaagcccctggatatttccgttgccggatcccaagttcattcacctggaattaatcctctgaaatcacccacgatgcaccaagtccagagtccgatgctcgggtccccatctggtaatttaaagtctccacaaacacccagccaattggccggaatgctcgctggtcctgcggctgctgcatctatcaaatccccccctgttctcgggagcgcagctgcctcgcccgtgcacctgaagagtcctagcctgccagcaccatctccaggatggacgtcttctcccaagcctcccctacagagccctggcattccacctaaccacaaagctccactgactatggcatcaccggcaatgctcggcaatgtggagtcgggaggcccaccaccgccaaccgcctcgcagcccgcttctgtgaacatccccggttccctgccttcatctaccccgtacaccatgcccccagagcccactctgagccagaatccgctgtcaatcatgatgtcccgaatgtcaaagtttgcaatgcccagtagcacaccactttatcatgacgctattaaaaccgtggccagttccgacgacgactctcctcctgcacgctcacctaacttaccctctatgaataatatgcccggaatgggaattaacacccaaaaccctcgcatatctggccctaacccggttgtccccatgccaacattgagccctatggggatgactcagcccctgtctcacagcaaccagatgccaagtcctaacgcagtgggcccaaacatcccccctcacggcgtccccatggggccaggacttatgtcacacaaccctataatgggccacggctctcaggaacctcctatggtgccccaaggcaggatgggcttcccccaaggcttccccccagtacagtccccgccacagcaggtacccttcccccacaacggaccaagcggtggacaaggtagcttccccggaggcatgggcttccccggagaaggacccctgggccgacccagcaacctaccccagagtagcgccgacgccgctctttgcaaacccggtggtcccggtggacccgactccttcaccgttctcgggaacagtatgccatcagtgtttactgacccggatctgcaggaagtgattcggcctggagctaccggaatcccggaattcgatctaagcaggattatacctagtgagaagccctcccagacgttgcagtatttccccaggggcgaagtccccggaaggaaacagccccagggcccaggcccaggtttcagccatatgcagggcatgatgggtgagcaggcccctagaatggggctcgcgctgccgggtatgggtggccctggccctgtggggacacctgacatcccactgggaactgctccctccatgcctggccataatcccatgcggccaccggcatttttgcagcagggtatgatggggccacatcatcgcatgatgtcccccgcacagtccaccatgccaggacagccaaccttgatgtcgaatcccgcagctgcggtcgggatgatcccagggaaggatcggggacctgctgggctgtatacccacccaggaccagttgggagccccggaatgatgatgtcgatgcagggcatgatggggccacagcagaacattatgattcctccgcagatgcggccacgagggatggccgctgatgtgggtatggggggtttctcacaagggccagggaatcccggaaatatgatgttttag

SEQ ID NO: 245394 - DNA, 1221 bp, synthetic construct
  misc_feature 1..1221: note = Description of Artificial Sequence: Synthetic coding sequence
  source 1..1221: mol_type = other DNA
atgagtggctgccctttcctgggtaataattttggatacacattcaaaaaactccctgtggaaggcagtgaggaggataagtcccagactggcgtgaatcgggcatccaagggcggactcatttatgggaactacttacacttagaaaaagtcctcaatgcgcaagaactgcagtcagaaaccaagggtaataaaattcacgatgaacatttgttcattattacccaccaggcctatgagctgtggtttaaacagattctgtgggagctggattccgtgcgagagattttccagaatggtcacgtgcgcgatgagaggaatatgctcaaggttgttagccgaatgcaccgggtgagcgttatcctcaagctcctggtccagcagtttagcatactcgaaacgatgactgccttggacttcaacgattttagggagtacttatctcccgcttcgggctttcaatctcttcagttccggctgctagaaaacaagattggagtacttcagaatatgcgcgtgccatacaatcgccgacactacagggacaacttcaaaggggaggagaacgaactgttactgaagtctgagcaggagaaaactttactcgaactggtggaggcatggcttgaaagaacccccggactagagcctcatggctttaacttctgggggaagctggaaaagaatataacgcgcggtttggaagaagaattcattcggattcaagccaaggaagagtccgaagaaaaagaagaacaggttgccgagttccagaaacagaaggaggtgttgttgtccctgtttgacgagaagagacacgaacacctcttaagcaaaggggagcgcagattatcctatagggcgctgcagggagcactgatgatttacttttaccgcgaggagccaaggttccaggtgccttttcagctcttgacctcgctcatggatatcgattcactgatgaccaagtggcggtataaccatgtgtgtatggtgcatcggatgctgggttcaaaagctggcactggaggctctagcggctaccactacctgcgaagcacagtgtccgacagatacaaagtgtttgtggacctgttcaatctgtcaacttatctgatccccaggcattggattcccaaaatgaatcccactatccacaagttcctctacacagctgagtactgcgactccagctacttctccagcgacgagagcgactag

SEQ ID NO: 245395 - DNA, 1335 bp, synthetic construct
  misc_feature 1..1335: note = Description of Artificial Sequence: Synthetic coding sequence
  source 1..1335: mol_type = other DNA
atgatcgaagacaataaggagaacaaagatcattcactggaacgaggccgagcaagtttaatcttttccttaaagaatgaagtcgggggacttataaaggcgctcaagatattccaggaaaagcacgttaatcttctgcacattgagagtaggaagtctaaaagacgtaattcggagtttgaaatcttcgtcgattgcgacattaatcgcgagcaactgaatgatatattccatctgcttaagtcccatacgaacgtgttgagcgtgaatctgcccgataattttaccctgaaggaagacggaatggagaccgttccctggtttccaaagaagatctcagatcttgatcactgcgcaaaccgggtcctcatgtacgggagcgagcttgatgccgaccaccctgggttcaaggacaacgtatatcgcaagagaaggaagtatttcgcagatctcgcaatgaattacaagcacggggacccaattcctaaagttgaatttacggaagaagagattaagacttggggtacagtgttccaggagcttaacaagctctacccaacccacgcctgtcgcgagtacttgaaaaacctgcccctgttatccaagtactgcggatatcgcgaagataatattccgcagttagaagatgtgtccaactttctgaaagagcggacgggattttctatcaggcctgtagctggctatctctccccccgagatttcctgagtggtcttgcattccgggtctttcattgcacacagtacgttagacattcctccgaccccttttatacacccgagccagacacctgccacgagctgctcggacacgtgcctctgctggctgagccttcattcgcccagttttctcaggaaataggtctggcaagccttggtgccagcgaggaggcagtgcaaaaactggctacttgctatttctttactgtggaatttgggctctgtaagcaagacggccagctgagggtgttcggagccggtctcttatcatctatctccgaactaaaacacgctctcagcggtcacgcgaaggtgaagccatttgatcctaagattacttgtaagcaggagtgcctgatcactactttccaggatgtctactttgtctcagaaagcttcgaagatgccaaggagaagatgcgcgaatttacaaagactattaaaagaccttttggtgtgaagtacaatccatatactaggtcaattcaaatcttgaaagacaccaaatccatcacctccgccatgaatgagttacaacacgatctggatgtagtaagcgacgctcttgcgaaagtgagccgtaagcccagtatctag

SEQ ID NO: 245396 - DNA, 1401 bp, synthetic construct
  misc_feature 1..1401: note = Description of Artificial Sequence: Synthetic coding sequence
  source 1..1401: mol_type = other DNA
atgatcgaagacaacaaggaaaataaggaccatagcctggaacgcggacgcgcatccttgatcttctcactgaagaacgaggtcggtggcctcattaaggccctgaagatttttcaagagaagcacgttaatcttctgcatattgaatctcgcaagtcaaagagacgcaactctgagtttgaaatcttcgttgattgcgacattaatagagaacagttgaacgatatctttcacttgctgaagtcgcacacaaacgtgctctcggtgaatttgccagacaacttcactcttaaggaggacggaatggaaacagtgccatggtttcccaaaaagatcagtgatctggatcattgtgccaaccgtgttcttatgtacggaagcgaactggatgcagaccacccgggattcaaggacaatgtttatcgcaaaaggcgaaaatatttcgccgacctcgcgatgaattataagcacggagaccctattcccaaggtggaatttactgaggaggagattaaaacatggggcaccgtgtttcaagagctgaataagttgtaccctacgcatgcatgccgggagtacttaaagaatctgccactcctctctaagtattgcggatacagagaagataatatccctcagctggaagatgtgtctaacttcttaaaggagagaactggtttttccattcgccctgtcgcaggctatctgagcccccgtgatttcctctccggactggcattcagggtgtttcattgtacacaatacgtgcggcactcttcggaccctttctacactccggagccagacacatgccatgagctgctgggacacgtgcccttgttagcagaaccctcattcgctcagttctctcaggaaattgggctggccagcttaggcgctagcgaggaggctgtgcaaaagctggccacatgttattttttcaccgtggagtttggtttgtgtaaacaggacgggcagctccgtgtgtttggcgcagggctgctcagcagtatatctgagctgaagcacgcgctctcaggacatgctaaagtgaagcctttcgaccccaagatcacctgcaaacaggagtgtctaatcaccaccttccaagacgtgtatttcgtgagcgagtcctttgaggacgccaaggagaagatgcgagagtttaccaagactattaagcggccatttggagtgaagtacaacccatatacccgatctatccagatcttgaaggatactaagtctatcacgagtgcgatgaatgaactacagcacgacctggacgtagtgagcgacgctcttgccaagtccctgaatgaggatgtcttgcaggtctccgttttcgctctgctcctgttcctgcctagtctgcacggggaatgccaccccgacacctag

SEQ ID NO: 245397 - DNA, 753 bp, synthetic construct
  misc_feature 1..753: note = Description of Artificial Sequence: Synthetic coding sequence
  source 1..753: mol_type = other DNA
atgcagcctgccatgatgatgttctcctctaaatactgggcaaggcgcggattttcactggacagcgcagtacctgaagagcaccagcttctaggctccagcacactgaacaagccgaattctggaaaaaatgacgataaagggaacaaaggttcatcaaagcgggaggcggcaaccgagtctggcaagacagcagtcgtgttctctctgaagaacgaggttggaggactggtaaaggctctccggctattccaggaaaagagagtcaacatggtgcacattgaaagcaggaaaagcagaagacgaagttctgaggtggaaatattcgtcgactgtgaatgcggcaagacagagtttaacgaactcattcagcttctcaaatttcagacaactatcgtgactctaaaccctcccgagaacatatggacagaggaagaagagctcgaggatgtgccctggtttcccaggaagattagtgaactagacaagtgcagccatagggtgctcatgtatgggagcgagctggacgcagatcaccccggattcaaggacaacgtatacagacaacgcaggaaatactttgtggatgtcgccatgggctacaaatacggaccgcgtctcctggcagctatcggcgattgggagttccagctgttcagtgtgagttcatcactctccagttcaagtctatgcatgctatcagtccatattctgatggatgttcgcagcattgtcgttgccgtagatatatag

SEQ ID NO: 245398 - DNA, 1473 bp, synthetic construct
  misc_feature 1..1473: note = Description of Artificial Sequence: Synthetic coding sequence
  source 1..1473: mol_type = other DNA
atgcagcctgcaatgatgatgttttcctctaaatactgggctagaaggggcttttccctggactctgctgtccccgaagagcaccagctgctaggaagttccactcttaataaacctaacagcggaaaaaatgacgacaagggaaacaagggctctagtaagagggaagccgctaccgaatccggaaagaccgcggttgtcttcagcctgaagaatgaggtgggcggtctagtaaaagcactacgactgttccaggagaaacgggtgaacatggtgcacatcgagagccgaaagtcgcgaagaagatccagcgaggtagagatttttgtggattgcgaatgtggaaaaacagaatttaatgagcttatacagctgctgaagtttcaaaccacaattgtcacccttaaccctcccgaaaacatttggaccgaggaggaagagctggaggatgtcccttggttcccaaggaagatctccgagctggacaaatgcagccatagagtattgatgtacggctctgaactcgacgccgaccatcctgggtttaaagataatgtctacaggcagaggaggaaatactttgtcgatgtggcaatgggttataaatacggacagccaattccacgggttgagtacaccgaggaagaaacaaaaacatggggcgtggttttccgtgaactcagcaagctctaccctacacacgcctgccgggagtacttgaaaaactttccgttattaaccaagtactgtggctacagagaggataatgtaccccaactcgaggacgtgtccatgtttctgaaggagcgttccggttttacagttcgacctgtcgcaggatatctgtccccaagagatttcctagctggcctggcctatagggtcttccactgtacacaatacatccgccacggaagtgatccactctataccccggaacccgacacatgccacgagttactgggtcacgtgcccctcctcgccgatcccaagtttgcccagttcagccaggagattgggctcgcttcactgggtgcctcagacgaagatgtacagaagttggctacttgctatttcttcacaatcgaattcggactgtgtaagcaggagggacagttgagagcctacggcgctggcctgttatcttcaattggggaattgaagcacgctcttagtgacaaagcctgcgtgaaagcttttgaccccaagacaacttgcctccaagagtgtctgatcacaacctttcaagaagcgtatttcgtgtctgaaagcttcgaagaggctaaggagaaaatgcgggactttgctaaaagcatcacaaggcccttttctgtctactttaacccctacacccagtcaatcgagattctgaaggataccaggtctatcgagaatgtggtccaagacctgagatctgatcttaacacagtttgcgatgctctgaacaagatgaatcagtaccttggaatttag

SEQ ID NO: 245399 - DNA, 525 bp, synthetic construct
  misc_feature 1..525: note = Description of Artificial Sequence: Synthetic coding sequence
  source 1..525: mol_type = other DNA
atgtcctcagccgcagccgatcactgggcctggctcctggtgctgtcctttgtcttcggctgtaacgtgctgcgtatattactgccttcatttagctctttcatgtcgcgcgttcttcagaaggacgctgaacaggaaagccaaatgcgcgcagaaatccaagatatgaagcaggaactttccacggtcaatatgatggacgagtttgcccgttatgccaggctggagaggaaaattaataaaatgacagacaaactgaaaacgcatgtgaaagcccgtacggctcagttggccaaaattaaatgggtgatttccgtcgctttttacgtcctgcaggctgccctcatgatctcactaatttggaagtattactccgttccagtggcagtggtgccatccaagtggataacacctctggatagactggtcgccttccctacgagagttgcaggaggagtgggcatcacctgctggatcctggtgtgcaacaaggtagtggcaatcgtcctgcatcccttttcctag

SEQ ID NO: 245400 - DNA, 423 bp, synthetic construct
  misc_feature 1..423: note = Description of Artificial Sequence: Synthetic coding sequence
  source 1..423: mol_type = other DNA
atgtcacgcgtgctgcagaaggacgctgagcaagagtcacagatgcgcgctgagatccaagacatgaagcaggaactgagcacagttaatatgatggatgagtttgcaaggtatgcacgtctggagaggaagataaataagatgactgacaaactgaagacccatgtcaaggccagaaccgcccagctggctaagatcaagtgggttatatctgtggccttctatgtgctgcaagcagccctgatgatctccttgatttggaagtactatagtgtgccagttgccgtggtcccaagcaagtggattacccctcttgacaggcttgtggcattccccacccgtgtggccggaggtgttggaataacttgctggatccttgtctgcaacaaggtggtcgctatcgtgctccaccctttcagctag

SEQ ID NO: 245401 - DNA, 423 bp, synthetic construct
  misc_feature 1..423: note = Description of Artificial Sequence: Synthetic coding sequence
  source 1..423: mol_type = other DNA
atgagcagagtgcttcagaaggacgctgagcaagaatcccagatgagagccgagatacaggacatgaaacaggagctctccacagtgaatatgatggacgaattcgctagatacgccagactcgagcgtaaaatcaataagatgacagacaagctcaaaactcatgtgaaggcccgtaccgcacaactcgctaagattaaatgggttatcagtgtggccttctacgtgctccaggccgcacttatgattagccttatttggaaatactattctgtgcccgtagccgtcgttcccagcaagtggatcacacctctcgataggctagtggcgttccccacccgggtggcaggcggtgtcggcattacttgctggattctggtatgtaacaaagtggtcgccatcgtgctgcatccattttcatag

SEQ ID NO: 245402 - DNA, 519 bp, synthetic construct
  misc_feature 1..519: note = Description of Artificial Sequence: Synthetic coding sequence
  source 1..519: mol_type = other DNA
atgagctctgctgcagcagatcattgggcatggcttctggtgctctcattcgtgttcggttgcaacgtgctccgtatccttctgccctctttttcttcatttatgtctcgcgtgctgcagaaagacgctgagcaggagtcccagatgagagcggagattcaggatatgaaacaggagctctctacagttaatatgatggacgagttcgcaagatacgcgcgactcgaaaggaaaattaacaaaatgactgacaagttgaaaacccacgtgaaagccagaacagcccagctggccaaaatcaagtgggtgatcagcgtggcattttacgtactccaggctgcgctgatgatttcactgatctggaaatactactccgtgcctgtcgctgtggtgccttccaagtggattacgcccctggacaggcttgtggcctttcccacccgcgttgccgtgttcagctcaagcatctggacatcaaagtgtttctcaagcccagataaaagcatattagaaaagtag

SEQ ID NO: 245403 - DNA, 1083 bp, synthetic construct
  misc_feature 1..1083: note = Description of Artificial Sequence: Synthetic coding sequence
  source 1..1083: mol_type = other DNA
atggcactgcactcaatgaggaaggccagggagcgctggtcctttataagagcgcttcacaagggctccgctgcagctcctgctctccagaaggattcaaagaaaagagtattcagtggcatccagccaactggaatcctccaccttggcaactatctgggagccatcgagagctgggttcgtctgcaggatgaatacgactccgtgctctacagtatcgtggatctgcattccataaccgttccccaagacccagcagtgctgagacagtccattttggacatgaccgctgtgctattggcatgcgggattaaccctgaaaagtctatcttgttccagcagagtcaggtttcagagcacacacaactatcatggattctctcatgtatggtcagattacccagactgcaacacctgcatcaatggaaagctaagaccacgaagcagaagcacgacgggaccgtaggactcctgacttatcccgtgttacaggccgcagacatcttactttataagtccacccacgtgcctgttggggaggaccaagttcagcacatggagctcgtgcaagatttggcccaaggttttaataagaaatacggggaattcttcccagtccctgagtctatcctaacgagtatgaagaaggtgaagagtctgagagatccctcagcaaaaatgtccaagtctgatcctgataagctcgccaccgtccgcatcacggactcaccggaggaaatcgttcagaaattcagaaaggccgtgacggactttacgtcggaagtgacctacgatccagctgggagggctggggttagcaacatcgtagccgttcacgctgcagtgacaggccttagcgtggaagaagtagtcaggagatcagctggaatgaatactgcgagatataaactcgctgtggcagacgcagtgatcgaaaaatttgcaccaattaaaagagaaattgagaagctgaaactcgataaggatcacctagagaaagtgctccagatcgggtcggccaaagccaaagaactggcatatacggtttgtcaggaggtaaagaagttagttggcttcctgtag

SEQ ID NO: 245404 - DNA, 663 bp, synthetic construct
  misc_feature 1..663: note = Description of Artificial Sequence: Synthetic coding sequence
  source 1..663: mol_type = other DNA
atggctctccactcaatgcggaaggctcgggagcgctggtctttcataagggcattgcacaagggatcagctgccgctcccgctttgcagaaggattccaagaagagagtcttcagcgggatccagcctacaggcatccttcatctcggtaactacctgggagccattgagtcctgggtgcggctgcaagatgaatacgactccgttctgtacagtatcgttgatctccactccataactgtgccgcaagaccccgcagtcctgcgacagtctattctcgacatgaccgcagtactactggcctgcggcattaaccctgaaaagagcatcttgttccagcagtcacaagttagtgaacacacccagttatcatggatcctgtcatgtatggtccggttaccacgcctccagcacctccatcagtggaaagccaaaaccaccaagcaaaaacacgatggtacagtcgggttgctgacttacccagttttacaagcagccgatattttgctctacaagtccacccacgttccagtgggagaagatcaggtgcagcacatggagctcgtccaagatctggctcaaggatttaacaagaagtacggcgagtttttcccagtgccggagagcatcctgagtatgtgcgtgctggtgttcctcacctag

SEQ ID NO: 245405 - DNA, 801 bp, synthetic construct
  misc_feature 1..801: note = Description of Artificial Sequence: Synthetic coding sequence
  source 1..801: mol_type = other DNA
atgactgctgtactactggcttgcggcattaatccagagaagtcaatattgttccagcagtcacaggtgtcagaacacacacagctgagttggattctttcatgtatggtgcgtttgccgagattgcagcacctgcaccagtggaaagcaaaaacaactaaacaaaaacacgacgggaccgtggggctgcttacctatcctgtgctgcaggctgccgacattctgctctataaaagcacacatgtgcctgttggcgaggatcaggtccagcacatggagctggtccaggaccttgcacaaggatttaataagaagtacggtgaatttttccccgtgccagaaagtatcctgactagcatgaagaaagtgaagtctctgcgggacccgagtgccaaaatgtctaaatctgatccagataaattggcaacagttcgtattacagattctcccgaggagatcgtgcaaaagttccgaaaagcagtgaccgactttacgtctgaagtaacctacgatcccgctggcagggccggagtgagcaatatcgtggccgtacatgctgcggtcactggtctgtccgtggaggaggtggtacgaaggagcgctggaatgaacacagccagatataagctggctgttgccgacgccgttatcgaaaaatttgccccaattaagagggagattgaaaagcttaagcttgataaggatcaccttgaaaaggtcctgcaaatagggtcagccaaagccaaagagctcgcctacacagtatgccaggaggtaaagaagctggtgggcttcctgtag

SEQ ID NO: 245406 - DNA, 1293 bp, synthetic construct
  misc_feature 1..1293: note = Description of Artificial Sequence: Synthetic coding sequence
  source 1..1293: mol_type = other DNA
atgttggttagtctaaagatgtcctacaaagcagcagccggtgaggactacaaagccgactgcccaccaggcaatccagcacccacctctaatcacggacccgacgctactgaagccgaggaagatttcgtggacccttggactgttcagaccagctccgctaaggggatagactacgataagctgattgtgcgtttcgggtctagcaagatcgataaagagctcatcaaccggatcgagcgtgcaaccggccagcggcctcaccacttccttcggagagggatcttcttttcgcacagggacatgaatcaggttcttgatgcctatgaaaataaaaagccattttatctgtacacaggcaggggtccgagtagcgaggccatgcatgtcgggcacctgatcccgttcattttcacaaaatggctccaagacgtgttcaacgtgccattggtgatccagatgaccgatgatgaaaagtatctgtggaaagacctgacccttgatcaggcatactcctacgccgtggagaatgcaaaagatatcattgcttgcggctttgatataaacaaaacctttattttcagcgatctggactacatgggcatgtcttcaggtttttataaaaacgtcgtgaaaattcaaaagcatgtcaccttcaatcaggtcaaaggcatttttggatttaccgacagcgactgtattggcaagatttccttcccagccatccaggcggctccctccttttcaaatagcttcccacagatcttcagagatagaacagatatacaatgtctgattccgtgcgccatcgaccaggacccatactttcggatgacgcgggacgttgccccacgcattgggtatcctaaacctgccttgttacatagcacttttttccccgcattacagggtgcccagactaagatgagcgcctccgatccaaatagtagcatcttcctgactgataccgcaaagcagatcaagacaaaggtgaataagcatgcgtttagcggaggtcgagacacgatcgaagagcatcgtcaattcgggggtaattgtgacgtggatgtgtcctttatgtatttaactttcttcctggaggatgacgataaactcgagcagattagaaaggattatacatctggtgctatgctgactggcgagctgaagaaagcgttgattgaagttctgcagcctctaattgccgaacaccaagcccgacggaaggaggtaacggatgaaattgtgaaggagttcatgaccccgcgtaaactatccttcgattttcagtag

SEQ ID NO: 245407 - DNA, 1416 bp, synthetic construct
  misc_feature 1..1416: note = Description of Artificial Sequence: Synthetic coding sequence
  source 1..1416: mol_type = other DNA
atgcccaactcggagccggcatccctgttagagctctttaacagcattgccacccagggggagctagtgcggagtcttaaggcaggcaacgccagcaaagatgagatcgatagtgctgtgaagatgcttgtgtcccttaaaatgagttacaaggccgctgccggtgaggattataaggccgactgccccccaggaaacccagcgcctaccagcaatcatgggccagacgcaactgaggctgaggaggattttgttgacccttggacagttcaaacgagctccgcgaaaggtatcgactacgataagttgattgtgcgtttcgggagttccaaaattgataaggaattgatcaataggattgagcgcgcaacagggcaacggcctcaccactttctgcggagagggatctttttttcccacagggatatgaaccaggttctggatgcctacgagaataaaaagcccttctacctctacacaggtaggggaccctcctctgaggccatgcacgtgggacacctgattcccttcatctttaccaagtggctccaggatgtgtttaacgtgcctctggtcattcagatgactgacgacgaaaagtatttatggaaagaccttactctagaccaggcctacagctacgctgtggagaatgcaaaagacataattgcttgtgggtttgatattaataagacatttatcttctcagacctggattatatggggatgtccagcggattttacaagaacgtggttaagattcagaagcatgttacattcaatcaggttaaagggattttcggatttacggatagtgattgtataggaaagatatccttccccgcaatccaggccgctccaagtttctcaaattcatttccacaaatctttcgtgatcgcacagacatccagtgtctgatcccttgcgctatcgatcaagatccttatttccgaatgactcgagacgtcgcccctaggattggttaccccaaacctgcactcctgcactcaacctttttcccagctctgcaaggggcacagaccaagatgtctgcatcagatccaaatagctccatctttctcacagataccgccaaacagattaaaaccaaagtgaacaaacacgcctttagcggcggaagagacacaattgaagagcaccggcaatttggaggtaactgtgacgtagatgtctcattcatgtatctaaccttttttctggaagatgacgataagctggaacagattcgtaaggattacacctcaggcgcaatgctgactggggagttaaagaaagcactgatagaagtgttgcagcctttgatcgcagaacaccaggctcgacgaaaggaagtcacagatgaaatcgtcaaggagttcatgactccccgaaaactgagctttgactttcagtag

SEQ ID NO: 245408 - DNA, 1293 bp, synthetic construct
  misc_feature 1..1293: note = Description of Artificial Sequence: Synthetic coding sequence
  source 1..1293: mol_type = other DNA
atgctcgtgagtctaaagatgagctataaggcggcagcgggtgaagattacaaggccgactgtccgccaggcaaccctgccccaacttctaaccacggcccagacgccaccgaggctgaggaggacttcgtggacccttggaccgtccaaacgagcagcgcaaagggcatcgactacgacaaactgatcgttcgttttggcagctccaaaattgacaaagaactaatcaataggatcgagcgcgctacagggcagagaccccaccactttctcagacgcggtatcttcttttctcaccgagacatgaaccaagtgctagacgcctacgaaaataagaagccgttctatctttatacagggagaggcccaagttcagaagctatgcacgttggccacttaatccctttcatatttacgaagtggctccaggatgtattcaatgtgccacttgttattcagatgacagatgatgagaaatatttatggaaagatcttacattggatcaagcttatagctatgccgtcgagaatgcaaaagacattattgcatgtggtttcgatattaataagacattcatcttttcagacctggattatatggggatgtcttcagggttctataaaaacgtggtgaaaattcagaagcacgttaccttcaatcaagtgaaaggaatcttcggatttactgatagcgactgcattggtaaaatctcattccctgcaattcaggccgctccgtccttctctaattccttcccacagatcttcagagacaggacagatatccagtgtctcataccttgcgccatcgaccaagatccttatttcagaatgacacgggacgtggcccctcgcatcggctaccctaaaccagcgctgctccacagcacatttttcccagctctgcagggcgctcagacaaagatgtccgcctccgatcccaactcttccatcttcttgacggacaccgctaagcaaatcaagaccaaagttaataaacacgcctttagtggcggacgggatacaatagaggaacatcgtcagttcgggggaaattgtgatgtggacgtgagctttatgtacctgacattcttcctggaagatgatgataagctcgaacagatcaggaaggactacaccagtggagccatgctgacaggggagttaaagaaggccctcatcgaagtcttgcagccactaattgcggagcatcaggcaagacggaaggaagtcaccgatgaaattgtgaaagaattcatgaccccaaggaagctgtccttcgacttccagtag

SEQ ID NO: 245409 - DNA, 1416 bp, synthetic construct
  misc_feature 1..1416: note = Description of Artificial Sequence: Synthetic coding sequence
  source 1..1416: mol_type = other DNA
atgcccaacagtgaaccagcatctctcctggaactatttaatagcatcgctacgcagggagaactggtcagatccttgaaagctggaaacgcttcaaaggatgaaatcgattccgctgttaaaatgctggtcagtttgaaaatgtcttacaaggcagcagcaggcgaggattacaaagctgactgtccacccggaaatccagccccaacttcaaatcacggaccagatgctacagaggcagaggaagacttcgtcgacccgtggaccgtgcagactagctctgcaaaagggatcgactacgacaaacttatcgtgcggtttggaagctctaagatcgataaagaacttattaatcggatcgagagagctaccgggcagcgtccccaccactttctacggaggggaatcttcttctcccatcgggatatgaatcaagttctggatgcctatgaaaataaaaagcctttttacctgtacacgggcaggggccctagttccgaggcgatgcacgtcggccatttgattccctttattttcactaagtggcttcaagacgtgttcaatgtgccactagttatccagatgaccgacgacgagaagtatttgtggaaggatcttactcttgaccaggcctattcctacgcggtcgagaatgccaaagacatcattgcttgcggcttcgacatcaacaaaacatttatctttagcgacctggattatatgggtatgtcctcaggattttataagaatgtggtgaagatccaaaaacacgtgacattcaaccaggtcaaggggatctttgggtttactgactctgattgtatcggaaagatttcttttccagctatccaggccgctccatcttttagtaatagctttcctcagatctttcgggatcgcaccgacattcagtgtctgatcccgtgcgcgatcgaccaggatccatatttccgcatgacccgggacgtcgctcctcgtatcggataccccaagcctgctttgttacactctactttttttcccgctcttcagggggcacagaccaagatgtcggcaagcgacccaaactcaagtatcttcctgacggacacagccaaacaaatcaagactaaggtgaacaagcacgccttctccggaggcagggatacgatcgaagagcaccgccagttcggaggcaactgcgacgtggacgtgtctttcatgtacctaacatttttcttggaagacgacgacaaattggaacaaatccggaaggattacactagcggagcaatgctgactggagagctcaaaaaagccttgatcgaggtcctacagccactgatcgcggagcaccaggcgagacgcaaggaggtgacagacgagatcgttaaagaattcatgacccccagaaaattgagctttgattttcagtag

SEQ ID NO: 245410 - DNA, 684 bp, synthetic construct
  misc_feature 1..684: note = Description of Artificial Sequence: Synthetic coding sequence
  source 1..684: mol_type = other DNA
atgctcgttagcctcaagatgtcttataaggcagcagcgggagaagactacaaggcagactgtccacctgggaacccagctccgaccagtaaccacggccctgatgctaccgaggcagaggaggacttcgtagatccgtggactgtgcagacttcaagcgcgaaaggcattgactacgacaagctgattgttaggttcggttctagcaagatagataaagaattgatcaacagaatagagcgtgccaccggccagcgcccacatcacttcctgaggcgcggaattttcttctctcatcgcgacatgaaccaggtgttagatgcttatgaaaacaaaaagcctttctacctgtacaccgggaggggccctagtagcgaagccatgcacgtgggccatcttatcccattcatcttcacaaaatggcttcaagacgtattcaatgtgcctttggtgatccaaatgaccgatgacgagaaatacctctggaaggatcttaccctcgaccaggcatattcttatgcagtggagaacgcgaaggatatcatcgcctgtggattcgatatcaataagaccttcatcttcagcgacttggactacatggggatgagctcagggttctacaaaaacgtggtgaaaatacagaaacatgttacatttaatcaggtcaagggcatcttcggctag

SEQ ID NO: 245411 - DNA, 324 bp, synthetic construct
  misc_feature 1..324: note = Description of Artificial Sequence: Synthetic coding sequence
  source 1..324: mol_type = other DNA
atgccaaacagcgagccggcaagtctcctggaactttttaactccatcgctacccaaggggaactagtgcggtccctcaaagcaggaaatgcttcaaaggatgaaatcgattccgcagtgaagatgctggtgagcctgaagatgtcctataaggcggcagcaggagaagattacaaggctgactgtccgccagggaatccagcaccaacttccaatcatggcccagatgctacggaggcagaagaagattttgtggatccttggacagtccagacttccagtgcaaaaggaatagactatgacaagcttatcgtgcgcttctag

SEQ ID NO: 245412 - DNA, 453 bp, synthetic construct
  misc_feature 1..453: note = Description of Artificial Sequence: Synthetic coding sequence
  source 1..453: mol_type = other DNA
atgcctaacagcgaacctgcctccttacttgaactgtttaatagtattgctacacagggcgagctggtccgctcccttaaagcagggaacgcgtcaaaagacgagattgacagtgctgtaaagatgctagtgtctttgaagatgagctacaaggccgctgccggagaggactataaggcagattgccctccaggtaaccccgcaccaaccagtaatcacggtccggatgcaaccgaagccgaagaggattttgtggatccttggactgtccaaacgagcagcgccaaaggaattgattacgacaagctcatcgttagattcggtagctccaagatagataaggagttgataaatcggattgagagagcaacgggccagcgtccccatcactttctccgcaggggaatctttttcagtcacagggatatgaatcaagtgttggacgcctactag

SEQ ID NO: 245413 - DNA, 294 bp, synthetic construct
  misc_feature 1..294: note = Description of Artificial Sequence: Synthetic coding sequence
  source 1..294: mol_type = other DNA
atgcccaacagtgagcccgcatcactcctggagctcttcaattcaatagcaacacagggagagctcgtacgctcactgaaagctggtaacgccagcaaggacgagatcgatagtgccgtgaagatgctcgtgtccttgaagatgagctataaggctgcagcaggagaggattacaaagcagattgcccgccaggaaacccagccccaacctctaaccatggccctgacgctaccgaggctgaggaggactttgtcgacccatggacagtccagacttcgtctgctaaagggtag

SEQ ID NO: 245414 - DNA, 81 bp, synthetic construct
  misc_feature 1..81: note = Description of Artificial Sequence: Synthetic coding sequence
  source 1..81: mol_type = other DNA
atgcctaactctgaaccagctagcctgctggagttattcaattccattgccacccagggcgaacttgtgcggtccctgtag

SEQ ID NO: 245415 - DNA, 318 bp, synthetic construct
  misc_feature 1..318: note = Description of Artificial Sequence: Synthetic coding sequence
  source 1..318: mol_type = other DNA
atgccaaattcagaacctgcatccttactggagctgtttaactcaattgcaacacaaggagagctcgtgcgctcactgaaagcaggcaacgcaagtaaagacgagattgattcagccgtgaagatgctggtgtccctcaagatgtcatataaggccgctgcaggagaggattacaaggcagattgccctcccggaaaccccgcaccaacgagcaaccacggaccagatgccaccgaagcagaagaagacttcgttgacccctggacggtgcagacatctagcgctaaaggtatcgattatgacaagttgattgtttag

SEQ ID NO: 245416 - DNA, 102 bp, synthetic construct
  misc_feature 1..102: note = Description of Artificial Sequence: Synthetic coding sequence
  source 1..102: mol_type = other DNA
atgcctaatagtgaaccagcgtcattgcttgaactattcaattccatcgctacacagggcgaattggtgcgcagtcttaaggccggaaacgcctccaagtag

SEQ ID NO: 245417 - DNA, 207 bp, synthetic construct
  misc_feature 1..207: note = Description of Artificial Sequence: Synthetic coding sequence
  source 1..207: mol_type = other DNA
atgcctaactcggaacctgcctctctcctcgagctgttcaacagcatcgccacacaaggggaactggtgcggagtctcaaggcgggtaatgcctccaaagatgagattgatagcgccgtgaagatgctggtcagcttgaaaatgtcctacaaggcagccgctggggaggactacaaggcagattgtcctcctggcaaccctgcttag

SEQ ID NO: 245418 - DNA, 375 bp, synthetic construct
  misc_feature 1..375: note = Description of Artificial Sequence: Synthetic coding sequence
  source 1..375: mol_type = other DNA
atgcccaactccgaaccagctagtttgcttgaactgttcaactccatcgctacacagggagagctggtccgaagtcttaaagctggaaacgcctctaaagacgagatcgatagtgcagtgaaaatgctggtgtccctcaagatgagctataaagctgcggcaggagaagactataaggccgattgccctcctgggaatcccgcacccactagtaaccacggaccagacgcaacagaggccgaagaggattttgtggacccatggacagtacaaacgtcctctgcaaagggcatcgattacgataagctgatcgtgcggttcggaagtagcaagatcgacaaagaattgattaatcgcattgagcgggcaacatag

SEQ ID NO: 245419 - DNA, 261 bp, synthetic construct
  misc_feature 1..261: note = Description of Artificial Sequence: Synthetic coding sequence
  source 1..261: mol_type = other DNA
atgccaaattccgaaccagcttctttgctagaactgttcaactctattgccacacaaggcgagctggtacgctcattgaaggcaggcaacgcgagtaaggatgaaatcgattctgcagtcaagatgctggttagcctgaagatgagctacaaggctgcagcaggggaggactacaaggctgattgtcccccaggcaaccctgctcctactagtaatcatggaccagacgccaccgaggcagaggaagattttgttgactag

SEQ ID NO: 245420 - DNA, 168 bp, synthetic construct
  misc_feature 1..168: note = Description of Artificial Sequence: Synthetic coding sequence
  source 1..168: mol_type = other DNA
atgccaaattccgaacctgcttctctgctcgagctcttcaatagtattgctactcagggcgagctggtccgctcattgaaggcgggtaacgccagtaaagatgaaatagacagcgccgtgaagatgttggtgagcctaaaaatgagctacaaggccgctgccggatag

SEQ ID NO: 245421 - DNA, 192 bp, synthetic construct
  misc_feature 1..192: note = Description of Artificial Sequence: Synthetic coding sequence
  source 1..192: mol_type = other DNA
atgccaaacagcgaaccagccagtcttctcgagctttttaatagtatcgccacacaaggtgagctcgtgaggtcactcaaggccggaaatgcgagcaaagatgagatagatagtgcggtgaagatgctcgtctctttaaaaatgtcatataaggcagccgctggagaggactataaagctgactgcccgtag

SEQ ID NO: 245422 - DNA, 213 bp, synthetic construct
  misc_feature 1..213: note = Description of Artificial Sequence: Synthetic coding sequence
  source 1..213: mol_type = other DNA
atgccaaatagtgagccagccagcttgctcgaactgttcaacagcatcgctactcaaggagagctcgtcaggtcgctgaaggctgggaatgcctctaaggacgagattgactctgccgtgaaaatgctcgtctctcttaagatgagctataaagcagccgcaggcgaggactataaagcagactgcccccctggcaatccagccccaacctag

SEQ ID NO: 245423 - DNA, 177 bp, synthetic construct
  misc_feature 1..177: note = Description of Artificial Sequence: Synthetic coding sequence
  source 1..177: mol_type = other DNA
atgccaaatagcgagcctgcctccctcctagagttgtttaatagcatagccactcagggcgagctggtacggagcctaaaagccggaaatgcgtccaaagatgaaatcgactctgccgtgaagatgctggtctccctgaaaatgtcctacaaagccgcagctggtgaggactactag

SEQ ID NO: 245424 - DNA, 423 bp, synthetic construct
  misc_feature 1..423: note = Description of Artificial Sequence: Synthetic coding sequence
  source 1..423: mol_type = other DNA
atgctcgtgtctctaaagatgtcctataaggctgccgcaggtgaagattataaggctgattgtccacctggcaatccagccccaactagtaaccacggccctgatgcaacagaggccgaggaagacttcgtagacccttggactgtgcagacctctagcgccaagggcatagattatgacaagttgatcgttagatttggaagtagtaagatagataaagagttgatcaaccggatcgaaagggccactgggcagcggcctcatcatttcctgcgacggggaatctttttctcccatcgggatatgaaccaggtgctggacgcatacgaaaacaaaaagcctttctatctttacacggggagaggcccatcttccgaagctatgcacgtcggtcatctcatccccttcattttcaccaagtag

SEQ ID NO: 245425 - DNA, 462 bp, synthetic construct
  misc_feature 1..462: note = Description of Artificial Sequence: Synthetic coding sequence
  source 1..462: mol_type = other DNA
atgctagttagtttgaaaatgagttataaagccgcagcgggtgaggactataaagctgattgtccccctgggaatccagcacctacttccaatcacggccctgatgcaacagaggccgaagaggattttgtagacccttggacagtccagacatcctccgctaaggggatcgactacgacaagctgatcgtgaggtttgggtcatctaagattgacaaggaattgataaatcgcattgagagggccacagggcaacgccctcatcacttcttgagaagaggcatcttttttagccaccgcgatatgaatcaagtgctggatgcatatgaaaacaagaaaccgttttatctgtataccgggagggggccttccagtgaggccatgcacgtcgggcatctgattcccttcatctttacaaagtggcttcaggacgtgtttaacgtccccctcgttattcagtag

SEQ ID NO: 245426 - DNA, 675 bp, synthetic construct
  misc_feature 1..675: note = Description of Artificial Sequence: Synthetic coding sequence
  source 1..675: mol_type = other DNA
atgctcgtgtctctaaagatgtcatataaagccgctgccggagaggactacaaagctgactgccctcctgggaaccccgcaccaaccagcaaccatggcccagatgccacagaggccgaggaagatttcgtggatccgtggactgttcaaacgtcaagcgcaaaagggatagactacgacaagctgatcgtgcgcttcggctccagcaagatagacaaggaacttataaacagaatagagcgagcaactggacagagacctcaccatttcttacgcagggggatctttttttcacaccgggatatgaaccaggtgctggacgcatatgaaaacaagaaacctttctacctatacacaggcagaggcccaagtagcgaagctatgcatgttgggcatctgattccttttatttttacaaaatggctgcaggacgtctttaatgttcctctcgttatacaaatgacagacgacgagaagtatctgtggaaggatttgaccctcgatcaagcctattcctacgctgtggaaaacgccaaagatatcattgcgtgcggttttgatattaacaagacatttatattctcggatctcgattacatggggatgtcgagtggcttttacaaaaatgttgtaaagattcagaagcacgtgacatttaatcaggtgaagggctag

SEQ ID NO: 245427 - DNA, 1293 bp, synthetic construct
  misc_feature 1..1293: note = Description of Artificial Sequence: Synthetic coding sequence
  source 1..1293: mol_type = other DNA
atgttagtctccttgaagatgtcctataaagcggctgctggtgaggactacaaagcagattgtcctcctggcaacccagcaccaacttcaaaccacggccctgacgcgactgaagcggaagaggattttgtcgacccatggaccgtgcaaacaagctcagcaaaaggtatcgactatgacaagttgattgtgcggtttgggtcctcaaaaatcgataaggagctaattaatcggatcgagagagccactggacagcgacctcatcattttttgcgccgagggattttcttctcccatagagatatgaaccaggtgcttgatgcatacgagaacaagaaaccattctacctatataccgggagaggaccatcgtcggaagcaatgcatgttggccacttgatcccctttatcttcacaaagtggttgcaggatgtctttaacgtacctctggtgattcagatgacagacgacgagaaatatttgtggaaagatttgaccctggatcaggcttactcctatgcagtggaaaacgctaaagacatcatcgcctgcggattcgatattaacaaaacgttcatttttagcgacctcgattatatgggaatgtcttcggggttctacaaaaacgttgtcaaaatccaaaagcatgtaacatttaaccaggtgaaaggcatcttcgggtttacagactccgactgcattgggaaaatatctttccctgctatccaagccgcacccagcttttccaattcttttcctcagatattcagagatcggactgacattcagtgtctgatcccatgcgcaatcgaccaggacccctactttagaatgaccagagatgtcgccccacggatcggataccccaaaccggctttgttgcacagtaccttttttcctgcccttcagggagcacaaactaagatgtcagccagcgacccaaactccagtatctttctcacggacactgcgaagcagattaagacgaaggtcaataaacatgcattttccggcggaagggatacaatcgaagaacatcggcagttcggcggtaactgcgacgttgacgtctctttcatgtatctcacattcttcctggaggatgatgataagcttgaacagatacggaaagactatacctccggggctatgctcacgggcgaactcaagaaagccctgattgaagtgctacagccgcttatagcagagcatcaggctagacggaaggaggtcactgatgagatcgtgaaggaattcatgacacctagaaagctgtcttttgattttcagtag

SEQ ID NO: 245428 - DNA, 345 bp, synthetic construct
  misc_feature 1..345: note = Description of Artificial Sequence: Synthetic coding sequence
  source 1..345: mol_type = other DNA
atgcctaactcggagccagcctctctcctggaactgttcaattcgatagctacccagggcgaactggtacggagtctcaaggcgggtaacgctagtaaagatgaaattgactccgctgtcaaaatgttggtgtcgctcaagatgagctacaaggccgctgcaggagaagattacaaggcagattgcccaccgggaaacccagcccctacgagcaaccacgggccagacgcaactgaggccgaagaagattttgttgacccatggacggtacaaacatccagcgccaagggtattgactatgacaaactgattgtacggtttggctcatcgaagatagacaaatag

SEQ ID NO: 245429 - DNA, 177 bp, synthetic construct
  misc_feature 1..177: note = Description of Artificial Sequence: Synthetic coding sequence
  source 1..177: mol_type = other DNA
atgcctaatagcgagccagcatccttactggaattgtttaattcaatcgccacccaaggcgagctggtgcggtccttgaaggccggaaatgcctccaaggacgaaatcgactctgctgtgaagatgctggtgtcactgaagatgtcttacaaggcagccgcaggagaagattactag

SEQ ID NO: 245430 - DNA, 459 bp, synthetic construct
  misc_feature 1..459: note = Description of Artificial Sequence: Synthetic coding sequence
  source 1..459: mol_type = other DNA
atgccgaattccgaacccgcatctctgcttgagcttttcaactcaattgctacccaaggagaattggttcgctccctcaaagcaggaaacgcatctaaagacgagattgatagcgctgtgaagatgctggtgagcctgaaaatgtcctacaaagcggcagcgggagaagactataaggccgattgtccgccaggcaatccagccccaacctctaatcatgggccagacgccacagaggcggaggaggacttcgtcgatccttggaccgttcagacctcgtcagctaagggtattgactatgataagcttatcgtgcgcttcggatctagtaaaatagataaggaactcatcaatcggattgaacgagcaactggtcaacgtcctcatcatttcctccgacggggaatcttcttctcacacagggacatgaatcaggttctggacgcatatgagaattag

SEQ ID NO: 245431 - DNA, 1416 bp, synthetic construct
  misc_feature 1..1416: note = Description of Artificial Sequence: Synthetic coding sequence
  source 1..1416: mol_type = other DNA
atgcctaatagcgagccagctagtctgttagagctgttcaattccattgcgacgcaaggggaactggtacgcagcctcaaggcaggtaatgccagcaaagatgaaattgattccgccgtgaagatgctcgtgtccctaaaaatgtcctataaggccgctgcaggcgaggactacaaagcagactgccctccagggaatccagccccaacatcaaaccacggacctgatgccacagaggccgaggaagattttgtcgatccctggacagtgcagacatctagcgccaagggaatcgactatgataaactgatcgtacgcttcgggtcctccaagattgacaaagagctgattaatcggatcgagagggcgaccgggcaaagaccccaccacttcttaagaagaggcatcttcttcagtcaccgcgacatgaaccaggtcctggacgcatatgagaataaaaagcccttctacttatacactggacgcggtccaagtagcgaagccatgcacgtaggacacctaatcccctttatctttactaagtggctccaggatgtgttcaacgttccactggttatccagatgaccgatgatgaaaagtacctttggaaggacttgaccttggaccaggcctatagctacgctgtcgagaatgccaaagacattatcgcctgcgggtttgatattaataaaacgtttattttctctgacctggattatatggggatgagctctggcttttacaaaaatgtggtcaagatccagaagcacgtgaccttcaatcaggttaagggcatctttgggttcactgactccgattgcattgggaaaatttctttccctgctatccaggccgctccctcgttctctaacagttttccgcaaatattccgggaccgaacagacatccagtgcctgatcccctgcgctatcgaccaggatccctattttcgtatgacccgtgacgtcgctcctcgcattggctacccaaaaccggcactccttcattccacctttttccccgcactgcagggagcgcaaactaaaatgtccgctagtgacccaaacagctctattttcctgactgacactgccaagcaaatcaaaacaaaggttaacaagcacgctttttcaggcggaagagacaccatcgaggagcacaggcaatttggtgggaattgtgacgtagatgtgtcctttatgtatcttaccttcttcctggaggatgacgataaactcgaacagatcaggaaagattatacgagtggcgctatgctcaccggagagctcaaaaaggctctcatcgaagttcttcaaccccttatcgctgagcatcaggctaggcggaaggaggtgaccgacgagattgtaaaggaatttatgactcccagaaaattgtctttcgacttccagtag

SEQ ID NO: 245432 - DNA, 465 bp, synthetic construct
  misc_feature 1..465: note = Description of Artificial Sequence: Synthetic coding sequence
  source 1..465: mol_type = other DNA
atgctggtgtctctgaagatgagctacaaggcggcagctggtgaagactataaggccgactgtccgcctggaaaccctgccccaacctccaaccacggtcccgatgcgacagaagctgaggaggatttcgtcgacccatggacagtacagacaagctctgccaaaggcatcgattacgacaaactgattgtgaggttcgggtcatccaagatagataaggaactgattaaccggatcgaaagggcaacggggcagcggcctcaccacttccttcggagggggatattcttttcgcacagggacatgaaccaggttctggacgcttatgagaataaaaagccattctacctgtataccggcagagggccaagctccgaagccatgcacgtcgggcacttgatcccgtttatctttactaagtggctgcaggacgtgttcaacgtgccacttgtgatccagatgtag

SEQ ID NO: 245433 - DNA, 639 bp, synthetic construct
  misc_feature 1..639: note = Description of Artificial Sequence: Synthetic coding sequence
  source 1..639: mol_type = other DNA
atgcctaattccgagcccgcttctctgctggagctattcaattcgatcgctacgcagggagaattagtgaggtccctgaaggctgggaacgcaagtaaagatgaaatcgacagtgccgtaaaaatgctcgtgtctttgaagatgtcttacaaggcagctgcaggggaggattataaagctgattgccctccgggtaacccagcaccgactagtaatcatgggccagacgctactgaggccgaggaagacttcgttgacccatggacagtgcagaccagtagcgctaaaggaatcgactatgataaactcatagtgaggtttgggagtagcaagatcgacaaggagttaattaacagaatcgagcgtgctacgggacagaggccgcatcactttctgcggagaggcatctttttttcacatagagatatgaatcaagtcctcgatgcctacgagaacaagaaacccttctatctgtacacagggagggggccaagctccgaggccatgcatgtgggtcacttgattcctttcatcttcaccaagtggctgcaagatgtctttaacgtgccattggtgattcagatgaccgacgatgagaagtatctgtggaaggacctcaccctggatcaggcctattag

SEQ ID NO: 245434 - DNA, 1041 bp, synthetic construct
  misc_feature 1..1041: note = Description of Artificial Sequence: Synthetic coding sequence
  source 1..1041: mol_type = other DNA
atgtccctgctgaggagcctccgggtgtttctcgtggccagaactgggagttatcctgctggtagccttcttcggcaatccccacaacctcggcataccttttacgcaggacctagactgtcagcttcagccagtagcaaggaactcctcatgaagctgagacgtaaaacaggatactcctttgtcaattgcaaaaaagctttggagacatgcggcggtgacctcaagcaggctgagatttggctgcacaaagaggcacagaaggaaggatggagcaaggctgctaaactccaggggagaaagaccaaggaaggcctcattggcctgctccaagagggcaacacaactgtgctggtggaagtcaattgcgagacggactttgtgagtcggaatctcaagttccagttgttggttcagcaggtggccctggggaccatgatgcattgtcaaacattaaaagatcaaccctccgcatattctaaggtgcagtggttaactcccgtcaacctcgccctgtgggaggcagaggcagggggttccctggaaggatttctgaattcttccgaactctcaggacttcctgccggacctgacagggaaggcagcttaaaggatcagttggccttagcgatcggtaagctgggcgagaatatgattcttaaacgagctgcctgggtgaaagtgccctctgggttctacgtcgggtcctacgttcacggggctatgcaatccccatctctacacaaactcgtcttaggtaagtacggcgctctggtcatttgcgagaccagtgagcagaaaacaaacctggaggatgtgggtaggagattaggccagcatgtggtggggatggcccctctgtccgtgggctccctggatgacgaacctggcggtgaggccgagactaagatgctttcccagccatacctcctcgatcccagtatcacactcggacagtatgtccagccacagggcgtctctgtcgtcgactttgttagattcgagtgcggtgaaggggaagaggcggctgaaactgagtag

SEQ ID NO: 245435 - DNA, 858 bp, synthetic construct
  misc_feature 1..858: note = Description of Artificial Sequence: Synthetic coding sequence
  source 1..858: mol_type = other DNA
atggtctactgtaccacaacatgggctatctggaactgccagcttcttttaggttataaaccactgcagaatgtaacgggcctcaataccgttggatcctgcaacactgtggcagaaatatggctgcataaggaggcccagaaagaaggttggtcaaaagcagccaagctgcagggaagaaagactaaagagggacttataggactgttacaggaaggcaacactacagtgctggttgaggtgaattgtgagaccgatttcgttagtcggaacctcaagtttcagctgttggttcagcaggtggcgctcggtactatgatgcactgccagacattgaaggaccagccttcagcctattccaagggattcctgaatagctcagagctgtcgggccttcctgctgggccagacagagaaggaagtctcaaagatcagctagcattggctatcggcaaattaggggagaatatgattctgaaacgcgctgcctgggtgaaagtaccctccgggttctatgtcggatcatacgtccatggtgcaatgcaatccccctctctccacaaactggttttagggaagtacggagctctagtcatttgcgagacatcagaacaaaaaaccaacctggaagatgtcgggcgacgactgggccagcatgtggtaggcatggctcctttgtctgtgggctcgctggacgacgaacccggaggagaagcggagacaaagatgctgagtcagccttacctcctggaccccagcatcacactaggtcagtacgtccagcctcagggcgtctctgtagtggacttcgtaaggtttgaatgtggcgagggggaagaagccgcagagactgaatag

SEQ ID NO: 245436 - DNA, 978 bp, synthetic construct
  misc_feature 1..978: note = Description of Artificial Sequence: Synthetic coding sequence
  source 1..978: mol_type = other DNA
atgtcacttctgcgctcactcagagtatttctggtggctcgcactggctcataccccgctggctccctcctgaggcagagtccacagccaaggcacactttttacgccggacctaggctcagcgcaagcgcatcatcgaaggagctgctcatgaaactgagaaggaaaaccggttactccttcgtcaactgtaagaaagccctcgagacctgcggaggcgacttgaagcaggcggagatttggctgcataaagaagctcaaaaagagggctggagcaaggctgcaaaattacaaggaaggaaaaccaaggagggcttgataggcctcttgcaggagggcaacacaaccgtgcttgtggaagtgaactgcgagactgacttcgtgtcacggaatttaaaattccaactcctagtgcagcaggttgctctggggacaatgatgcattgtcaaacactcaaggatcaaccgtctgcatacagcaagggctttcttaacagctctgaactttctggcctgcccgctgggccagatagggaaggctccctgaaagatcagttagcactggccattggcaaactgggcgagaacatgattctgaagcgtgctgcatgggtcaaagttcctagcggattttacgtggggtcatatgtgcacggagcaatgcagtcaccctcactgcataaactcgtgctcggaaaatatggggctttggtgatctgtgagaccagcgagcaaaagacaaacctggaagatgtaggaagaaggcttggacagcacgtcgtcggaatggcgccacttagcgtgggttcccttgacgatgagcccggaggcgaagccgaaacgaagatgctgtcccaaccctatctcctagatccaagtatcacgctcggtcagtacgtgcagcctcagggtgtttcagtggtcgatttcgtgaggttcgaatgcggagaaggggaggaggccgcagagactgagtag

SEQ ID NO: 245437 - DNA, 504 bp, synthetic construct
  misc_feature 1..504: note = Description of Artificial Sequence: Synthetic coding sequence
  source 1..504: mol_type = other DNA
atgtcacttctgaggtccctgcgtgtgtttctggttgcacggactggatcttacccggctggaagtttgttgcggcaaagcccacagcctaggcacactttttatgcagggcctcggctttccgcaagcgcttcgtctaaagagctgttaatgaagcttcgaagaaagacaggctatagcttcgttaattgcaaaaaggcgctagaaacttgtgggggagacttgaaacaggcagagatttggctacacaaagaagctcagaaagagggatggtctaaggccgcaaaactgcagggacggaaaaccaaggaaggactcatcggcctcctgcaagagggaaacacaacagtgctcgtagaagtaaattgcgaaactgacttcgtgtcccgcaacctcaaattccagctgttagtacagcaggtagctctcggcactatgatgcactgtcagacattaaaagaccagcccagcgcttattcaaaagaaaactgggagaagacttag

SEQ ID NO: 245438 - DNA, 648 bp, synthetic construct
  misc_feature 1..648: note = Description of Artificial Sequence: Synthetic coding sequence
  source 1..648: mol_type = other DNA
atgtctctgctgcgaagcttaagagtgttcctcgtggcgaggacaggaagctacccagctgggagtcttctacggcagtcacctcagccacgccacactttttatgcaggacctcgcctgtctgcctctgcatcaagcaaggagctgttaatgaagttgcgacggaaaacaggatactcctttgtaaattgcaaaaaggctctggaaacttgtgggggagacctcaaacaggctgagatttggctccacaaggaggcccagaaggagggctggtccaaagccgctaaacttcagggtaggaaaaccaaggagggtctgatcggcttgctgcaggagggcaatacaactgttttggtcgaagtaaattgcgagaccgacttcgtgagccgcaaccttaagttccagctcctcgtgcagcaggttgctctgggcacaatgatgcactgtcaaacactgaaagatcagccaagcgcctactcaaagggctttctcaactcctcagagcttagtggacttccggcagggcctgaccgggagggtagcctgaaagaccagctggcactggctattggtttgcctttccagatcggggcagtatcagaactgcaactgcctgaatccaactttctgcagaatacaagctcttag

SEQ ID NO: 245439 - DNA, 435 bp, synthetic construct
  misc_feature 1..435: note = Description of Artificial Sequence: Synthetic coding sequence
  source 1..435: mol_type = other DNA
atgaaaagccagtggtgtcggcctgtggccatggacctgggagtgtatcaattgaggcacttttccatcagtttcttgtctagcctactcggtacagagaatgccagtgttcggctagacaattcgtcatccggtgccagcgtcgttgccatcgacaacaaaattgaacaagccatggaccttgtaaagtctcatcttatgtatgccgtccgcgaggaagtggaggttctgaaggagcagatcaaagaactgatcgagaaaaactcccagcttgaacaagagaacaacctcctgaagacactcgcctctcctgagcaactggcccagttccaggctcagttgcaaactggatcacccccagccaccacccaaccacaggggacgacccagccacctgctcagcctgcttcccagggcagtgggcctacagcttag

SEQ ID NO: 245440 - DNA, 3222 bp, synthetic construct
  misc_feature 1..3222: note = Description of Artificial Sequence: Synthetic coding sequence
  source 1..3222: mol_type = other DNA
atgcatcagccgccagaaagcactgctgcagcagccgctgctgctgacatctctgctagaaagatggcccaccctgccatgttccccagacggggatccgggtccggatccgcgagtgccctgaatgccgctgggaccggcgtcgggagtaacgctacctctagtgaagatttccctcccccaagtcttttgcagcctccccctccagccgcttcatcgacctctgggccacagcctccgccaccacagagtcttaacttactttcacaggcccagctccaagctcagccacttgcccctgggggtactcaaatgaaaaagaagtcaggtttccaaatcacctccgtgacgccagcacagatcagcgcaagcatttccagcaacaactcaatcgcagaggatacagagagttatgatgatttggacgaaagccacaccgaggatcttagctcgagtgaaatattagacgtgagcctgtcccgggctaccgatctgggcgaacccgaaaggtcctcctccgaagaaaccctaaacaacttccaggaggcagagaccccgggagcagtctcacccaatcagccccatctaccccagccccacctgccccatttaccccagcagaacgtggtaattaacggcaatgcacatccacatcacctccatcatcatcatcagatccatcacggacaccatctccaacacggtcaccatcacccaagccatgtggcagtggccagcgcttcaatcaccgggggaccaccctcatcaccagtgagtcgcaaactttccacaaccggaagcagcgatagtatcacaccagtggcccctaccagcgcagtgtcttcctccggctccccggcaagcgtgatgacgaatatgagggctccgtctactacaggcggtattggcatcaacagcgtgactggtacctccacagtgaataatgtcaatattaccgccgttgggagtttcaatccaaacgttacctccagtatgctgggcaacgttaacataagcacctcaaacataccttctgccgcaggcgtctctgtgggacccggagtcaccagcggtgtgaacgtgaacattctctccggaatgggtaacggcactatctcttcttccgcagctgtgtctagtgttcccaatgctgcagcagggatgactggtggatccgtctcctctcagcagcagcagcctaccgtgaatacgagtcgcttccgagttgtgaagctcgatagctcgtccgagcctttcaagaagggcaggtggacctgtacagagttctatgagaaggaaaatgcagtacccgctaccgagggggtcctaatcaataaagttgttgagacagtgaagcagaatcctattgaagtgacctcagaaagagaatcgacctcaggcagctctgtgagctcttcagtttctaccctgtctcactacacggaaagcgttggatctggcgagatgggagctcctacagtggtggtgcagcagcagcagcaacagcagcaacaacaacagcagcaacctgctctccagggagttaccctacaacagatggattttggtagcaccggccctcaatccatcccagcggtgtctatcccacagagtatttcgcagtcccagatcagccaggtgcagcttcagagccaggagctgtcttatcagcagaaacagggtctgcagcctgtccccctgcaggccaccatgtccgctgccacaggcatacaaccctcacccgtgaacgttgttggagtgacatcagcactcggacaacaaccgagcattagcagtctggcacaaccccagctgccgtactcgcaagcggctccaccagttcagacccccctaccaggggcaccccctccacagcagctacagtacgggcaacagcagcctatggtttccacacagatggctccaggccacgtgaagtctgtcactcagaatccggctagtgagtacgtgcagcagcaaccaattctccagacagccatgagcagtggccagccgtcttcagccggagtaggggcaggaacaaccgtgattcctgttgcccaacctcagggcatccagcttcctgtccaaccgaccgccgtccccgcacagcctgctggggcatcggtgcaacctgtcggccaggctcccgctgccgtctccgctgtgccaacgggcagtcaaattgctaatattggtcaacaagctaatatccccacagccgtgcagcaaccatcaacccaagtcccaccttccgtgattcagcagggtgcccctccttcatctcaggtggtaccccctgctcaaaccgggatcatacatcagggagtgcagacatccgctccctcactgccccagcaacttgtcattgcatcccaaagtagcctcctgactgtacctccacagccacagggtgtcgagcctgtggcacaagggattgtgtctcagcagcttcccgctgtttcaagcctaccctccgcaagctctatctccgtaacaagccaggtgtcatccactggcccttcagggatgccctcagcacccacaaacctcgtcccaccccaaaatatagcccagacccctgcgacccagaacggcaatttagtgcagagcgtgtctcaaccccctttaatagcaactaatacgaacttaccccttgctcagcagattcccctgagctctactcagtttagcgctcagtctctggcccaggccattggcagccagatagaagacgctaggagggccgctgagccatcgcttgtggggctcccacagacgatttcaggcgattctggtggaatgtcagctgtgtccgacggctcaagcagcagcttggcagcctccgcttctctgtttccgctgaaggtgctgcccctgacaacaccacttgttgacggggaggacgagagctccagcggggctagcgtggtggcaattgacaacaagattgaacaggccatggatttggtaaaaagtcaccttatgtacgcggttagagaagaggtggaagttctcaaggaacagatcaaagaactaattgagaagaactcccaactggagcaggaaaacaacttgctcaagacattagcatcgcccgaacagttggctcagttccaggcgcagctgcagacagggtcacctcctgccacaacacaacctcagggtaccactcagcctccggctcagcccgcttctcagggtagcggcccaaccgcttag

SEQ ID NO: 245441 - DNA, 126 bp, synthetic construct
  misc_feature 1..126: note = Description of Artificial Sequence: Synthetic coding sequence
  source 1..126: mol_type = other DNA
atgaagagtcagtggtgtagacccgtcgcaatggatctcggtgtataccagctcaggcacttctcaatttcctttctgagctctcttctcggcaccgagaatgcctccgtgaggctcgacaattag

SEQ ID NO: 245442 - DNA, 429 bp, synthetic construct
  misc_feature 1..429: note = Description of Artificial Sequence: Synthetic coding sequence
  source 1..429: mol_type = other DNA
atgcaccagcccccagaatccacagcggctgccgctgcagccgcagatatatctgcccgtaagatggcacatccagccatgtttccccgacgaggttctgggtccggcagcgccagtgcgctgaacgccgcaggaaccggcgtaggctccaacgcaacaagcagtgaggactttccccctccgtccctcctacagcccccaccgccagccgcttcttccacctccgggccacagcctcctcccccacaaagcctgaatcttctgagccaggcccaacttcaggcgcagcccctggcacctggcggtacccagatgaaaaagaagtcagggtttcagatcacaagcgttacccccgctcaaatctctgcgtctatcagttcaaataattctattgccgaggacactgagagctacgacgacctcgactag

SEQ ID NO: 245443 - DNA, 1713 bp, synthetic construct
  misc_feature 1..1713: note = Description of Artificial Sequence: Synthetic coding sequence
  source 1..1713: mol_type = other DNA
atgcaccaaccaccggagagcactgctgccgctgccgctgcggctgatataagcgcacggaagatggcccaccctgcgatgttcccaaggcgaggttctgggtcaggttccgcaagcgctctcaacgctgccggaactggagtgggctctaatgcaacgagcagcgaggatttccctccaccctccctcctgcaaccgccaccgcctgcggcaagtagcacatctggccctcagcctcctcctcctcaaagcctcaacctgcttagtcaggcacagctgcaagcccaacctctggcccctgggggaacccagatgaagaagaagagcggattccagataaccagtgtgacaccagcacagatctccgcctccattagcagcaataatagcatcgcggaagatactgaatcctatgacgacctggacgagagtcacaccgaagatctcagctctagtgagatcttagatgttagtttatctagggccaccgatcttggtgaaccggagagatctagctcagaggaaacactgaataatttccaagaagcagagacacccggagccgtttctccgaaccagccgcatttgccccagccacacctcccccatttaccccagcagaacgttgtgataaatggtaacgcacaccctcaccaccttcaccaccaccaccagattcatcacggtcaccatctacaacatggccaccatcacccaagtcatgtcgccgtagcttctgcctcaattactggcggacccccttccagccctgtctccaggaagttaagcacgacaggaagctcagatagcataaccccagtagctcctacatccgccgtgagcagttcaggcagtcccgcaagcgtaatgactaatatgagagctcctagtactacggggggaattggaattaactcagtaacaggcacatctacagtcaataacgtgaacattaccgcagtcgggagcttcaaccccaatgtcacgagcagtatgctcggaaatgttaacatatccacttcaaacatccctagtgccgctggtgtatccgtcggccctggcgtgaccagcggcgtgaatgtaaatattctgtctggaatgggtaacggaactatctcatcctctgctgctgtgagcagcgtgcccaacgcagcggctgggatgactggaggttctgtgtccagtcagcagcagcaacccactgtaaacaccagccgatttagggtggttaaacttgattcttcttcagaacctttcaagaaaggcagatggacctgtacagagttttatgagaaagaaaacgccgtacccgctaccgagggagtgctcatcaacaaagtggtcgaaaccgtgaagcaaaatccgattgaagtgacaagcgagcgggaatctacctcaggctcctctgtttcatctagcgtgagcactctatcacattacacagagtccgtgggatccggtgagatgggcgcacctaccgtggtcgtgcagcagcaacagcagcaacagcagcaacagcaacaacaacccgctctgcagggtgtgactctgcaacagatggactttggcagcacaggtccccagtctataccagctgtatccatccctcagtccatcagccagtctcagatttctcaggtgcagctgcagtcccaggagctttcttacctgacaatgaaagttgtgctgctcatcgtttatctttgtatgtag

SEQ ID NO: 245444 - DNA, 603 bp, synthetic construct
  misc_feature 1..603: note = Description of Artificial Sequence: Synthetic coding sequence
  source 1..603: mol_type = other DNA
atggcccaatccaagctggattgccgttctccagtagggctggattgctgcaattgctgtcttgatctcgctcatagaagtggtctgcagcgcggatcctcaggggagaacaataatcctggaagcccaactgtgagtaactttagacagctgcaagagaagctggtattcgagaatctcaataccgataagttgaatagcatcatgcggcaggacagcctggaaccggttctgagggacccttgttatctgatcaatgaaggcatctgcaatcgaaatatagaccagacaatgctgagcatccttttattcttccattccgcaagcggcgcatctgtggtagcaatcgataataagattgagcaggcaatggatctggtgaaaaatcatctcatgtatgccgtgagagaagaagttgagatcctgaaggagcaaattcgtgagctcgttgaaaagaatagccaactcgaaagggagaataccctgctgaaaacactcgcttcccctgagcagcttgagaaatttcagtcatgtctctcacctgaagaacccgcacccgaatctccacaagtgcccgaggcccctggcggtagtgccgtctag

SEQ ID NO: 245445 - DNA, 333 bp, synthetic construct
  misc_feature 1..333: note = Description of Artificial Sequence: Synthetic coding sequence
  source 1..333: mol_type = other DNA
atggcctttcagcccccatactcctccagcctatttcgcaagcgagacaatgcaagcggcgcttcagtggtggccatagacaataagattgaacaggcgatggatctggtcaagaatcacctgatgtacgccgtgcgagaggaagtcgaaattctgaaggagcagattcgcgaactggtggagaagaacagccagctggagcgtgaaaacactcttctgaaaaccttggcctctcccgagcaactggaaaagtttcagagttgcctttctcctgaggagcctgccccagagtccccacaagtcccggaagcgccaggaggatctgcggtgtag

SEQ ID NO: 245446 - DNA, 603 bp, synthetic construct
  misc_feature 1..603: note = Description of Artificial Sequence: Synthetic coding sequence
  source 1..603: mol_type = other DNA
atggcacagtcgaagttagactgccggagcccggtggggttggactgctgcaactgttgtctggatctggctcatcgtagtggactgcagcggggaagcagtggcgagaacaataatcccggttcgcccactgtgtcgaacttcagacagctgcaggaaaagctagtgttcgagaacttaaacaccgataagctgaactccatcatgaggcaggattctctggaacccgtgttacgcgacccctgttacctgatcaacgaaggcatctgtaaccggaacatcgaccagactatgctcagcatcttactgttcttccatagcgcaagtggcgctagtgtcgtagcaatcgacaataaaatcgagcaggccatggatctggtcaaaaatcatctcatgtatgccgtgagggaggaagtggaaatcctcaaggagcagatcagggaattggtggaaaagaactcccagttggaacgggagaatacactcctgaaaacactggctagtccagagcaactggagaagtttcagagttgtctatcaccagaggaacccgcacctgaatcaccccaagttcctgaggcgccaggtgggagcgccgtctag

SEQ ID NO: 245447 - DNA, 603 bp, synthetic construct
  misc_feature 1..603: note = Description of Artificial Sequence: Synthetic coding sequence
  source 1..603: mol_type = other DNA
atggcccagtccaaactggattgccgctcaccagtgggccttgattgttgcaattgctgcctcgacctcgcccaccgaagtgggttgcagcgaggaagctcaggcgagaacaacaaccctggctcccccacagtgagcaactttcgccagctgcaggaaaaactggtgttcgagaatttgaatacagacaagttaaattcaattatgagacaagatagtctggaacctgttctgcgcgacccctgctacctcatcaacgagggcatctgcaatcggaacatcgatcaaacaatgttgagtatcctgttatttttccactccgcttctggagcatctgtggtggcaatcgataacaaaattgaacaggcaatggacctggtcaagaatcatttgatgtacgctgtgcgcgaggaggtggaaatcctgaaagagcagatccgcgaattagtcgagaagaatagtcagctggagagggagaacactctattaaaaacgcttgcaagccccgaacagctggagaagttccagagctgtctgtcccccgaagaacccgcaccagagtccccgcaagtgcccgaggcccctgggggatcggcggtgtag

SEQ ID NO: 245448 - DNA, 234 bp, synthetic construct
  misc_feature 1..234: note = Description of Artificial Sequence: Synthetic coding sequence
  source 1..234: mol_type = other DNA
atggatctcgttaagaaccacctgatgtatgcagttcgcgaggaggtagagatcctgaaagagcaaattcgggaactggttgaaaaaaatagccaacttgaaagggagaacaccctgctgaagacattggcctcacccgagcagcttgagaaatttcagagctgtctctctccagaggagcctgcgcctgagtctccacaggtgcccgaggcgccagggggaagcgcggtgtag

SEQ ID NO: 245449 - DNA, 405 bp, synthetic construct
  misc_feature 1..405: note = Description of Artificial Sequence: Synthetic coding sequence
  source 1..405: mol_type = other DNA
atgaatactgagatgtatcaaacaccgatggaagtggccgtgtaccagctgcacaatttttccatcagtttcttttcgagcttgctcgggggtgatgtggtaagtgtcaagttggataattccgctagcggcgcttctgtggttgctatcgataataagattgaacaggctatggacctcgtcaagaatcacctgatgtatgccgtacgtgaggaggtggagattctgaaggaacagattcgagagcttgtcgagaagaactcacagctggaacgggagaatacgctcctgaagaccttggctagccctgagcagttggagaaattccagagttgcctgtcacccgaagagcctgcgccagaaagcccacaggttcctgaggctccagggggatctgcggtctag

SEQ ID NO: 245450 - DNA, 540 bp, synthetic construct
  misc_feature 1..540: note = Description of Artificial Sequence: Synthetic coding sequence
  source 1..540: mol_type = other DNA
atggcccagagtaagctggattgtagatccccagtgggtcttgactgctgtaactgttgccttgacttggctcaccgatctgggctgcagagaggaagcagtggagagaataataatcctggaagccctacagtgtccaacttccgacaggactccttggagccagttctaagggatccgtgctacctgattaacgagggtatctgcaatcggaatatcgaccagacgatgttgtctattctgctgttcttccattctgccagtggtgctagtgtggtggccatcgacaacaagatcgagcaggccatggacttggtcaaaaaccatctaatgtacgcagttagggaagaggttgaaattctcaaggaacagattagagaacttgtggaaaagaactcccagctggaacgggaaaatactcttctgaaaacgctcgcaagccccgagcagctggagaagtttcagtcctgcctgtctcctgaggaaccagcgccagaatcccctcaggtcccagaagccccagggggttctgctgtgtag

SEQ ID NO: 245451 - DNA, 372 bp, synthetic construct
  misc_feature 1..372: note = Description of Artificial Sequence: Synthetic coding sequence
  source 1..372: mol_type = other DNA
atggcccagtcaaagctcgactgtcgaagccctgtcggactggactgttgtaattgttgcctggacctggcccatcgcagtggattgcagcgcggaagcagcggagagaacaataaccctgggtctcctacggtgtcaaattttcggcagttgcaggagaagcttgtcttcgaaaacttaaataccgataagctgaactctatcatgaggcaggattccttagagcctgtgctgagagatccttgttacctgatcaacgagggtatctgcaatcggaacatcgatcaaacaatgctgagtatactactgttcttccatagcgcctcaggagccagtgtggtcgcaatagacaacaaaatagagcaagcatag

SEQ ID NO: 245452 - DNA, 78 bp, synthetic construct
  misc_feature 1..78: note = Description of Artificial Sequence: Synthetic coding sequence
  source 1..78: mol_type = other DNA
atggatctcgtaaagaatcacctgatgtacgccgttcgggaagaagtggagatcctgaaggaacaaataagggaatag

SEQ ID NO: 245453 - DNA, 351 bp, synthetic construct
  misc_feature 1..351: note = Description of Artificial Sequence: Synthetic coding sequence
  source 1..351: mol_type = other DNA
atggcacagagtaaactcgattgccgctcaccggtaggactagattgctgcaattgctgcctggatctcgcacatagatctggcctccaacgcggatcatctggggagaacaataatcctggcagtccaaccgtgtccaacttcaggcagctccaggagaagctcgtctttgagaacttaaacaccgataaactgaactccattatgcggcaggattctctagagccagtgttgcgcgacccgtgctacctgatcaatgagggaatatgcaatcgcaatattgaccagaccatgctgagtatcctattattcttccattccgcctctggggcttcagtggttgccatatag

SEQ ID NO: 245454 - DNA, 177 bp, synthetic construct
  misc_feature 1..177: note = Description of Artificial Sequence: Synthetic coding sequence
  source 1..177: mol_type = other DNA
atggctcagagcaagctggattgtcgttcgccagtgggattggattgctgcaattgctgtctcgatctggcacaccgatccgggcttcaacggggttcttctggcgaaaataacaatccagggtctccaacagtgagcaacttccggcagcttcaggaaaagttggtgttcgaatag

SEQ ID NO: 245455 - DNA, 255 bp, synthetic construct
  misc_feature 1..255: note = Description of Artificial Sequence: Synthetic coding sequence
  source 1..255: mol_type = other DNA
atggcccagtccaaactggactgtcggtcccctgtgggccttgattgctgcaactgctgtctcgatctagctcaccgctctggtctccagagaggttcttccggcgagaataataatccaggctcacccactgtgagtaacttcagacaattacaggaaaaactggtctttgagaaccttaatacagataaactgaacagcatcatgagacaggattcactcgagccagtactccgagatccctgttacttgtag

SEQ ID NO: 245456 - DNA, 603 bp, synthetic construct
  misc_feature 1..603: note = Description of Artificial Sequence: Synthetic coding sequence
  source 1..603: mol_type = other DNA
atggcccagagcaagctggactgtagatctccagtggggctcgattgttgtaactgttgtctggatctcgcccacaggtctggcctacagaggggctcctccggcgaaaacaataaccccggatcccccactgtctccaactttcgccagctgcaggaaaagctggtttttgagaaccttaataccgacaagctgaatagtatcatgcggcaagactccctggaacccgtcctgagagatccctgttatttgataaacgaagggatctgcaaccgcaatattgatcagactatgctgagcattctactgttcttccactcggctagcggggcatcagttgtggccatcgataacaagatcgaacaagcaatggaccttgtaaagaaccatctcatgtatgccgtgagggaggaagttgagatcctgaaggagcagatcagagagcttgtggagaagaattcccagctggagagagagaacacattactgaagaccctggcttcgccagagcagcttgagaaattccagtcatgcctcagcccggaggaacccgcaccagagtcaccgcaagtgccggaggcacccggtgggagcgcagtgtag

SEQ ID NO: 245457 - DNA, 303 bp, synthetic construct
  misc_feature 1..303: note = Description of Artificial Sequence: Synthetic coding sequence
  source 1..303: mol_type = other DNA
atggctcagtccaaactcgactgtaggagccctgttgggctcgattgttgtaactgctgtctggatttagcccaccggagtggactccaaagggggtcatcaggcgagaacaataatcctggaagccctacagtgtcgaattttcgacagctccaggaaaagctggtgttcgagaacctgaatacagataagctgaatagtataatgcgacaggacagcctggaaccggtgttgcgggatccatgctatttgattaatgagggcatttgcaaccgcaacatcgatcagacgatgctctcatag

SEQ ID NO: 245458 - DNA, 360 bp, synthetic construct
  misc_feature 1..360: note = Description of Artificial Sequence: Synthetic coding sequence
  source 1..360: mol_type = other DNA
atggctcaatccaaacttgactgtcggtctcccgtgggactagactgctgtaactgttgtctagatttagctcaccgatctggattgcagcggggttcatctggagagaacaataatcctggttcgccaaccgtaagcaatttcagacagctgcaggaaaagctggtgttcgaaaatctcaatacagataagctcaacagtataatgaggcaggacagcttggagcctgtgttaagggacccctgctatctgatcaacgagggcatctgtaacaggaatatcgaccaaaccatgttaagcatactactcttttttcactcggccagcggagccagcgtggttgcaatagacaacaagtag

SEQ ID NO: 245459 - DNA, 399 bp, synthetic construct
  misc_feature 1..399: note = Description of Artificial Sequence: Synthetic coding sequence
  source 1..399: mol_type = other DNA
atgaggcaggactcactcgaacctgttctccgtgacccttgttatctcattaatgaaggtatatgcaataggaacattgaccagacaatgttaagtatcctcttgttcttccacagtgcgtctggcgctagcgtggtggccatcgacaataaaatcgaacaggctatggatctagtgaaaaatcacctgatgtatgctgtaagagaggaggtagagatccttaaagagcagatcagagagctggtcgaaaaaaattcgcaattagaacgagaaaacacccttctgaaaacccttgcatccccagagcagctggagaagtttcaatcatgtctcagccctgaagagccagccccagaaagcccacaagtgccagaggcaccaggagggagcgccgtttag

SEQ ID NO: 245460 - DNA, 375 bp, synthetic construct
  misc_feature 1..375: note = Description of Artificial Sequence: Synthetic coding sequence
  source 1..375: mol_type = other DNA
atggcccagtcaaaactggattgtcggtcccctgtcggcttggattgctgtaactgctgcctggatcttgcgcatcgctctgggctgcaaagggggtcatctggtgagaacaacaatcctggtagcccaacagtcagcaactttaggcagctgcaggaaaaactggtctttgagaatcttaatacagataagctgaacagtatcatgagacaggactccctcgaaccagtgctgagagatccatgctatctgatcaatgaaggcatctgcaaccggaacattgatcagacgatgctatctatcctactgttttttcactccgcttcgggcgcttcggtggtcgctatcgataataagatcgagcaggcaatgtag

SEQ ID NO: 245461 - DNA, 1188 bp, synthetic construct
  misc_feature 1..1188: note = Description of Artificial Sequence: Synthetic coding sequence
  source 1..1188: mol_type = other DNA
atgtctgggggaaagaagaaaagctcttttcagataacatctgtgacaaccgactacgaaggaccaggttctcccggagcgtcagatcctccaacaccacagccacctacaggaccgcctcccaggttgccaaacggggagccaagcccagacccaggaggaaaaggaacaccaagaaatggctcccctccgcctggtgctccttcttctaggtttcgagtcgtgaaactacctcacggactgggcgaaccttacaggaggggtaggtggacatgcgtggacgtctatgagagggacttggagccccactcctttggaggcctcttagaaggtatccgcggtgcttcagggggtgccggtggcaggagtctggacagcagactcgagctagccagcctcggtctaggagcccctacacccccatctgggctgagccaaggaccaacttcttggctccgtcctccccctaccagcccgggtccacaggcacggagcttcacaggaggtctgggccagcttgtagtcccctcgaaggccaaggctgaaaaacccccactgtcagctagttctcctcagcaaaggccacctgagccagaaaccggcgagagcgcgggaacttcccgagctgctacgcctttgccctcactccgtgtggaggcagaggctggcggttcaggggctagaactccaccgctgtctcggcgtaaggctgtcgatatgcgtttaagaatggagctgggtgcaccggaggagatggggcaggtgcccccactggactccaggcctagcagtcctgcactgtactttacacacgatgctagtctggtgcataagtctccagatccttttggtgccgtagctgcacagaagtttagtcttgcccactcaatgttagccataagcgggcacctggattcagatgacgatagtggatccggctctctggtggggatagacaacaagatcgagcaggcaatggacctggtaaaatcccatcttatgttcgcagtgagggaagaggttgaggttctgaaagaacagatccgggagctcgcggaacgaaatgctgcattagaacaggagaatggtctcctgcgcgcacttgcctctcctgagcagctggcccagctgccgtcgtccggagtcccaagacttggtcctcctgctccaaacggaccaagcgtatag

SEQ ID NO: 245462 - DNA, 1314 bp, synthetic construct
  misc_feature 1..1314: note = Description of Artificial Sequence: Synthetic coding sequence
  source 1..1314: mol_type = other DNA
atgagtggactggacggagtgaagcgaaccacccctttgcagacccactctataattatcagtgatcaggtcccttccgatcaggatgcacaccaataccttaggttgcgcgaccagagcgaagccacccaggttatggctgagccaggcgaaggaggaagtgaaaccgtggccctgcctccgcctcctccctccgaggaaggcggagttccacaggacgcagctggcagaggaggcactcctcaaatacgagtggtggggggtcgcggacatgtggccattaaggctggccaagaggaaggccagccacctgctgagggtttggctgctgctagcgtggtgatggctgcggacaggtctctgaaaaagggtgtgcaggggggtgagaaagccctggaaatctgcggagcccaacggagcgccagcgagctaacagccggtgcagaggctgaggccgaagaggtaaagacaggtaagtgcgcaaccgtgagtgcagctgttgcggaacgagagtccgctgaggtggtgaaagaaggcctggccgaaaaggaggtaatggaggagcagatggaagtcgaggagcagcctccggaaggcgaagagattgaagtcgcagaggaggatcgactggaggaagaagcacgggaggaagaaggaccatggccgctccacgaggcccttcgaatggatcccctggaggctattcagttggaactagatacagtaaatgcccaagcagacagagctttccaacagctggagcacaagtttggacggatgagaagacattatctagaacggcgaaattatatcatccagaacatccctgggttttggatgaccgcgtttcggaaccatcctcagctgtccgccatgatcaggggccaagacgcagagatgctgcggtatattaccaatctggaggtgaaggagcttaggcaccccaggacagggtgcaaatttaaattcttttttcgaaggaacccctacttccgaaataaactcatcgtcaaggaatacgaagtgcgctcaagtgggagagtcgtttcactgtcgacacctattatctggagaagaggtcacgagcctcagtccttcattcggaggaaccaggatctcatatgctccttctttacttggttttccgaccatagcctgcctgaaagtgataaaatagcagaaatcatcaaggaggatctatggcctaatccgctgcagtactatcttctcagggaaggtgtccgtagggcccgaaggcggccactccgcgaacccgtggaaatcccacgtccatttggttttcagagcggttag

SEQ ID NO: 245463 - DNA, 522 bp, synthetic construct
  misc_feature 1..522: note = Description of Artificial Sequence: Synthetic coding sequence
  source 1..522: mol_type = other DNA
atgtctggactcgatggggtcaagcgcacaacaccccttcaaactcacagtatcattatctcagaccaagttccctctgatcaggacgcccaccagtacctcagactgcgagaccagagcgaggccacccaggtgatggctgagcctggggaggggggttctgaaaccgtagcactcccgcctccgccaccttctgaagaggggggtgtgccgcaggacgcggcaggcagaggcggtacgccacagattcgagtcgttggtggtaggggacatgtggccattaaggccggtcaggaagaaggacagcccccagccgaaggcctcgccgctgcctccgttgtaatggccgctgaccggagcctgaagaagggcgttcaaggcggtgaaaaagcactagaaatctgtggggcacagaggtccgcctcggaactaactgccggagccgaggccgaagctgaggaggtaaagacaggcaaatgcgccaccgtgtctgctgccgtggctaagatgcagcgatgctag

SEQ ID NO: 245464 - DNA, 2082 bp, synthetic construct
  misc_feature 1..2082: note = Description of Artificial Sequence: Synthetic coding sequence
  source 1..2082: mol_type = other DNA
atggaccgtcccgatgaaggtcctcccgcaaaaacgaggcgcctgagttctagcgagagcccgcagcgcgatccacctccacccccacctcctcccccactcctacgactacctttgccaccccctcagcagcgacctaggctccaggaagaaactgaagccgctcaggttctcgcggacatgcgaggcgtcggtctggggcctgctctgcccccacctcctccctacgtgattctggaagagggaggaatcagggcgtacttcacgctcggcgctgaatgccctggttgggattccaccatcgaatctggttacggcgaggctccccctccaacagagagtctagaagcccttcctactccggaggcttctgggggatctctggaaatcgacttccaagtcgtgcaaagtagttctttcgggggtgaaggcgctcttgagacttgctcagccgtcggttgggctccccagagactagtagatccaaagagcaaggaagaggctatcataatcgtagaggacgaggatgaagacgaaagggagtctatgaggtcctcccgaagaaggaggcggagaaggcgcaggaaacagcgcaaagtgaagcgcgagagtagggaacggaacgccgagcggatggagagcatattgcaggccctcgaggacattcagctggacctggaggctgtgaacatcaaggccggtaaggccttcctgagactgaaacgcaagtttattcagatgagaagacccttcctggagaggcgggacttaattatccagcacatcccaggattttgggtgaaggccttcttaaaccatcctcgcattagtattcttattaaccgtagggacgaagacatctttagatacttaaccaacctgcaggtccaggaccttcgccacatttcaatgggctacaaaatgaagctctacttccaaaccaacccttactttactaatatggtgattgtcaaggaattccaaaggaatagatccggtcggctggtctcacactctacccctatccggtggcaccgtggccaggagcctcaagccagaagacatggcaatcaggatgcaagccactccttcttttcgtggttctccaatcactctctaccagaagcagatcggatcgctgagattatcaagaacgatttatgggtaaatcccctgcggtattatctgcgtgaaagagggtcgagaatcaagcgtaagaaacaagagatgaagaagagaaagaccagaggcaggtgcgaagtggttataatggaagacgcccctgattattacgctgttgaagacatcttttctgagataagtgatatagatgagacaatccatgacataaaaatttcagatttcatggagactacggattattttgaaacaactgacaatgaaataacagacatcaatgagaacatttgtgactcagaaaaccccgaccataatgaagtacctaataacgagaccaccgacaataacgaaagcgctgatgaccatgaaaccaccgacaacaatgagtcagctgacgataataacgagaatcctgaagacaacaacaagaatactgacgataatgaggagaacccgaataacaacgaaaatacatacggaaacaattttttcaagggcggtttctggggaagtcacgggaataaccaagattccagcgacagcgataatgaggctgacgaggccagcgacgatgaggacaatgatggtaatgagggggataatgagggatctgatgatgatgggaatgagggtgacaatgaaggatcagacgatgatgacagggatatagagtactacgaaaaggtgatagaggacttcgacaaggaccaggcagattacgaagacgtcatcgagattatttctgacgaatccgtggaggaagagggaattgaggaaggaattcagcaggatgaagatatttacgaggaggggaactacgaggaagaggggagcgaggacgtgtgggaagaaggtgaagacagcgatgattcagatctcgaggatgtacttcaggtgcctaacggctgggctaaccctgggaagagaggcaaaaccgggtag

SEQ ID NO: 245465 - DNA, 1062 bp, synthetic construct
  misc_feature 1..1062: note = Description of Artificial Sequence: Synthetic coding sequence
  source 1..1062: mol_type = other DNA
atgccttggcctcttttgctgctgctggctgtgtccggcgctcaaaccacgagaccatgtttccctgggtgtcagtgcgaggtagaaacatttggtctgttcgacagcttttctctgacgcgcgtcgattgcagcgggttagggccacatatcatgcccgtacccatcccactggacacagcgcacctggacctgagctctaatagactggagatggtgaacgagtccgtgctggctggccctggatacaccaccctcgctggcctggatctctcacataatctgttgacttcgatctctccgacagccttctctaggctgcgttacctggagtccctggatctgagccataatggactaacagcactgccagctgaaagctttacttcttcccccctgtccgacgtaaatctgagccacaatcagttgagggaggtgagcgtgtctgcctttaccacccattcacagggcagagcgctacacgtcgacctgtcccacaatctgatccacagacttgttccacaccccacccgggcagggctgccggcaccaaccattcagtctttaaatctggcatggaacagattgcacgctgtgccaaatctgagggacctcccactgcgatatctgagtctcgacggaaatccactagctgtcattggcccaggcgctttcgctggactcggtggactgacacatctctcactcgcttcactgcagcggttgcccgaactggccccatccgggttccgggaattgcctggattacaagtactggacttgtccggtaatccaaagctaaattgggccggtgctgaagtgtttagtggtttgagttccctgcaggaactcgatcttagcgggaccaacctagtacccctgccagaggccttgctgttacacttgcccgctctgcaatcagttagcgtcggacaggacgtgcggtgccgtcgcctggtgagagaggggacttatcctagaaggcccggaagttcccccaaggtggcactacactgcgtggacacacgcgacagtgccgctcgaggccctacgatcctgtag

SEQ ID NO: 245466 - DNA, 966 bp, synthetic construct
  misc_feature 1..966: note = Description of Artificial Sequence: Synthetic coding sequence
  source 1..966: mol_type = other DNA
atgccctggcccttgctgttactgctcgccgtgtccggggctcagaccacacgcccttgcttcccaggctgtcagtgtgaggtcgagacgttcgggctctttgattccttctctctcacacgcgtcgactgctctggtctcggcccacacatcatgcctgtcccgatcccccttgacacggcccaccttgatctgagtagcaataggctagaaatggtgaacgagtctgtgctcgccggacccggatacacgactctggccggacttgatctctctcacaatctgctaacctcaagtccgttatcagatgtgaacctctcccacaaccagctccgggaagtatcagttagcgcttttacaactcattcacaggggagagccctgcatgtggatctctctcacaatctgatccatcgcctggttccccacccgacaagggctggactgccagctcctaccatccagagtctcaacctagcctggaatcgattgcacgcagtgcccaatctgagagacctgccactgagatatctctccctggacggaaatccactcgcagtcatcgggccaggcgctttcgccggattggggggactcacccatctttcactggcgtccctgcagcgccttcccgaattagccccttcagggtttagagagctgcccggtctccaggtcctggatctgtctggaaacccaaagcttaattgggctggagctgaggtcttcagtggactgtcctcacttcaggaactggacctgagcggcaccaaccttgtgcctctacccgaggctctgttgctgcatctgccagctctgcaaagcgtgagcgttggccaggacgtgagatgcaggaggctcgtgagagaagggacctatccaaggcgccctggtagctctccaaaggtcgcactacattgcgtggacacccgtgactccgcagcgagaggcccaactatcttgtag

SEQ ID NO: 245467 - DNA, 318 bp, synthetic construct
  misc_feature 1..318: note = Description of Artificial Sequence: Synthetic coding sequence
  source 1..318: mol_type = other DNA
atgccttggccgcttcttctcctgctcgccgtatccggggctcagaccacccggccatgtttccctggatgccagtgtgaggtggagacgtttggactcttcgattctttctcactgactcgggtcgattgcagtgggctgggtccccatatcatgccggtccccataccattggatactgcccatctggacctctcctcaaacagacttgagatggtgaacgaaagtgttctagccggtcctggttataccacactggcgggtctcgacctatcgcataatctcctaactagtattagcccaaccgcctttagttag

SEQ ID NO: 245468 - DNA, 1062 bp, synthetic construct
  misc_feature 1..1062: note = Description of Artificial Sequence: Synthetic coding sequence
  source 1..1062: mol_type = other DNA
atgccttggccgttgctgctgctcctcgctgtatcaggagcccagacaacaagaccatgctttccagggtgccagtgcgaggtggagactttcgggttatttgactcatttagtctgacacgcgtcgactgctccgggctcggaccccatattatgcccgtgcctattcccttggataccgcacacctggacttgtccagcaatcgcttggagatggtcaatgagagtgttctcgctggtcccggatataccactctggccggtcttgacctttctcacaacctgctcactagtatttcgccaaccgcattctcccggttgaggtatctcgaatctctcgatcttagtcacaacggactaaccgctctgccggcagagtcttttacttcctctcccttgtcagacgtgaatctgagccacaatcagctgcgtgaggtaagtgtgtccgcattcactacccacagccaaggcagggcccttcacgtggacttatctcacaaccttatccacaggctcgtgccccaccctactcgggctgggctccccgcacctacaatccagtctttaaatctcgcctggaaccgtttgcatgcagtcccaaatctgcgggatctgccattgaggtatctctctctcgatggtaaccctctcgccgtaatcggtcccggtgccttcgcgggactgggtggcctgacacacctttccttggcttctcttcagcggctgcccgaacttgctccctctggctttcgcgagctccctgggcttcaggttcttgatctctctggcaatccgaagcttaattgggccggtgctgaagttttcagcgggctctcctccctgcaggaactagacctgtcaggcactaatctggttcctttacccgaagcactcctccttcacctcccagcccttcagtccgtgtccgttggtcaggatgtgcgctgtagaaggctggtccgagagggaacttacccacgcaggcccggatcttcccccaaggtggcactccactgcgtggacacaagggacagcgccgctagggggcctacaatattgtag

SEQ ID NO: 245469 - DNA, 453 bp, synthetic construct
  misc_feature 1..453: note = Description of Artificial Sequence: Synthetic coding sequence
  source 1..453: mol_type = other DNA
atgccctggcctctgctcctcctactggctgtgtccggagcccagactacaagaccttgtttccctgggtgccagtgcgaggtggagaccttcggactctttgattccttctccctgactagagtggactgcagcggacttggcccacacatcatgcctgtgccaataccactggacactgcccacttagacttgtcatcaaaccggctcgagatggttaacgagtctgtgctggcagggcctggatataccactttggcgggtctggatctgagtcacaatctgctcacatctatcagtcccacagccttttctcgactgcgatatctcgaatcattggacctgtcgcacaatggcctgactgcacttccagcagaatcctttacctcaagcccgttatctgacgtcaatctgagccataaccagctgagggaagtctccgtcagtgcctag

SEQ ID NO: 245470 - DNA, 2574 bp, synthetic construct
  misc_feature 1..2574: note = Description of Artificial Sequence: Synthetic coding sequence
  source 1..2574: mol_type = other DNA
atggagtccgaagatctgagtggcagggagttaaccatagatagcattatgaacaaggtgagagacattaagaacaagtttaagaatgaggatctcaccgacgaactgtcattgaataagatctcggccgatacaactgacaacagtggtacggtgaatcagatcatgatgatggctaataaccccgaagattggttatcgctgctcctcaagcttgaaaaaaactctgtcccactgtccgacgcactgctgaacaagctcattgggcgttactctcaggcgattgaagccctgccgcctgataaatacgggcagaacgagtccttcgccaggatacaggtgaggttcgctgaattaaaagcgattcaggagcccgacgatgctcgtgattactttcagatggcaagagccaattgcaaaaaatttgccttcgtccatatctccttcgcccagttcgagctgagccagggaaacgtcaaaaagagcaagcaactgctccagaaggctgtcgagaggggggcagttccactggagatgctcgagattgccctgcgcaacctcaacctgcagaaaaaacagctcctgagcgaggaggagaaaaagaacctgtcggcctcaactgttctgactgcccaagagagttttagcgggtcactcggtcacctgcagaatcgaaacaatagctgtgattccagaggtcagaccaccaaggcaaggtttctatacggggagaacatgcccccacaagatgctgaaatcggttaccgtaactccctgaggcagaccaataagacaaaacagagctgcccttttggaagagtgccagtgaatctcctaaacagtcctgactgtgatgttaaaaccgatgattccgttgtgccctgtttcatgaaaaggcagaccagtcggagtgaatgccgcgacctggtggtacctgggtcaaagcctagcggcaatgacagctgcgagctccggaatctgaaatctgtacagaatagccacttcaaggaacctttggtctccgacgagaagagcagtgagttgattattactgactctattacactgaagaataagaccgagtcctcactcctggccaagctggaggagactaaggagtatcaggagccagaagtgccagagagtaatcagaaacagtggcagagcaaaagaaagagtgaatgtattaatcagaaccctgcagcttcttcaaatcactggcaaatacctgaacttgcccgaaaagttaataccgagcagaagcataccactttcgaacagccggtgttctctgtttcaaagcagtcgcctcctataagcacctctaaatggttcgatccgaagtccatttgcaaaacgcccagttctaatacgctggacgactacatgtcatgtttcagaactccggtggttaaaaatgattttccacctgcctgccagctcagtacaccttatggacagcctgcatgctttcagcagcaacagcaccagatacttgccactcctctgcagaacttgcaggtgctggcctccagctccgccaacgagtgcatctcagttaaaggaagaatctacagtattctcaaacagattgggagcggcggtagctcaaaggtattccaggtgctgaatgaaaaaaaacagatttacgcaattaaatatgtcaatctggaagaggcagacaaccagacattggactcataccggaacgaaattgcttatctgaacaagctgcagcaacactctgataaaattattcgcctgtatgactatgagataactgaccagtacatttacatggtgatggaatgcgggaatatcgacttgaactcttggttgaagaagaagaaatccatcgacccttgggagaggaaaagttattggaaaaacatgctggaagcagtccataccatccaccagcacggcattgtgcactcggatcttaagccagccaacttccttatcgtcgatggaatgctcaaactcatagattttggcattgccaaccagatgcagccagatacaaccagtgtcgttaaggatagtcaagtggggacggttaattatatgcctcccgaggcgattaaggacatgagtagttctagggagaacggcaagtccaagagcaagatttctcccaaatctgacgtgtggtctctgggctgcatactctactatatgacatatggaaagaccccgttccagcagatcatcaaccagatcagtaaactacacgccattatagatccaaaccatgagatcgaattcccagacattccggagaaggacttacaagacgtcttgaagtgctgtctgaagcgagaccccaagcagcgaatcagcattccagaactcttggctcacccttatgttcagattcagacacaccccgttaatcagatggccaagggtacaaccgaggagatgaagtacgtgctaggtcagctcgtcgggctcaattcccctaatagcatcctgaaagccgcaaagaccctgtacgaacattacagcggaggcgaaagtcataacagcagctcgtcgaagaccttcgagaaaaagagagggaaaaaatag

SEQ ID NO: 245471 - DNA, 420 bp, synthetic construct
  misc_feature 1..420: note = Description of Artificial Sequence: Synthetic coding sequence
  source 1..420: mol_type = other DNA
atggaatctgaggacctgtcagggagagagctcacaattgattctattatgaataaggtgagggacatcaagaataagtttaagaacgaagacctgaccgacgagctatccttgaataagatctctgctgacactaccgataattccggcaccgtgaaccagattatgatgatggctaataatccagaggattggctgagccttcttctgaagctcgagaaaaacagcgtgccacttagtgacgcactcttgaataagttaatcgggcgttactcacaggcgattgaggctctcccccctgacaagtacggccaaaatgagagcttcgcaaggatacaagtaaggttcgccgagctgaaagccattcaagaaccggatgacgcacgggactactttcagatggcccgagctaattgctag

SEQ ID NO: 245472 - DNA, 531 bp, synthetic construct
  misc_feature 1..531: note = Description of Artificial Sequence: Synthetic coding sequence
  source 1..531: mol_type = other DNA
atggaatccgaggatctgagcggccgtgagctcacaatagattcaattatgaacaaagttagggatattaaaaacaagtttaaaaatgaagatctaaccgatgaactaagtctcaataaaattagcgccgacaccactgataacagcggcacagtgaaccaaattatgatgatggcaaacaatcctgaagactggctgtcattgctgttgaagcttgaaaagaattctgtccccctttcagatgccctgcttaacaagctgattgggcgatacagccaggccattgaagccttgccccctgacaaatatggacagaacgaaagcttcgccagaattcaggttcgattcgctgaactcaaagcgatccaggagcccgacgacgccagggattattttcagatggcaagagctaactgtaagaaatttgcatttgtgcacatcagtttcgcacagttcgaattaagccaaggcaatgttaaaaagtctaaacagcttctgcagaaagctgttgagcgcggagcagtcccgtag

SEQ ID NO: 245473 - DNA, 453 bp, synthetic construct
  misc_feature 1..453: note = Description of Artificial Sequence: Synthetic coding sequence
  source 1..453: mol_type = other DNA
atggagtctgaggatctcagcgggagagagctgactatcgactcaatcatgaacaaggtgagagacatcaagaacaagttcaagaacgaagatcttacggatgaactatcactcaataagatatccgccgatacaacagataattccggcacggtgaaccagatcatgatgatggccaataatcctgaggactggctgtcccttctgctgaagttggagaaaaatagcgtacctttgagtgatgccctgctgaacaaactcattggtcggtactctcaggcaattgaggcattgccccctgataagtacggacaaaacgaatcattcgctagaattcaggttcgatttgctgagctaaaagctatccaagagcccgacgacgctagagattacttccaaatggccagggcgaattgcaaaaagtttgcttttgtccatatctccttcgcatag

SEQ ID NO: 245474 - DNA, 492 bp, synthetic construct
  misc_feature 1..492: note = Description of Artificial Sequence: Synthetic coding sequence
  source 1..492: mol_type = other DNA
atggcggaaggcggaggtcaaaaccaccacgaagtggtaaagttcatggatgtttatcagaggtcctattgccaccctatcgagactctcgttgatatattccaggaataccccgacgaaattgagtatatcttcaagccctcttgtgtgccactaatgcggtgcggaggctgttgcaacgacgaaggacttgaatgtgttccgacagaggagtccaatatcacaatgcagatcatgaggattaaaccacaccagggccaacatatcggggaaatgtcttttttgcagcacaataaatgtgagtgtcgtccgaagaaggatcgggctagacaggaaaatccatgtggcccttgctccgaacggaggaagcatttatttgtacaggaccctcaaacttgtaaatgcagctgtaagaacacggactctagatgtaaagctcgacagctggagctgaacgaacgaacatgccgatgtgacaaaccgcgtaggtag

SEQ ID NO: 245475 - DNA, 1368 bp, synthetic construct
  misc_feature 1..1368: note = Description of Artificial Sequence: Synthetic coding sequence
  source 1..1368: mol_type = other DNA
atgaccacaatggccgcagcaaccctgctaagggccaccccgcatttcagtggcctagccgctggcagaacttttctgctgcagggcctgttaaggttgcttaaagcacccgctctccccctactgtgtaggggcctggcggtggaggccaagaagacatatgtgagggacaaaccacatgtgaacgtgggaaccatcggccatgtggatcatgggaaaacaaccctgacagctgccataaccaagatccttgcggaaggcggtggtgccaagttcaaaaaatacgaggaaatcgataatgctcctgaggagagagcacggggtataaccattaacgcagcccacgtggagtacagcacagcagctcggcattatgcccacaccgattgcccaggtcacgcggactacgtaaagaatatgatcacgggaaccgcacccctcgatggatgcatccttgttgtggctgccaatgacggcccaatgccgcagactagggagcacctccttttggcaagacagataggcgtagagcacgtcgttgtatatgtcaataaagcagacgcggtccaggattcagagatggtggagttggtcgagctggagatccgtgagctcctgacggaattcggatacaagggtgaagagactcccgtgattgttgggtctgccctgtgtgctctggagggcagagaccccgagcttggcctcaagagcgttcaaaagctcctcgatgcagttgacacgtacatccctgtgcccgcaagggacttggagaaaccgttcctcctgcccgtggaggctgtttactcagttcccggacgcggaactgtagttacaggaacgctggagcggggaattctcaaaaagggcgacgaatgcgagctcttaggacacagtaagaacatcaggactgtggtgaccggcattgaaatgttccataagagtctagagcgagcagaggccggtgacaatcttggcgctctggtgagaggcctcaagcgagaggacctgagaagaggactggtcatggtgaagccaggttcaattaaacctcatcagaaggttgaggcccaggtttatattttgtctaaggaagaggggggacgccacaagccctttgtgagtcattttatgcccgtgatgttcagccttacctgggatatggcctgtaggattatcctgcctcccgaaaaggagttagctatgccaggcgaggatctgaaattcaacctcatcctccgacagccaatgatcctggaaaagggacagcgtttcacgctgcgggacggtaaccgtaccattggcaccggcttggtgactaacacactcgcgatgactgaggaagaaaagaacataaagtggggttag

SEQ ID NO: 245476 - DNA, 1611 bp, synthetic construct
  misc_feature 1..1611: note = Description of Artificial Sequence: Synthetic coding sequence
  source 1..1611: mol_type = other DNA
atggcaaccccagacgctggcctgccaggagcggaaggggtcgaacctgcaccttgggctcagctggaggctcctgccagattgttgctgcaagcactgcaggccggtcctgagggggctcgacggggactcggtgttctgagggctcttggttcccgcggttgggaaccttttgattggggacggctcctggaggcattatgtagggaagagccggtggtgcagggcccagacggacgcttggagctgaagcccctactcctgagactgcctcggatttgtcagagaaatctgatgtctctcctaatggcggttcgtccgtccctcccggagtcaggactactgagcgtgctgcagatcgctcagcaggacctagctcccgatcctgacgcttggttacgggcactgggcgagctattaagacgcgaccttggagttggaaccagcatggaaggcgcaagtccgttgtcagaaaggtgccagcgccagcttcagtcactgtgtaggggcctaggtcttgggggtcggagacttaagtcccctcaagcgcctgatccagaggaagaagagaaccgcgattctcagcagccgggaaaaagaaggaaggatagtgaggaagaggcagccagccctgagggaaagcgtgttcccaaaagactgcgctgctgggaagaggaagaagaccacgagaaggaaagacctgagcataagagcttagagtccctggccgacggcggttcagcttctcctattaaagaccaacctgtgatggcggtcaagaccggcgaggatggtagtaacctggatgatgcaaaagggttagccgagtccctggagctgccgaaggctattcaagaccagctgccccgactgcaacagctgttgaaaactctggaagaagggctcgaagggcttgaggacgctcctcctgtcgaactgcagctgttacatgagtgtagcccaagccagatggatctcctctgcgcgcaactgcagctgcctcagctgtcggacctcgggcttctgcggctttgcacctggctgctggccctctctcccgatctgagtttgagcaacgccaccgtgctgacaagatccctgtttctaggtcggattctgtcgctgaccagttctgcgagcaggctgcttacaactgcgcttactagtttttgcgctaagtatacgtaccctgtctgctctgcactcttagatcccgtcctgcaggctcccggaaccgggccagcacagactgagctgctctgctgtctggtgaaaatggaatcgctagagcctgatgcccaggtgctgatgttgggccagattttagaactcccatggaaggaagaaacgtttctcgtgctgcagtcattgttggaacgtcaggtggagatgactcctgaaaagttttcagtcctcatggagaaactctgtaaaaaaggcctggcagccactacgtccatggcatatgcaaagcttatgctgacagttatgacgaagtaccaggctaacattacggagactcagcgacttggtctcgccatggccctagagccaaacacaactttcttgcgaaaaagcctcaaagccgcacttaaacatctaggtccctag

SEQ ID NO: 245477 - DNA, 1470 bp, synthetic construct
  misc_feature 1..1470: note = Description of Artificial Sequence: Synthetic coding sequence
  source 1..1470: mol_type = other DNA
atgccgctgagggacgaaactttaagagaagtttgggctagcgatagtggccacgaagaagagtccctgtctcccgaggcccctcggagaccgaagcaacggccagctcccgcacagaggcttcggaagaagcggaccgaggcccctgagagcccctgccctacgggctccaagcctaggaaaccaggcgaagaggaggaggaagaggaggatgaagaggacgaagaggaagaggctgaggagaaaaaggagaagatactcctacctccaaaaaaaccgctgagggagaaatctagcgctgatctgaaggaaaggagggccaaagcacagggtccacgcggtgatctgggcagccctgatccacccccaaaacctctgcgagtccgaaacaaggaggctcccgcaggtgaaggcaccaaaatgcggaagacgaagaagaaggggagtggagaggcagacaaggaccccagcggctctccagccagcgctaggaagagccccgctgcaatgtttctggtcggggaggggagtcccgacaagaaggcactgaaaaagaaggggactcccaagggagcgaggaaggaggaggaggaggaagaagaggccgcaacggtcatcaagaaaagcaatcagaaagggaaggccaagggtaagggtaaaaaaaaggcaaaggaggagagggcaccttctcctcctgtcgaggtcgacgaaccacgagagttcgtactccggccagccccacagggaaggaccgtgaggtgccggctcaccagagacaaaaaagggatggatagaggaatgtacccttcttactttctacatctagacactgagaagaaggtatttctactcgccggaaggaagaggaagaggagtaagactgccaactacctgatctcaattgacccaacgaatctgagtcgaggaggtgagaacttcattggcaaacttcgcagcaatctccttggcaaccggttcacagtgtttgacaatggccagaatcctcaacggggttattcgacaaatgtggcttctctgaggcaggaactcgccgcagtgatttacgagaccaatgtgctcggctttagagggccacgacggatgacagtgatcattccaggcatgagtgcagaaaacgagcgcgtgcctatccgccctcgcaatgcaagtgacggtctgttggtacggtggcagaataagacccttgagtctctgatcgagttacataacaagcctcccgtgtggaacgatgacagcggttcctatacacttaactttcagggacgcgtgacacaagcaagcgtgaagaattttcaaattgtccatgccgacgaccctgattatattgtcctacaatttggccgagtggctgaggatgcgtttaccctcgactataggtatcctctctgtgcgcttcaagctttcgccatagccctgtccagctttgatggaaaattggcctgtgaatag

SEQ ID NO: 245478 - DNA, 561 bp, synthetic construct
  misc_feature 1..561: note = Description of Artificial Sequence: Synthetic coding sequence
  source 1..561: mol_type = other DNA
atgcctctgcgggacgaaactttgagggaggtgtgggcctctgacagcggccacgaggaggaatctctgagtcccgaagcccctagacggccaaagcagcggcctgcacctgcccagcgattacggaagaagcgcacagaggctccggagtccccttgccctacagggtcaaaaccccgtaagcctggtgaagaggaagaggaagaagaggatgaggaagacgaggaagaagaagccgaagagaagaaagagaaaatccttctccctcccaaaaagccattacgtgagaagtcaagcgcagaccttaaagaacggagggccaaggcacaaggccctagaggagatctcggctcacccgaccccccacctaaacctctcagagtccggaacaaagaagcccctgcaggggagggaacaaaaatgaggaaaacaaagaaaaaagggagcggagaagccgataaggatccctccggctcccccgcatccgccagaaagagccccgctgccatgtttctagtgggagagggttcccccgataagaaagctctcaagaagaaatag

SEQ ID NO: 245479 - DNA, 3033 bp, synthetic construct
  misc_feature 1..3033: note = Description of Artificial Sequence: Synthetic coding sequence
  source 1..3033: mol_type = other DNA
atgggagcctacgcacgcgctagcggggtgtgtgccagaggttgtctggactccgccggtccatggactatgtccagggccctgcgcccacccctgcctcccctgtgcttttttctgctactgcttgccgctgcgggagccagggccggtgggtatgagacttgcccaaccgttcaaccaaatatgttgaatgtgcacctcctgcctcatactcatgatgacgttggctggttgaagaccgtggaccagtatttctacggcattaagaatgatatccagcacgctggggtgcagtatattctcgactctgtgatttccgctctactggcagacccaaccagaaggtttatctatgtagagatcgccttcttctcacgctggtggcaccagcagacaaatgcgacgcaggaagtggtgagagatcttgtgagacaggggcgtttggagttcgccaatggcggttgggtaatgaacgatgaagccgcaactcactacggagccatcgtcgatcagatgacactaggccttaggtttctggaagacactttcggcaacgacggtcggcctagggtggcctggcatatagatccctttggccatagcagggaacaagctagtctgtttgcccagatgggcttcgatgggtttttcttcggaagactggactaccaagacaaatgggttcgcatgcaaaaattggagatggagcaagtgtggagggccagcacaagcctcaagccacctaccgccgatctgttcaccggcgtgcttccaaatggatacaacccccctagaaacctgtgttgggacgtgctctgcgttgatcagccactcgtggaggaccctcgtagtccagaatacaatgcgaaggaactcgtggattacttcctgaatgtcgctacagcgcaaggacgctactaccggaccaatcatacagttatgacgatggggagcgatttccagtatgagaacgccaacatgtggtttaagaatctcgataaattgattcggctggttaacgcccaagccaagggttccagtgtccatgtgttgtacagcacacctgcctgctacttatgggaattgaacaaggccaacctgacctggtcggtgaaacatgatgattttttcccctacgctgacgggccacatcagttctggacgggatacttctctagtcgccctgccctgaaacggtacgagaggctgagttataattttttacaagtgtgtaaccagttggaggcactggttgggttggccgcaaatgtgggaccctatgggtccggggactcagccccactcaacgaggctatggccgtactgcagcatcatgacgctgtaagcggcacaagtagacagcacgtggctaatgactatgcgagacaactcgcggcaggctggggtccctgcgaggtactgctgagcaacgctctcgctcgactgcgcggtttcaaagatcattttacgttctgccagcagctcaatatctcaatctgtccgttgtctcaaacagcggcaagattccaggtcatcgtttacaatcccctggggagaaaagttaactggatggtccgactgcctgtctcagaaggcgttttcgttgtgaaggacccaaatgggaggaccgtgcctagtgacgtggtcatcttcccttccagtgattcccaagctcacccccctgaacttctgttttccgcttctcttcctgcactggggtttagcacatattctgtggcacaggtccctcgctggaaaccacaagcaagagccccacagccaatcccacgtagaagctggtctccggctctcaccattgaaaatgagcatatcagagcaacctttgatcctgataccggacttctcatggagatcatgaacatgaaccagcaactgctgttgccagtgaggcagacattcttctggtataacgcctccattggagacaacgagagcgaccaggcttccggcgcatacatttttcgacctaatcagcagaaacctctgccagtgtctcggtgggcccagatccatctggtgaaaacaccacttgtgcaggaagtacaccagaatttctccgcctggtgctcacaagtggtgcgcctgtatcccggacaacggcatctggaactcgaatggagcgtcgggccaattcccgtgggagacacttggggtaaggaggttattagcagattcgatacacccctagagaccaagggccgtttctatacggactctaacggccgtgagatcctggaaagacggagagattatcgacccacctggaaactcaaccagactgaaccagtggctgggaactattaccccgtcaatacaaggatttacattacagatggaaacatgcagctcaccgtcctgaccgaccgctcccaggggggatcctctctgcgagatggctcgttggagttaatggtgcacagacgattgctgaaggacgatggtaggggtgtgagtgagccacttatggagaacggaagcggagcatgggttagaggccgacatttggttctcctggatacagctcaggccgctgctgcaggccaccggctgctcgcagagcaagaggtcctcgcaccccaagtcgtcctggcgcctgggggtggagccgcatataatttgggcgcaccacccagaacgcagttttccggcctgaggcgtgacctgccaccttccgtgcatctgctgacattggctagttggggacctgaaatggtgttgctgcgattagaacatcagtttgctgtaggagaggactccgggagaaacttgtccgcacccgtgaccttaaacttgagggatttattttctaccttcacaattaccaggcttcaagagacaaccctggtcgccaaccagttgagagaagccgcatcacggctcaaatggactactaatacagggcctactccgcaccagacaccctatcagctggaccccgcaaatatcacgctggaacccatggaaatccgcactttcctcgcgagcgtgcagtggaaggaggtggacggatag

SEQ ID NO: 245480 - DNA, 1158 bp, synthetic construct
  misc_feature 1..1158: note = Description of Artificial Sequence: Synthetic coding sequence
  source 1..1158: mol_type = other DNA
atgcacgtgtgtgtgtgtgtctgtgtctgtgtgtacatgcctgtgtgtgtggatgcgtgcatgtgctgcgaggcgggacgccctgcctttcgctcattcctgttcagtctatgctctgatctgggggcagtgatcagtctgctcttgtggggtagacaactgtttgctttatacagtggtaacgatgttaccgatatcagcgatgataggttccccaagccacctgaaattgccaatggctacgtggaacacctgttcaggtaccaatgtaagaattattacagacttcggaccgagggcgacggcgtctacacactgaatgataagaagcagtggataaacaaggcagttggggataaattgccggagtgtgaagccgtatgtggtaagccaaaaaaccccgctaaccctgtacaaaggattttgggcggacacttggacgctaaaggcagtttcccgtggcaggccaagatggtgtcccaccataatctcaccactggcgctactctaattaatgagcaatggttactgactacagccaagaatctctttttaaaccacagcgaaaacgctactgccaaagatatagcccctacactcaccctttacgtcggcaaaaaacagctggttgagattgagaaggttgtgctacaccctaactaccatcaagtcgacattgggctgattaagctaaagcagaaggtcctggttaatgagcgcgtgatgcctatatgtttgcctagcaagaactatgctgaagttgggagagtgggctacgtgtctggatggggccagagtgacaactttaagctgacagatcatctgaagtacgtgatgctgccggtggctgaccaatatgattgcatcacacactacgagggctctacctgtccaaagtggaaggcgcctaaatccccagttggggtgcagcctatccttaacgaacacactttctgcgtgggcatgagcaaataccaggaagatacatgctatggagacgcaggcagcgctttcgctgtccacgatctcgaggaggatacgtggtatgccgcaggcatcctgtcatttgacaagtcatgcgccgtggccgagtatggagtgtacgttaaagttaccagtatccaacactgggtgcagaagaccatagctgagaattag

SEQ ID NO: 245481 - DNA, 1329 bp, synthetic construct
  misc_feature 1..1329: note = Description of Artificial Sequence: Synthetic coding sequence
  source 1..1329: mol_type = other DNA
atggaggcctcacgttgccgtttgagtccatctggtgacagcgtctttcatgaggaaatgatgaagatgagacaagctaagctcgactaccaaaggctgctgcttgagaagagacaaaggaagaagcgccttgaaccattcatggtgcagccgaatcctgaagctcgcctgcgccgagcgaagccacgggcatctgacgagcaaacaccattggttaattgccataccccacactctaacgttattctccacggaatagacggcccagccgcagtgctgaagcctgatgaggtgcacgctcctagtgtcagcagcagcgtggtcgaagaggacgcagagaataccgtcgacactgcaagtaagcctggcctgcaggaacgtttgcagaagcacgatatttcagagagtgttaatttcgacgaggagaccgatggcattagtcagagcgcttgtctggagagacccaactctgcctctagccagaatagcacggacacaggaacaagcggaagcgccacagctgcccaacctgccgacaacctgctgggggatattgatgacctggaggacttcgtgtacagccctgcaccccagggtgtcaccgttagatgtcggataatccgcgacaaacgcggaatggaccgaggtctgttcccgacatactacatgtatctcgaaaaggaggagaaccagaaaatttttttattggctgccagaaaacgcaaaaaatccaagactgccaattatctgatctcaatcgatcctgtggacctgagtagggagggggaatcatacgtaggaaagctaagatctaatctcatgggcactaagtttaccgtgtatgataggggcatttgccctatgaaaggtagaggactggtgggggcagcccacactagacaggagctggcggcaatctcatacgaaactaacgtcctcggattcaaaggccctcgaaaaatgtccgtgataattccaggaatgaccctgaaccataaacagattccatatcaaccgcaaaacaaccacgattctctcttatctcgctggcagaaccggacgatggagaatctggttgagctccacaacaaggctccagtgtggaattccgatacccaatcttacgtgttgaacttcagaggccgtgtcacccaggcctctgtgaagaactttcaaatcgttcacaagaatgaccctgactatattgtgatgcagtttggtcgggtggcagacgatgtattcaccttagattacaattaccctctgtgtgccgttcaggctttcggaatcggcctgagttccttcgattccaaattggcttgcgagtag

SEQ ID NO: 245482 - DNA, 513 bp, synthetic construct
  misc_feature 1..513: note = Description of Artificial Sequence: Synthetic coding sequence
  source 1..513: mol_type = other DNA
atgatgaaaatgagacaggcaaaactggattatcaacgcctgctgctcgaaaagaggcaacgtaagaagagactggaaccattcatggtgcagcccaaccccgaagccagattgagacgagctaaacctcgagcttccgacgagcaaaccccattggtgaattgccataccccccatagcaatgtcatccttcacggaatagatggaccagccgcagttctcaaaccagacgaggtccatgcaccatccgtgtcctctagcgtagtggaagaggatgctgaaaataccgtcgatacggcgtccaagccaggtctccaagagcggctgcagaaacatgacatcagtgaaagcgtcaactttgacgaggagactgatggtatttcccagtcggcctgtctcgagcgccctaacagtgccagctctcaaaatagcacctttagctcattctgtcagaaaacagaagatactggttatcgccattttagattttgctattgcagacccacatcgtag

SEQ ID NO: 245483 - DNA, 801 bp, synthetic construct
  misc_feature 1..801: note = Description of Artificial Sequence: Synthetic coding sequence
  source 1..801: mol_type = other DNA
atgctgaagaccccatggatacttctgcccagtcaggactttcgtagtgtgagtaaaagtatggacaccggaacaagtggctccgccaccgccgcacaaccggcagataatctgttgggggacatcgacgacctggaggactttgtctattcccccgctccacagggagtgacggtgcggtgccggattatccgggacaagagagggatggatcggggattatttccaacatactacatgtacctggaaaaggaagaaaaccagaaaatttttttgctggctgctcgcaaacggaaaaagagtaaaaccgcgaattaccttatatcaatcgatccggtggacctgtctagagagggggagtcatacgttggcaagctgaggtccaacctgatgggtactaaatttacagtttatgatcgtgggatttgtcccatgaaaggcaggggcctggttggtgcggctcatacccgccaggagctggcggctatctcctataaccacgactctctgctctctcgctggcaaaacaggaccatggagaatctggtggaactccataataaggccccagtctggaactctgatacccagtcttacgtgctcaattttagaggtcgcgtgacccaggcctccgtgaagaatttccaaatagtgcacaagaacgatcccgactatatcgtcatgcagttcgggagagtcgccgatgatgtgtttacactggattacaactaccctctgtgtgctgtccaagcgttcggcatcggcctgtcaagcttcgactcaaaactggcttgtgaatag

SEQ ID NO: 245484 - DNA, 1506 bp, synthetic construct
  misc_feature 1..1506: note = Description of Artificial Sequence: Synthetic coding sequence
  source 1..1506: mol_type = other DNA
atggaggcctccaggtgccgactctcgcctagtggcgacagtgtttttcatgaagagatgatgaagatgcgacaggctaaactggattatcagagactgcttctggagaaacgtcagaggaaaaaaaggctggaaccctttatggttcagccaaatccagaggctcgcctacggcgagccaagcccagggctagcgatgaacaaactccgcttgtgaattgtcacaccccgcacagcaatgtgatcctgcacggaatagatggcccagctgctgtactcaagcctgatgaggttcacgctcctagcgtgtcatctagcgtggttgaagaagatgcagagaacactgtggatactgcatcaaagccaggtttacaggagcgattgcagaaacacgatatttccgagtcagtcaactttgatgaagagacagacggcattagtcagtcagcttgtcttgagaggcctaattcagcatcatcccagaattctactgacacaggcacatcaggtagcgccaccgctgcccagcccgctgataatctccttggcgatatcgacgatctggaagacttcgtgtatagcccggcaccacagggtgtcaccgttaggtgccgaatcattcgcgacaagagaggcatggaccgaggcttatttcccacctattacatgtatctagagaaggaggagaatcagaagattttcctgctggctgctagaaagagaaagaagtctaagactgcaaattatctgatttctatagatccagttgatttaagcagagagggggagagctatgtcggaaaactccggtccaacctgatgggaaccaagttcacggtttatgataggggcatctgcccaatgaagggcagggggctcgttggagccgcacacactcgacaggaactcgccgcaatttcttatgagaccaatgttctagggtttaaagggcctcgaaagatgagcgttatcattcccggaatgacccttaatcataagcagattccatatcaaccacagaataaccatgactctctcctgtcacgatggcagaatcggacaatggagaatcttgtcgagctccacaacaaggcacctgtatggaatagtgacacacagtcatacgtgctcaactttaggggtagagtaactcaggccagcgttaagaattttcagattgtgcataagaacgaccccgactatatcgttatgcagttcgggagagttgcagacgacgtttttactttggactacaactatcccctctgtgcagtccaagcttttgggatcggcctgtcgtccttcgataaatgcatacagactctgcgcatgcaggaactctgtgagctgcacaggcagcaccactccgccgcatctctagttcataggaccgtgtgtcagcggtgggtgggccacccctggcgactgctcccccaaacatcccttctttggactgacctctcacccccacccgtggtgcccgcaccccatcaaatttccatgtag

SEQ ID NO: 245485 - DNA, 1269 bp, synthetic construct
  misc_feature 1..1269: note = Description of Artificial Sequence: Synthetic coding sequence
  source 1..1269: mol_type = other DNA
atggctctgagcgacgagccagctgctggaggcccagaagaggaggccgaggatgagaccctggctttcggcgctgccctggaggcttttggagaaagtgctgagacgagagctctcttgggacgtctccgggaggtccacggagggggtgcagagcgagaagttgccctcgaacggttcagggaatggatgatgaatttactgttggatatcgtacaggatcagactagtcctgctagcttggtgcatctcgcgtttaaatttctatatataattaccaaagtccggggttacaagactttcctcagactctttcctcatgaggtcgctgatgtggaacctgtgcttgacctggtcactatccagaacccaaaagaccatgaagcctgggaaacacggtatatgctgctcctgtggctgtccgttacctgcctcatccccttcgatttcagtaggctcgatggtaacctcctgacccagcccggtcaggctcgtatgagtataatggaccggattcttcagatcgcagagtcttatttgatagtgtcagataaggctagggacgctgctgctgttctggtgtcaagatttataacaaggccagacgtgaagcaatccaaaatggccgagtttctggactggtcgctgtgtaatttggctcgttcctcatttcagacaatgcagggcgtgattaccatggatggtacgcttcaggctttggcccagatttttaaacacggaaaacgagaagattgcctgccctacgccgctaccgtccttagatgcctggatggctgccggctgcctgagagcaaccagactttgctgcggaaacttggggttaagctagtgcagcgcctgggacttaccttccttaagccgaaagtcgccgcatggcgataccagaggggatgtagaagcttggccgcaaatttgcaactgctgacacaaggacagagcgagcagaaaccattaatccttaccgaggacgacgatgaagacgacgacgtgcccgaaggagtggaacgggtgattgagcagctgcttgtgggtctgaaggataaagataccgtcgtcaggtggagcgctgccaagggcataggtaggatggcagggagactgccgagagcgttagcagacgatgtggtgggttcagtgctagattgtttctcctttcaagagacagacaaggcctggcacggaggatgtctggctttagcagaactgggcagacgagggctgctactcccctccaggctcgtagattag

SEQ ID NO: 245486 - DNA, 2997 bp, synthetic construct
  misc_feature 1..2997: note = Description of Artificial Sequence: Synthetic coding sequence
  source 1..2997: mol_type = other DNA
atggacggaactcttcaggcccttgcacagatctttaagcacggcaagagagaggactgcctgccttacgctgctactgttctccgctgcttagacggctgccgattaccagaatctaatcagacactccttcgtaaactcggcgtcaagctggtacagaggttgggtctcacttttctgaaacccaaggtggctgcctggaggtaccagcgtggttgtcggagcttagctgcgaatctgcagttactgacacaaggccagtcggagcagaagccactcatcttaaccgaggatgatgacgaggacgatgacgtgcccgagggggtcgaaagagtaatagaacagttgctcgttggactgaaagataaggacactgtggtgaggtggagcgccgcaaagggcattggcaggatggccggtaggcttccacgggctctagctgatgatgtggtgggatcagtactggattgtttctccttccaggagaccgacaaagcgtggcatggcggatgcttggctttggcagagctcggcagaagaggactactactgccctcccggctcgtcgatgtcgttgctgtaatcctcaaggctttaacctacgacgaaaagcggggtgcatgttcagtcggaactaatgtgagggatgccgcttgctacgtgtgttgggccttcgctagggcctatgagccccaggagctgaagccgttcgtgacagcaatttcttctgccctggtgatcgccgcagtcttcgacagagatattaactgtagacgcgcagcatcggcggcattccaggagaacgtggggcgacagggtacattccctcatgggatagacattttgaccactgcagactactttgcagttgggaacaggtctaactgctttctggttatatctgtattcatagctggctttcctgaatacactcaacccatgattgaccacttggtcactatgaagatatctcactgggacggtgtgattcgagagcttgctgcgagagcgctccacaacttggcgcaacaggcgcctgaattctccgcaacacaggtcttcccacgtttgttgagcatgacactgagtcctgacctgcacatgagacatggttctattttagcttgcgcagaagttgcctacgctctatataaactcgccgctcaggaaaataggcctgttaccgaccacctcgacgagcaggcagtccagggcttgaaacaaatccatcagcagctctacgatcggcaactgtatcgtggcctcggtgggcagcttatgcgccaagccgtctgcgtcctaattgagaaactttccctgtcgaagatgccttttcgtggtgatacagttatcgacgggtggcagtggctgattaacgacactctccggcaccttcacctaatctcctcccacagccgacagcagatgaaagatgctgctgtgagtgccctggccgctttatgttcagaatactacatgaaagaacccggagaggcggatccggctatccaggaagaattgatcacccagtatctggccgagctcaggaacccagaggaaatgactcgatgtggatttagtctggccttgggagcattgcctggttttttgttgaaaggccgtcttcagcaggtgttgacggggcttcgggctgtcacacacaccagcccggaagatgtttcattcgctgagtcccgccgtgacggactcaaggctatcgcaaggatctgtcagacagtgggagtgaaggccggtgcacccgatgaagccgtgtgtggagagaacgttagccagatctactgtgcactgctagggtgcatggatgactacaccaccgattctcgaggagacgtcggcacttgggtacgcaaggctgccatgacgagcctgatggatctgacactgttgctggcgaggtcacagcctgagctgattgaggcacatacttgcgagaggatcatgtgttgtgttgcacagcaagcaagtgagaagatcgaccggttccgggcacatgcagcaagcgtattcctgactcttttgcattttgatagtccgccaattccacatgtgccccatcggggtgagcttgaaaaactcttccctcgctctgacgtggcatctgtgaactggtctgcaccaagccaggcttttcctaggattacgcaattgctgggtctccctacctaccgctatcatgtgttgcttggcctcgtggtgtccctgggcggactgactgaaagtaccataaggcatagtacccagtccctcttcgagtacatgaagggtattcaatccgaccctcaggcactaggctcctttagcgggacactcttacagatctttgaggacaaccttctaaacgagagggtgagcgtgcctctactgaaaaccctggaccacgtgttgacacacggatgttttgatatcttcactacagaagaggaccatccattcgccgttaaattgctggccctttgtaaaaaagagatcaaaaacagtaaagatattcagaagctcttgagcgggatcgcagtagacttcccctccgcgacacttgtttgcgtgggcacagtgcagatgtatgcccatacccatcttcggttgggcgcaccaggtccccactgtgctcatggctctgccttacccaggttttgcgagatggtgcagttccctggcgacgtacggagacaagcactgctgcagctatgcctgctactgtgtcaccgcttccccctcatcagaaaaacaaccgcctctcaagtttacgagacattgctaacgtactctgacgtagtcggtgcagatgtgctggacgaagtagttactgtattatccgacaccgcctgggatgcagaactggccgtcgtgcgggagcaaaggaacagattatgtgatctcctaggggtccccccttcttggtgcccaacatggtgcctgttgaaaccggtgctggagccgatcccacacccttgtctggtgaggatgtcatgttcttag

SEQ ID NO: 245487 - DNA, 3579 bp, synthetic construct
  misc_feature 1..3579: note = Description of Artificial Sequence: Synthetic coding sequence
  source 1..3579: mol_type = other DNA
atggctctgtccgacgagccagcagctggagggccagaagaagaggccgaagacgagaccctcgcttttggagctgcgcttgaggccttcggggagtccgccgagactcgggcactcctcgggaggctgcgtgaggtccatggcggaggtgcagaaagggaagttgcgctggaacgtttccgagtaatcatggataaataccaggagcagcctcacctgcttgacccccatctcgagtggatgatgaacctgctgctcgacatagtccaagaccagaccagcccagccagcctcgtccatcttgcctttaaatttctctacataatcaccaaggtcagaggatataagacgtttctccgcctgtttccccatgaggttgcagatgtggaacccgtgctcgacctagtaactattcaaaatcccaaggatcatgaggcttgggaaaccaggtacatgctattgctgtggctgagcgtgacatgtttaatccctttcgatttctcgcggttagacggaaacttgctaacacaacccggacaggcaagaatgtccattatggacaggatcttacagattgctgagtcctacttgatcgtgtcagataaggccagggatgccgcagccgtccttgttagtaggttcataacccgccctgacgttaaacaaagcaagatggctgaattcctggattggtcactgtgtaacttggcgcgaagttcattccaaacaatgcagggcgtgatcaccatggatggcactctgcaggctcttgcccagatttttaagcacggcaagcgcgaggattgtttaccctatgctgccactgtgctgagatgtctcgatggctgtcgactccccgagagcaatcagacgttgcttagaaagctaggcgtgaaactcgtgcaacggcttggattgacattccttaaaccaaaggtagcagcctggaggtatcaacgaggctgtcggtcactagccgcaaacctgcaactgctcacacagggccaatcagaacagaaacccctgatccttacggaggacgacgatgaggatgacgacgttcctgagggcgtagaacgcgtcatagaacaacttcttgtgggtctgaaagacaaggataccgtggttagatggtccgccgctaagggaatcggtcggatggctggtcggctcccgcgtgccttagccgatgacgttgtcggaagcgtcctggactgcttttcctttcaggagacggataaagcctggcacgggggatgcctggcattagctgaacttgggagaagaggtctgcttctgccatctcgtctcgtagacgtggtagcagttatcctcaaagcccttacttatgatgaaaagagaggcgcttgtagtgtgggtacaaacgtaagagatgccgcttgctacgtgtgttgggccttcgctcgggcatatgagcctcaagagttgaagccgtttgtgacagccatcagctccgccctggtaattgccgctgtttttgacagagacattaactgtcgtcgggcagcctctgccgctttccaagagaatgtgggcaggcagggcacattccctcacggcatcgacattttgacgaccgcagattacttcgccgtggggaacagaagcaactgcttcctggttatcagcgtctttattgctggcttccctgagtatacacagcccatgatcgaccacctggtaactatgaagatcagccactgggatggtgtgatcagggagttggcagcaagggcgttgcacaacttagctcagcaggctcctgaattcagcgctactcaggtgttccctaggttgttgtctatgaccttatcacctgacctgcatatgaggcacggatctatcctcgcttgtgccgaagtggcctatgccctttataagctggcagctcaggaaaatagacccgtgaccgaccatttagacgaacaggccgtacagggacttaaacaaattcatcagcagctctatgacagacagctttatagaggactgggtggacagctcatgagacaggctgtttgtgtcttaattgaaaaactctctctatctaagatgccattccgcggtgacacagtcatcgatggctggcagtggctgattaacgatacacttaggcatcttcacctgatctctagccactcccgtcagcagatgaaagatgcggcagtctcagcactggctgcgttatgcagcgaatattatatgaaggaaccgggagaggccgatcctgctatacaggaggaactgattacccaatacctggccgagctccgcaaccctgaggaaatgacacggtgtggattctccctggcccttggggctctgcctggcttcctcttgaaggggagactgcagcaagttctgacagggctccgagccgttactcacacctctccagaggacgtctcattcgcagaaagcagaagggacggcctcaaggccatcgccagaatttgtcagactgtgggcgtcaaggcaggggcacctgacgaggcagtttgcggagaaaacgtgtctcaaatatattgcgctctcctcggctgcatggacgattataccactgattctaggggagatgtggggacttgggtgcggaaggcggctatgacaagccttatggatctgacactcctgttggcgaggtctcagccagaattgattgaggcccatacctgtgagcggattatgtgctgcgtagcgcagcaggcctctgaaaagatagataggtttcgggcacacgcagcctccgttttcttaaccttgcttcattttgactctcctcctattcctcacgtccctcacagaggcgagcttgagaagttgtttccaagatccgatgtcgcctccgtgaactggagcgccccttctcaggcatttcccagaatcacacagctgctgggtcttccgacgtaccgatatcacgtgctgctcgggttggtggtgagcctggggggtctgactgagagcacaatcaggcattctacacagagtctctttgagtacatgaagggtatccagagtgatccccaggctcttggttcattttccggaaccctgctgcaaattttcgaagataatctccttaatgaacgagtttctgtgcctctgcttaaaaccctcgaccatgtgctgactcatgggtgtttcgacatcttcacaacggaggaggaccatccttttgcagtcaaattgctggccttgtgcaagaaagaaataaagaatagcaaagacatccagaagctgctgagcggcattgccgtattctgtgagatggtgcagtttcctggagatgtgagacgccaggcactgctccaactgtgcctgttgctctgccaccgttttcctctcatcagaaagactacagccagccaagtgtacgagacactgcttacttattcggatgtcgttggtgcagatgtactggacgaggtagtgaccgtgctctcggacacagcttgggatgcggagcttgccgtcgtcagagaacagagaaaccgactctgcgatctgttaggggtgcccagaccacaactagtgcctcaacccggtgcttgttag

SEQ ID NO: 245488 - DNA, 936 bp, synthetic construct
  misc_feature 1..936: note = Description of Artificial Sequence: Synthetic coding sequence
  source 1..936: mol_type = other DNA
atggccggacgactacccagagccctggcagatgatgttgtggggtccgttctggactgcttcagtttccaggagactgacaaggcatggcatgggggttgcctggctcttgctgagctcggccgacggggtttgctgctgccgtcccgtctcgtagatgtggtggctgtaatcctgaaagccctcacatacgacgagaagaggggtgcctgttctgtcggcaccaatgtacgggatgccgcatgctatgtgtgctgggctttcgctagggcatacgaaccacaagagctcaagccctttgttaccgcaatttcaagcgccctagttatagctgccgtgttcgaccgggacattaattgcaggagggctgctagtgcggcttttcaggagaatgtcggacggcagggaaccttcccacacggtatagacattctgacgactgctgattattttgcggtggggaatagatccaactgctttctggtgatttcagtgttcatcgccggtttccctgagtacacacaaccgatgattgatcacctggtgacgatgaagatttcccattgggatggtgtgattcgcgaactggcggcaagagcccttcataacttagcacagcaggcgccagagttttccgcaacccaggtcttccccagattactaagcatgactttgagtcctgacctccacatgaggcacggatctatcctggcatgcgccgaggtggcttacgccttatacaaactggcagcccaggagaaccggcctgtgaccgaccaccttgacgagcaggccgtgcagggactgaaacaaatccaccagcagccatgtatatgcagttgggggctcatgtcccctgagagcaaagctgagttctgcgtctgcgtctgcagaattagcctgggaagacaatgtgttcaccttagcggcctctag

SEQ ID NO: 245489 - DNA, 2253 bp, synthetic construct
  misc_feature 1..2253: note = Description of Artificial Sequence: Synthetic coding sequence
  source 1..2253: mol_type = other DNA
atggccctcagtgacgaacctgcggctggagggccagaggaagaggccgaggacgaaactctagcttttggagccgctctggaagcctttggagagagcgccgaaacacgcgctctcttaggcaggttacgagaggtacatggtggaggggctgaaagagaagtagcgctggagagattccgggtgatcatggacaaatatcaggagcagccacatctgctcgatccacatctcgaatggatgatgaatctccttttggacatcgtccaagatcagacttcccccgcatccctggttcacctggctttcaagtttctttacattattactaaggtccgtggttacaagactttcttacggctgtttcctcacgaagtagcagatgtagagcctgtgctcgacctggtcacaatccaaaacccgaaggaccacgaagcgtgggagacaaggtatatgctgttattatggctgtccgtgacgtgtctcatcccctttgatttttcaaggttggacggcaacctgctgacccaacccggtcaggcgaggatgtccattatggatcgaattctccaaatagccgaatcgtatttaatcgtatccgacaaggcaagggacgcagcagccgtgctggtctcccgttttataacccgtcccgatgtcaagcagagtaagatggcggagtttctggactggtcactgtgtaatcttgcccgatccagcttccagacaatgcaaggcgtgataaccatggacggcactcttcaagctctggcccagatctttaagcacggcaagagagaagattgtctgccgtatgccgctacagtgctgagatgccttgacggttgtcgccttccagagtccaatcagaccttactgcggaagttaggggtcaagcttgttcagagactcgggctgacgtttctcaaacccaaggtagcagcctggagataccagcgcggatgtcggtctctagccgctaaccttcaactcttaacacaaggccagtctgaacagaagccactcattctaacagaggatgatgatgaggatgatgatgtcccggagggcgtcgaaagggtgattgaacagttgctggtgggtttaaaagataaggatactgttgtccgctggtccgccgctaaaggaattgggaggatggctggcagattacctcgggctctcgcagacgatgttgtggggtcggttctcgattgcttcagcttccaggagactgataaagcctggcacggtgggtgcctggccttggctgaactgggaagaagaggactactgttgccatcaaggcttgtggatgttgtggccgtgattttaaaggctctaacgtacgatgaaaaacgaggtgcctgtagcgtgggcacgaatgttagggatgcagcttgttacgtgtgctgggccttcgcaagggcttacgagcctcaagaactgaagccttttgtgaccgctatatccagtgccctggtcattgccgctgtgtttgatcgggacattaactgtaggcgggcagccagtgcagccttccaggagaacgtcggccgacaggggacatttcctcatggtattgatattctgacaacagccgactatttcgcggttggcaaccgctctaattgctttttggtcattagtgttttcatagcgggattccccgaatacacccagccgatgattgaccacctcgtgacaatgaagatatcgcactgggacggggttatcagggaattagcagccagggccctccataatttggcccagcaggctcctgagtttagcgccacccaggtcttcccacgactgctctctatgacgttatctcctgatctccacatgcggcatgggtctatccttgcgtgtgccgaggtggcatatgctctgtataaactagctgcccaagaaaaccgccctgtgaccgaccatctagacgaacaggctgtgcagggactcaagcagattcaccaacagctttatgaccgccagctctataggggactcggtgggcagctgatgagacaggccgtgtgcgttttgatcgagaaactaagcctatcaaaaatgccttttcgcggagacaccgtcattgacggatggcagtggttaattaacgactctctttggctactcgtgggactcggacggccaagccgcctgccctcggaacggcctgcaccagccggaagtcacagattcaagtcttcctatccacatttcccccgtggcaggaaattttgctag

SEQ ID NO: 245490 - DNA, 555 bp, synthetic construct
  misc_feature 1..555: note = Description of Artificial Sequence: Synthetic coding sequence
  source 1..555: mol_type = other DNA
atgaaaggaatccagtctgaccctcaggccctcggctcattttccgggactttgctgcagatctttgaggacaatctgctaaacgaacgcgtgagcgtaccactgttgaagactttggatcacgtactaacgcatggctgtttcgatatcttcaccaccgaggaagatcatccttttgccgtcaagctcttggccctgtgtaagaaagagattaagaacagcaaggacattcaaaaacttctgagcggaattgccgtattctgcgagatggtgcaattcccaggtgatgtgaggaggcaagcgctgctgcaattgtgtctgcttctttgccacagatttcccctgattcgaaagacaactgctagccaggtatatgagacgttactgacttactcagatgtggtgggagccgatgtgttagacgaagttgtaaccgtcctgagtgataccgcctgggatgcagaactagccgtcgtcagagaacagcggaaccggctgtgtgacctgctgggggtcccccgtccacaactagttccccagcccggtgcttgctag

SEQ ID NO: 245491 - DNA, 1584 bp, synthetic construct
  misc_feature 1..1584: note = Description of Artificial Sequence: Synthetic coding sequence
  source 1..1584: mol_type = other DNA
atgtcggatacattaactgcagatgttattggcaggagggtcgaagtgaatggtgaacatgcgactgtaagattcgccggagtggtcccgcctgtggctggcccatggctgggggttgaatgggataaccccgaaagaggcaagcacgacggcagccacgaaggcaccgtgtactttaagtgtcgccaccctacaggcggttctttcataaggcccaataaggttaattttggtacagactttctgactgctattaaaaacagatacgtactcgaggatggaccagaagaggatcgaaaagagcagatagtcacaatcggcaacaagccggtggaaacaatagggtttgattcaataatgaagcaacagagccagctttctaaacttcaggaagtaagtctgcgcaattgcgcagttagttgtgccggagagaagggcggtgtggctgaagcctgcccgaacatccgtaaggtggacctgtcaaagaacctgctgagctcttgggacgaggtgattcatatagcagaccagctcagacacctggaggtcctcaacgtctccgagaataaactgaagttccccagtgggagtgtcctcacgggtacgctgagcgtattgaaggtattagttcttaaccaaaccgggatcacttgggctgaggtgctgagatgcgtggccggttgtccaggactggaagaactgtatttagaatcaaataacatatttatttctgagcgccctaccgacgtcctgcaaaccgtgaaactgttggacttgtcttctaaccagctcatagacgaaaaccagctttacctcattgcgcaccttcctagactggagcagttgattctgtcggatactggcatttcatctttgcactttcccgacgccggaataggatgcaaaacaagcatgttcccttcacttaaatatcttgtggtaaatgataaccagatatctcaatggtccttctttaacgagctcgagaaactgcccagcctgagagccctcagttgcctccgcaaccccctgacaaaagaggataaggaggccgagaccgccagactgttaatcatcgcctcaatcgggcagctcaaaacactcaacaagtgcgagattctgcccgaagaaagaagaagagccgagctcgactaccgaaaagcattcggcaacgaatggaaacaggccggagggcacaaggatccggagaaaaaccggttgtcagaggaatttttgactgctcaccctcgctaccaatttctctgtctaaagtacggagctcccgaggattgggagctgaaaacccaacagcccctcatgctcaagaaccagttactgaccttgaaaataaagtacccgcatcagctcgatcagaaggtgttggagaagcagctccccggttctatgaccatacagaaagtgaaaggtctcttgtcgaggctgttgaaggtgccagtctccgacctcctgctctcctatgagtcgccgaagaagccgggacgagagatcgaactggagaacgacttgaagtccttacagttctactctgtggagaatggggattgtttactagtgcgttggtag

SEQ ID NO: 245492 - DNA, 1584 bp, synthetic construct
  misc_feature 1..1584: note = Description of Artificial Sequence: Synthetic coding sequence
  source 1..1584: mol_type = other DNA
atgtccgacactttgacagccgatgtgatcggcagacgcgtggaggtaaacggagaacatgctacagtccgctttgctggggtagtgcctccggtagctggaccctggctcggagtggagtgggacaaccctgagcgagggaagcacgatgggtctcatgagggtaccgtttacttcaagtgccggcatcctaccgggggaagcttcattagaccaaataaggttaattttggaaccgattttttaacagccattaaaaataggtatgtgctcgaagacggtcctgaggaggacaggaaggagcaaattgtcactatcggcaataaaccagttgagaccatcggctttgacagcataatgaagcaacagtcacaactcagcaaactacaggaggtgtccctgcggaactgcgccgtctcttgtgccggagaaaaaggtggagtggccgaagcatgtcccaacatccgaaaagttgatctgtccaaaaacctgttaagctcctgggatgaggttattcatatcgcggatcaattgcggcacctggaggtactcaacgtgtctgaaaacaagcttaagtttccgtctgggtcggtgctgaccggcactctttccgtgctcaaggtcctcgttctaaatcagactggcatcacgtgggcagaagttttgaggtgcgttgccggatgtcccggtctggaggagctgtatctggagagtaataacatctttatctccgaacgccctaccgatgtcctacagaccgtaaaactgctggatctcagctcaaaccagctgatcgacgagaatcagctctatcttatagcgcatttgccacgtctggagcagctgattctaagcgataccgggatttcatccctccacttccccgacgctggaatcggttgtaagactagtatgtttccgtcattgaaatatctggtagtcaatgacaaccaaatctcacagtggtccttcttcaatgagctcgagaagctgcctagtctgcgcgcactcagctgcctcagaaaccccttaacaaaggaagacaaagaggctgagacagcacgattgctgattatcgccagtataggacagctgaagaccctgaataaatgcgaaattctgcccgaagagcggcgacgcgctgaactcgattaccgaaaggcttttgggaacgagtggaagcaagctggaggacataaagaccccgaaaagaatcgactaagcgaggagttcctgactgcacatccacgatatcagtttctgtgcctcaagtacggggcacccgaggattgggagctgaaaacgcagcagccactcatgctgaagaaccagctcctgactttgaaaattaagtatcctcaccagttagatcagaaagtgctggagaagcagctaccgggatccatgactatccagaaggtgaagggcctgctctcgagattattgaaggttccggtgagtgatctgttactcagctatgaatctcccaaaaagccagggagggaaatagaacttgaaaatgacctcaaatccctacagttctatagtgtggagaacggcgattgcttgctggtccggtggtag

SEQ ID NO: 245493 - DNA, 1737 bp, synthetic construct
  misc_feature 1..1737: note = Description of Artificial Sequence: Synthetic coding sequence
  source 1..1737: mol_type = other DNA
atgagtgacacacttacggctgacgtcataggcagacgcgtggaggtaaacggagagcacgccaccgtcaggttcgcaggtgtggtccccccagttgccggaccctggctcggtgtggagtgggataatcctgaacgaggcaaacacgacggctcccacgaagggactgtgtacttcaaatgcagacatccaacaggcggaagttttatcaggcccaataaggtgaattttggcactgactttctcacagccattaagaatcgttatgtcctggaggacggccctgaggaggataggaaagagcagatcgtgacaatcggaaacaagccagtggagactatcggatttgatagcatcatgaaacagcagtcccagctgtctaagttacaggaagtttccctgaggaactgcgctgtgtcttgcgcgggtgagaagggtggggtcgctgaggcatgccccaatatccgcaaagtcgatctgtccaagaatttactgtccagttgggatgaggtgatccacatagcagatcagttgcgacacctggaagtcctcaatgtcagcgagaacaagttaaaattcccctcaggatcggttctgacaggcactttaagcgtattgaaggtgcttgtgctgaatcaaacaggtatcacctgggcagaggcacatgcacagtgcggtggctcaaggcatgggctggatatgcagaaggacgcgagcaaatttgttgatttgtgcgtgcttcagaaatgtagcacatctaactgcattatttctgcgaaggaccacacctcaatgcggatgaatgttgccaaagttcttaggtgtgttgcaggctgtccagggctggaggaactgtacctagagagtaacaatatttttatctcagagcgacctaccgacgtgctgcagaccgtgaagctgctggatctctctagtaaccagttaatcgatgagaaccagctgtatctaattgcccacctgcctcggttagaacagctgattctgtccgatactggaatttctagtctgcacttcccagatgctggcatcgggtgtaaaaccagcatgttccccagtctaaaatatctcgtggtgaatgacaatcaaataagtcagtggtcctttttcaatgaactggagaagcttccaagtcttagggcactgtcctgtctgaggaatccactgacaaaagaagacaaagaggccgagacagcgaggctgttgattattgcaagtataggacaattgaagacgttgaataaatgcgaaattttaccagaggagcggaggcgggctgagttggattaccgcaaagcgttcggtaacgagtggaaacaggcgggaggccacaaggaccctgaaaaaaaccggctgagcgaagagtttttgactgcccatcccaggtatcagtttctttgcctgaaatatggtgccccagaagactgggagcttaagactcagcagcctttgatgttgaaaaaccaacttctcacacttaagatcaagtaccctcaccagctggatcaaaaggtactggaaaaacaactccctggatctatgactatccaaaaagttaagggcctgctctcaagactcctgaaagttcccgtttcggacctacttctgtcttatgagtccccgaaaaagcccggaagagaaatcgagctggagaacgatttgaaaagcctgcagttttactccgtcgagaacggggattgtctcctcgttcggtggtag

SEQ ID NO: 245494 - DNA, 2001 bp, synthetic construct
  misc_feature 1..2001: note = Description of Artificial Sequence: Synthetic coding sequence
  source 1..2001: mol_type = other DNA
atgatccacgaacttctcttagctctgtccggttatcctggctccatctttacatggaacaaacgttccggcctgcaagtgtcccaggacttccctttccttcatccgagcgaaactagcgttctcaatagattgtgcagactcggaaccgattacatccggttcaccgagttcattgaacaatacacagggcatgtccagcagcaggatcaccatccctctcagcagggccaagggggtctgcacggcatctacttgagggcattttgtaccggactcgactcagtgctgcagccctacaggcaggccctgctcgatctcgaacaagagttcttgggggatcctcacctgtctatctcccatgtgaattatttcttggaccagtttcagcttctgtttcccagcgttatggtggttgtcgagcagattaaatcacagaagattcatggatgtcagattctcgagactgtctacaagcacagttgtggaggcctccccccagtgagatcagctctggaaaagattttggccgtatgtcacggtgttatgtacaagcagttgagcgcatggatgttacatggtctcttgctcgaccagcacgaagaatttttcataaaacagggacccagtagcggcaatgtctctgctcaaccagaggaagatgaggaagaccttggtatcggcggattgaccgggaaacagctgcgcgagctgcaggacctgcggctgatcgaagaggagaacatgctggccccttccctgaagcagttcagtcttagggtggagatcctcccgagttatatacctgtcagggtggccgagaagatcctgtttgtgggagagagtgtacagatgttcgagaaccagaatgtcaatctgacacgcaaagggtccatccttaaaaaccaggaggatacttttgccgctgaactgcacagactgaagcaacaaccacttttctctctcgtagacttcgaacaggtcgttgatcgcatacgttcaactgtggccgagcacttatggaaactcatggtggaggagtctgatttacttggacagctcaaaatcatcaaagatttctacctcctgggacggggtgagctttttcaggcatttatagataccgctcagcatatgttaaagacacctcctactgctgtcaccgagcacgacgtgaatgttgcgtttcagcaatcagctcacaaggtcctactcgacgacgataacctgctgccactgcttcatctgaccattgaatatcacggcaaagaacataaggacgctacccaggccagagagggcccaagccgagaaactagccctcgcgaggctcctgcctcagggtgggccgctctagggttaagctataaggtacaatggccgctccatatccttttcacgcctgccgtgctggaaaaatacaatgtcgtgtttaaatatcttttaagcgtccggagggtccaagctgagttgcagcattgttgggctctccagatgcagcgcaaacatctgaaaagcaatcaaacagatgcaattaaatggcgcctccgcaaccacatggcattcctggttgacaatctacagtactatttgcaggtcgatgtcctggagtcacagttcagccagcttttgcatcaaatcaactcaacacgtgacttcgaaagtatccgactggcccatgatcattttctgtctaatttgcttgcccagtcgttcatcttactgaaacccgtgttccactgcctcaatgagatcttagatctgtgccacagtttctgttccttggtgtctcaaaatctgggacccctggatgaacgaggcgcagcacagcttagcatcctcgtgaagggtttctcccgacagtcgagcttattgtttaaaattttatcttctgttaggaaccaccagatcaattcagacttagcacagctgctgctcagacttgactataataaatattatacacaggctggcggaacactagggtcctttggcatgtag

SEQ ID NO: 245495 - DNA, 660 bp, synthetic construct
  misc_feature 1..660: note = Description of Artificial Sequence: Synthetic coding sequence
  source 1..660: mol_type = other DNA
atggccgataaggcgaagcctgctaaggcagccaacaggacaccaccaaagtcacccggagaccccagcaaggaccgggcagccaagcgcctgagtctagagtcggaaggcgcaggtgagggggctgccgcttccccagaactgagcgctctggaggaggcctttaggcggttcgcagtgcacggcgacgctcgcgcaacaggtcgagaaatgcacggaaagaattggagtaagctttgcaaggactgccaggtcatcgacggaaggaatgtgactgtgaccgacgttgacatagtgttttctaagataaaaggaaaaagctgccgtacaataacctttgagcaattccaggaggcactggaagagctggcaaagaaacgttttaaagataaatcctcagaggaggctgtaagagaggtgcatcgcctgatcgaaggcaaagccccaattatcagcggagtgacaaaagccatttcctcacctactgtcagtcggctgacggatactactaagtttacagggtctcacaaggaacggttcgacccttccggcaagggaaaaggaaaggcgggaagggtggatttagtggatgagtccggctatgtgtccggctacaagcacgcagggacatacgatcagaaggtgcagggagggaagtag

SEQ ID NO: 245496 - DNA, 1071 bp, synthetic construct
  misc_feature 1..1071: note = Description of Artificial Sequence: Synthetic coding sequence
  source 1..1071: mol_type = other DNA
atgagcaaattgtggcgcaggggctctacaagtggcgcaatggaggcgcctgaacccggtgaggctctggagcttagtctggcgggtgcgcatggacatggagtgcacaagaagaagcacaaaaagcacaaaaaaaaacataaaaaaaagcaccaccaggaggaagacgccggtcccacccagcccagccctgcaaaacctcagttaaagctcaaaatcaaacttggaggtcaggtgctaggcacaaaatccgtgcctacctttactgtcatcccggaaggaccacggagtccaagccctctaatggtcgtagacaacgaggaggaacctatggagggcgtcccactcgagcagtaccgagcatggctggatgaagattctaacctgagcccatcaccactgcgagacttgtcaggcggtcttgggggacaggaggaggaagaggaacagcggtggcttgacgcgctggaaaagggcgagctcgacgacaacggggatctgaagaaggaaatcaatgaacgcctgttaactgcgcgacagagggcccttttacagaaggccaggtctcagcccagccccatgctcccactccccgtagccgagggttgcccaccaccagctttgacagaggagatgctgctaaagcgcgaggaacgcgctcgaaaacggaggttgcaagctgcaagaagggccgaggaacataagaaccagactattgagcgccttactaagacggccgctacgtcaggacgagggggaagggggggtgctagaggcgagcggcgaggcggacgcgctgcagccccagccccaatggtgcgctactgttccggtgcccaggggagtaccctgtcctttcctccgggagtccctgcgcctaccgccgtgtcccaacgcccttcaccaagcggccctcccccaaggtgcagcgtccctggttgcccacatccaagacgatatgcatgctctcgcaccggccaagcattgtgctcccttcagtgttacaggatcaacctacaaatgcgtctcggcggacccgagggacccggatcccctcttctggctacctag

SEQ ID NO: 245497 - DNA, 1272 bp, synthetic construct
  misc_feature 1..1272: note = Description of Artificial Sequence: Synthetic coding sequence
  source 1..1272: mol_type = other DNA
atggctggcaaggtgaagtgggtgacagacatcgaaaagtctgtgctgatcaacaacttcgaaaaaagaggttgggttcaggtaaccgagaacgaggactggaacttttactggatgagtgtgcagactattcggaacgtgtttagtgtggaagcgggataccgcctgtcagatgaccagattgtgaatcactttcccaaccattacgagttgaccagaaaagacctgatggttaaaaatattaagcgctatcgaaaagagctggagaaggagggctcccccctggccgagaaagacgaaaatggaaaatatttgtacctggacttcgtgcccgtgacatacatgctgcccgcagactacaacctgtttgtggaggaattccgaaagtcccccagcagtacatggatcatgaagccctgcggaaaggcgcaggggaaggggatatttctgattaacaaattgtcacagataaaaaagtggtcaagggactcgaaaacctccagctttgtctctcagtctaataaggaggcctatgtgattagcttgtacataaacaaccccttgctgatcgggggacggaaattcgaccttcgactgtacgtgcttgtgagcacctataggccactgagatgctatatgtataaactcggattttgtagattctgcacagttaagtatacgccttctacatccgaactggataacatgttcgtgcacctgactaatgtggcaattcagaagcacggcgaggactataaccacatccatggcggaaagtggactgtgtccaatctaagactgtatcttgagtccacccgcggtaaggaggtgacctctaaattgttcgacgagatccattggatcatcgttcagagtctgaaagcagtggccccagtcatgaacaatgataaacactgttttgagtgctatggctacgacattatcattgacgataagctgaaaccatggttaatcgaggttaacgctagtcccagcttgacgtcctcgacagcaaacgatagaatactaaagtataatcttatcaacgacacactcaatatcgccgtgccaaacggagaaattcctgattgtaagtggaacaaatctcccccaaaggaggtgctgggtaactacgaaattctgtacgatgaagagctggcccaaggggatggggctgaccgcgaactccgatccaggcagggccagtccctgggcccacgggctggcagatcacgtgattctggcagagctgtcctgacgacatggaagtag

SEQ ID NO: 245498 - DNA, 1185 bp, synthetic construct
  misc_feature 1..1185: note = Description of Artificial Sequence: Synthetic coding sequence
  source 1..1185: mol_type = other DNA
atggctggaaaggtcaagtgggtgaccgacattgaaaaatccgtgctgattaacaacttcgaaaagcgcggatgggtgcaagttaccgagaatgaagattggaatttctactggatgtccgtacagacaatcaggaatgtattctcagtggaagccggataccggctgagtgatgaccagatagtgaatcacttccctaaccactacgagctaaccaggaaggacctgatggttaagaatattaagcgatatcggaaggaactggagaaggagggaagcccactggccgagaaagatgagaacggaaagtacttgtatctcgacttcgttccagtgacatatatgctgccggctgattataatttgtttgttgaagagttccgcaaaagcccctccagcacctggatcatgaaaccttgtgggaaggcgcagggaaagggaatttttctgatcaataaactatcccagatcaagaagtggtcacgggactcgaaaacctcttcctttgtgtcacaatctaataaagaggcatacgtgatttcgctgtacatcaataatcctctgctgataggcggtcgcaagttcgacctgagactttacgtcttggtctcaacctatcggccattgaggtgttacatgtacaaactgggcttctgccggttctgcacggtcaaatataccccatccaccagtgagcttgataacatgttcgtacatcttactaatgtggctatccagaagcatggagaggattacaatcatatccacggaggcaaatggaccgtttctaatctgcgactgtacctggaatctactagaggaaaagaagtcaccagcaagctgtttgacgagatccactggataatcgtacagtctctcaaagcagtggccgtaaatgcctcccctagtctgacttcctctacggccaatgaccggattctaaagtacaatctcattaacgacacacttaacatagcggtgcctaatggcgagattcccgactgcaaatggaataaaagcccacccaaagaagtgctaggaaattatgaaattttatacgacgaagagctggctcagggtgatggagctgaccgcgaacttcggtctagacaggggcagtcactcggtccccgagctggccgtagcagggattccggaagggctgtcctgactacgtggaaatag

SEQ ID NO: 245499 - DNA, 180 bp, synthetic construct
  misc_feature 1..180: note = Description of Artificial Sequence: Synthetic coding sequence
  source 1..180: mol_type = other DNA
atggctggtaaagtgaaatgggtgacagacattgagaagagcgttttaatcaataattttgagaagcgaggttgggtgcaagtgaccgaaaacgaggattggaatttttattggttactggacctccctgagttcaggtaccgctcatgcctgaatgagttcccagattttagagtgtag

SEQ ID NO: 245500 - DNA, 1068 bp, synthetic construct
  misc_feature 1..1068: note = Description of Artificial Sequence: Synthetic coding sequence
  source 1..1068: mol_type = other DNA
atgccacatcagcccactatcttgctgaatacagtttcggccagcgcttctccatgcctgcaccccggtgcacagaacattccctcacccaccgggctgcctcggtgccggtctggcagtcacaccattggaccctttagttcgttccagtccgccgcacatatttactcacaaaagctgtccagaccctctagtgcgaaagctgccggatcttgctatctgaataaacaccatagtggtattgctaaaacacagaaggagggcgaagatgcttccctctactcgaagagatataatcagagtatggtcaccgcagaattacagagactggctgagaaacaggccgctcgacagtattcacctagctctcatataaaccttctgacccagcaggtgacgaacctgaatctagccacgggcataatcaatcgctcttccgcctctgcgccaccgacactgaggcccatcatctcaccgtcaggcccaacgtggagcactcagagcgacccacaggcaccagagaatcacagctccagccccggatcacgtagcctgcagacggggggatttgcctgggagggggaagtagaaaacaacgtgtactcccaagcaacaggagtagtccctcagcacaagtatcatccaaccgccggtagttaccagcttcagtttgcccttcagcagctcgaacagcaaaagttacagagtcggcaactgctggaccagagccgagctaggcaccaggctatattcggtagccagaccctgcccaattccaatttgtggaccatgaacaacggagcaggctgtcgcatttccagtgcaactgcatcggggcagaaacccaccacacttccgcagaaagttgtgcctcctccatcctcctgcgcatctctggtgcccaagccaccacccaaccatgagcaggtccttcgcagagctacatctcagaaagcttccaaaggtagctctgctgaagggcagctgaacggcttgcaatcttctctgaaccccgcagcatttgtcccaattacctcgtccaccgtgaattcccataccgcattgtag

SEQ ID NO: 245501 - DNA, 3846 bp, synthetic construct
  misc_feature 1..3846: note = Description of Artificial Sequence: Synthetic coding sequence
  source 1..3846: mol_type = other DNA
atgccgatcgtcatggcgagggacttggaggaaaccgcctcctccagcgaggatgaagaggtaatcagccaggaggatcatccatgcatcatgtggaccggcggatgccgcaggattcccgttctcgtctttcacgccgacgcaattttaactaaggataataatataagggtaatcggtgagcggtaccacctgagctacaagatcgtcaggaccgattctcggcttgtgcgctcgatcttgactgcgcacggttttcatgaagtacaccctagcagcactgattataacctaatgtggaccggcagccacctcaaaccctttcttcttcggacactctctgaggcccagaaggtgaaccatttcccgagaagctacgaactgacccggaaagaccgcctctataagaacatcattagaatgcaacacacacatggctttaaagcctttcatatactgcctcaaacgttcctgttgccagcagagtatgctgaattttgtaactcgtactctaaggatcggggaccctggatcgtaaaacctgttgccagctcccggggaaggggtgtctatttgataaataacccaaaccagataagcctggaagaaaatattctggttagccggtacatcaacaacccgctcctcattgacgacttcaagttcgatgttcgcctttacgttctggtgacctcatacgaccccctggtgatatacctctacgaagagggcctcgctcgatttgctactgtacggtacgaccagggcgctaaaaatattcggaatcaattcatgcacctgaccaattatagtgtcaataaaaagagcggcgactacgtgagttgcgatgaccccgaagttgaagactacggaaacaagtggtccatgtcagctatgctgcgttatctcaagcaggaggggagggataccacagccctgatggcacacgtagaagatttgataatcaaaactataatttcagctgagctcgccatagctacggcttgtaagacatttgtgcctcatcgatctagctgctttgaactgtatggctttgacgtgctgattgactccacgctaaagccatggctgttagaagtgaatttgtctccctctctggcctgcgatgcaccgttggatctaaaaattaaagcttccatgatatcagacatgtttactgtggttggtttcgtgtgccaggatcccgctcaaagggcctccacgagacccatctaccctacattcgaaagctctagacggaacccttttcaaaagccgcaacgatgtcgacccctgagcgcttccgacgccgagatgaagaatctggttgggtctgctcgggagaaggggcctggtaaactcggcggttctgttctggggttgtcaatggaggagatcaaggttttgagacgggttaaggaggagaacgacaggaggggcggttttatccgaatctttcccactagcgaaacttgggagatctatggcagctacctagagcataaaacaagcatgaattatatgcttgccacacggcttttccaggacaggatgactgctgatggtgctcctgagttgaaaatcgagagcctgaattccaaggctaagctacatgccgctctgtatgagcggaagctgttgagtctggaggtgcgtaaacggaggagaagatcgagccgcctcagggccatgcgcccaaagtacccagtgatcacacaaccagccgaaatgaacgttaaaaccgagaccgagtcagaggaggaggaggaagtggccttagacaatgaggatgaggaacaggaagcttcccaagaggagtcagcagggtttctgagagagaatcaagcaaaatatacccccagcctgactgcactcgtcgaaaatactccgaaggagaactcaatgaaggtacgtgaatggaataacaaaggcggacattgctgcaagctggaaacccaggagctggagccaaaatttaacctgatgcagatcctgcaggataatggaaacctctccaaaatgcaggccaggatcgccttctctgcctatttgcaacatgtgcagatccgccttatgaaggattctggaggtcagacattctccgctagttgggcggctaaagaagatgagcagatggagctggtggtgagattcctgaaacgggcttccaacaaccttcagcacagtctgagaatggtgctgcctagcagaaggttagccctgctagaacggaggaggattctagcccaccagctcggagactttattatcgtctataacaaagagacagagcagatggcagaaaagaagtctaagaagaaggttgaggaggaggaagaggacggtgtcaacatggagaacttccaagagttcattcggcaggcgtccgaggctgagcttgaggaagtactgactttttatacacaaaagaataaatctgcctccgtcttcctgggaacgcactccaagatttccaagaacaacaacaactatagcgacagtggagccaaaggggatcaccccgagacaatcatggaagaagtgaaaatcaaacccccaaagcagcagcagactactgagatccactccgacaaactgtctcgcttcacgactagtgctgagaaggaggctaagctggtttattcaaactcctctagtgggcctactgctaccctccaaaagattccgaacacacatctgagctcggtaaccacatctgatcttagccctggcccttgccatcattcttccctgtctcagatcccgtcagcaattccttccatgccgcatcaaccaaccattcttctgaacacggtgagcgcttcagcatcaccttgtctgcaccccggagctcagaacattccttcacccactggcctgccgcgatgtagatcggggagccacacaatcgggccattttcaagttttcagtctgcggcacacatctacagtcagaaactgtccaggcccagcagcgccaaggccggttcttgttacctgaacaaacaccacagcggaatcgcaaagacacagaaggaaggggaggacgcctccttgtacagtaagcgctataaccagagtatggtgaccgccgaactgcagaggctcgccgaaaagcaggcagccagacagtactcgccttccagccacatcaatcttctgactcaacaggtcaccaatctcaacttggccactggcatcattaatcgctcttcagcaagcgccccaccaaccctcaggccaattatatccccaagcggacccacatggtccacacagtcagatccccaggcccctgagaaccatagttcatcacccggttctcgtagcctccagacagggggtttcgcttgggaaggcgaagttgaaaataatgtctattcccaggccacaggagtcgtgccacagcataaatatcaccccacagctgggagttatcaactccagtttgctttgcagcagctggagcagcagaagctgcagagccggcaattgcttgaccaatcccgcgctaggcaccaggctatctttgggtcccagacactgccaaatagtaatctgtggactatgaacaatggagcagggtgtcgaattagttcagctactgcatccggacagaaacctacgactttgccacaaaaggtggtgccccctccttcctcttgtgctagtctggtacctaaacctccgccaaaccatgaacaagttctgcgcagagctacctcacagaaagcttctaagggctcctccgctgagggacagcttaatggtttgcaatcctcactcaatccggcagcctttgtgccaatcactagcagcacagatcctgcacacaccaaaatctag

SEQ ID NO: 245502 - DNA, 2454 bp, synthetic construct
  misc_feature 1..2454: note = Description of Artificial Sequence: Synthetic coding sequence
  source 1..2454: mol_type = other DNA
atgaaagagatcaaggttttgcgtagggtcaaagaagaaaacgatcgcagagggggttttatacgcatttttcccacttccgaaacatgggaaatctacggatcatacctcgagcacaaaacctctatgaattacatgctggccaccaggctgttccaagacagggggaatcctcgcagaagcttacttactgggaggacgaggatgacagcagatggtgcacctgaactcaaaatcgagagcctgaacagtaaggccaagctgcatgcagccctctacgagagaaagctactgtctctagaggtccgcaagcgcagacgccgatcctccagactgcgggctatgaggcctaagtacccggtaattacacagcctgctgagatgaacgtcaagactgagaccgagtcagaggaagaagaggaagttgcactggacaacgaggatgaggagcaagaagccagccaggaggagtctgccggattcctcagggaaaaccaggctaagtatacaccaagtttaacggcactcgtggaaaatacccctaaggaaaatagcatgaaagtaagggagtggaacaataaagggggacattgttgtaagctcgagactcaggaattggagcctaaatttaacctgatgcagattctgcaggacaatggcaacctatctaaaatgcaagctcgcattgcattcagcgcctacctgcagcatgtccagatccgtttgatgaaggatagcggaggacaaacattttcagcttcatgggccgctaaggaggacgagcagatggaactggtggtgcggtttttgaagcgcgcatccaataacctccagcactccttaaggatggtccttccctcgaggcgcctcgcactcctggaaaggcgacggattctggcgcaccaactaggggattttattattgtatataataaggagaccgaacagatggccgagaagaaatcaaaaaaaaaagttgaggaggaggaagaagatggtgtcaacatggagaattttcaggaatttatccggcaggcatcagaggctgagctcgaagaggtgcttacgttctatacgcaaaaaaacaaatccgcttctgtctttctgggcacacatagcaagatctccaaaaacaataacaactactctgacagcggcgcaaaaggtgaccatcctgaaacaataatggaagaggttaagatcaagcctccaaaacagcagcagaccacagaaattcactcggacaagctcagcagatttaccacgtcggctgagaaagaagcaaagctagtgtactcaaatagttcgtctggcccaaccgccacactgcagaaaatccccaacactcaccttagcagcgtgactacgagtgatctgtctcctgggccttgccaccactcctctcttagccagatcccttccgctatcccatccatgccacaccagcctacaattttgttaaataccgtctctgcctcagcttctccatgcctgcatcccggagcacagaatattccttcccccacgggcttacctagatgcagatcaggctctcacacaatcgggccattttcttccttccagtcagccgctcatatttacagtcagaagctctctagaccgtcttctgcaaaggctggcagttgctatttgaacaagcatcatagcggcatcgcaaagacccagaaagagggcgaggatgccagtctatactccaagagatataatcagagcatggtgacagcagagctccaacggttggcagaaaagcaggcagcaagacagtatagcccgagctcccatatcaatctcctgactcagcaggtgactaatctgaaccttgcaacaggtattatcaatcgcagcagcgccagcgccccacccaccttgcgacctatcatatctcctagcggcccaacctggagcacgcagtctgaccctcaggctccagagaaccattctagttcacccggttcacgctctctccagacaggcggatttgcctgggaaggcgaggtggagaataacgtgtatagccaggcgactggggtggtacctcagcataagtatcatccgacagctggcagctatcagctacagtttgcactccaacagttagagcagcagaagctgcagagcaggcaactcctcgatcagtcccgggcacgtcatcaagccatctttgggagtcaaaccctgccgaactccaacctgtggacaatgaataatggcgctggatgtaggatcagctcagccacagcgtcgggccagaagcctactactttgccccagaaggtggtgccaccgcctagcagctgcgccagcttagttcccaaaccaccgccaaatcacgagcaggtgcttagaagggcaacatcacagaaggcttccaacaccagatttcgctccagttttcagaactacctttggtatttcttccaggccgtatcttag

SEQ ID NO: 245503 - DNA, 2337 bp, synthetic construct
  misc_feature 1..2337: note = Description of Artificial Sequence: Synthetic coding sequence
  source 1..2337: mol_type = other DNA
atggcccacgtagaagacctgattattaagactatcatcagcgccgagcttgccattgctaccgcctgtaagacctttgtgccccataggtcttcgtgttttgagctatacgggttcgacgtgctgatcgattcaacgctgaaaccctggttgctggaggtgaacctcagccccagtcttgcctgcgacgcccctcttgacttaaaaatcaaagcctctatgatcagtgacatgttcacagtggttggctttgtgtgtcaagatcccgctcagcgggcaagcacacgtcctatctatcccacattcgaaagctcccggagaaacccattccagaaaccacaaagatgcagacctctcagtgcttcagatgctgagatgaagaacctggttgggtccgccagagagaagggacccggtaagctgggcggttctgttttaggtctttccatggaagaaattaaggtgctgcgccgagttaaggaggaaaacgataggaggggcggattcatcaggatctttcccaccagcgagacgtgggaaatttacggaagctaccttgaacacaagacatcaatgaattatatgctggccacccggctgttccaagaccgcatgaccgcggacggagcccctgagctgaagatcgagtcactcaattccaaggcaaagttgcatgctgccttatacgagcgaaaactcctttccctggaagtccgcaagcgtaggcggcgatcaagtcggctgagagccatgcggcctaagtacccagtgataacccagcccgcagaaatgaacgtcaaaactgaaacagagagcgaggaggaagaagaggtcgctttggacaatgaagacgaagaacaagaggcaagtcaggaggaaagtgccggatttctccgagagaatcaagcaaagtatactccttcactgacagccctggttgagaatacccctaaagagaactctatgaaggtgcgggagtggaataacaaaggagggcactgttgcaagctcgagactcaggaactggaacctaaatttaatctgatgcagatcttgcaggataatggaaacctgtctaaaatgcaggcacgaattgccttcagcgcttaccttcaacatgtgcagataagactgatgaaggattctgggggacagactttcagtgcctcgtgggctgccaaggaagacgagcagatggaactggtagtcaggttcctgaagagagcgtcaaacaatctccaacactcacttcgcatggtgctgccatcacgcagactggcacttctggaaaggcgccgaatcttagcacatcagctgggcgattttattattgtctataacaaagagaccgaacaaatggcagagaagaagtcaaaaaagaaggtcgaggaggaagaggaagatggggtaaacatggaaaacttccaagagttcattagacaggccagcgaggcagaactggaagaagtgcttactttctatacacaaaagaataaaagcgcgtccgtgtttttgggaactcatagtaagatctccaagaataacaacaactatagcgatagcggagcaaaaggtgaccacccagaaactattatggaagaagtgaaaataaaacctccaaagcagcagcaaactaccgaaatccatagtgacaagttatcccggttcacaactagcgcagaaaaggaagcaaaattggtctatagcaatagtagcagtggtccaaccgccacattacagaaaattcctaacacccatctgtcctcagtgacaactagcgacctttccccaggcccatgccatcactcgtcccttagtcagattcccagcgcaataccgtccatgcctcatcagcccactatactgttgaataccgttagtgccagcgctagcccctgtctgcacccgggagcccaaaacattccatctcccacaggattgccgagatgtcggagcgggagtcacacaattggtcccttctctagtttccaaagcgccgctcacatctatagtcagaagctgagtaggccatcctctgccaaggccggtagctgttacctgaacaaacatcattccggcatcgccaagacacagaaggaaggagaggacgcgtctctctactcgaagcgctacaatcagagtatggtgaccgccgaattgcagcgcctcgctgaaaagcaggctgccagacagtattccccatcctctcataccgatccctggaagtacgaccgatccatcaggatgtgcagccccctgaacatcctggaaccagagtttaagaaatacctgatgggaatttatagcccgcacagctcgaaaaaaaagaagaagtag

SEQ ID NO: 245504 - DNA, 1755 bp, synthetic construct
  misc_feature 1..1755: note = Description of Artificial Sequence: Synthetic coding sequence
  source 1..1755: mol_type = other DNA
atgcgcattgggactcctaccgctggacccggtcccagcgcagtgatggaggggtgcctgggcgtggcagaacttagaaaactctctaccttttccgcttacctggaagatcactcctacaacgtggagcagatatggagggacattgaagatgtcataataaaaacgctcatctcagcccacccaatcattaggcataactaccacacttgcttccctaaccacaccctcaactccgcttgctttgaaatacttggatttgatatcctgttggatcacaaattgaagccctggttgttagaggtcaaccactctccgagtttctcaactgacagtaggcttgataaagaagtgaaagatggtttgctgtatgacactcttgttttaatcaatctcgaaagctgcgacaaaaagaaagtgctcgaagaggaacggcagcggggacaattcctgcaacagtgttgctcccgcgagatgcggattgaggaggcgaaggggtttcgggcagtccagctgaaaaaaacggagacatatgagaaggagaattgtgggggatttcggcttatctacccttccctgaattcagagaaatacgaaaaatttttccaggacaacaattccctgtttcagaacacagtggcctctagggcacgcgaggagtacgcaaggcagctgattcaggagctgcgccttaagcgggaaaagaaaccttttcagatgaaaaagaaagtggaaatgcagggcgagagcgcaggcgagcaagtgcgtaaaaaagggatgcggggatggcagcagaaacagcaacaaaaggacaaagccgctacccaagccagcaagcagtatatccaacctctgactttggtgtcctatactcccgatttgctactgtccgtgcgaggcgaacgaaagaacgaaaccgatagctctctgaaccaagaggctcctaccgaggaagcctctagcgtcttccccaagcttaccagtgccaagcctttctcgtccctgcccgatttgcgcaacattaacctgagtagcagcaagctggagccgtcgaaacctaattttagcataaaggaagctaagtctgcctcagccgtgaacgtcttcaccggcacagtgcatctaacctccgtggagactacccccgagtcaaccacacaactgagcatctcaccaaagtccccaccgactctcgctgttaccgcgtcatccgagtatagcggacccgaaaccgatcgcgttgtgtcattcaagtgcaaaaagcagcagactccgcctcatctgactcagaaaaagatgctcaaatctttcctccccaccaaatccaaatccttttgggaatctccaaacactaattggacactcctcaagtcagatatgaacaagcctcatctgataagcgagctgttaacaaagttacagctgtccgggaaactgtcattttttcccgctcactacaaccccaagttaggaatgaataacctgtcacaaaatccctccttgccaggagaatgtcattccagatccgactcttccggcgaaaagcgacagctggacgtttcttctttgctcttgcaatcaccccagagttacaacgttaccctgagagatctactcgtaattgcaaccccagctcagcttgatccaagaccatgccgatcgcacgcttcagcgatgagagacccatgcatgcaggatcaggaggcctactctcattgcctcatcagtggacaaaagggatgcgagcggagttag

SEQ ID NO: 245505 - DNA, 2532 bp, synthetic construct
  misc_feature 1..2532: note = Description of Artificial Sequence: Synthetic coding sequence
  source 1..2532: mol_type = other DNA
atgccacagtgcccaacactcgagagccaggaaggagagaactcagaggagaagggtgattcctctaaggaggaccctaaagagacagtagccctcgccttcgtccgggagaaccccggagcccagaatggcctacagaacgcgcaacagcagggcaagaaaaaacgcaaaaaaaaacgcttggtaattaacctctcttcctgtcgctacgaaagtgtcagacgggctgctcagcaatatggttttcgggagggcggtgaggacgatgattggaccctgtactggactgattacagtgtctcccttgagcgtgtgatggagatgaaaagctatcagaagatcaatcactttcccggaatgtcagagatctgtcggaaagacttacttgccaggaacatgtcgaggatgctgaaaatgttccctaaggatttcaggttcttccctaggacatggtgccttcctgccgattggggcgacctgcaaacttatagccgaagcaggaaaaataaaacctacatttgcaagccagacagcgggtgccaaggcaaaggaatttttatcacacgcacagtgaaggagataaaaccaggggaagacatgatttgccagctgtatatctccaagcccttcatcatcgatgggttcaagttcgatctgaggatctatgtgctggtcaccagctgcgaccctttgcgtatctttgtttataatgagggcctagcccgatttgccaccacaagttattctcggccatgtaccgataatttggatgatatctgtatgcacctgaccaactactccatcaacaagcattctagcaatttctctagagacgcccactccggatccaaaagaaaactgtcaacgttttcagcttatctcgaggatcacagttacaacgtcgaacagatatggcgcgatatcgaagatgtcatcatcaagactctcattagcgcccaccctatcattcggcacaactaccacacctgtttccctaaccacaccctaaactctgcatgtttcgagatcctgggttttgatatcctcttagaccacaaattgaagccatggctgctggaagttaaccatagcccttccttctctacagatagcagattggacaaagaggtcaaggacggtctgctgtacgatactctggtgctcataaacctggagtcttgtgacaaaaaaaaggtcttggaagaggagcgccagcgcggtcagtttcttcagcagtgttgctccagagagatgcgcattgaggaggctaaaggcttcagggctgtacaactcaagaaaaccgagacctacgaaaaggaaaattgcgggggattcagacttatatatcctagcctgaattctgagaaatacgaaaagttttttcaggataacaacagcttgttccaaaacactgtggcttcccgcgcacgagaagagtacgctcgccaactgatccaggaactgcgcctgaagcgtgaaaagaaaccattccagatgaagaaaaaggttgagatgcagggcgaatcagccggtgaacaagtccggaagaagggtatgcggggatggcagcagaagcagcagcagaaggataaggcagcaacacaggccagcaagcagtacattcaacctctgactctggtttcctacacaccagatttactcctgagcgtgaggggcgaaaggaaaaatgagacggactcatccttgaatcaggaggctcctaccgaagaggcatcttccgtattcccaaagctgacctctgccaagccgtttagctctctaccggatctcaggaacattaacctgtcctcaagtaaactagaacccagcaagcctaattttagtatcaaggaggccaaatctgctagcgccgtcaatgtttttacaggtaccgtccatctaaccagcgtagagacgacacccgagagcaccacgcagctgtccatctcccccaagtctccaccgaccctggccgtgaccgctagttcagaatattccggcccagagactgaccgtgtggtcagcttcaagtgtaagaagcaacaaacccctcctcatctaacacagaaaaaaatgttaaagtcgttcctgcccacaaaaagcaaatcattttgggaatccccaaacacaaactggacactgctcaaatccgatatgaacaagcctcacctcatttctgagctgctgacgaaactgcagctctctggaaagctgtcattcttccccgcacattataatcctaagctgggaatgaacaacctctctcagaatccttcactccccggagagtgccactcccgctccgatagttcaggagagaagcgtcaacttgatgtttcatcactgttactgcagtcacctcaatcctataacgttacactccgcgacctgttggtgattgctactccggcacagctcgaccccagaccatgtaggagccacgcgagtgcaatgcgagatccatgtatgcaggaccaagaggcttactctcattgcctcatcagcggtcagaagggctgtgaaagaagttag

SEQ ID NO: 245506 - DNA, 558 bp, synthetic construct
  misc_feature 1..558: note = Description of Artificial Sequence: Synthetic coding sequence
  source 1..558: mol_type = other DNA
cagcccatgggcgcactgcttctgcaccctagtcggagagggcctgctggagtggtcgctagctggaccagcagccccgcaggaagagatgggggtgtgggcatagctggagcgtggtattttcccagggcttctagccaggctcgggaaatgccacagtgtccaaccctagaatctcaggagggtgagaactctgaggaaaaaggcgacagcagcaaggaagatcctaaagaaaccgtagctctggctttcgtccgagaaaaccctggagcccagaatggcctccagaacgcccagcaacagggcaagaaaaaaagaaaaaagaagagaatgcccctgaagaactctagaaaacgccgttttccctgtttcaagaaagcactcatatgtcccggaaatctcgttaggttgcagtacgactcaaccatattgacataccaagatcctacagccgcttgcgcctttcagttcctgttcaacatctcaccctgtctggccccttttcgactcattgatgagggtaaattggtccacttcttgatacatagttttccttag

SEQ ID NO: 245507 - DNA, 1710 bp, synthetic construct
  misc_feature 1..1710: note = Description of Artificial Sequence: Synthetic coding sequence
  source 1..1710: mol_type = other DNA
atggaggggtgtcttggagttgcagagttacggaaacttagcaccttttcagcttacttggaggaccacagctacaacgtggagcagatttggcgagacattgaagatgtgattataaaaactctcatctccgctcatccgattatcagacacaactaccacacttgtttccccaatcacaccctgaactccgcttgttttgagatactcgggtttgacatcctgttagatcacaagctgaagccctggctacttgaggtgaaccactcgccatccttcagcacagattcaaggttggacaaagaagtgaaagacggccttctgtacgatactttagtcctgatcaatttggaatcgtgtgacaagaagaaggttttggaggaagaacgacagagaggacagtttctccagcagtgctgctcccgagagatgaggattgaggaagccaaaggctttcgagcggtccagcttaagaaaaccgaaacttacgagaaagagaattgtgggggttttaggctgatttatccatcccttaacagtgagaagtatgagaagtttttccaagacaataactcacttttccagaatacagtggccagtcgtgctagagaggagtatgccaggcagttgatccaggaattgcgtctgaaaagagagaagaagccattccaaatgaaaaagaaggtcgagatgcagggtgaaagtgccggagaacaggttcgaaagaaaggaatgcgtggctggcagcagaagcaacaacagaaagacaaagctgccactcaggcttctaagcaatatatccagccgctaactctggtcagctataccccagacctactattgtccgtgaggggtgagagaaagaatgaaactgacagctctctgaatcaggaagctccgacagaggaagcgtcctcagtattccctaaacttactagcgctaaaccattttcctcacttcccgatttgcggaacatcaacctgagtagttcaaaacttgagccatccaaaccaaactttagcatcaaagaggccaaatccgcgtccgccgtaaatgtgttcacaggaaccgtgcacctcacatcagtggagaccacccccgaatctacaacacagctatcaatttcccccaaaagtccaccaaccttggcggtgacagcgtctagcgagtactcgggtcccgaaacggacagggtagtgtcatttaaatgcaagaaacagcaaacaccaccccacttaacccaaaaaaagatgctgaagtctttcctaccaactaagagtaagtccttctgggagagccccaataccaattggaccctcttgaagtcagacatgaacaagccccatctgatctctgagctgctgaccaagctgcagctgagcgggaagctgagcttttttccagcacactataaccctaagctgggaatgaataatttgtcccagaacccaagcttgccaggcgagtgccatagtaggagcgacagcagtggagagaaaaggcagctggacgtatcgtctttgctgctccagtctccacaaagttacaatgttacactgcgtgatctattggtaattgccactccagcccaactggacccccgtccctgtcgaagtcacgcctccgccatgcgggacccttgtatgcaggaccaagaggcatactcacactgtctaatctcgggacaaaagggctgcgagagatcctag

SEQ ID NO: 245508 - DNA, 2676 bp, synthetic construct
  misc_feature 1..2676: note = Description of Artificial Sequence: Synthetic coding sequence
  source 1..2676: mol_type = other DNA
atgggcgcactactgctgcacccctccaggcgcggaccagccggagtggtcgcttcatggacgtccagccccgcaggtagggatgggggtgtaggaatcgccggagcttggtatttccctcgggcaagtagccaggcccgtgagatgccccagtgtcccaccctcgagagccaagaaggcgagaatagtgaagagaagggggactccagcaaggaggaccccaaagagaccgtagcactcgctttcgtaagggagaatcccggagcgcagaatgggctgcaaaacgctcagcaacaggggaaaaagaaaaggaaaaaaaagcgtctggtcatcaatctctctagctgtcgttatgagagcgttcggagggcagcccagcaatacgggttcagagaaggcggtgaggacgatgactggaccctctattggactgactatagcgtctcccttgagagagtgatggagatgaagtcgtatcagaagattaaccattttcctggcatgagtgagatctgtcgcaaagacctgttagccaggaacatgtctcgtatgctaaaaatgtttccaaaggactttaggttttttcctcgcacttggtgcctgccagcagactggggcgatctgcagacctacagcaggagcaggaaaaataaaacctacatctgcaagccagattccggctgccagggaaaaggtattttcatcacacgaaccgttaaagaaatcaaaccgggtgaggatatgatatgtcagctgtatatcagcaagccttttataatcgatggattcaagttcgacctccgcatttatgtcctggttactagctgcgatcccctacggatctttgtatacaacgaaggcttggcgcgattcgcgactacttcatactctcggccatgtacggacaatcttgatgacatctgtatgcatctgaccaattattccatcaacaagcactcatcaaatttctcccgggacgcccactctggaagtaaacgaaaactgtctacctttagcgcttatctggaggaccattcgtacaatgttgagcagatctggagagacattgaggacgttattataaaaacacttattagcgctcaccccattatacgacataactatcacacgtgcttcccaaaccatacacttaactcggcctgtttcgaaatcctcggctttgacatactattagatcataagctgaaaccgtggctccttgaggtgaatcactcccccagcttcagtacagattcacggctcgataaagaggtaaaagatggcctgttgtatgacacactcgtactcatcaatctggagtcctgtgataagaagaaagtgctcgaagaggaaaggcagagaggccagttcctgcaacagtgttgttcccgggagatgaggatcgaggaggctaagggattcagagctgttcagctgaagaaaaccgagacgtacgaaaaggagaactgcggaggatttagacttatctacccatcactaaactcggagaagtatgaaaaattctttcaagacaacaattcgctgtttcagaatacggttgcgtctcgagctcgtgaagaatatgccaggcaattaattcaggagcttcgcctaaagcgcgagaagaagccttttcagatgaagaagaaagtagagatgcagggcgaaagtgctggagagcaggttaggaaaaaggggatgaggggatggcagcagaagcagcaacaaaaggataaggctgccactcaggcgtccaagcagtatattcagccccttacgcttgtctcatacactcctgacttactcctcagcgttaggggtgagcgcaaaaacgaaaccgacagtagtcttaatcaggaggccccaaccgaggaggcaagtagcgtgttcccaaagcttacatccgccaagccgtttagctctttgcccgacctacgaaatattaacctctccagcagcaagttagaaccaagtaaaccaaatttttcaataaaagaagctaaaagcgctagcgctgtaaatgtttttactgggaccgtccatctgaccagcgtggagacgacacctgaaagtacaacccagctatcaatatcgcctaagagtccacctaccctggccgtaacagctagctccgagtactccgggccagaaacagacagagtggtaagctttaaatgtaaaaagcagcaaacccctccccacttgacacagaaaaagatgctcaaaagttttctgccaacaaagtccaaatctttttgggaatcccctaacaccaattggacactcctcaaaagcgacatgaataaaccccacttaatatctgagctgctcactaaacttcagctttcaggcaagctgtctttcttccccgctcactataaccctaaattgggcatgaataatctgtcacaaaacccttccctgcctggcgagtgccactcacgtagcgactcatctggagagaaacgtcaactcgatgtgtcgagtctgctgttacagtctcctcaatcttataacgtgactctgagagacctgttggtcatcgctacccctgcccaattagaccctcgcccttgccgatctcacgcctcagccatgcgggatccttgtatgcaggaccaggaggcttactctcattgcctgatatctggccaaaagggatgcgaaagatcatag

SEQ ID NO: 245509 - DNA, 306 bp, synthetic construct
  misc_feature 1..306: note = Description of Artificial Sequence: Synthetic coding sequence
  source 1..306: mol_type = other DNA
atgcctcagtgccctaccctggaatcccaggaaggtgaaaacagtgaggagaagggcgattcctccaaggaagatccgaaagagacagttgctctggcttttgtgagagaaaacccaggcgctcagaacgggttgcagaacgcccagcagcaaggtaagaagaagcggaagaagaagcgcctggtgatcaatctttcttcctgccggtacgagagcgtgcgtagggccgctcagcagtatggatttcgagaagggggtgaagatgacgactggacactgtattggacagattacagcgttagttag

SEQ ID NO: 245510 - DNA, 1356 bp, synthetic construct
  misc_feature 1..1356: note = Description of Artificial Sequence: Synthetic coding sequence
  source 1..1356: mol_type = other DNA
atgagggagtgtatttcaattcacgtcggccaggcgggtgtgcagattggcaatgcgtgctgggagctttactgtctagagcacggtattcagcccgatggtcaaatgcctagcgacaaaactataggagggggtgacgactcctttaacactttcttttcagagactggtgccggaaagcacgtaccgagggctgtgttcgtagacctcgagcccactgttatcgatgaagtgcgcactggaacttatagacagctgttccatccagagcaattaatcacgggcaaggaggacgcagccaacaattatgctaggggccactatacaattggcaaagagattattgatcttgtgctggacaggattcgtaagctcgcggatcagtgcacgggtcttcaagggttcttagtgttccattcctttgggggaggaaccggatcggggtttacgtcgttattgatggagcgcttgtcagttgactacgggaaaaagtcaaagctcgagttctctatctaccccgctccccaggtcagtactgcagtggtggagccatacaattcaattctcaccactcataccacgttggagcattcagactgcgcgttcatggtggataatgaggccatctacgatatttgtagacggaatttggacatcgagcgcccaacctacacaaatttaaaccggctgattggtcagattgtgtcatctattacagcatccctccgtttcgacggagctctgaacgtggatctgactgaatttcagactaatctcgtcccgtacccaaggatccacttccccctcgccacatatgccccagtcatctctgctgagaaggcatatcacgaacaactttctgtagccgaaattacaaacgcttgttttgaacctgccaaccaaatggtgaagtgcgaccctaggcatggcaagtatatggcttgctgcctcctctacagaggcgatgttgtgcctaaggacgtgaacgcggcaatagcaacaataaagacaaagcgcaccatccagttcgtggactggtgtccaacgggttttaaagttgggattaattaccagcctcccaccgtggtgcccggaggagacctcgctaaggttcagcgcgctgtttgcatgctgtccaacaccactgccatcgcggaggcttgggccagactggatcacaaattcgatctcatgtacgctaagcgtgcttttgtccactggtacgtgggagaaggaatggaggagggagaattctccgaagcgcgagaagacatggccgctttggaaaaggactatgaggaagtaggagtggactcggtggaaggtgaaggagaggaggagggagaggaatactag

SEQ ID NO: 245511 - DNA, 1356 bp, synthetic construct
  misc_feature 1..1356: note = Description of Artificial Sequence: Synthetic coding sequence
  source 1..1356: mol_type = other DNA
atgcgagaatgtatatctattcatgtggggcaggctggggttcagataggcaatgcgtgttgggaactgtactgcctggaacacgggattcagcccgatggtcaaatgccgagtgataagaccatcggcggtggggacgactcgttcaacacgttcttttctgagaccggggcaggtaagcacgtgcctagggcagtctttgtagatctcgagccgaccgtgatagacgaagtcagaaccggtacctataggcagcttttccatcccgaacagctgattaccgggaaggaggacgcagccaacaattatgccagaggccactataccattgggaaggagatcatcgacctggtactggatcgaattagaaagctggcagaccagtgtacaggcctgcaggggttcctggtcttccattcattcggtggcggaactggtagtggcttcacaagcctgctgatggaacgcctttctgtggattatggcaagaagagcaagctggagttctctatctaccccgcacctcaggtgtccaccgccgttgtcgagccatataactcaatactgaccacgcacacgactctagaacattccgactgtgccttcatggtggacaacgaagctatctacgacatttgcagacggaacttagatatcgagcgtcctacctacactaatcttaatcgtctgattggccagatcgtttcaagtatcaccgccagtctcagattcgacggcgcattaaatgtggacttgactgagtttcagaccaatctggttccctacccccgaattcattttcctttggccacatatgcccctgtgatatcggccgaaaaggcttatcacgaacagctaagcgtggctgagatcacaaacgcatgcttcgagccggctaatcagatggttaaatgcgaccctcgccacgggaagtatatggcgtgttgtctgctctacagaggcgacgtggttcctaaagatgtgaacgccgctattgcaacgataaaaactaaaagaacaatccagtttgtggactggtgtcctactgggttcaaggtcggtatcaattatcagcctcctacagtggtgccaggcggagatctggccaaagtacagcgcgctgtgtgtatgttgagcaatacgacagcaatcgctgaagcatgggcgcgactggatcataaatttgacttaatgtacgcgaagcgagctttcgttcattggtatgttggcgagggcatggaagaaggggagttctccgaggcacgcgaagatatggccgcattagaaaaggattacgaggaagtgggcgtggatagcgtggagggagagggggaggaggagggtgaagagtactag

SEQ ID NO: 245512 - DNA, 1152 bp, synthetic construct
  misc_feature 1..1152: note = Description of Artificial Sequence: Synthetic coding sequence
  source 1..1152: mol_type = other DNA
atgatcgatcttgagcctacggtagtggacgaagtgcgggctggtacctaccgccaactgtttcatcctgagcagttaataaccgggaaggaagatgctgcaaataactacgccagaggtcattatactgtgggaaaggagtctatcgatcttgtattagatcgcatccgtaaactgacagatgcctgtagcggactgcaaggatttctcatctttcacagtttcggcggtggtaccggaagcggctttaccagtctcctgatggagagactgtctctcgactacggcaaaaagagcaagctggagtttgctatataccccgctccacaggttagcacagctgttgtggaaccctacaacagcatcctcactacacacaccacactcgaacacagcgactgcgcatttatggtggataatgaagccatctacgatatctgcaggcgaaatctcgacatagagagacctacctacaccaacctgaataggctaatctcacaaattgtgtccagcatcacagccagcctgcgctttgatggggcactgaatgtggatctgaccgaattccagactaacttggtgccttatcccagaattcatttcccactggtgacctacgcccctattatatcagctgaaaaagcttaccacgaacagctgagtgtcgctgagattaccagctcatgtttcgagcccaattcacagatggttaagtgcgatcctcggcacggcaaatacatggcctgttgcatgctgtatcgcggagacgttgttcccaaggacgtgaatgtggccatcgctgccataaagaccaagcgcacaattcagttcgtcgattggtgtcccacaggattcaaggtcggcatcaactaccagccaccaacagtcgttcctggaggggatttggcaaaggttcaacgtgctgtctgcatgctatcaaacaccactgccattgcagaggcttgggcacgcctggatcacaaattcgacctgatgtatgccaagagagccttcgtccactggtatgtgggcgaagggatggaagaaggggagttctctgaagccagggaggacctagccgctttggagaaagattacgaagaagtagggacagacagtttcgaggaggagaatgagggagaagagttttag

SEQ ID NO: 245513 - DNA, 1350 bp, synthetic construct
  misc_feature 1..1350: note = Description of Artificial Sequence: Synthetic coding sequence
  source 1..1350: mol_type = other DNA
atgcgcgaatgcattagcgtgcacgttggccaggccggtgtccagatcgggaatgcctgttgggaattgttttgcctggagcacggaatccaggccgatgggacttttgacgcacaggcgtctaagatcaatgacgatgattccttcactaccttcttctccgagaccggcaatggaaagcatgtgcctcgcgctgttatgatagacctcgaacccaccgtggtggacgaggtccgcgctgggacctatcggcagctcttccatcccgagcaactgatcaccggcaaagaagacgcggctaataactacgctcggggacattacacagtgggcaaagagtcaattgatttagttcttgaccgaatacgtaagctgacagatgcttgctctgggttgcaggggttcttgattttccacagtttcggcggtgggacagggtcagggtttacttctctgctcatggagcgcctaagcttggactacggtaagaagtcgaagctggagtttgcaatttaccctgcccctcaggtgtcaaccgccgtggtcgagccttataattcaatactgacaacccatactaccctggaacattctgattgtgcctttatggtggataacgaagcaatctacgatatatgccgccgaaatctcgatattgagcgccctacatacaccaacctgaaccgcctaatttcccagatcgtttccagcatcacagcctccctgaggttcgatggagctctaaacgtggacctgaccgaattccagactaatcttgtgccctaccccagaatccacttccccctcgtcacatacgcccctatcatctccgccgaaaaagcgtaccacgaacagctgtcagtcgcggagattacaagcagctgctttgagccaaatagtcaaatggtgaagtgtgaccctagacacgggaaatatatggcctgttgtatgctatatcgcggtgatgttgttcccaaagatgtgaatgttgctattgcagctattaagactaagcggaccatccaatttgtggactggtgtccaaccggttttaaggttggtattaattatcagccaccaaccgtggtccccggaggggacttggcaaaagtgcaacgagccgtgtgcatgctctcgaacactacagcgattgcggaggcctgggctaggttggaccacaagttcgaccttatgtacgccaagagggctttcgtccactggtatgtcggagagggcatggaggaaggggagttctccgaggcacgagaggatctggcggctctggagaaggactatgaggaggtcggaacagactcatttgaagaagaaaacgagggagaggagttctag

SEQ ID NO: 245514 - DNA, 912 bp, synthetic construct
  misc_feature 1..912: note = Description of Artificial Sequence: Synthetic coding sequence
  source 1..912: mol_type = other DNA
atggccagacgaggcccaggctggagaccacttctcctgttggtgcttctcgccggagctgcacagggaggcctctactttcgcagagggcagacgtgttatagaccactcagaggggatgggctagctccgctcggacgctccacatatccaagacctcatgaatacctaagccctgccgaccttccgaaaagctgggactggcgcaacgtggacggcgtaaactacgcaagcatcactcgaaaccagcacatcccacagtattgtggcagctgctgggctcatgcatccacctcagcgatggctgatcggattaacatcaagcgaaagggagcctggcctagcaccctgctcagcgtgcagaatgttatcgactgcggcaacgccggtagttgtgaggggggaaacgatttatccgtatgggactacgcccatcaacatggtatcccagatgagacttgtaataattaccaggctaaagaccaggagtgtgataagtttaaccagtgcggcacatgcaacgagtttaaagagtgccacgccattcgcaattataccctttggcgagtcggcgactacgggtccctgtccggcagagagaagatgatggcagaaatctatgccaatgggccaatttcctgtggtatcatggccacagagcgcctggcaaactatacaggcggaatctatgcggagtaccaggatactacttatatcaatcatgttgtgtccgtggccggatgggggatctccgacgggaccgagtattggatcgtgaggaactcctggggagagccatggggtgagcggggatggctgcggattgttacgtccacctataaggatgggaaaggggcacgctacaatctggcaatcgaagaacactgcacctttggagaccccatcgtttag

SEQ ID NO: 245515 - DNA, 1338 bp, synthetic construct
  misc_feature 1..1338: note = Description of Artificial Sequence: Synthetic coding sequence
  source 1..1338: mol_type = other DNA
atgcgggagatcgtccatattcaggccggacaatgcggaaaccagattggggctaaattttgggaggtcattagcgacgagcatgggatcgacccaactgggtcataccacggcgattccgatcttcagcttgagagaattaatgtgtactataatgaagcaaccggtaacaagtacgtgccgagagctatcctagtggatttggaacctggcaccatggactctgtgagaagcgggcctttcggacagatcttcaggccagataatttcgtgttcgggcaatccggagccggtaacaattgggcgaagggtcactacaccgagggagcagagctggtcgactcagttctggacgtggtaaggaaagaaagcgaatcctgtgactgtctgcaagggtttcaactgactcacagtctcgggggaggaacggggtctggcatggggacactgctgattagtaaaattcgggaggaataccccgacaggatcatgaacactttttccgtcatgccgtcgccaaaagtctctgacacagttgtcgagccatacaatgcaacgttgagcgtgcaccagttagtggaaaacacagacgagacctattgcatcgataacgaagctctatatgacatttgctttcgcactctgaagctgaccactccaacctatggcgacctgaaccatctggtatccgcaactatgtcgggggtgacaacctgcttgaggttccccggtcagctaaacgcggatttgcgcaagttggccgtgaatatggtgccattcccacggcttcacttctttatgccgggttttgccccactgacaagcagaggcagccagcagtaccgagcattgacggtccccgaacttactcagcagatgtttgactcgaagaatatgatggcagcctgcgatcccagacatggaagatatctgaccgtggctgcaatctttcggggacgtatgagtatgaaggaggtggatgaacagatgttgaatgtccagaataagaattctagctactttgtcgagtggataccgaacaatgttaagaccgcggtgtgcgatatccccccaaggggcctcaaaatgtcggcaacttttatagggaactctaccgctatacaagaactgtttaagcggatttcggaacagttcaccgcgatgtttcgcagaaaggcattccttcattggtacactggcgaggggatggacgagatggagtttactgaagctgaatcaaacatgaatgacctggtaagtgagtaccagcaataccaggatgccaccgccgacgaacaaggagaattcgaggaagaagaaggcgaagatgaggcctag

SEQ ID NO: 245516 - DNA, 1353 bp, synthetic construct
  misc_feature 1..1353: note = Description of Artificial Sequence: Synthetic coding sequence
  source 1..1353: mol_type = other DNA
atgagagaaattgtgcacattcaggccggtcagtgcgggaatcagattggagccaagttttgggaggttatatcagacgagcacggaattgatccatctggtaattacgtaggcgattccgatctgcaactggaacggatcagtgtctactacaatgaggcctcgagccacaaatacgtgccccgtgccattttggtcgacctggagccgggtaccatggactcagtgaggtcgggcgcatttggccaccttttccggcctgataatttcatcttcggacaaagcggcgctgggaataactgggctaaagggcattataccgagggtgcggagttggtggattccgtcctcgatgtggtgaggaaagagtgcgaaaactgtgactgtctgcagggcttccaactcactcactctttaggcggtgggaccggcagcgggatgggcaccctgctaatttcaaaggtccgcgaggagtaccccgaccgaattatgaataccttctcagtcgtaccaagccctaaagtaagtgacacggtggtcgagccatacaacgctacactgtccattcaccagctggtcgagaacaccgatgaaacctactgcattgacaacgaagcactgtacgacatctgcttcagaacgctaaaacttgctacccctacatatggggatcttaaccaccttgtcagcgccaccatgtcgggcgtgacaacgtcgttgaggtttccagggcagcttaatgctgacctcaggaagcttgctgtcaacatggtcccgtttcctagactacactttttcatgcctggctttgctcctctaactgccagggggagccagcaatatagagctctcactgtacctgaattgacccagcagatgtttgatgccaaaaacatgatggccgcatgcgaccccagacacggacgctatctgactgtagccacagtgtttaggggcagaatgagcatgaaggaggttgacgagcaaatgctcgccatccaatctaagaatagcagctattttgttgagtggattcccaataacgtcaaggtcgcagtttgcgacatcccacccagaggtctgaagatgagcagcactttcattggaaacagtactgccatacaggagctgtttaaacgtatctctgagcagtttacagccatgttccgcaggaaggcctttttacattggtataccggggagggcatggacgagatggagttcacggaggcagagagcaatatgaatgatttagtgtcagagtatcagcagtaccaggatgccaccgctgaagaggaaggggagatgtacgaggacgacgaggaagagtcagaggcccaaggtccaaagtag

SEQ ID NO: 245517 - DNA, 1137 bp, synthetic construct
  misc_feature 1..1137: note = Description of Artificial Sequence: Synthetic coding sequence
  source 1..1137: mol_type = other DNA
atggacagtgttcggagtggagcattcggccacttgtttaggcccgataacttcatcttcggccaaagcggagcaggaaacaactgggctaagggacattacactgagggcgctgaactcgtcgactccgttttagatgtcgttaggaaggaatgcgagaattgtgactgtctacagggctttcaactgacacactcactggggggaggtactgggagtggcatgggtacgcttttaatcagtaaggtacgagaggagtaccctgaccgcatcatgaacaccttctccgtcgtccccagccctaaagtgtccgacacagtggtggagccgtacaacgccaccctctccatccatcagctcgtggagaatactgacgagacatattgcattgacaatgaggccctgtatgatatttgttttcgtactctgaagcttgcgacccctacatatggggacctgaatcatctcgtcagtgctactatgagcggcgtaacgacctcacttagatttccaggacagctcaatgccgacctgagaaaacttgctgtcaatatggtccctttccctaggctacatttcttcatgccaggcttcgcccctctcaccgcccgtggcagccagcagtatcgcgcactcactgtccccgagctgactcaacagatgtttgacgccaaaaatatgatggctgcgtgtgatcccaggcatggacgctacctcaccgtggcgaccgtatttcgagggagaatgtctatgaaggaggtcgatgagcagatgctggcgatccagagtaagaatagctcctactttgtagagtggatccccaacaacgtgaaagtagctgtttgtgatattcccccaagaggcctgaaaatgtccagtacgtttatcgggaactcaaccgccattcaggagctgttcaaacgcatcagtgagcagtttaccgctatgtttagacgcaaggcctttctgcactggtacacaggggaggggatggacgaaatggaatttactgaggccgaatcgaatatgaatgacctggtgtccgagtatcagcagtatcaggatgccactgccgaggaggaaggggagatgtatgaggatgacgaagaggaatcagaagcgcaggggccaaaatag

SEQ ID NO: 245518 - DNA, 1335 bp, synthetic construct
  misc_feature 1..1335: note = Description of Artificial Sequence: Synthetic coding sequence
  source 1..1335: mol_type = other DNA
atgcgcgaaatagtgcacattcaggccggtcaatgcggcaatcaaattggagctaaattctgggaggtgatttcggacgaacacggcatcgacccaaccggaacctaccacggggacagcgacctccagctcgacaggatatctgtgtattacaacgaggccacagggggaaaatatgttccacgtgctatcctggtggatttagagccagggaccatggattctgtgcgttctgggccttttggtcagatcttccggccagataactttgtctttggccagagtggggctggcaacaattgggccaagggccattataccgagggtgccgagttagtcgatagtgtcttggacgtggtgcggaaggaagccgaaagttgtgactgcttgcagggctttcaactgacccactcactgggcggagggactggcagcggtatgggaaccctcctgatttcaaaaatcagggaggaatacccggatcgcatcatgaacacattcagcgttgtgccctcacctaaagttagcgacactgtggtcgaaccttacaatgctaccctcagcgtgcaccagttggtggagaacacagatgagacctactgcattgataacgaagccctgtacgacatttgttttaggacccttaaactaacaactcccacatacggagatctgaaccacctggtgtcagcaaccatgagcggtgtaactacgtgcctgcggtttccaggtcagctcaatgctgacctgcgcaaactcgctgtgaatatggtcccatttccgcgactccatttcttcatgccagggttcgcccctttgacctctcggggatcccagcagtacagggctctgactgtgcctgagctgacccagcaggttttcgacgctaagaacatgatggccgcttgtgaccccaggcatggacgatatctgacagtcgccgcagtcttcagaggccgtatgagtatgaaagaggtcgatgagcaaatgctgaatgtccagaataagaactccagctacttcgtggaatggatcccgaataatgtgaaaactgctgtgtgcgatattcctccccgagggctgaaaatggccgtcactttcatagggaacagcacggccattcaggagctatttaagcgcatcagtgaacaatttacagccatgtttcggagaaaagcctttctgcattggtacacaggggagggcatggatgaaatggagttcacggaagcagagagcaatatgaacgacctcgtgagtgagtatcaacagtatcaagatgccaccgccgaagaagaggaagacttcggcgaggaagcggaggaggaggcctag

SEQ ID NO: 245519 - DNA, 1119 bp, synthetic construct
  misc_feature 1..1119: note = Description of Artificial Sequence: Synthetic coding sequence
  source 1..1119: mol_type = other DNA
atggactcagtgcgatcagggcctttcgggcaaattttccgacccgataacttcgtttttggccagtcaggagctgggaacaactgggcaaaaggtcactacacagagggggcagagttggtagacagtgttctcgacgttgtcagaaaagaagctgagagctgtgattgtctgcagggctttcagctgacccattcactgggcggaggcaccggatccggcatgggaaccctcttgatctccaagattcgagaggagtatcccgaccgaatcatgaacacatttagcgtggtcccctcacccaaggtaagcgacactgttgtcgaaccatataatgctaccctctccgtgcatcagttggtcgagaatacggacgagacttactgtatcgataacgaagccctatatgacatatgctttagaacgctgaagcttacaactcctacctacggggacctgaatcacctggtgtccgcgactatgagcggcgtcacaacgtgccttcgatttcctgggcagttaaacgcggaccttcggaaactggccgtaaacatggtgcccttccccaggcttcatttcttcatgccaggatttgccccacttacaagccggggttcccagcagtaccgcgctctaacagtgcccgagttaacccagcaggtgttcgacgctaagaacatgatggcagcatgtgaccccaggcatggccgatacctcaccgtggctgctgtattcaggggaagaatgagcatgaaggaggtggacgagcagatgttgaatgtgcaaaataagaactcttcctatttcgtcgagtggatccccaataatgtaaaaaccgctgtttgcgacattcctccgagggggctgaagatggcggtgacgttcattgggaacagtactgcaattcaagaacttttcaagcgtattagtgagcagtttactgccatgtttagaaggaaggcctttctacattggtatacaggggagggaatggacgagatggaattcacagaggccgaaagcaatatgaatgacctggtgtctgaataccagcagtatcaagatgccacagctgaagaggaggaggatttcggggaggaggccgaagaggaggcttag

SEQ ID NO: 245520 - DNA, 1335 bp, synthetic construct
  misc_feature 1..1335: note = Description of Artificial Sequence: Synthetic coding sequence
  source 1..1335: mol_type = other DNA
atgagagaaatcgtgcatatccaggcaggccagtgtggaaatcagatcggagccaagttctgggaggttatcagtgacgaacatggcatcgatccaacaggcacctaccacggagacagcgatcttcagctggaccgcatctcagtttattataatgaggccaccggaggtaagtacgtaccccgtgctatcctggtcgatctggaaccgggaactatggatagtgttcggagcgggccattcggccagatcttcaggcctgacaatttcgtatttggacagagcggggctggaaacaattgggccaagggccactatacagaaggcgcagagttagttgattccgtgctcgacgtggtgcggaaagaggcagagtcatgtgattgcctccaaggattccagctgactcatagccttgggggtggcaccggatccggtatgggcaccctgttgatttccaaaatcagggaggagtacccagacaggatcatgaacaccttttcagttgtgcccagccctaaggtgtcagacactgtagtggaaccttacaatgctaccctttctgtgcaccaactggtggaaaatacagatgagacgtactgtatcgataatgaggccctgtacgacatatgttttagaactttgaaactaacaacacctacgtacggggacctcaatcatctcgttagcgccacgatgagcggggtgacaacctgtctcagattccccggtcagttaaatgccgatctgagaaagctggcggtgaatatggttccattcccccgattgcattttttcatgcctgggtttgctccccttacgtcacgaggctcacagcagtatcgggcactcacggtgccagagttgacccagcaggtatttgacgctaaaaatatgatggcagcttgtgatcctcgccacggtcgatatctgacggttgctgccgtattcaggggtagaatgagcatgaaagaggtggacgaacagatgctgaatgtgcagaacaaaaacagctcctactttgtggaatggatacccaataatgtgaaaacagcagtttgcgatatcccaccccgaggtctgaaaatggcggtcacattcatcggtaattccaccgcgattcaggagctgttcaaacggatctctgaacagttcacagccatgtttaggagaaaagcctttctgcattggtatacaggtgaaggaatggatgaaatggagttcaccgaggcagagtccaacatgaatgacctagtgagtgaatatcaacaatatcaagatgctacagccgaggaagaggaagatttcggcgaagaggctgaggaggaagcttag

SEQ ID NO: 245521 - DNA, 1119 bp, synthetic construct
  misc_feature 1..1119: note = Description of Artificial Sequence: Synthetic coding sequence
  source 1..1119: mol_type = other DNA
atggattcagtgcgaagtggcccattcggacagattttccggcctgataactttgtgttcgggcaaagtggcgcagggaataactgggccaagggccactacacagagggggctgagctggtggactcagtcctcgatgtcgtgagaaaggaggctgagtcttgtgactgtctgcagggttttcagctgactcactccctggggggagggaccggtagtggcatgggtactctcttgatctcaaagatcagagaggaataccccgaccggatcatgaacacctttagcgttgtgccgtctccaaaagtaagcgacacagttgtcgaaccatataacgccacactcagcgtgcatcagttagtggagaataccgacgaaacttactgcattgataatgaagccctttatgacatttgcttcagaaccctgaagctcaccacaccaacttacggggatctcaatcacctggtgagcgcaactatgtcaggagtcactacctgcctgaggtttccgggtcagctgaatgctgatctgaggaagctcgccgtgaatatggtgccctttccccgattacactttttcatgccagggttcgcacccttaacctcgaggggctctcagcagtatcgggcactgactgtccccgaacttactcagcaagtatttgacgctaaaaatatgatggctgcctgtgacccacgtcatggtaggtacttgaccgtggcagccgtgttccgaggccgtatgtctatgaaagaagtggacgaacaaatgctaaatgttcaaaacaaaaattccagctactttgtcgagtggattcctaataacgttaagactgctgtgtgtgatattcccccaagaggtctgaagatggccgtgacatttatcggtaactcaacggctatacaggaactcttcaagcggatctcagaacaattcactgccatgtttagacgtaaagcctttttgcactggtacaccggcgagggcatggacgagatggagttcaccgaagcggagtccaacatgaacgacctggttagcgagtaccaacagtatcaggatgcaacagccgaagaggaagaagatttcggtgaagaggcagaggaagaggcttag

SEQ ID NO: 245522 - DNA, 1281 bp, synthetic construct
  misc_feature 1..1281: note = Description of Artificial Sequence: Synthetic coding sequence
  source 1..1281: mol_type = other DNA
atgttttgggaggtcatctcagacgagcacgggattgatccaacaggaacgtatcacggggattccgatttacagctggatcggatcagtgtttattacaacgaagccaccggaggcaaatacgtgccgcgtgcgatcttagtggatctcgagcctggtacaatggatagtgtgagaagcgggccattcggccagatcttccgacccgataatttcgtgtttggccagtcaggcgcaggcaataactgggccaagggtcactatacagagggcgctgagctggtggactctgtactggacgtagtgcgcaaggaggccgagtcttgtgactgtctccagggcttccagctgacccattccttgggcggagggaccggatcaggaatgggtaccctactgattagcaagattcgggaagagtatcccgacagaattatgaacaccttttcggtcgtgccatctccgaaggtgagcgacactgtcgttgaaccatacaatgccaccctcagcgtgcaccaactggtggaaaatacagacgagacttattgtattgacaacgaggctctatatgatatttgtttccgaacactgaaattgacaactcccacctacggggacttgaaccatctcgtatccgccacaatgtccggagtgactacctgtcttaggtttcccggtcaactgaacgcagacctcagaaagctcgcagtgaacatggtcccctttcccaggcttcactttttcatgccagggttcgctccgttaacgtctagaggaagccagcagtaccgcgctctaacagtgcccgagctgacccagcaagtgttcgatgccaaaaacatgatggctgcgtgcgatccacgacacggcaggtatctgacagtcgcggcagtctttcgcggaagaatgagtatgaaggaggtggatgagcaaatgctgaatgtccagaataaaaattcttcttatttcgtcgaatggatcccaaataacgtgaagacagccgtgtgtgacattccgccaagagggctgaagatggcagttacattcatcggcaattcaacagctatccaagagctctttaagagaatctcagagcaattcacggcaatgttccgcaggaaggcatttcttcactggtatacaggcgagggaatggatgagatggagtttacagaggccgaatccaatatgaatgacctcgtgtctgagtatcaacagtaccaggatgctaccgctgaagaggaggaggactttggggaggaggcagaggaggaggcatag

SEQ ID NO: 245523 - DNA, 1119 bp, synthetic construct
  misc_feature 1..1119: note = Description of Artificial Sequence: Synthetic coding sequence
  source 1..1119: mol_type = other DNA
atggattcggtgaggtccgggcctttcggccaaattttcaggccggataatttcgtttttggtcaatctggcgctggcaataactgggccaaaggccattacactgagggggcagagctggtcgactctgtgttagatgtcgttagaaaggaagccgaatcttgtgactgtcttcaaggtttccagctcacgcacagcctgggcggtggcacgggctctggaatgggaactctgctcatcagcaaaattcgggaggagtatccagataggataatgaatacattctcggttgtgccttcccccaaggtgtcagatacagtggtggagccttacaatgcaaccttgtccgtacaccaactcgttgaaaacacagatgaaacgtactgcatcgataacgaggccctgtacgacatttgcttccgcactctgaagctgactacacccacttatggcgacctcaaccatttggtttcggcaaccatgtccggagtcaccacgtgtctgcgatttcccggtcaactcaacgccgatctgcgaaagttggctgtaaacatggtgccgtttccccgtctgcacttctttatgccagggttcgccccactgacttcaaggggctcccaacaatacagggctcttactgtcccagagctgacacagcaggtgttcgacgctaagaacatgatggccgcatgcgacccaaggcacggtcgatacctgacagtggcggctgttttccgcggaagaatgagtatgaaggaagtggacgaacagatgcttaatgttcagaacaagaatagctcttattttgtcgagtggattcccaacaacgtgaagaccgcagtgtgtgatatccctccaaggggcctcaagatggcggtgacatttattggaaattcaactgcaatccaagagctgtttaaaaggattagcgaacagttcacggccatgttcaggcgaaaggcctttttgcactggtacactggagaagggatggatgagatggaatttactgaggcagagtccaatatgaacgatctggtctccgagtaccaacagtaccaggatgctacagcagaagaagaggaagacttcggagaagaggctgaggaggaggcctag

SEQ ID NO: 245524 - DNA, 1119 bp, synthetic construct
  misc_feature 1..1119: note = Description of Artificial Sequence: Synthetic coding sequence
  source 1..1119: mol_type = other DNA
atggacagcgtgcgaagcggtcccttcggacagatttttaggccagacaacttcgtgttcggccagtcgggggctggcaacaactgggctaaggggcactacaccgagggcgcagagctggtcgactccgtgctggacgtcgtccggaaggaggccgaaagctgtgactgccttcaaggatttcagttgacccacagtttgggcggtgggactggttccgggatgggaaccctcctgattagtaaaatccgggaggagtacccggatcgcattatgaacacattcagcgtcgtgcccagccctaaagtcagtgatactgtcgtcgagccatacaacgcaaccttgtccgtgcatcagctggtggaaaatactgacgagacttattgcattgataacgaggctctttatgacatctgctttcgcactttgaaactcactactccgacatatggtgatctgaatcatctggttagcgccacaatgtcaggagttaccacttgtctgagattcccaggacagctgaacgctgacctccgtaagctcgcagtgaatatggtcccttttccacgcttacactttttcatgcccggattcgctcctctcacctcacggggatcacagcagtatcgggctctgaccgtgcctgagctgacacagcaagtgtttgatgcaaaaaatatgatggctgcttgtgacccacgacatggacgctacctgaccgtagccgctgtgtttcggggtcggatgtctatgaaggaggtggatgaacagatgctcaacgtgcagaataagaattcgtcctacttcgtggagtggattccaaacaacgtgaaaaccgccgtgtgtgacataccgcctcgtgggctcaagatggctgtgacctttatcgggaactccactgcaatccaggagctcttcaaaagaatttcagagcaatttaccgcgatgtttcggaggaaggccttcttacattggtacaccggggaaggtatggatgagatggagttcactgaagccgagagtaatatgaacgatctggtgagcgaatatcagcaatatcaagacgcaacagctgaagaggaggaggatttcggggaggaggccgaggaggaggcgtag

SEQ ID NO: 245525 - DNA, 1281 bp, synthetic construct
  misc_feature 1..1281: note = Description of Artificial Sequence: Synthetic coding sequence
  source 1..1281: mol_type = other DNA
atgttctgggaggtgattagcgatgagcatgggatagatcccacaggaacttatcatggagactctgaccttcagctggatcgcatttccgtctactacaacgaagccactggcggaaagtatgtgccacgggcaattctcgtggacctcgagcccggtacaatggactcagtacgcagtggtccatttggacagatattcagacccgataatttcgtgtttggacaatccggggctggtaataactgggcaaaaggacattatactgaaggcgctgaattggtagattcagtactggacgtcgtgcgaaaggaggccgagagctgcgattgcttgcagggctttcaacttacccacagcctggggggtggaaccggttccggaatgggtactcttctgatctcaaagattcgggaggagtatcccgatcgcataatgaacacattctctgttgtgccctcgcccaaggttagcgatacagtggtggaaccctataatgcaacgctctctgtgcaccagcttgtcgagaataccgatgagacatactgcatcgacaatgaagccctgtacgatatatgcttccggactctgaagctcactactcctacttatggcgaccttaaccatctggtgagcgctactatgtccggagtgaccacttgtttgcgatttcctggtcagctgaatgcagaccttcgcaagctcgccgttaatatggtcccattcccacggctccatttctttatgcccggattcgctcccctgacgagccgcggatcccagcagtaccgagctctgacagtgccagagcttacacagcaggtattcgatgcgaagaatatgatggccgcttgtgaccccagacatgggaggtaccttactgtagccgctgtgttcaggggcagaatgtctatgaaggaagtggacgaacagatgctcaatgtacagaataaaaacagcagctacttcgtggagtggattccaaacaacgtcaagaccgccgtgtgcgatataccaccccgtggcctcaaaatggccgtgactttcatagggaactctacagcgattcaagaactgttcaagaggatttcagagcagtttacagctatgttccggagaaaagcttttctgcactggtacacaggcgaaggtatggacgagatggagttcaccgaggccgagtcgaacatgaacgatctcgtctcggaataccagcagtaccaggatgcgacagccgaagaggaagaggacttcggagaggaagccgaggaggaagcttag

SEQ ID NO: 245526 - DNA, 1281 bp, synthetic construct
  misc_feature 1..1281: note = Description of Artificial Sequence: Synthetic coding sequence
  source 1..1281: mol_type = other DNA
atgttctgggaggtgatttccgacgaacacggtatcgaccccactggaacatatcacggtgatagtgacctgcagctggaccgcatcagcgtgtattataatgaggccacgggagggaaatatgtgccccgagctatccttgtcgatttggaaccgggaacgatggattccgtgaggagtggcccattcgggcaaatttttcggcctgacaattttgttttcggtcagtcaggcgctggtaacaactgggccaagggccattataccgaaggggcagagctggtcgattccgtcctggatgtggtgaggaaggaggcagaaagctgtgattgcttgcaaggcttccagttaacccacagtctcggaggaggaacaggctccgggatgggaacactcctgatctccaagatcagggaggagtatccagatcggatcatgaacacctttagcgtagttccaagtcctaaagtttctgacacagtggtggagccgtacaacgcaaccctatcagtgcatcagctagtggagaatacagacgaaacctattgcatcgacaacgaagccctgtatgacatttgcttccgaaccctgaaactgaccacacctacttacggagatctgaaccacctcgtgagtgccaccatgagtggtgtcaccacctgtttacgtttcccgggtcagctcaacgcagacctaaggaaacttgccgtgaacatggtgccctttccccgactccacttcttcatgcctggatttgcgcctctaacgtcacgcggaagccagcagtaccgcgcacttactgtgcccgaactaactcaacaggtttttgacgcaaagaatatgatggcagcgtgtgatcctcgccatggccgatatctcactgttgctgctgtgtttcggggtcgcatgtcaatgaaagaggtcgatgaacaaatgctcaatgtccagaacaaaaatagttcttatttcgtcgaatggattcctaacaacgtgaagaccgccgtatgtgacatcccaccccgtggactgaagatggcggttaccttcattgggaattccaccgctatccaggagctgtttaagaggatttccgaacagttcaccgccatgtttcgcagaaaggcatttctgcactggtataccggcgaggggatggacgagatggagttcactgaagcagagtctaacatgaacgacctcgtttctgaataccagcaataccaagacgcgaccgctgaagaggaagaagacttcggcgaagaagcagaagaggaagcctag

SEQ ID NO: 245527 - DNA, 1119 bp, synthetic construct
  misc_feature 1..1119: note = Description of Artificial Sequence: Synthetic coding sequence
  source 1..1119: mol_type = other DNA
atggactctgtgagatctggaccttttggccagatcttccgcccagataatttcgtgttcggacagagcggtgcaggcaataactgggctaagggccattatactgagggcgcagaattggtggactcagtgctggatgtggtgcgcaaggaagcagaaagttgcgattgtctgcaaggatttcagttaacccatagcctgggcggtggtacaggttctgggatgggcacgctgttaattagcaagatccgggaagaatacccggaccggataatgaatactttctccgtcgtcccctcccctaaagtttctgacacagtggtggaaccgtataacgcaactctatcagtccatcagttagtggaaaacactgatgaaacatactgcattgacaacgaggcactgtatgacatatgttttcgaacactgaaactgaccacgccgacatatggcgatctgaaccacctcgtatcagccaccatgagcggtgtgactacctgtctaaggttcccaggtcagctaaatgccgatcttcggaagctagctgtaaatatggtgccatttccacgcctgcatttcttcatgcctggtttcgcccctcttacaagccggggatctcagcaatacagggctttaactgtccccgaactcactcagcaggtgtttgacgccaagaacatgatggcagcatgcgatccgaggcacggcagatacctcaccgtggcagcagtctttagggggcgaatgtctatgaaggaagtggacgaacagatgctgaacgtgcagaacaagaatagcagttattttgtagaatggatcccaaataacgttaagaccgccgtttgcgacattcccccaaggggactgaaaatggccgttactttcatcggaaattcgaccgctattcaggaattattcaagaggatttccgaacagttcacggcaatgttccgtagaaaggcattcttgcactggtacactggggagggcatggatgagatggagttcaccgaagctgaatcaaacatgaacgacttggtaagcgagtatcaacagtatcaggacgctacggccgaggaggaagaggacttcggagaagaagcagaggaagaagcatag

SEQ ID NO: 245528 - DNA, 1281 bp, synthetic construct
  misc_feature 1..1281: note = Description of Artificial Sequence: Synthetic coding sequence
  source 1..1281: mol_type = other DNA
atgttctgggaggtgattagcgacgaacacggtatagatcccaccggaacttatcatggcgatagtgacctgcagctagacagaatctcagtttactacaatgaggcaactgggggaaagtacgtcccgagggccattcttgttgatctcgagcctggaacaatggactctgtaagaagtggaccattcggacagatatttcggcctgataatttcgtgttcggccagtcaggggctgggaacaactgggccaaggggcactacaccgaaggcgctgaattggtagatagcgtactggatgttgtgcggaaagaagctgagtcctgcgattgcctgcaggggttccagctgactcattccttaggagggggaacgggttccggtatgggcactttgctgatttctaaaatacgagaggaataccccgaccgaattatgaacacattttctgttgtgccctcccctaaagtgagcgacacggtcgtggagccatacaatgccacgctctccgtgcatcagctggtagagaataccgacgaaacatactgtattgataatgaggcattgtacgatatttgctttagaacactgaaactgaccacacccacatacggtgatctgaaccatctcgtttccgctactatgagcggcgtgactacgtgcctgcgatttcccggacaattgaatgcggatctgaggaagctggcagtgaacatggtgccgtttccaaggctgcactttttcatgcccggatttgcgcctctcacatccagaggatctcagcagtaccgcgctttaacagtgcctgaacttactcagcaggttttcgatgccaagaacatgatggcagcgtgtgatcctagacatggacgatacttgactgtggctgctgtgttcaggggcagaatgagcatgaaggaggttgacgaacagatgctaaacgtgcagaacaaaaacagtagctatttcgtggaatggattccgaataacgttaagacagccgtgtgcgatatccctccgcgtgggttgaaaatggccgtgactttcataggtaactctactgccattcaagagttgttcaagcggatatcagaacagtttacagcaatgtttcggcgaaaggcatttctccactggtatactggagaggggatggacgaaatggagttcactgaggccgaaagcaacatgaatgatcttgttagcgagtaccaacagtaccaggacgccaccgccgaggaagaggaggatttcggtgaggaagcggaggaggaagcctag

SEQ ID NO: 245529 - DNA, 1335 bp, synthetic construct
  misc_feature 1..1335: note = Description of Artificial Sequence: Synthetic coding sequence
  source 1..1335: mol_type = other DNA
atgcgggagattgtccacatccaggcaggacagtgtgggaatcaaatcggcgcaaaattctgggaagtcatatcagacgagcatggtatagatccgaccgggacctaccatggcgatagcgacctgcagctggacaggataagtgtgtattacaacgaagccacgggtgggaagtatgtgccccgtgcaatcctggtggacctggaaccagggactatggactccgtgaggtcaggccctttcggtcaaattttccggccagataactttgtatttggccagtccggggcagggaacaactgggctaagggacactataccgaaggcgcagagctggtggattccgtcctggatgtagtccgcaaggaagctgaaagttgtgactgtctccagggcttccagctgacacactccctcggaggtggaactggaagcggcatgggtacgctgctcatctcaaaaatccgcgaagagtaccctgatcgaatcatgaacacattttctgtcgtgcccagccctaaagtttcggacacagtcgtcgaaccttacaacgccactctctctgtccaccagttggtggagaacacagacgaaacatattgtatcgataacgaggctctttatgatatatgcttcaggactttgaaactgaccacgcccacatacggcgacctgaatcacttagtttccgccacaatgagcggggtgaccacatgcctgcgattccccggacaactgaacgcagatctccgcaagttggccgtgaatatggtacccttccccagactccactttttcatgcccggatttgcgcctctgacatctcgcggaagccagcagtacagggcattgacagtccccgagctgacacaacaagtgttcgatgctaaaaatatgatggctgcttgcgaccctaggcatggacggtacctgaccgtggccgctgtatttaggggcagaatgagcatgaaagaggttgatgagcagatgctgaacgtgcaaaacaagaactccagctactttgtggagtggattcctaacaacgtgaagactgctgtgtgtgatatcccacccagaggactgaagatggctgtcaccttcattggcaattctaccgctatacaggaactcttcaagagaatttccgagcaattcaccgccatgtttcgcaggaaggcctttctgcactggtacactggagaaggtatggacgagatggagttcactgaagctgagtcaaacatgaatgacctggtgtctgagtaccagcagtaccaagatgcaacagccgaggaagaggaggacttcggggaggaagctgaggaagaagcgtag

SEQ ID NO: 245530 - DNA, 1281 bp, synthetic construct
  misc_feature 1..1281: note = Description of Artificial Sequence: Synthetic coding sequence
  source 1..1281: mol_type = other DNA
atgttttgggaggtgatctctgacgaacatggcatcgaccctaccggtacctaccacggcgacagtgaccttcagctggatagaattagcgtctactataatgaagctacggggggtaagtatgtccccagggcgatacttgtggacttggaacctgggacaatggactccgtcaggagtggtccctttggtcaaatctttcgcccagacaatttcgtcttcgggcagtctggggctggaaataattgggctaagggacattataccgagggcgctgagctggtggacagcgtcctggatgtggtgcgcaaggaggcagagagctgcgactgcttgcagggcttccagcttacccattcactgggcggtggcactgggtcggggatgggcaccctcttaatttcgaagatccgcgaggagtatcccgaccgtatcatgaacactttttcggtggtacctagtccgaaggtgagcgatacggtggtggaaccttacaatgcaacactgagcgtgcatcagctagtcgagaacacagacgagacttattgtattgacaacgaagctctctacgacatttgctttaggacactgaaactgactaccccaacctacggcgacttgaaccacctggtcagcgccaccatgtcaggggtgactacatgcttgaggtttcctggacagctcaatgcagacctgaggaaactggctgtgaatatggtccccttcccaaggcttcacttcttcatgccaggctttgctccactaaccagcagagggtcccagcagtatagggcgttgacggttcccgagctgacgcaacaagtttttgacgctaagaacatgatggctgcatgcgatccccgacacggaagatacctcaccgtcgccgcagtattcagggggaggatgtcgatgaaggaggtcgacgagcaaatgctgaacgttcaaaacaaaaactcatcctactttgtcgagtggatcccaaacaatgtcaaaacggcagtatgcgatatcccgccaagaggacttaagatggccgttacttttattggaaactcgacagccattcaagagctattcaagcggatctcagagcagttcacggcaatgttccgccgtaaggctttcctgcattggtataccggagaaggcatggacgaaatggagtttactgaggccgagtccaacatgaatgatctggtgtctgaatatcagcaataccaggacgctactgccgaagaggaggaggatttcggcgaggaggccgaagaggaggcctag

SEQ ID NO: 245531 - DNA, 1119 bp, synthetic construct
  misc_feature 1..1119: note = Description of Artificial Sequence: Synthetic coding sequence
  source 1..1119: mol_type = other DNA
atggattctgtccgctcagggccatttgggcagatattcagacccgataacttcgtattcgggcaatccggtgcagggaacaactgggcaaagggacactatactgagggcgcagaactggtcgactccgtgctggatgtcgtgcgcaaagaggctgaatcctgcgactgtctgcagggctttcagctgacacattccctggggggtggcacaggctctggtatgggaaccttgttgatcagcaaaatccgggaagagtatcccgatcgcatcatgaataccttcagcgttgtgccctctccgaaagttagcgacacggtcgtggagccatataatgctacactgagcgtgcaccaactggtcgagaataccgatgaaacatattgcattgataatgaagccctctatgatatctgttttcgaactttgaagctgacgactcccacttatggcgatctgaatcacttggtgagcgctactatgagtggcgtgacaacctgcctgagatttcctggccagttgaacgccgatctccgtaagctggcagtgaacatggtgcccttccctcgcctgcacttttttatgccaggctttgcacctctgacgtccagggggtcccagcagtaccgcgctctgaccgtcccagagctgacacagcaagtgtttgacgccaagaacatgatggccgcttgtgaccctcgacatggtaggtacttgactgtggccgcagtgtttaggggcaggatgtccatgaaggaggtagatgagcagatgctcaatgtgcagaataaaaactccagctactttgtggaatggatacctaataacgtgaagaccgcggtttgtgacatcccaccccgtggactcaagatggccgtaacgtttatcgggaattctactgcgatccaagagctgttcaaacggattagtgaacagttcacagccatgtttcgaagaaaggcattcctacattggtatactggagagggaatggacgaaatggagtttactgaagccgaatccaatatgaacgatttggtgtcggagtatcagcagtatcaagatgcgaccgcggaggaagaagaggacttcggcgaggaagcagaagaagaggcttag

SEQ ID NO: 245532 - DNA, 1335 bp, synthetic construct
  misc_feature 1..1335: note = Description of Artificial Sequence: Synthetic coding sequence
  source 1..1335: mol_type = other DNA
atgagggagatcgtccacattcaggccggacagtgtggcaatcagattggggctaagttctgggaagtgattagcgatgagcacggcatcgatccaacaggcacttatcacggagacagcgacctccagctggataggatttccgtttactacaacgaagcgaccggtggaaagtatgtgcccagggctatcctggttgatctggaacctggcaccatggattcagtacgctctggaccttttggtcagatttttcggccagacaatttcgtattcggccagagcggggctggaaataattgggccaagggccattacacagagggggcagagctcgtcgactctgttttagatgtcgtgcggaaggaggccgaatcatgcgattgtctacaggggttccagctgacacactcacttggcggtggaaccggctctggaatgggaactcttctcattagcaaaatccgggaggagtaccccgatcgaattatgaacacattctccgtcgtgccctcacccaaggtgtctgacactgtagtggaaccgtacaacgctactctgagtgtgcatcagctggttgaaaacactgacgagacttactgcatagataacgaagcgctatacgacatctgcttccggactctgaaactcaccaccccgacctacggtgatctgaatcaccttgtgtccgcaactatgagtggcgtgaccacatgcctcaggtttccagggcagctgaatgccgacctgaggaagctcgccgtgaacatggtaccatttcctagactgcacttctttatgcccggattcgccccactgaccagccgcggatctcaacagtaccgtgccctaacggtgcctgaactgacacagcaggtctttgacgcgaagaacatgatggccgcttgtgatcccagacacgggaggtaccttacggttgctgccgtgtttcggggacggatgtctatgaaagaggtggatgagcagatgttaaatgtacaaaacaagaactcttcatattttgttgagtggataccaaataacgtgaagacggcagtctgcgacatccctcccagaggtcttaaaatggctgtgactttcatcggaaattccacggcaatccaggagctgtttaaaagaatctcagagcagttcactgcaatgtttcgcagaaaggcttttctacattggtatacaggggagggcatggacgaaatggagttcactgaagcagaatccaacatgaatgaccttgtaagcgaataccagcaatatcaggacgcaactgccgaggaggaggaggactttggcgaggaggctgaagaggaggcgtag

SEQ ID NO: 245533 - DNA, 1335 bp, synthetic construct
  misc_feature 1..1335: note = Description of Artificial Sequence: Synthetic coding sequence
  source 1..1335: mol_type = other DNA
atgagagaaatcgtgcatattcaggcaggccaatgtggtaatcagattggcgcaaaattttgggaagtgatttcagatgaacacggcattgaccctaccggaacttatcacggagactctgacctacaattggaccggatttcagtatactacaatgaggcgaccggcggtaaatatgtgccaagagccatattagtggacttggagcccggtaccatggattctgtgcgaagtgggcctttcggacagatcttcagacctgataactttgtgttcggacaaagcggcgctggcaataactgggctaagggacactatactgagggcgcagaattagtggactcagtgctggacgtagtcaggaaggaggcagagtcttgcgactgcctccagggtttccaactgactcatagcctaggcggaggcacgggatctgggatggggacactactgatctccaaaatcagggaagaatatccggatagaattatgaacacgttttccgttgtgccatcgccaaaggttagtgatacggtggtcgaaccatacaatgctacactgtccgtgcatcaactggtagagaatacggacgagacctattgcatcgataatgaggcgctgtatgacatctgctttcgaacgctcaagttgactaccccaacgtacggcgacctgaaccatctcgtcagcgctacaatgtctggagttacaacctgcctgagattccccggacagttgaatgctgatctgcggaaactggctgttaatatggtccccttcccgaggctgcatttctttatgccaggattcgcgccactgacgtctcggggtagtcagcaatatagagccttaacagtgcctgagctcactcagcaggtgtttgacgcaaaaaacatgatggctgcttgcgatccgaggcacggcagatacctgacggttgccgcagtgtttaggggcaggatgagtatgaaagaggtggacgaacaaatgctaaacgtgcaaaataagaacagttcatattttgtggagtggatccctaacaacgtgaagaccgccgtctgtgatattccacccagggggctgaaaatggcagtgacttttattggaaattccaccgcgatccaggagctgttcaagcgcatatcagaacaatttacggccatgtttcgcagaaaggcctttctccattggtacaccggcgagggaatggacgaaatggagtttactgaggccgagagtaatatgaacgacttagtttcagaataccagcagtatcaggacgctacagccgaggaagaggaggattttggcgaagaagcagaggaggaagcgtag

SEQ ID NO: 245534 - DNA, 1335 bp, synthetic construct
  misc_feature 1..1335: note = Description of Artificial Sequence: Synthetic coding sequence
  source 1..1335: mol_type = other DNA
atgcgggagatcgttcacatccaagcaggccagtgtgggaaccagatcggcgctaagttctgggaggtaatctcggacgagcacggaattgacccaacgggtacttatcatggggatagcgaccttcaacttgataggattagcgtctattataatgaggctacaggcggaaaatacgtgccaagggcgatcctcgtggatttggaacccggaaccatggactccgttagaagtggcccatttggccaaatctttagacctgacaacttcgtgtttggccagtctggagccggaaataattgggctaaagggcactatactgagggtgccgaattggttgattctgtcctcgacgttgtgaggaaggaagcggaaagctgcgattgcctccagggttttcagttgacacattcattaggagggggaacaggttctggcatgggaacactattaatctcaaaaattagagaagagtacccagacaggataatgaatacgttcagtgtggtgccctcccccaaggtgtccgacaccgtagtcgaaccatacaatgcgacattaagtgtacaccaattggtggagaatacagacgaaacatattgcatcgacaacgaggccctctacgatatctgcttcagaacacttaaactcaccactcctacgtatggagacctgaatcatctggtgtcagccactatgtccggcgtgaccacctgcctgcgattccccggacagcttaatgccgacctgcgaaagttagccgttaatatggtgccattcccgaggctgcactttttcatgccaggtttcgcgccactgacctcccggggaagccagcagtaccgcgcactcactgtccctgagctgacacaacaagtgtttgacgccaaaaatatgatggccgcttgtgatccaagacatgggcgatatctgaccgtggcagctgtgttccggggtcgcatgtcgatgaaggaggttgatgagcaaatgctaaacgttcagaataagaactcatcgtattttgtggaatggatccctaacaatgtgaaaaccgccgtgtgcgacattccgccaaggggtctgaaaatggcagtgacctttatcggcaactccactgcgatacaggagctttttaaacgtatttccgaacagttcacagccatgtttcgcaggaaggccttcctgcattggtacaccggtgagggtatggatgaaatggaattcactgaggctgagagcaacatgaacgacctggtatctgaatatcagcagtaccaggacgccaccgccgaagaggaagaggattttggggaggaggccgaagaggaggcatag

SEQ ID NO: 245535 - DNA, 1062 bp, synthetic construct
  misc_feature 1..1062: note = Description of Artificial Sequence: Synthetic coding sequence
  source 1..1062: mol_type = other DNA
atgcgggaaattgtccatatacaagctggccagtgcgggaaccagattggtgccaagttttgggaggtgatttcagacgagcatggcattgatcccactggcacctaccacggcgattccgacctgcagcttacacatagtctggggggtggcaccggcagcggtatggggaccctgttgatcagcaagattagggaggaatacccggacaggattatgaatactttcagcgttgtgcccagcccaaaggtatctgacaccgttgtggaaccctataacgcgacgctctcggtccaccagctcgtggaaaatacagacgaaacctattgtattgacaacgaggcactatacgatatttgctttcgtacactcaaactcactacgcctacatatggggatctcaatcacctggtgtccgccaccatgtctggggtgacaacatgcttgagattcccagggcaattgaacgctgatttgcggaaactggctgtgaacatggttcctttcccacgtctgcatttttttatgccagggttcgcccctctgacgtctcgtggttcacagcaatatcgcgcacttaccgtccctgagctgacacagcaggtgttcgatgctaaaaatatgatggccgcttgcgatccacgccacgggagatacctgaccgttgctgccgtgtttaggggcagaatgtccatgaaggaggtcgatgagcagatgctgaatgtgcaaaacaagaattcgagttatttcgtggagtggatccctaacaacgtaaagacagcagtgtgcgacatccccccacggggtctaaagatggcagtgaccttcatagggaattccacggctattcaggagctgttcaaacgcattagcgagcaatttaccgccatgttccgaagaaaggcctttctccattggtataccggtgaggggatggacgaaatggagttcaccgaggccgagtctaacatgaatgacctcgtttcggagtaccagcagtaccaagacgcaacggctgaggaagaggaggatttcggggaggaggctgaggaagaggcctag

SEQ ID NO: 245536 - DNA, 1281 bp, synthetic construct
  misc_feature 1..1281: note = Description of Artificial Sequence: Synthetic coding sequence
  source 1..1281: mol_type = other DNA
atgttctgggaagtgatttctgacgagcatggaattgatcccacagggacataccatggagattccgacttacagctggatcggattagtgtctattacaacgaggcaacaggtggaaaatacgtacctcgcgcaatactggttgacctggagcctgggaccatggactcagtccgctctggtcccttcgggcagatttttaggccagataattttgttttcggtcagtccggggctggcaacaattgggccaagggtcactatactgagggggcagaattagtagactctgtgctggatgtggtccgcaaggaagcggagagctgtgactgcctccaaggattccagctgactcattctctgggcggaggcacaggttctgggatggggaccctcctgatctccaagatccgggaggaatacccagatcggatcatgaatacatttagtgtcgtgccctcgccaaaagtcagcgacaccgtggtagagccctacaacgccacgctctccgtccaccaacttgtcgagaatactgatgagacatattgtatcgataatgaggcactgtacgatatttgtttccggaccttgaagctgaccaccccgacatacggcgacctaaatcatctggttagcgcaacaatgagcggagtaacaacttgcctacggttccctggacaattgaacgccgacttaagaaagctcgctgttaacatggtccccttcccacgtcttcacttcttcatgcccggatttgccccacttacgagccgcggtagccagcagtatcgcgcactcacagtcccagaactaacccaacaggtcttcgatgccaagaacatgatggctgcctgcgaccccagacatggcagatacctcacagtggctgccgtgttcaggggtcgaatgtcaatgaaggaggtcgacgagcagatgctgaatgttcaaaataagaatagcagctattttgtcgagtggatccctaacaatgtgaaaacggctgtgtgcgatatcccccctcgcggtctgaagatggccgttacttttattggaaattccacagccatacaggagctgtttaaacgcataagcgaacaattcacagctatgttccggagaaaggccttcttacactggtacaccggggagggaatggacgagatggaattcacagaggctgaaagcaacatgaatgatctagtgtcagagtatcagcaataccaggacgccacagcagaggaagaggaagacttcggcgaggaagccgaggaggaggcatag

SEQ ID NO: 245537 - DNA, 1119 bp, synthetic construct
  misc_feature 1..1119: note = Description of Artificial Sequence: Synthetic coding sequence
  source 1..1119: mol_type = other DNA
atggacagtgtgcgcagtggacctttcgggcaaatctttcgtccagataattttgttttcgggcagagcggagccggtaataattgggcaaagggccattatactgaaggggcagagctggttgacagtgtcctggacgtcgttcgaaaagaggcagaatcttgtgattgcctccaaggatttcaattgactcatagcctgggcggtggcacagggtctggtatgggtactctgctcatatctaagattcgcgaggaataccccgacaggatcatgaatactttcagcgtggtaccgagtcccaaggtgtccgatactgtggttgaaccctacaacgccaccctgtccgtgcatcagctggtagaaaacaccgacgagacttattgcatagataatgaagctctctatgacatatgcttccgcaccctaaagctgacaacacccacctacggagatctgaaccacctggtatccgccactatgagcggcgttactacctgtttacgctttcctggccaactaaacgccgaccttcggaaattggcagtaaacatggtaccattcccacggcttcacttcttcatgccaggtttcgcccctcttacctctcgcggaagtcaacagtatcgggctctgaccgttccagaactcacccagcaggtgttcgacgctaagaacatgatggcagcatgtgatccgaggcacggtagatacttaaccgtcgcagctgtcttcaggggaaggatgagtatgaaagaggtggacgagcaaatgctgaatgtgcagaacaagaattcttcatatttcgtggagtggattcccaataatgtgaagactgccgtttgcgacatacctccacggggtctgaaaatggctgtgacctttataggcaattcaacagcaattcaggagttattcaaacgaatttccgagcagttcacggctatgtttcgacgaaaagcatttctccactggtacacgggcgaaggaatggacgagatggagtttactgaagccgagtccaacatgaatgaccttgtcagcgagtatcaacagtaccaggacgccactgccgaggaggaggaggatttcggcgaggaggcagaggaagaggcttag

SEQ ID NO: 245538 - DNA, 1281 bp, synthetic construct
  misc_feature 1..1281: note = Description of Artificial Sequence: Synthetic coding sequence
  source 1..1281: mol_type = other DNA
atgttctgggaggtgatctcagatgagcacggcatagaccctactggtacctaccacggtgattccgacctgcaactggacagaatctccgtgtattataacgaagctactgggggaaaatatgtgccccgtgctatcttggtcgacctggagccaggcactatggactcagttcgcagcggtccctttggacagatttttaggcctgacaattttgtgttcgggcaatctggtgcgggaaataattgggccaagggtcactacacagagggtgcagagctggttgacagtgtcttggatgtggttagaaaagaagctgaaagctgcgattgtctacaaggatttcaactgacacactctctggggggaggcaccgggtcaggtatggggacccttctgatatccaagatcagagaagagtaccccgatcgcatcatgaatactttctccgtcgtgccatcaccaaaggtcagtgacacagtggtggagccctacaatgctactctgtcagtacatcaattggtggagaataccgacgagacatactgcatcgacaatgaggcattatatgacatttgctttaggacacttaaactcacaactcctacctatggcgaccttaatcacttggtaagcgctaccatgagtggagttacaacatgcctcaggttcccaggacagctgaacgcagatctaaggaagttggccgtcaacatggtgccatttccaaggctccacttctttatgcctggctttgccccacttacttcacgcggatcacagcagtatagggccctcacagtgcccgagttaactcagcaagtattcgatgctaagaatatgatggccgcttgtgaccctcgacatgggcgatacttgaccgttgccgctgtctttaggggcaggatgtctatgaaagaagtcgacgagcaaatgctaaacgtgcagaacaagaattcctcctatttcgttgagtggatccctaacaacgtgaagacagccgtctgcgatattccgccaagaggactgaagatggccgttaccttcatcggcaattctactgcaatccaggaattgtttaaacggatctccgaacagtttaccgctatgttccgacgcaaggcttttctgcactggtacactggggagggaatggacgaaatggaatttaccgaggcagaaagcaatatgaacgatttggtctccgagtatcagcagtatcaggacgctaccgctgaggaagaggaagacttcggcgaggaggcggaggaagaggcgtag

SEQ ID NO: 245539 - DNA, 1281 bp, synthetic construct
  misc_feature 1..1281: note = Description of Artificial Sequence: Synthetic coding sequence
  source 1..1281: mol_type = other DNA
atgttttgggaggtcatttccgacgaacacggaattgaccccactgggacatatcacggtgacagtgatttgcaactggaccgaatatcagtttactataacgaagctaccggtggcaagtacgtccctcgtgccattctggttgacttagaacctggaaccatggattctgtcagatccggtccattcggccagatatttcggcctgataactttgtgtttgggcagtcgggcgcaggcaacaattgggcaaaaggacactatacagaaggagccgaactggttgattccgtattggacgtcgtacgcaaagaagctgagtcctgcgattgtctgcaggggtttcagctgactcactctctaggaggagggacaggcagtggtatgggcacactgctgatatcgaaaatccgagaagagtaccctgatcgcattatgaacacattctccgtggtacccagccccaaagtctcggacactgttgtggaaccttacaacgcgacgttgagcgttcaccagcttgttgagaataccgacgagacatactgcattgacaacgaggctctctatgacatctgcttcagaactctgaagttaaccaccccaacctatggggacctaaatcacttggtttccgcaacaatgtctggggtgactacctgcctgaggttccccggacagctgaacgccgatttgagaaagctcgctgtaaacatggtgccgttcccacgccttcactttttcatgcctggcttcgcccctttgacatccagagggtcccagcagtaccgggctctgaccgtccccgagctgacgcagcaggtcttcgacgctaaaaacatgatggccgcatgcgatccacgtcatggcaggtacctgactgtggcagcagtctttcgtggaaggatgtctatgaaagaggtggacgagcagatgctcaatgtccagaacaagaactccagctatttcgttgaatggattcccaacaacgtaaagacagccgtctgcgatatcccaccacgcggtctcaagatggctgtgactttcataggcaatagtaccgctattcaggaactgtttaagaggatatccgagcagtttacagctatgttcagacgaaaagcattcctccattggtacaccggtgaaggcatggacgagatggagtttacagaagctgagtcaaatatgaacgatttagtctcagagtatcagcagtaccaggatgctacggcagaagaagaggaagatttcggtgaagaagctgaagaagaagcatag

SEQ ID NO: 245540 - DNA, 1119 bp, synthetic construct
  misc_feature 1..1119: note = Description of Artificial Sequence: Synthetic coding sequence
  source 1..1119: mol_type = other DNA
atggatagcgtgaggtcaggccctttcgggcagatcttccggcctgataactttgtgtttgggcagagtggggctggcaataactgggcaaaggggcactatacagaaggcgctgaacttgtggattctgttctggacgttgttcgcaaggaagctgagtcttgtgattgcctgcagggatttcagctcacacactctctagggggtggtacgggaagcgggatgggaaccctgctgatttcaaaaattagggaggaatatcctgacaggattatgaacactttttccgtcgtgccttcgcccaaagtgagtgacaccgtcgtggagccttacaatgcaacgttatcagtgcaccagctggtggagaacaccgacgagacctattgcatcgacaacgaagcattatacgacatctgcttccgaaccttgaaactgactactcctacatacggtgatctcaaccacctggtttccgcaacaatgagtggagtgaccacgtgtttgcgtttccccggtcagttgaacgcggacttaaggaaactggctgtgaacatggttccgtttccacgcctacactttttcatgcctggattcgcaccattaacttctcggggatcacagcagtatagagctttaaccgtgcctgaactgacacagcaagtgttcgatgccaagaacatgatggcggcttgtgatccgcgtcatggccgatacttgacagttgcagccgtgttcaggggaagaatgtccatgaaggaagtggatgaacagatgctgaacgttcagaacaaaaacagctcttacttcgtggagtggatacctaataatgtgaaaactgcagtttgcgacattccgcctaggggattgaagatggctgtgactttcattggcaatagtaccgcgatccaggagctgtttaagaggatcagtgaacagttcaccgctatgtttagaaggaaggccttcctgcattggtatacgggtgaaggaatggacgagatggaatttactgaagctgaaagtaacatgaatgatttggtttcagaataccagcagtaccaggacgccacagcagaagaagaagaggacttcggagaggaagccgaggaggaggcttag

SEQ ID NO: 245541 - DNA, 1335 bp, synthetic construct
  misc_feature 1..1335: note = Description of Artificial Sequence: Synthetic coding sequence
  source 1..1335: mol_type = other DNA
atgagagaaatcgtccacattcaagcaggacagtgtggcaatcaaattggcgctaagttttgggaggtcataagcgatgaacacgggattgaccccactggcacataccatggtgatagtgatctccagcttgatcggattagcgtttactataatgaggctaccggcggaaagtacgttcccagggctatccttgtggacctcgagcctggcaccatggattctgtgcggagtggcccttttggccagatatttagacccgataacttcgtattcggccagagcggggctggtaacaactgggccaagggccattacacggagggtgctgagctcgtggactccgtgttggatgttgtacgcaaagaagcagaaagttgtgactgcctccaaggatttcagctcacacacagcttgggcggaggcacaggctctggcatgggcactctgctgattagtaaaattcgggaagagtaccctgatcggataatgaatactttttccgtagtgcccagccctaaggtgagcgacacagtggtagagccttataatgcaacactttctgtacatcagcttgtggagaacactgacgagacatactgcatagataacgaagctctgtatgatatatgctttcgtaccctcaagctgaccacaccgacgtacggagatctgaaccacctcgtatcagcaaccatgagcggcgtcacaacgtgtctccggtttcctggccagctcaacgccgatcttcggaaactggccgtgaatatggtgcctttccctcgcctacattttttcatgcccggattcgccccactgacctcgaggggtagccagcagtatcgcgctctgactgtaccagaattgacacagcaggttttcgacgctaagaatatgatggcggcatgtgaccctaggcacgggagatacctgactgtggccgcagtttttagagggcgtatgagcatgaaggaagtagacgagcagatgttaaatgtgcagaataagaatagctcctattttgtggagtggattcctaataatgtcaagactgctgtgtgcgatatacccccacgcggattgaagatggcagtgaccttcatcgggaactctacagcaattcaggagctgttcaagagaattagtgagcaatttacggccatgttcaggcggaaagccttcctgcactggtacaccggagagggcatggacgagatggaattcaccgaggcagagtcaaatatgaacgacctcgtgagcgaataccaacaatatcaggacgcaaccgccgaggaggaagaggatttcggagaggaagcggaagaggaggcatag

SEQ ID NO: 245542 - DNA, 732 bp, synthetic construct
  misc_feature 1..732: note = Description of Artificial Sequence: Synthetic coding sequence
  source 1..732: mol_type = other DNA
atgcgcgagattgtgcatattcaagccggacagtgtggaaatcagatcggcgcaaagttttgggaggtgatctccgacgaacatggcatcgaccctacaggtacctatcatggggatagtgacctgcagctcgaccgtatttcggtgtactataatgaggccaccggaggaaagtacgtcccaagggcaattctagtggatcttgagcccggaaccatggactccgtccgctcggggccttttggacaaattttccgaccagacaactttgtgttcgggcagtctggtgctggtaataattgggcaaaaggccactacacggaaggggcagaactggtggattctgtgctggacgtggtcaggaaagaggaggtggatgagcagatgcttaacgtccaaaacaagaactccagttactttgtggaatggatacctaataatgttaagaccgctgtgtgtgacattccacctagagggctgaaaatggccgtaacctttatcggaaactcaaccgccattcaggaactgttcaagaggatcagcgaacagtttaccgccatgttcagaagaaaggctttcctgcattggtatacaggggaaggaatggacgagatggaattcacagaggccgagtcaaacatgaacgatctggtgtcagagtatcagcagtaccaggatgctactgccgaggaggaggaggactttggggaggaggctgaagaggaggcttag

SEQ ID NO: 245543 - DNA, 1119 bp, synthetic construct
  misc_feature 1..1119: note = Description of Artificial Sequence: Synthetic coding sequence
  source 1..1119: mol_type = other DNA
atggattctgtgagaagcggacctttcggccagattttccggccagataactttgttttcgggcaaagcggcgctgggaataactgggctaaaggccactacaccgaaggcgctgagctggtggacagcgtcttggatgtggttcggaaggaggccgagtcctgtgattgtctgcaaggcttccaattaacccactcactcgggggaggaacagggtcaggtatggggaccctgttgatctctaagattcgtgaagagtaccccgaccgcatcatgaacactttctcagttgtgcccagcccaaaggtttccgacactgtggttgagccctacaacgctacactcagcgtccatcagctcgtcgaaaacactgatgagacctactgtatcgataacgaagctctctacgatatctgcttcagaactctcaagcttactacaccaacatacggagacctcaaccatttagtctccgctacaatgtctggagtgacaacatgcctgcgcttccctggccaactgaatgcagaccttaggaaactcgccgtgaacatggtgcctttccctcgccttcatttcttcatgcctggcttcgctccactcaccagccggggaagtcaacagtatagagcactgacggttcctgagctcactcaacaagtttttgacgcaaaaaatatgatggcagcctgcgatccaagacacggtcgttaccttaccgtcgcagctgtcttcagaggtcggatgtctatgaaagaagtcgatgagcagatgttgaatgtccagaacaaaaacagctcatactttgtcgagtggatcccaaataacgtgaagaccgccgtttgtgacatccccccaaggggcctgaaaatggccgtgaccttcatcggtaattccaccgcaattcaggaacttttcaaacgcattagtgaacagttcactgccatgtttagacgaaaggcctttctgcactggtataccggcgagggcatggatgagatggagttcacagaggcagagtcaaatatgaacgatctcgtctccgaatatcagcagtaccaagacgccaccgcagaagaagaggaggatttcggggaggaggcggaagaagaggcgtag

SEQ ID NO: 245544 - DNA, 1119 bp, synthetic construct
  misc_feature 1..1119: note = Description of Artificial Sequence: Synthetic coding sequence
  source 1..1119: mol_type = other DNA
atggacagtgttcgatccgggccttttgggcagatttttagacccgacaactttgtcttcggtcagtcaggcgctggtaataactgggctaagggacattacactgagggagcggagcttgtcgactcggttctcgacgtggtcagaaaagaggccgagagctgcgattgcctgcagggtttccaactgacccactccctgggcggaggaactggctctggcatgggaacgcttctcatctctaagatcagggaggagtacccagacagaatcatgaataccttctccgtagtgccctctcccaaggtgtcggatacagtcgtggagccatacaacgctacactgtcagtccatcagctcgttgagaataccgatgagacatactgtatcgataatgaggcactgtacgatatctgcttcaggaccctgaagctgactacgccaacatatggggacctgaatcatctcgtctccgctactatgagtggtgtcaccacctgcttgcgctttcccggtcagctgaatgctgatctgagaaagttagcggtgaacatggtgcctttccctagattgcacttttttatgcccggattcgcacccttgacctctcgcggttcacagcagtaccgggctctgaccgtgccggagctgacacagcaggtcttcgacgctaagaacatgatggcagcatgtgacccgaggcatgggaggtaccttaccgttgctgccgttttccgtggcagaatgtctatgaaagaagtagatgagcagatgttgaacgtacagaacaaaaattctagctacttcgtggagtggatcccaaacaacgttaagacagcagtgtgcgatattccaccaagaggattaaagatggctgtgacttttattggcaactccacagcaattcaagagctcttcaagcgcatctccgagcagtttaccgccatgtttaggagaaaggctttcttgcactggtatacaggagaaggaatggacgagatggaatttactgaggccgaatccaatatgaatgatctggtgtcagagtaccagcagtaccaagacgctaccgcggaggaagaggaagactttggagaagaggccgaggaggaggcatag

SEQ ID NO: 245545 - DNA, 1335 bp, synthetic construct
  misc_feature 1..1335: note = Description of Artificial Sequence: Synthetic coding sequence
  source 1..1335: mol_type = other DNA
atgcgtgagattgtgcacatccaagccggtcagtgtggaaatcagattggtgcgaagttctgggaggtcatctccgacgagcacggcatcgatcctaccgggacatatcacggtgacagcgatctccagttggataggatcagcgtctattataacgaagcgacgggtggaaagtacgtgccgcgtgcaatattggtggatctcgaaccaggcacgatggacagtgtacgtagcggtcccttcggtcagattttcagacctgacaacttcgtgttcggtcagtccggagccggaaataactgggcaaagggccactacacagaaggagccgagctggtagatagcgtcctcgatgttgttcggaaggaagctgagagttgtgattgcctccagggcttccagcttacccattctcttgggggagggaccggctccggtatgggaaccctcctgatttctaagatcagggaggaatatcccgacagaatcatgaacactttttctgtcgttccgtcaccgaaggtgtctgatacggtggtggaaccatacaacgcgacactttccgtccaccagctagtggaaaataccgacgagacctattgtatcgacaatgaggcgttgtacgacatttgcttccggactctaaaactcacgaccccaacatacggggacttgaatcatctggtgagcgcaacaatgtcgggcgtgacgacttgcctgcggttccctggccagctgaacgcggatctaagaaagcttgcagtaaatatggtgccttttccacggcttcatttttttatgccaggattcgctccattgacctccagaggtagtcaacagtaccgggctctgaccgtgccagagcttactcaacaggtttttgatgctaagaatatgatggcggcatgtgacccaaggcatgggaggtacctgactgtggctgccgtctttagaggtagaatgtctatgaaagaggttgacgaacagatgttgaacgtgcagaacaaaaattctagttattttgttgaatggatcccgaacaatgttaagactgccgtctgtgacataccaccacggggacttaaaatggccgtgactttcatcgggaatagtacggccatacaagagcttttcaagcgcatcagcgaacaattcaccgccatgtttcggagaaaggcctttcttcattggtacacaggggagggtatggatgagatggagtttacagaagctgagagcaacatgaatgatctggtttcagagtatcaacagtatcaagacgccaccgccgaagaagaggaggactttggagaggaggccgaagaggaagcttag

SEQ ID NO: 245546 - DNA, 1119 bp, synthetic construct
  misc_feature 1..1119: note = Description of Artificial Sequence: Synthetic coding sequence
  source 1..1119: mol_type = other DNA
atggatagtgttcgaagtggtccgtttggacagatttttaggcctgacaacttcgtctttggccagtctggcgcagggaacaactgggccaagggtcactacactgagggtgcagagctcgtggacagtgtcttagatgtcgtccggaaggaagcagaatcctgcgattgccttcaggggttccagcttacccatagtctgggtgggggaactggctctggaatgggtactctgcttatttctaaaattagggaggagtaccctgaccgcattatgaacaccttctccgtggttccgtcccccaaggtctccgacaccgtggttgagccttacaacgctactttgtcagtgcaccagctggttgagaataccgacgaaacctattgtatagacaacgaggcattgtatgatatctgttttcgcacactcaaactgactactcctacatatggtgacctcaatcacctggtgtccgccacaatgagtggcgtgacaacctgcttgagatttccgggacaactcaacgccgacctgaggaagctagcagtgaacatggttcctttcccaagattgcatttctttatgccgggttttgccccactgaccagtcgcggatcgcagcagtacagggcactgacagttcccgagctaacccagcaagtgtttgatgcaaagaatatgatggcggcatgcgaccccaggcatgggagataccttactgtggctgctgtatttagaggtagaatgtcgatgaaggaagtggatgagcagatgctcaacgtccagaacaaaaacagctcatacttcgtagagtggattccaaacaacgtgaaaacagccgtctgcgatatcccccctcggggtttaaaaatggctgtgacattcattggcaacagcacagcaatccaagaactgttcaagcgtattagcgagcagttcacagccatgttcaggcgtaaagcttttctgcattggtatacaggagagggaatggatgagatggaatttactgaagccgagtccaacatgaacgatcttgtgagcgagtaccagcagtaccaagatgccacagccgaagaggaagaagacttcggagaggaagcagaagaggaggcttag

SEQ ID NO: 245547 - DNA, 1119 bp, synthetic construct
  misc_feature 1..1119: note = Description of Artificial Sequence: Synthetic coding sequence
  source 1..1119: mol_type = other DNA
atggacagcgtgaggtccgggccttttggacaaatttttaggcctgataacttcgtcttcggccagtcaggtgccggtaacaactgggctaaaggtcactatacagagggcgcagagttggttgattccgttctggacgttgtgcgaaaggaagccgaatcctgtgactgcttacagggcttccagctcacacatagccttggcggtgggacaggaagcgggatgggaactcttctgatttccaagatacgtgaggaatatcccgacagaatcatgaatacttttagcgttgtgccatcaccgaaggtgagcgacacagtggtagagccatacaatgccaccctgagtgtgcaccagctggtcgaaaacactgatgaaacctactgcatagacaacgaggctttatatgatatatgcttccgcactctcaaattaaccacgcctacttatggggacctgaaccatcttgtgtctgcgacgatgagcggagttaccacctgcctgcgtttccccggtcagctgaacgccgatcttcgaaagcttgctgtgaatatggttcctttcccgcgtctgcatttctttatgcccggtttcgcccctctgacctcccggggaagtcaacagtaccgagcattaactgtcccggaattaacccagcaggtgttcgatgccaaaaatatgatggctgcttgtgatcctaggcatgggaggtacttaacggtggcggcagttttccgcggaaggatgtccatgaaagaagtggatgagcagatgttaaatgttcagaataagaacagttcttatttcgttgagtggattccgaacaacgttaagaccgcggtttgtgatattcctccgagaggcctgaagatggccgtgacattcatcggcaactcgaccgctatacaagagctgttcaagaggatcagcgagcagtttaccgctatgtttagacggaaagccttcttgcactggtacaccggggaagggatggatgagatggagttcacagaggcggagagcaacatgaatgatttagtatccgaataccagcagtatcaggatgcaacggccgaggaagaagaagacttcggagaagaagcagaagaggaggcgtag

SEQ ID NO: 245548 - DNA, 1119 bp, synthetic construct
  misc_feature 1..1119: note = Description of Artificial Sequence: Synthetic coding sequence
  source 1..1119: mol_type = other DNA
atggattccgttcgatcgggaccattcggccagattttcaggcccgacaattttgtttttgggcagtcaggcgcagggaacaattgggctaagggtcactataccgaaggcgcagagctggtggacagtgtgctggacgtggtacggaaggaggctgagtcctgcgattgtttgcagggattccagctgacccacagtctaggcggtgggacggggagtggcatgggaacactactgatcagtaagattcgggaggaatatcccgacagaatcatgaacacctttagcgtggtgcctagtcccaaggttagtgacacggtagtagagccgtataatgctacactgtctgtccaccagcttgtcgagaacactgacgaaacatattgtattgataatgaagctctgtacgatatttgcttccgcactcttaaactgaccacccccacttacggagaccttaatcacctggtctcagcaaccatgagcggagttaccacatgcctccgtttccccggacagttaaatgccgacctgcgaaagctggctgttaacatggtgcctttcccacgcttgcatttctttatgccagggttcgcacctctgacttcccggggaagtcagcagtatcgggctctgaccgtcccggagttgactcagcaggtgtttgatgccaaaaatatgatggcagcatgtgacccccgacacgggcgttacctcacagtcgctgctgtgtttaggggtaggatgtccatgaaggaggtggatgaacaaatgttgaatgttcagaacaaaaacagctcctacttcgttgagtggataccaaacaacgtgaaaaccgcagtatgtgacatccctccaagagggctgaaaatggcagtcacctttatcggcaatagcaccgccatccaggagctcttcaagcgcataagcgaacagttcacggcaatgttccggagaaaggcttttctgcactggtacactggcgagggtatggatgagatggagttcactgaggccgagtctaatatgaacgacctggtttccgaatatcaacagtaccaggatgcaaccgcggaagaagaggaagactttggagaagaggcggaggaggaggcctag

SEQ ID NO: 245549 - DNA, 1119 bp, synthetic construct
  misc_feature 1..1119: note = Description of Artificial Sequence: Synthetic coding sequence
  source 1..1119: mol_type = other DNA
atggattcggtgcggtccgggcctttcggtcagatctttcgccctgacaacttcgtgttcgggcagtccggcgctggaaacaactgggctaagggccattatacagagggagcagagttggtcgactccgtcctggacgtggtccggaaggaggctgaaagctgcgattgtttacaggggtttcagcttacccattcccttggaggcggaacaggcagtggaatgggtacacttctgattagcaagatcagagaagaatacccagatcgaataatgaacacatttagtgttgtgccttcaccaaaggtctctgatacagttgttgagccctacaatgctacattaagtgtccaccagttagtggaaaacaccgacgagacttactgtatcgacaatgaagctctgtacgatatttgtttcaggacactcaagctgactactcctacctatggcgacctcaaccatctggtcagcgcaacaatgagcggagtcacaacctgcttacgcttcccgggacagctgaatgcagacctaagaaagctggctgtgaacatggtgccgttcccaagactgcacttctttatgccgggtttcgccccactcacctctcggggttcccaacagtacagggccctgacggtgcccgagctgacacagcaggtcttcgacgctaagaatatgatggcggcttgtgacccccgtcatggacgatacctgactgtggctgcagtgttccggggaagaatgagtatgaaagaagtggatgagcagatgttgaatgtccagaataaaaattctagctactttgtggaatggatccccaataacgtgaagacagctgtgtgtgatattcccccaaggggcctgaaaatggctgtgacttttattggtaactccactgccatccaggaattattcaagagaatatcagaacagtttaccgctatgttccgacgcaaggccttccttcactggtacaccggagaaggcatggatgaaatggagttcacagaggcagaatcaaacatgaacgatctggttagtgagtatcagcagtaccaggatgctaccgccgaagaggaggaagattttggtgaagaagctgaggaggaggcttag

SEQ ID NO: 245550 - DNA, 1119 bp, synthetic construct
  misc_feature 1..1119: note = Description of Artificial Sequence: Synthetic coding sequence
  source 1..1119: mol_type = other DNA
atggacagcgttcggagtggtccgttcgggcagatctttcgccctgataattttgtattcgggcagtccggagccggaaacaactgggcgaaaggacactataccgagggcgctgagcttgtggactctgtcctggatgtggtgcgtaaggaagccgaatcttgtgattgcctgcagggctttcagctcacacactccctcggaggtggcacaggtagcggtatgggaaccttactaatttctaagatacgggaggagtaccctgatagaataatgaataccttcagcgtcgtgcccagtccaaaggtgtccgacactgtcgtggagccttacaacgctacactatccgttcatcagttagtcgagaatacagacgagacatattgcattgataatgaggcgctttatgatatttgctttcggacactgaagctgactacccctacctacggagatctaaaccacctggtgtcagccactatgagcggcgtgaccacatgcctgcgatttcccggtcagctgaacgctgacttaaggaaactggcagtgaacatggtgccattcccacgattgcatttctttatgccgggattcgctcctttaacaagccgtggaagtcagcagtatagagcacttaccgtaccggaactcacacagcaagttttcgatgccaagaacatgatggccgcttgcgacccccgacacgggagatacctcactgtggcggcagtcttcagaggtagaatgtctatgaaagaggtggatgaacagatgctgaacgtacaaaacaaaaacagctcatacttcgtcgagtggattcccaacaatgttaaaaccgctgtttgtgacatacctcctcgaggattgaagatggccgtgacctttatcgggaattctaccgcaattcaggagctgttcaaacggatctcagagcagttcactgcaatgtttcggagaaaagctttcttgcactggtataccggtgaaggcatggacgagatggaatttacagaagccgaaagcaacatgaacgaccttgtcagcgaataccagcagtatcaagacgcgactgctgaggaagaggaggacttcggagaagaagccgaagaagaagcctag

SEQ ID NO: 245551 - DNA, 1119 bp, synthetic construct
  misc_feature 1..1119: note = Description of Artificial Sequence: Synthetic coding sequence
  source 1..1119: mol_type = other DNA
atggattctgtcaggtcagggccattcggacaaatcttccgcccagataattttgtgttcggacagagcggcgctggcaacaattgggcgaagggacattacaccgagggagctgagttagtggattcagtcctggacgtcgtacgcaaggaggcagaaagctgcgactgtctgcagggcttccagctcacccattccctaggcggaggaacaggttctgggatggggactttgttgatctccaagatcagggaagagtaccccgatagaatcatgaacactttctcggtggtgccctctcctaaggtcagcgataccgtggttgaaccttataatgccaccctgtccgtccatcagctcgtggagaacaccgatgagacatactgcattgacaatgaggccctctacgatatctgtttccggacactcaaattaactactcccacttacggagacttgaaccacctggttagcgctacaatgtccggggttaccacgtgtctgcgattcccaggacagctgaacgcagatctgcggaaactcgcagtcaacatggtgccgtttcccaggttacacttttttatgccaggatttgccccattgacatctcggggaagccagcagtatagggcactaacagtcccggaactgacgcagcaggtattcgacgccaagaatatgatggctgcttgcgatcccagacatggcagatatctgaccgtcgctgctgtattccgaggtcggatgagcatgaaggaggtcgacgagcagatgctgaacgttcaaaataaaaatagttcatactttgtagagtggatcccaaacaacgtaaaaacagcagtttgcgatataccaccgaggggcctcaagatggccgtaacttttattggcaacagcactgccatccaggagctcttcaagaggatttccgaacagtttactgcgatgtttcgccgaaaggcgttcctgcattggtacaccggtgagggcatggatgagatggagttcaccgaagcagagtctaatatgaacgacctggtaagtgagtaccaacagtatcaggatgctactgctgaagaagaggaggacttcggcgaagaggccgaagaggaagcctag

SEQ ID NO: 245552 - DNA, 624 bp, synthetic construct
  misc_feature 1..624: note = Description of Artificial Sequence: Synthetic coding sequence
  source 1..624: mol_type = other DNA
atgggcacactgctcatatccaaaatccgcgaagaatatccggatcgcattatgaatacattttcagtggttccatcgccaaaggtcagtgacacagtcgtggagccgtataatgctacgctctcagttcatcagctggtggaaaataccgatgaaacttactgcattgacaacgaggccctatacgacatctgcttcaggacactaaaattgaccactccaacttacggcgacttgaaccaccttgtcagtgccaccatgagtggcgtgacaacgtgcctgaggttccctgggcagctgaatgccgacctgagaaagttggctgtgaacatggtgccgttcccacgccttcacttttttatgcctgggttcgcccctctgacttcgcggggttcccaacagtaccgcgcactgactgtgcccgaacttacccagcaggtttttgatgcaaagaatatgatggctgcctgtgatccccgtcatggcagatacctgactgtggctgccgtgttcagaggaagaatgtcaatgaaagaggtcgacgagcaaatgcttaacgttcagaataagaatagtagttatttcgtcgaatggcctcaacagtgccaggactcccgactatag

SEQ ID NO: 245553 - DNA, 1248 bp, synthetic construct
  misc_feature 1..1248: note = Description of Artificial Sequence: Synthetic coding sequence
  source 1..1248: mol_type = other DNA
atgagggaaatcgtccatatccaggcaggccagtgcggcaatcagataggcgcaaaattttgggaagttataagtgacgaacacgggatagaccctaccggcacctatcacggcgattcagatttacagctggataggatctccgtctattataacgaagccaccggaggaaaatatgttccaagagccatactggtggatcttgaacccggtacgatggattccgtgcgttcagggccattcgggcagattttcaggccggataacttcgtttttgggcagtccggcgctggaaacaattgcctgcaaggctttcaattgacgcattcgcttggtggaggaaccggcagcggtatgggcacgctgctcatttcaaaaatacgagaagagtaccccgatcggataatgaatacgttctcagtggtgcccagccccaaggtcagcgatactgtggtcgaaccatataacgctactctcagtgtgcatcagctggtggagaacaccgacgagacgtactgtattgataatgaagccctctacgacatatgcttcagaacactcaaactgacaacccctacctatggtgacttgaaccacttggtgtccgccaccatgtccggcgtaactacctgtctgagatttcccggtcaactcaatgccgatctcagaaaactggcagttaacatggtgcctttcccacggctgcatttcttcatgccaggctttgcacctctaacctctcgcggatctcagcagtacagggcactcacagttcccgagctgacccaacaagtgtttgatgcgaaaaacatgatggcagcatgcgatcccagacatggaaggtacctgaccgtggctgctgttttccgcggaaggatgagcatgaaagaggtggatgaacagatgctcaatgtgcaaaacaaaaattctagctattttgtggaatggattccaaataatgttaagacagcggtgtgtgatatacccccacgcggactgaagatggccgtgacgtttatcggaaactcaacagccatacaggagctgttcaaacgcatctcagagcagttcactgccatgtttagacgcaaggcctttttacactggtatactggggaggggatggacgagatggagttcacggaggcagaatccaacatgaatgacctcgtgtccgaatatcagcagtaccaggatgctactgccgaagaggaggaagactttggtgaggaggcagaggaagagtag

SEQ ID NO: 245554 - DNA, 1062 bp, synthetic construct
  misc_feature 1..1062: note = Description of Artificial Sequence: Synthetic coding sequence
  source 1..1062: mol_type = other DNA
atgcgcgagattgtgcacatacaggcgggtcagtgtggcaatcagatcggcgcaaaattttgggaggtgattagcgatgaacatggcatcgaccccacaggaacataccacggcgattccgacttgcagctgacccattcccttgggggaggcactggcagcgggatgggcacccttcttatcagcaagatcagagaagaatatccagatcgcatcatgaatacattttcagttgttccatcacctaaggtcagcgacactgtggtcgagccctataacgccacactctctgtccaccagctggtggagaatacggatgagacatactgtatagacaatgaggcactgtacgacatatgttttaggaccttaaaacttacaacgcctacctacggggaccttaaccatttggtgtctgccactatgtctggtgtcacaacctgcttgcggttccctggccagctgaacgccgacctccggaaactggcagtgaacatggttccttttcccagacttcacttttttatgcccggattcgccccactgacctccaggggctctcagcaataccgggctctgacagtgccggagcttacacaacaggttttcgatgcaaagaatatgatggcagcctgcgatccgaggcatgggcgatacctgactgtagccgctgtgtttcggggaaggatgtcaatgaaagaagtggacgagcagatgcttaacgtgcagaacaagaatagttcatattttgtcgagtggatcccaaataatgtaaagacagccgtgtgtgatatcccccctcggggactaaaaatggccgtgacctttatcggcaactctacggcaatacaggagctgtttaagagaatttctgagcaatttacagccatgtttagaaggaaagcctttctccactggtacacgggggagggtatggacgagatggagttcacagaagctgaatcgaatatgaatgatctggtaagtgagtatcagcaataccaggatgccactgccgaagaggaggaagacttcggagaggaggcagaagaggaggcatag

SEQ ID NO: 245555 - DNA, 1062 bp, synthetic construct
  misc_feature 1..1062: note = Description of Artificial Sequence: Synthetic coding sequence
  source 1..1062: mol_type = other DNA
atgcgtgagatcgttcacatccaggctggccagtgcggcaatcagattggagccaaattctgggaagtgattagtgatgagcacgggatcgaccctactggtacataccatggtgactccgacctgcaactgacgcacagccttgggggtggaactggcagtggtatggggacacttctaatcagcaaaattagagaagagtatcccgaccgaataatgaacacatttagcgtggtgccaagtcccaaggtttctgatacagtggtggagccatataacgctactctcagcgtgcatcagctggttgaaaacacagacgagacctattgcatcgataatgaggcactctatgatatttgctttcgtacgctcaagctaacaacaccaacatacggggatttgaaccaccttgtgtcagccacaatgagtggagtgactacttgcctgagatttccaggacagcttaacgccgacctgcggaagctggccgtgaacatggtccccttccccaggcttcacttttttatgccgggattcgctccgctcactagtagggggagccagcagtatcgggcactcacagtgccggagctgacccagcaggttttcgatgccaaaaatatgatggccgcttgcgatcccaggcacggtcgctacctgacagttgcagccgtgtttaggggccgaatgtcaatgaaggaagtggacgaacagatgcttaatgtccaaaacaaaaatagctcgtattttgtcgaatggatccctaataatgtgaaaactgcagtctgtgacatccctcctcgtggcctcaaaatggccgtcacatttattggcaatagcaccgccattcaggagctgtttaagcgcatctctgaacagttcacggccatgtttcggagaaaggcttttctacattggtacacaggagagggcatggacgagatggagtttacagaagctgagtccaatatgaatgacctggtgtccgagtaccaacaatatcaggacgcaacggctgaggaagaggaagatttcggggaagaagccgaggaagaggcctag

SEQ ID NO: 245556 - DNA, 1308 bp, synthetic construct
  misc_feature 1..1308: note = Description of Artificial Sequence: Synthetic coding sequence
  source 1..1308: mol_type = other DNA
atgcgcgaaattgttcatatccaggccggtcagtgtggtaatcagattggcgctaagttttgggaagtgatatcggatgagcacggcatcgatccaaccggcacctaccacggtgattcagaccttcaattggaccgcattagcgtgtactacaatgaagccacgggtggaaagtatgtccctcgggctattctagttgatctggagcctggcacaatggattccgtcagaagtggcccattcgggcagattttccggcctgacaacttcgtctttggccagtccggtgctgggaataattgggcaaagggtcactacacagagggagccgagttggttgatagcgttctcgacgtagttagaaaggaggcagagagttgtgactgtcttcaggggttccagctgacccacagtctaggtggcggtacgggcagtggcatgggcacgctcttaatctccaagatccgtgaggagtatcccgaccggatcatgaatacgttcagtgtggttcctagccccaaggtcagtgacaccgtagtggaaccttacaatgcaaccctctccgtccaccagctggttgagaataccgatgaaacttactgtatcgacaacgaagcattgtatgatatctgctttagaacactgaaacttacaactccaacctatggggatctcaaccacctcgtctctgcaaccatgtcaggcgtgactacatgccttcggttcccagggcagctgaacgcagatctgcggaagctagccgttaatatggtgcccttccccaggctgcacttctttatgcccggtttcgctccacttacctcacggggttctcagcagtacagggctctgacagttcctgaactcacccagcaagttttcgacgccaagaatatgatggccgcatgcgacccacgccacggccgttacctgaccgtagccgctgtgttccgcggacggatgtctatgaaagaagtcgatgaacagatgctgaatgtgcagaacaagaacagctcatatttcgtcgaatggatcccaaataatgttaaaaccgctgtgtgtgacattccgccacgtggtctgaagatggccgtgacttttatcggcaactccaccgcaatccaagaactcttcaaacgcatcagcgaacagtttacggccatgttccgtagaaaggcctttctgcattggtacacgggcgaagggatggatgaaatggagttcaccgaggccgaatccaatatgaatgacctggtcagtgaataccaacagtatcaggatgctaccgccgagggcggtggcctttag

SEQ ID NO: 245557 - DNA, 1308 bp, synthetic construct
  misc_feature 1..1308: note = Description of Artificial Sequence: Synthetic coding sequence
  source 1..1308: mol_type = other DNA
atgcgcgaaattgtgcatattcaggcaggccagtgcggaaatcaaatcggagccaagttttgggaggtaattagcgacgagcacgggatcgaccccaccggtacataccatggcgattccgatctgcagctggataggatatcagtatactacaatgaggccactggtggtaagtatgtgccacgagccatccttgtggaccttgagcccggtacgatggactctgtacgctcgggcccattcgggcagatatttcgccctgacaattttgtgtttggacagagtggagccggaaataactgggctaaagggcactatacagaaggcgctgaacttgttgattccgtcctcgatgtagtgcgaaaagaagcagaaagctgtgattgcctgcaggggtttcagctgacacactctttaggtggcggaaccgggagtggaatgggaacattgcttatctccaaaatccgtgaagagtaccccgatagaattatgaacaccttcagcgtcgtgccctcccctaaggtgtccgacactgttgtggaaccctataacgctacgcttagcgtccatcaactcgtggaaaacactgacgaaacgtactgcattgacaatgaagcactgtacgatatctgctttcggactctcaaactgaccactccaacctacggcgatctgaaccacttggtttcagccacaatgtcaggcgtaaccacttgtctaagattcccaggccagcttaacgcggacttgcggaagcttgcggtaaacatggtccctttcccaaggctacacttttttatgcccggattcgcgccactcaccagccggggatcacagcagtaccgtgccctgaccgtgcccgagctaacccagcaggtgtttgacgcaaagaacatgatggctgcttgtgacccaaggcatggtcgctatctcacagtcgccgcagtttttcgcggtcgtatgtctatgaaggaagtggacgagcagatgctcaacgtccagaacaagaacagctcctattttgttgagtggattcctaataacgtgaagacagctgtgtgtgacatacctccaagaggcctgaagatggccgtgacattcattggaaacagcacagcaattcaggagctcttcaagcggatctcagagcagtttacggctatgtttcgtcggaaggccttcctccattggtacacaggggagggcatggatgagatggaattcactgaggcggagtctaatatgaacgacctggtctctgaataccagcagtaccaggatgcaactgcagaagggggtggtctgtag

SEQ ID NO: 245558 - DNA, 1308 bp, synthetic construct
  misc_feature 1..1308: note = Description of Artificial Sequence: Synthetic coding sequence
  source 1..1308: mol_type = other DNA
atgcgggagattgtgcacattcaggctggccagtgcggcaatcagatcggcgcaaaattttgggaagtgatttctgatgagcacggcattgatcctaccggtacttaccacggtgacagcgatctgcagcttgatcgcatctcggtgtattataacgaggctaccggcggtaagtatgttcccagggcaatcctggtggacctggaacccggaaccatggacagcgtcagatccggtcccttcggtcagatttttagacctgataatttcgtgtttggtcagagcggcgctggaaataactgggccaagggccattatactgaaggagccgagctggtagactcggttctggacgtggtgcgaaaggaagccgaaagctgcgattgtttgcagggttttcagttaactcacagtctaggcggaggcacgggtagtgggatgggaactctcctaatttcaaagataagggaggagtatcccgataggatcatgaatacgtttagcgtggtccccagtcccaaagtgtctgacactgtggtggagccctacaacgcgacactgtctgtgcatcaactggtggagaatactgacgagacatactgtatcgataacgaggccctatacgatatatgtttccgaacactaaaactgactacccccacatacggcgacctcaatcacctggtctcggctaccatgtcaggggtgacgacttgtctgaggtttcctggccagctgaacgctgatctacgcaagttggccgttaacatggttccgttcccacgactgcacttctttatgcccggattcgcccctctgacatctaggggcagtcaacagtatagggccctgacggttccggagcttacacaacaggtgtttgatgccaaaaacatgatggctgcgtgcgaccctaggcacggcaggtacctcactgtagctgctgtcttcagaggacgcatgtccatgaaggaagtcgatgagcagatgctgaacgtacaaaacaagaacagctcctactttgtggaatggatccccaataacgtcaaaaccgccgtgtgtgacattccacctcgaggtctgaaaatggctgtcacgttcattgggaattccaccgccattcaggaactctttaagagaatatccgagcagttcactgccatgttcagaaggaaggctttccttcactggtatacaggagaagggatggacgagatggaattcacagaagcagagagcaacatgaatgatctggtgagtgagtatcaacagtaccaggacgctactgccgagggaggagggctgtag

SEQ ID NO: 245559 - DNA, 1248 bp, synthetic construct
  misc_feature 1..1248: note = Description of Artificial Sequence: Synthetic coding sequence
  source 1..1248: mol_type = other DNA
atgcgcgagatcgtgcacattcaagccggtcaatgcgggaatcaaatcggtgccaaattctgggaggtgatctctgatgaacatgggattgatccgactggcacttaccatggcgactcagatctgcagctggatcgcatctcagtttactacaatgaagccactggcggaaagtacgtccctcgggctatattagtagacttggaacccggaaccatggacagcgtgcgatctggtccgtttggacaaatcttccggccagacaattttgtctttggtcagtcaggcgctggcaacaactgcctgcagggcttccagcttacccatagcctcggtgggggtactggatcagggatggggaccctcctcatttcaaaaatccgagaagagtatcccgatcgaataatgaacaccttctctgtcgttcccagcccaaaagtatcggatacagtggtagaaccttataacgctacattgagcgtccatcagttggtcgaaaatactgatgagacctattgtattgataacgaggcactctatgatatatgttttagaactcttaaattgacgacaccgacttatggggatctgaatcatctcgtgtcggccaccatgagcggcgtgaccacctgcctgcggtttcccggtcagttgaacgcagacttgcgtaaactggccgtgaatatggtgccatttccgcgtttgcatttcttcatgcctgggttcgctcctcttactagcagggggtcgcagcagtacagggccttgactgtgcctgagctcacacaacaggtgtttgacgctaaaaatatgatggctgcgtgcgatcccaggcacggccgatacctaactgtggcagcagtgttcaggggcaggatgtcaatgaaagaggtcgatgaacaaatgctgaacgtgcagaataagaattcctcatactttgtggaatggatcccgaacaatgtcaagaccgcggtgtgcgatatcccacctcgaggcctcaagatggcggtaactttcataggaaatagtacagccatacaggaactctttaagcgcattagcgaacaatttaccgccatgttccgcaggaaggcgtttctgcattggtacacaggagaggggatggacgaaatggagtttactgaggccgaatctaacatgaacgacctggtgtctgagtaccagcagtaccaggatgctacggcggaggaagaggaggatttcggcgaggaagccgaagaggaatag

SEQ ID NO: 245560 - DNA, 1248 bp, synthetic construct
  misc_feature 1..1248: note = Description of Artificial Sequence: Synthetic coding sequence
  source 1..1248: mol_type = other DNA
atgagggagattgtgcacatccaggcaggacagtgtggcaatcagatcggagcaaagttctgggaagtgattagcgacgaacacggtatcgatcccacaggcacctaccacggtgactccgacttgcagctcgaccgtattagtgtctactacaatgaagctacaggaggtaaatatgtgccaagagccatactcgtggatctcgagcccggtaccatggactccgtgcgaagcggaccttttggacagatattcaggcccgacaacttcgtgtttggacagagcggagctggaaataattgcctgcaaggctttcaattgacccattcattagggggaggcactggctccggaatgggcacactgctcatcagcaagataagagaggagtatccagataggatcatgaataccttctccgtggttccaagccctaaggttagcgacacagttgtagagccgtacaacgcaactctctccgtgcaccagctggtggagaatacagacgaaacttattgcatcgacaatgaggcactgtatgacatatgcttccgaacattgaagttgacaactccaacttatggcgaccttaaccacctggtgtccgctaccatgagtggcgttacaacatgtctgagatttcccggtcagttaaacgccgatcttcgaaagctcgcagtgaatatggtcccctttccgcgtctgcacttcttcatgccaggcttcgccccactgacaagtcgcggatctcagcagtacagagctctgaccgtcccagagctgacacagcaagtcttcgacgcgaaaaacatgatggcagcctgtgatcctcggcacggacggtacctcactgtggccgctgtgttccgtggaagaatgagcatgaaggaggtggacgagcagatgctgaatgtgcaaaataagaacagtagctatttcgtagaatggattcctaacaatgtgaaaactgcggtgtgtgacatcccacctcgaggtctgaagatggcagtgacgttcatcgggaactctacagctatccaagagttatttaagcggatctctgagcagtttaccgccatgttccgtcggaaggcctttctccactggtacacgggcgaaggaatggatgagatggaatttaccgaagctgaatccaacatgaatgacctggtgtcggaataccagcagtaccaggacgccaccgcagaggaggaggaagattttggcgaggaggccgaggaagagtag

SEQ ID NO: 245561 - DNA, 1248 bp, synthetic construct
  misc_feature 1..1248: note = Description of Artificial Sequence: Synthetic coding sequence
  source 1..1248: mol_type = other DNA
atgagggagatagttcatattcaggcaggccaatgcgggaaccagattggcgcaaaattttgggaggtgatttccgacgagcacggcattgacccaaccgggacgtaccatggggatagcgaccttcaactggataggattagcgtctattataacgaagcaaccggagggaagtatgtcccacgcgctatcctggttgatctggagcctggtactatggactccgtaaggagcggaccgttcggccagattttcaggccagacaatttcgtgttcggtcaatccggcgctggaaataattgcctccaaggcttccagctgacgcactctctgggtgggggaaccgggagcggcatgggcactctccttatatcaaagataagagaggagtaccccgacaggattatgaacacttttagcgtggtgcctagccccaaggtgtcagacacggtggtagagccatataacgcgaccctcagcgtacaccaactcgtggagaataccgacgaaacatactgtattgacaatgaagcattatatgatatctgctttagaactctgaagctaacaacccccacctatggggatctgaaccatttggtcagtgccacgatgtcaggtgtgaccacatgtctgcgattccccggtcaactcaacgcggaccttaggaagctggcagtgaacatggttccattccccagactccatttcttcatgcccggttttgcgcctttgacatccagagggtcccagcagtatcgcgcattaacagtgcccgagcttactcagcaggtgtttgacgcaaagaacatgatggctgcttgcgacccaagacacggcaggtatctcaccgtggccgcagtgttcagagggcgaatgtcgatgaaggaagtagatgagcagatgctgaatgtgcagaataagaatagctcttactttgtggagtggatcccaaacaacgttaagacagccgtgtgcgacatacctcccagaggtctgaaaatggccgttacctttattggaaactccactgctattcaagagctctttaagcgcatatcagagcagttcaccgcaatgttccgacgtaaagccttcctgcactggtataccggcgaagggatggacgagatggaatttaccgaagccgagtctaatatgaacgatttggtatcagaataccagcagtaccaggatgccactgccgaggaagaagaggatttcggagaagaggctgaggaggagtag

SEQ ID NO: 245562 - DNA, 1308 bp, synthetic construct
  misc_feature 1..1308: note = Description of Artificial Sequence: Synthetic coding sequence
  source 1..1308: mol_type = other DNA
atgagagagatagtgcacatccaggccggacagtgtggaaaccagattggggctaagttctgggaggttatttcagacgagcacggcattgacccaacagggacatatcacggcgactcagacctccagctagaccgcatcagtgtctactataacgaggccaccggcggtaagtatgtaccccgagctattcttgttgacctagaacctggaacgatggactctgtgcgatctggtccattcggtcagatctttcgccctgataatttcgtgtttggacagagcggcgctgggaacaattgggccaaaggccactacactgagggggctgagctggttgactccgtgttggacgtagtcagaaaagaggctgagagctgcgactgtttgcagggcttccaactgactcacagcctcggaggaggcaccggaagcggaatgggcaccctactcattagtaagatacgagaagagtacccagacaggattatgaacacattcagcgtagtgcctagccctaaggtgtccgacacagtggtggagccatacaacgctaccctgtctgtccatcagcttgttgagaacactgacgaaacatactgtatcgataatgaagccctctatgatatttgcttcaggactttgaagcttactacacccacatacggagacttaaaccatctggtaagcgctactatgtccggagtcactacatgccttcgctttccgggacagttgaacgctgatctgaggaagctggccgtcaatatggtcccctttcccaggcttcatttttttatgcctggctttgcacccttgacatcccggggatcccagcagtaccgagccctgacggtcccggagctgacgcagcaggtgttcgacgccaaaaatatgatggccgcttgtgatcccagacatgggcgttatctgaccgtcgcggcagtgttccgcggtagaatgagcatgaaggaagtagacgagcagatgctgaatgtgcagaacaaaaattctagctatttcgttgaatggatcccaaataacgttaaaaccgccgtgtgcgatattcccccacgcggtctgaagatggcagtgactttcatcggaaactcaacagccatccaagaattattcaaaagaatcagcgagcaatttacggccatgtttcgcaggaaggcctttttgcactggtatacaggagaaggcatggatgagatggaatttacggaggccgaatccaacatgaacgatctggtatccgagtatcagcagtaccaggacgccactgccgagggagggggtctttag

SEQ ID NO: 245563 - DNA, 1308 bp, synthetic construct
  misc_feature 1..1308: note = Description of Artificial Sequence: Synthetic coding sequence
  source 1..1308: mol_type = other DNA
atgagagaaattgtgcacattcaggctggtcagtgtggcaatcagattggcgctaagttctgggaagtcatcagcgatgaacacggtattgaccctaccggcacttaccacggagacagcgatctgcagttggatcgtatcagcgtgtactacaatgaggccacggggggaaagtatgtccctagggcgattctcgtagacctcgaacctggaacgatggactcggtcagatcaggtccattcggtcagattttcagacccgataatttcgtgtttgggcagtccggagccggaaataactgggctaaaggccactacacagaaggagcagagttagtggactctgttctggacgtggtccgaaaggaagccgagtcctgcgactgtctccaggggttccagctaacccacagcctcggcggtggcacgggcagtggcatgggcacgctgctgatctcgaaaataagagaagagtatcctgatagaattatgaacacatttagcgttgtcccatccccaaaggtctctgatacagtagtggagccgtacaacgcaactctgtctgtgcaccagcttgtagaaaacacagacgaaacgtactgcattgacaatgaggccctttacgacatttgtttcagaaccctcaaactgaccacacctacctacggcgatcttaaccatctggtgtctgctaccatgagcggggttacaacctgcctacgctttccaggacaattgaacgcagacctccgcaagcttgctgtcaacatggtgccctttcccaggctgcatttctttatgcccggatttgccccacttacaagcaggggcagccaacagtatagagccctcacggtgcctgagctcacccagcaggtttttgacgccaaaaacatgatggctgcatgcgatccccgtcatggtcgctatctgactgtagcagccgtgtttaggggaagaatgagcatgaaagaagtggacgagcaaatgctgaatgtgcagaataagaactcatcttatttcgtggaatggatccctaacaatgtcaagactgccgtgtgtgacatacctcccaggggactgaaaatggccgtaacatttattggaaacagtactgcgattcaggagctgtttaagcggattagcgagcagtttactgcgatgttccggagaaaggcctttctgcactggtatacaggtgagggtatggacgagatggaattcacagaagcagaatccaacatgaatgacctggtatcagaataccagcagtatcaggacgcgaccgcagagggaggaggattatag

SEQ ID NO: 245564 - DNA, 1308 bp, synthetic construct
  misc_feature 1..1308: note = Description of Artificial Sequence: Synthetic coding sequence
  source 1..1308: mol_type = other DNA
atgcgggagatagttcatatccaagccggtcagtgtgggaaccagattggagctaaattttgggaagtgatctctgatgagcatggtattgaccctaccggcacttaccacggtgactccgatctgcagctggaccgcatcagcgtatactacaatgaagcaaccggtggaaagtatgtccctcgggctatactggtggatttggaaccaggcactatggactcagtgcggagcggacctttcggtcagatcttccgcccagataatttcgtgtttgggcagtctggggcagggaataattgggctaaaggacattatacagagggagcagagctagtagacagtgtcctcgacgtggtgcggaaggaggcagagtcttgcgactgcctgcaggggtttcagcttacccattccttggggggaggaacaggcagcggcatgggcacccttctgatcagtaagattagggaagagtatccggaccggatcatgaataccttctctgttgtgccatcccccaaggtctctgataccgttgtcgagccgtataacgcaacgctgtccgtgcatcagctagtggaaaatactgacgagacctattgcatcgacaacgaggccctgtatgacatttgttttcggacactcaagctgaccaccccaacttatggcgacttgaatcatcttgtctccgcaacaatgagcggcgtcaccacctgcttgcggtttcctgggcaactgaatgccgatctcagaaagctggctgtgaatatggttccattccctcggctgcacttttttatgccaggctttgcacctctgacgagtcggggtagtcagcaatacagagcgctgacagtgcccgagttaacccagcaggttttcgacgcaaagaacatgatggctgcctgtgaccctagacacggacgatatctgacagttgccgctgtgtttagagggcgtatgtcaatgaaagaagtggatgaacagatgctgaacgtacagaacaaaaacagcagttatttcgtcgaatggatccccaacaacgtgaagaccgccgtgtgcgatattccaccaagaggcctgaaaatggcagtgacattcattggcaactcgactgctatccaggaattgtttaagcgaatctcagaacagttcaccgctatgtttcggcgaaaggcgttcctgcactggtacaccggggagggcatggacgaaatggaattcacagaggctgagagcaatatgaacgacttagtttccgagtatcagcaataccaagacgctaccgccgaggggggtggcttgtag

SEQ ID NO: 245565 - DNA, 1062 bp, synthetic construct
  misc_feature 1..1062: note = Description of Artificial Sequence: Synthetic coding sequence
  source 1..1062: mol_type = other DNA
atgcgagagatcgtgcatattcaagctggacagtgcggtaaccaaataggcgctaaattctgggaagtgatctcagacgagcatgggattgaccccaccggcacataccatggggattcggatcttcagctaactcatagtctcgggggagggacagggtctggaatgggaacactgcttatctcaaaaattagagaagagtatcccgaccgcatcatgaacacattttccgtcgtcccatcacccaaagtaagcgacacagttgtcgagccatacaacgccacactttcagtccaccaactggtggaaaacactgatgaaacatactgtattgataacgaagccctctacgatatttgctttagaacacttaagttgaccacccctacgtacggcgacctcaaccacctcgtatccgctaccatgagtggagtgacaacatgcctgagatttcctggacagttgaatgcagatttaagaaaactcgccgttaacatggttccttttcctcgcctccacttttttatgccgggtttcgcacccctgacctcccggggttcgcagcaataccgggctctgacagtgcccgagctaacgcagcaggtcttcgatgccaaaaacatgatggctgcctgtgatcccagacacgggagatacctgaccgtggccgcagttttccgcggtcgtatgagtatgaaggaggtggatgaacagatgttgaatgtccaaaacaagaatagttcttacttcgtcgaatggatacctaacaacgtgaagaccgccgtgtgtgacataccgccacgaggcctgaagatggcggtgaccttcatcggcaatagtacggccatccaggaactcttcaagcggatttccgagcagttcaccgcgatgttccggagaaaagccttcctacactggtacacgggagaaggaatggatgaaatggagttcacagaggcagagagcaatatgaacgaccttgtaagtgaatatcagcagtatcaggacgccacagcagaagaggaagaagatttcggcgaggaggccgaggaggaagcgtag

SEQ ID NO: 245566 - DNA, 1248 bp, synthetic construct
  misc_feature 1..1248: note = Description of Artificial Sequence: Synthetic coding sequence
  source 1..1248: mol_type = other DNA
atgcgcgagatcgtacacattcaagcagggcagtgcggcaatcaaatcggcgctaaattttgggaggtgatctccgacgaacacggcattgaccccaccggcacctaccatggcgattccgatttgcagctggaccgcatctcagtctattataacgaggccacgggagggaagtacgtacccagagccatacttgtggacctggagccgggaaccatggactccgtgcgaagcggaccctttgggcagatatttcgccctgataactttgtctttggccagagcggggctggtaacaactgtcttcagggatttcagcttacacattcgctcggaggtggtacaggttctgggatgggcactctcctcataagtaagataagagaggagtacccagaccgcattatgaatacctttagtgtggttccttctcctaaagtgtccgataccgtagtggaaccctacaacgccaccctcagtgtgcaccagctggtggagaatacagacgaaacctattgtatagataatgaagctctgtatgacatctgttttagaaccctgaaactcaccacaccaacatatggcgacctaaatcacctcgtcagtgccactatgtcaggtgtaacgacttgtctacggttccctggacagctgaatgccgatttgagaaaattagcagttaacatggtgccattccccagactgcacttttttatgcctggctttgcgcctctgacgtcaagggggtcccagcagtaccgcgcactaacagttcctgaattgacccaacaggtgtttgacgccaaaaacatgatggcagcttgcgatcctcgacatggacgctacctcacggtcgcagccgtgtttagggggagaatgagtatgaaggaggtggatgagcagatgctgaatgtgcaaaataagaatagctcatattttgttgagtggattcctaacaacgtcaagacagccgtctgtgacattccaccaagaggactcaagatggctgtgactttcatcggtaactcgaccgctatccaggaactgttcaaaagaatcagcgagcagttcacggctatgttcaggcgtaaagcttttcttcactggtacacgggggaggggatggacgagatggaattcactgaggcggaaagtaatatgaatgacctggtgtcagagtatcaacagtatcaggacgcgacagctgaggaagaagaagactttggcgaggaggccgaagaggaatag

SEQ ID NO: 245567 - DNA, 1308 bp, synthetic construct
  misc_feature 1..1308: note = Description of Artificial Sequence: Synthetic coding sequence
  source 1..1308: mol_type = other DNA
atgcgagagatcgttcacatacaagccggtcagtgcggtaatcagatcggcgcaaagttctgggaggtgattagtgacgaacatggcatcgaccccaccggcacatatcatggggatagtgacctccaattagataggatatctgtgtattataacgaggcgaccggtggaaaatatgtgccacgcgcaattctcgttgatttggaaccaggcacaatggattcggtgcgctccggtcctttcgggcagatattccggcctgacaattttgtgtttggtcagtctggcgctggcaacaactgggcgaaaggtcactatacggaaggcgctgaacttgtagacagtgtgctggacgtggtgcgcaaagaggcagagagctgtgattgtctacaggggttccagttgacacacagccttggcggtgggactggctccggcatgggtactctcctcataagtaagatccgggaagaataccctgatcgaatcatgaatactttcagcgtcgttccaagccccaaggtgtccgatactgtcgtcgaaccttataacgccacactgtccgttcaccagcttgttgaaaatactgatgagacttattgcattgataatgaagccttatacgatatttgcttccgaactttgaagctaacaacgcccacctatggcgacctgaaccacctggtctctgcgaccatgtcaggagtgactacgtgtctgcggtttccaggtcagctgaacgcagacttgcgtaagcttgctgtaaacatggtgccctttccacgattacacttcttcatgcccggatttgcacccctaacaagcagaggtagccaacagtacagagctctcactgtgccagagctgacacagcaagtgttcgatgctaagaacatgatggccgcatgtgatcctcgacacggaagatatcttaccgttgccgctgtctttcgcggaagaatgtccatgaaggaggttgacgagcagatgctgaatgtccagaacaagaactcttcttattttgtggagtggatccccaacaatgtcaaaactgccgtgtgcgatatccctcctaggggcctgaaaatggcagtcacattcattgggaattcaaccgcaattcaggagctattcaaaagaatttcagagcagtttactgccatgtttcgcagaaaggcatttcttcactggtacactggcgagggaatggatgaaatggagttcactgaggctgagtctaacatgaacgatcttgtttctgagtatcagcagtaccaggatgcgaccgctgaggagggtggagtgtag

SEQ ID NO: 245568 - DNA, 1062 bp, synthetic construct
  misc_feature 1..1062: note = Description of Artificial Sequence: Synthetic coding sequence
  source 1..1062: mol_type = other DNA
atgcgagagatcgtgcacatccaagctggccaatgcggaaatcaaatcggcgctaagttctgggaagttatctccgatgagcatggaatcgatcctacgggaacctaccatggtgattctgatctgcagctcacccactcactcggcggaggtactgggtctgggatgggaaccctgctgatatcgaaaattcgagaggagtatcccgacaggattatgaacaccttcagtgtagtcccctctcctaaggtgagtgataccgttgtggaaccctacaatgctacacttagcgtgcaccagctggtggagaacaccgatgaaacctactgtattgataatgaagccctgtacgatatatgtttccggactctgaagctcacaactccaacatacggggaccttaaccacctcgtgtctgcaaccatgtcaggcgtcactacttgtctgcgatttccaggtcagctgaatgccgacttacgcaagctggccgtgaacatggtcccattcccgagactccattttttcatgcccggtttcgctcccctgacatctagaggatctcaacaatatagggcgttgactgtgccggagctgacacagcaggtgtttgacgctaaaaacatgatggctgcttgtgatccccgtcatggccgttacctgacagtagccgctgtgtttaggggacgcatgtccatgaaagaggtggatgaacaaatgttgaacgtgcaaaataaaaacagttcatattttgtggagtggatccccaataatgtcaaaacagctgtttgtgacatacccccaaggggcttaaaaatggccgtgacgttcatcggcaattccactgccattcaggaattattcaaacgtatttctgagcaattcacggccatgttccgtcggaaagcctttcttcattggtacactggcgaggggatggacgaaatggagtttaccgaggcagagagcaacatgaacgatctggtttcagagtaccagcagtatcaggatgccactgcggaagaagaagaggattttggcgaggaagccgaggaagaggcctag

SEQ ID NO: 245569 - DNA, 1062 bp, synthetic construct
  misc_feature 1..1062: note = Description of Artificial Sequence: Synthetic coding sequence
  source 1..1062: mol_type = other DNA
atgcgagagattgtgcacatccaggctggacaatgcggcaatcagataggggcaaagttctgggaggtgatcagcgacgagcacgggatcgatccaacaggaacctaccacggagactcagacctgcaactaacacacagtctcggtggagggacagggtccgggatggggacactcctcatcagcaagatccgcgaggagtatcccgatcggattatgaacacctttagtgtggtgccatccccaaaagtttctgatacagtagtggaaccctacaacgctacgttatccgtgcaccagctcgtggagaacacggacgagacctactgtattgataatgaagcactttatgacatatgctttcgtacattgaagctaaccaccccgacttatggtgatctcaaccatttggtcagtgcaacaatgtcaggagtgacaacatgcctgcggttccctggtcagctaaatgccgacctcaggaagcttgccgtgaacatggtgccatttccccgactgcacttctttatgccaggcttcgccccattgacttcccggggatctcagcagtaccgcgcactcacagtcccagaactaacacagcaggttttcgacgccaagaatatgatggccgcttgcgatcctcgtcacgggaggtacttgactgtggcagcagtttttagaggccgaatgagtatgaaggaggtagacgagcagatgttgaatgtccaaaacaagaacagtagctacttcgttgagtggatccccaataatgtgaagacggcggtctgcgatattccaccaagggggcttaaaatggcagtcacatttatcgggaactcaaccgccattcaggaactattcaaacgaatttcggagcaattcacagcaatgtttaggcggaaggcttttttgcactggtataccggggaaggcatggatgagatggaatttacagaagccgagagtaacatgaatgacttggtttctgaataccagcaataccaagacgctaccgcagaggaggaggaagattttggcgaagaggctgaggaggaggcctag

SEQ ID NO: 245570 - DNA, 1062 bp, synthetic construct
  misc_feature 1..1062: note = Description of Artificial Sequence: Synthetic coding sequence
  source 1..1062: mol_type = other DNA
atgagagagatcgtgcacatacaggcaggccaatgtggaaaccaaattggggctaaattctgggaggtaattagcgatgagcacgggattgaccctacaggcacctaccacggtgacagtgacctgcaattaacacactccctggggggtggtactggcagcggcatgggtaccctcctgatatctaaaataagagaagaatatcctgaccgaatcatgaataccttcagcgttgtcccgtcacctaaagtttctgacactgtagtggagccatacaatgcgaccctgagtgtgcaccagctcgtggaaaacaccgatgagacatactgcattgacaatgaagcactctatgacatctgtttcagaacacttaagctgacaactccgacttatggcgatctgaatcacttagtctcagctacaatgtcaggggtcaccacgtgtctaaggtttccaggacagctcaacgcagatctgcgtaagctggcagtgaatatggtgccctttcccagacttcactttttcatgccgggattcgcccctctgaccagtcgcggaagccaacagtatcgagctctgacagtgccggagctcacccaacaagtgttcgatgccaagaacatgatggccgcttgcgacccacgccacggcagatatctgactgtggctgctgtgttccgaggcaggatgagtatgaaggaggtcgatgagcaaatgctgaacgtacagaacaagaattcatcctattttgtcgagtggataccaaataatgtgaagaccgccgtatgcgatatcccgcctcgcggactgaagatggcagttactttcattgggaatagcaccgcaattcaagagctgtttaagagaatcagcgagcaatttacagccatgttccgccgtaaggccttccttcactggtatacaggcgaggggatggacgaaatggagttcaccgaagccgagtctaatatgaacgacctcgtcagtgaataccagcaataccaggacgctacggcagaggaagaggaggacttcggagaagaggctgaagaggaagcatag

SEQ ID NO: 245571 - DNA, 1248 bp, synthetic construct
  misc_feature 1..1248: note = Description of Artificial Sequence: Synthetic coding sequence
  source 1..1248: mol_type = other DNA
atgcgagaaatcgtgcacatccaggcgggacaatgtggtaatcaaattggagcaaagttctgggaggtcatctccgatgagcatggtattgaccccacgggcacttatcacggcgattcagacttgcaactcgataggataagtgtctactataacgaggcaaccggaggcaagtacgtgccgcgtgcaatacttgtggacctggagcctggaacgatggattctgtcaggtccgggccattcggacaaatctttaggcctgacaatttcgtcttcggacagtcaggggctggaaataactgtctccagggtttccagctgactcattcacttggtggtggcacggggagtggcatgggcaccttactgatttccaagatacgagaggaataccctgaccgaattatgaatacattctctgttgtgccgagtcccaaagtgagtgacacggtggtggaaccttacaatgctactctctcagttcaccagctggtagaaaataccgacgagacatactgtatcgacaacgaagccctctatgacatttgcttccgtacgctgaagctgaccacacctacctacggagacctgaaccatctagtctctgccaccatgtctggggtgactacatgcttaaggttcccgggacaattgaacgcggatctgaggaaactggcagttaatatggtgcccttccccaggctgcatttcttcatgccaggatttgctcccctgacttcaagaggctcacaacagtaccgcgctcttacggtcccagagctgacccagcaggtatttgatgccaaaaatatgatggccgcttgtgatccgcgacacggcaggtatctgaccgttgccgctgtctttcgaggccgtatgtccatgaaagaggttgacgagcaaatgttgaacgtccagaacaaaaattctagttactttgtcgaatggatcccgaacaatgttaaaactgccgtctgcgacatccccccacgcggactcaagatggccgtgacattcatcggtaattccactgccatccaggaactgtttaaacgtattagtgaacagttcaccgccatgttcaggcgaaaagccttcttgcactggtatacaggggaaggcatggacgaaatggagtttacggaagctgagtcaaatatgaatgacttggtcagtgagtatcagcagtaccaagacgcaacagctgaggaggaggaggacttcggggaagaggctgaggaagaatag

SEQ ID NO: 245572 - DNA, 1248 bp, synthetic construct
  misc_feature 1..1248: note = Description of Artificial Sequence: Synthetic coding sequence
  source 1..1248: mol_type = other DNA
atgagggaaatcgtgcatattcaggcaggccagtgcggaaaccagatcggtgcaaagttctgggaggtcatctctgatgagcacggaatcgaccccaccggaacataccacggggactccgatctgcaactagaccgtatcagcgtgtattacaacgaagccaccggaggtaagtatgtgccgagagcaattctcgtggacctggagccaggtactatggattctgtgcgctctggcccttttggtcagatttttcgccctgataacttcgtattcggccaaagtggggctggaaacaattgccttcagggcttccaattgactcattccttaggaggcggaactggtagcggcatgggaaccctattaatttccaaaattagagaggagtacccagataggattatgaacaccttctctgtcgtacctagtcccaaggtttccgacactgtcgtcgaaccatataatgctactttaagcgtgcatcagctcgtggagaataccgatgaaacttattgtattgacaacgaggcgctatacgacatttgttttcgcactctgaagcttacgactcctacatacggtgacctgaaccatctggtcagcgccaccatgtccggagtcactacctgtttacggttccccggacaactgaatgccgacttaaggaaactcgctgttaacatggtgcctttcccgaggctgcactttttcatgcctggattcgcacctctgacaagccgcggttcacaacagtatcgggcactcaccgtccctgaattgacccagcaggtgttcgacgctaaaaacatgatggctgcttgtgatccacgccacggcagatatttgactgtcgcagcagtctttagaggacgcatgtccatgaaagaggtcgacgagcagatgttaaacgttcaaaataagaattcttcatatttcgttgagtggatcccaaacaatgtgaaaaccgccgtatgcgacatccctcccagaggactgaagatggcagtaacgttcattggcaattccacagcgatacaggaactgttcaagaggatttccgagcagttcaccgcaatgtttcgacggaaggcctttctgcactggtacacaggggaaggaatggacgaaatggagtttactgaagctgagtccaacatgaatgacttggtgtcagagtaccaacaatatcaggatgccactgccgaggaggaagaagatttcggagaagaagctgaggaggagtag

SEQ ID NO: 245573 - DNA, 1062 bp, synthetic construct
  misc_feature 1..1062: note = Description of Artificial Sequence: Synthetic coding sequence
  source 1..1062: mol_type = other DNA
atgcgcgagatcgtgcacattcaagccggacaatgtggcaaccagattggcgcaaagttttgggaggtgattagtgacgagcacggcatagaccccaccggcacgtaccatggcgattctgacctgcagctgacacatagtctgggaggtggaactgggtccggtatgggcaccctcttaatatccaagatccgtgaagagtaccccgatagaataatgaacacattcagcgtggtgccatcccctaaggtcagtgataccgtcgtggagccctataatgctaccctctctgtccatcagctggtcgaaaacactgatgagacatactgtattgacaacgaggcgctctatgatatctgttttcgtaccttgaagctgaccacaccaacatacggcgatctcaatcacctcgtgtcagcaacgatgagcggcgtgaccacctgcttacggtttcctgggcagctgaatgctgacttgcggaagctggccgtgaatatggtcccttttcctaggttacatttttttatgccagggtttgcacccctcactagtaggggatcccagcagtacagggctctgacggtacccgaacttacccagcaggtatttgatgcaaagaacatgatggccgcttgcgatcccagacacgggagatacctcacagttgcggctgtttttcgaggccgaatgagtatgaaggaggtggatgagcaaatgttaaatgtgcagaacaaaaactccagctatttcgtcgagtggatcccaaataacgtcaaaacagctgtgtgtgatattccgccaagaggattgaaaatggccgtgacatttattgggaactctaccgctatacaggagctttttaagagaatcagcgagcagtttacagcaatgttccgccgtaaagcattccttcactggtacaccggggaaggcatggatgaaatggaatttactgaagccgaatcaaacatgaacgatcttgtttccgagtatcagcagtatcaagatgcaaccgccgaagaagaggaggatttcggtgaggaggccgaggaggaggcctag

SEQ ID NO: 245574 - DNA, 1362 bp, synthetic construct
  misc_feature 1..1362: note = Description of Artificial Sequence: Synthetic coding sequence
  source 1..1362: mol_type = other DNA
atgtctatcgttacagtgcagctgggtcagtgtggaaaccaaatcggcttcgaggtgtttgatgccctattaagcgactcacattcctcacaaggcctctgctccatgcgcgaaaatgaagcatatcaggcttcttgcaaggagcgttttttttctgaagaggagaatggagtgccgatcgcccgagccgtactggtggacatggaaccaaaggtcatcaatcaaatgcttagtaaagcagcccaaagtggacagtggaagtacgggcaacatgcttgcttctgccagaagcagggatctggtaataactgggcgtacggctacagtgtgcatgggccacggcacgaggagagcattatgaatattattcggaaggaggtggagaaatgcgacagcttcagcggattttttatcataatgagcatggcaggcggaacaggctcaggcctaggcgctttcgtaacacagaatctcgaggatcagtactcgaactctctgaaaatgaaccagattatctggccttatgggaccggtgaggtaattgtacagaactataactcaattctgaccctctctcacctgtaccggagtagcgatgcccttctgctgcatgaaaatgatgctattcacaagatctgcgctaaactgatgaacatcaaacagatttcattttccgacataaatcaggtccttgcgcaccaactgggctctgtcttccagccaacttacagtgccgaatcaagtttccattataggaggaatcccctcggcgatctaatggagcatctcgtaccccatcccgagttcaagatgctctcagtgagaaatatccctcacatgagtgagaattcacttgcttacaccacctttacctgggctgggctgctgaagcatcttcgccagatgctgatttcaaacgcgaaaatggaggaaggcatagacaggcacgtttggccgcctctgtccgggcttccacccctcagcaaaatgagccttaataaggatctgcactttaacactagcattgcaaacttggtgatacttcggggtaaagatgtgcaatctgcagacgttgagggcttcaaggacccggcactctacacatcgtggctcaagcccgtgaatgcctttaatgtatggaagacacagcgcgcttttagcaagtatgagaagtccgcggtgttggtgtctaattctcaattcctagtaaagccactcgatatgatagtcgggaaggcttggaatatgttcgcttctaaggcctatatccatcagtataccaagttcggcatcgaggaggaagacttcctggattcttttacttctctggagcaggttgtcgctagttactgcaacctgtag

SEQ ID NO: 245575 - DNA, 1197 bp, synthetic construct
  misc_feature 1..1197: note = Description of Artificial Sequence: Synthetic coding sequence
  source 1..1197: mol_type = other DNA
atgagtatcgtcactgtccagctgggacaatgtggcaaccagattggcttcgaggtgttcgatgcgctactgagtgatagccactcaagtcagggcctgtgtagcatgcgtgagaacgaggcctatcaagcgtcgtgtaaagagagattctttagtgaagaggagaacggagtgcccatcgctcgcgcagtgctcgtagatatggagcccaaagtcattaaccagatgctctctaaagctgctcagtcagggcagtggaaatacggtcaacatgcttgcttctgccagaaacaggggtccggaaataattgggcctatggctacagcgtgcacggcccacggcacgaagagagtatcatgaatatcatccgaaaagaagtggaaaagtgtgacagcttcagtggtttcttcatcattatgtccatggctggcggaaccggctctggcctcggcgctttcgttacacagaacctagaagaccagtactccaattcactcaagatgaaccaaataatatggccatacggtaccggagaggtcattgtgcagaactacaatagtatcttaactctcagtcacttataccggtcctctgacgctctgctcctgcacgaaaacgacgctatacacaaaatttgcgcgaagctgatgaacatcaagcagatctctttcagtgatataaatcaagtgctggcccatcagctaggcagcgttttccagcccacgtattcagccgaaagctcgttccattatagacgaaatcccttgggaattgaccgccatgtttggcctccgttgtccggcctgccaccgttgtccaaaatgtctttgaacaaagatttacatttcaacacatctatagctaatttggtgatcctgaggggcaaggatgttcagtccgcagatgttgaagggtttaaggatcccgcattgtacaccagttggctaaagcccgtgaatgcttttaacgtgtggaagacacaacgagctttcagcaagtacgagaaatcagccgtgttagtgagcaattctcaattcctggtaaagcctcttgacatgattgtcggaaaggcttggaacatgtttgcctctaaagcatatattcaccagtacaccaagtttggaattgaagaggaggacttcctggactccttcacgtcactggaacaggttgttgcgtcttattgcaatctgtag

SEQ ID NO: 245576 - DNA, 600 bp, synthetic construct
  misc_feature 1..600: note = Description of Artificial Sequence: Synthetic coding sequence
  source 1..600: mol_type = other DNA
atgagcattgtgaccgtgcagctgggccaatgtggtaaccaaatcggctttgaggtcttcgatgccctgttgtcagactctcatagcagccaaggactctgttccatgcgggagaatgaggcataccaggcaagctgtaaggagcggttcttttcggaagaggagaacggaggcatagatagacacgtatggccaccactctccgggctgcctccactatctaagatgtcccttaataaggacctgcatttcaacacctccatcgcaaacctggtgatcctgcgcggaaaagacgtccagtctgctgatgtcgagggctttaaagacccggcactttatacctcatggctgaagccagtcaacgcctttaacgtttggaagacccagagggcattttcgaaatatgagaagtcggctgtcctggtgtcaaactcgcagtttctagtcaagcccctcgatatgatcgtcggtaaggcttggaatatgttcgcttcgaaggcttacatacaccagtataccaagtttggtatcgaggaggaggattttttggactcattcacaagcttggaacaggtcgttgccagctactgcaatctgtag

SEQ ID NO: 245577 - DNA, 1056 bp, synthetic construct
  misc_feature 1..1056: note = Description of Artificial Sequence: Synthetic coding sequence
  source 1..1056: mol_type = other DNA
atgtctatcgtcactgtccaactaggacagtgcggaaatcagattggctttgaggtgttcgatgcgctgttgtccgattcacattccagtcaggggctgtgctccatgcgtgaaaacgaggcataccaggcatcttgcaaagaaagatttttttccgaggaagaaaacggggtaccgattgctcgggcagtgcttgttgacatggagcctaaagttattaaccaaatgctctcaaaagcagcacaaagcggccagtggaaatatgggcagcacgcctgcttttgtcagaaacaagggagcggcaacaactgggcgtatgggtactcagtgcacgggccacggcacgaggaaagtattatgaatatcattcggaaggaagttgaaaaatgcgatagtttcagcgggtttttcattattatgtctatggccggtggcactggttctggtctcggcgcttttgtgactcagaacctggaagaccagtattctaatagccttaagatgaaccagatcatttggccatacggaacaggggaggtcatcgttcaaaattataactccatcctcaccttatcccatctttatcgttctagcgacgcgctgctcctgcacgagaatgacgccattcataagatttgtgctaaactgatgaacattaagcagatcagcttctctgatatcaaccaagtcctggcccaccaactcgggtcagtctttcagccgacctatagtgctgaaagctcatttcattacagacggaaccctctggaaggctttaaggaccccgcactctacacatcttggctgaagccagtgaacgcattcaatgtgtggaagacacagagggctttctcaaagtacgaaaagagcgccgttttagtgtctaattctcaatttctggtgaagccgttggatatgatcgtaggcaaagcttggaacatgtttgccagtaaggcatatattcaccagtataccaagttcggaatagaagaggaggactttctcgatagtttcacaagtctggaacaggtggtggcctcatattgcaatctctag

SEQ ID NO: 245578 - DNA, 1191 bp, synthetic construct
  misc_feature 1..1191: note = Description of Artificial Sequence: Synthetic coding sequence
  source 1..1191: mol_type = other DNA
atgtcaatcgttaccgtgcaactggggcaatgcggcaatcagattggctttgaagtgtttgacgccttactgtctgacagtcattccagtcagggcctgtgttctatgcgcgaaaatgaagcttatcaagcttcctgcaaagagcgcttcttttcagaagaggagaacggtgtcccaatcgctcgcgctgttctggtggatatggaacctaaggtgattaaccagatgctcagtaaggcagctcagagcggacagtggaaatacggtcagcatgcgtgtttctgccagaaacagggttctggaaataattgggcctatgggtattctgtccatggccctcgacatgaggaaagtatcatgaatatcattagaaaggaagttgagaagtgtgacagttttagtgggttcttcattataatgagtatggcgggagggacaggtagcggcctcggggcattcgtcacacaaaatctcgaggaccagtatagtaattcccttaaaatgaatcagataatttggccctacgggactggtgaagttattgttcagaactataattccattctcacgctttcacacctgtatcgcagcagcgacgctctgctgttgcatgagaatgacgcgatccacaagatctgcgcaaagctaatgaacatcaaacagattagcttctccgacatcaaccaagtgctggcccatcaattaggctcggtgtttcagccaacctactccgcggagtcttccttccactaccggaggaatcctcttggagacctgatggagcacctcgtccctcaccctgagtttaagatgctcagtgtgcgaaatatccctcatatgagtgagaattcactcgcctacacgacattcacctgggccggactcttgaagcacctgcggcagatgctgatttccaacgccaaaatggaagaaggaatcgatcgacacgtgtggcctcccttatcaggcttaccccctctgagcaaaatgagcctaaacaaggatcttcacttcaacacctcaatcgccaacctcgttatcttacggggtaaggatgttcagagcgctgatgtgggtaagaagttccgggcttacatccaccagtacacgaaatttggaatcgaggaagaagacttcctggatagcttcactagtttggaacaagttgtggcatcttactgtaacctgtag

SEQ ID NO: 245579 - DNA, 714 bp, synthetic construct
  misc_feature 1..714: note = Description of Artificial Sequence: Synthetic coding sequence
  source 1..714: mol_type = other DNA
atgaacataaaacagatctctttttccgatatcaatcaggtgctagcccaccaactgggcagcgtcttccagcccacgtacagtgctgagtcatccttccactaccggagaaaccctcttggcgatttaatggagcatctcgtcccacatcccgaattcaagatgttgtcagtgaggaacattcctcacatgagtgaaaacagccttgcctatactacttttacttgggcgggtctgctgaaacacctgaggcagatgctcatatcaaacgccaagatggaagagggcatcgaccgacacgtgtggcctccccttagtggattaccgcctctcagcaagatgtcgctgaacaaagacttgcatttcaatacatctatcgccaatttggtcatcctaagagggaaggacgttcagtcagcagacgtcgaaggctttaaggacccagctctgtatacaagctggcttaagccagtgaatgcctttaatgtctggaagacccagagggcattcagtaaatacgaaaagagtgccgtgctcgtgtccaactctcaatttctcgtcaaacctctggacatgattgtgggcaaggcctggaacatgtttgcttcaaaagcgtatatccatcagtacactaagttcggtattgaagaggaggattttctcgattcgttcacttcgctggagcaagtggtggcctcgtattgcaacttgtag

SEQ ID NO: 245580 - DNA, 378 bp, synthetic construct
  misc_feature 1..378: note = Description of Artificial Sequence: Synthetic coding sequence
  source 1..378: mol_type = other DNA
atgagcatcgtaactgttcagctcggacaatgtggtaaccagattggcttcgaggtgttcgatgccttgctcagcgattcgcacagtagccaggggctctgtagtatgagagaaaacgaagcatatcaggcctcttgcaaggagcggttcttttccgaggaagagaacggcgtacccatcgcaagggcagtattggttgatatggaacctaaggttattaaccagatgctcagcaaggcggctcagtccggtcagtggaaatacggacagcacgcttgcttctgtcagaagcagggcagcggcaacaactgggcctacgggagggacaaagattctgcgtgttacccagactggtcaggcacaccaggtctgcagtag

SEQ ID NO: 245581 - DNA, 492 bp, synthetic construct
  misc_feature 1..492: note = Description of Artificial Sequence: Synthetic coding sequence
  source 1..492: mol_type = other DNA
atgacccagtctgtggtcgtgcaggtcggccagtgtgggaatcagatagggtgctgtttttgggatctggcgctgcgagagcatgccgctgttaaccaaaaaggaatctatgacgaggccatctctagtttctttcgcaacgttgatacccgcgtggtgggcgacggcggaagtataagcaaaggcaagatttgttcgcttaaggcaagggcggtgctcattgacatggaggagggggtggtgaacgaaattctgcagggaccccttcgcgacgtttttgatacgaaacagctcattaccgatatcagcggctcgggcaacaattgggccgtggggcataaagtgttcggcagcctgtaccaggatcagattctcgagaaattcaggaagtctgccgaacactgtgactgccttcagtgcttcttcataattcacagcatgggaggcggaaaaatcttccacagtttcgcctgcaattctgtgaaagggtag

SEQ ID NO: 245582 - DNA, 621 bp, synthetic construct
  misc_feature 1..621: note = Description of Artificial Sequence: Synthetic coding sequence
  source 1..621: mol_type = other DNA
atggagtccgatcagaggaaagtggtgggcgatggtggaagtattagtaagggtaagatatgtagtcttaaagcacgcgctgtgttaattgatatggaggaaggggtggttaatgaaattcttcagggtccgctccgtgacgtcttcgatactaaacagctgattaccgacatttcaggatctgggaacaactgggccgtgggacataaagtgttcggatccctatatcaggaccagatcttggagaagtttagaaaatcagctgagcactgtgactgtctgcagtgcttttttatcatacacagcatgggaggcggaacaggttcaggccttggcacatttctgctaaaggtgctggaagacgaattccccgaagtctatagatttgtgaccagcatctacccttcgggcgaggacgatgtcatcactagcccatacaattcaatccttgccatgaaggagctgaatgagcacgccgattgcgttttacccatcgacaaccagtcactgttcgacatcatttcgaagattgatctgatggtgaacagcggcaaactcggtacaactgtgaagcctaagagcctggtcacctcctcctctggagcactaaagaaacaatag

SEQ ID NO: 245583 - DNA, 1428 bp, synthetic construct
  misc_feature 1..1428: note = Description of Artificial Sequence: Synthetic coding sequence
  source 1..1428: mol_type = other DNA
atgactcaaagcgtcgtggttcaggttggccaatgtggtaaccagatcggctgttgcttctgggacctggctctgagggaacatgctgcagtgaatcagaagggaatctacgacgaagctatctcttccttctttcgtaatgtcgacaccagggtggtgggagacgggggttccattagtaagggaaaaatttgctctctgaaggcacgcgctgtgttaatcgatatggaagaaggcgtcgtgaacgagatcctgcagggacccctgagggacgtcttcgacactaaacagttgattacagatattagcggctcaggaaataattgggctgtgggtcacaaggtttttggttccctctatcaggaccagatactggagaaatttaggaagagtgccgagcattgtgattgcctccagtgttttttcatcatccactcaatgggcggtggcaccggttcagggctgggaacttttctcctgaaagtattagaggacgagttcccagaagtctaccgatttgttacatccatctacccatccggcgaagatgatgttataacctctccttacaatagcattctagcaatgaaagaacttaacgagcatgcggattgtgtgcttccaattgacaatcaaagccttttcgatattataagcaagattgatcttatggtgaactcagggaaattgggcactacggttaaacctaaaagtttggtgacttcatcaagcggggctttgaaaaagcaacataagaagccttttgatgctatgaacaatattgttgcaaatctgctgttgaacctgacttcaagtgcccgatttgaagggtccctcaatatggacctgaatgaaatctcgatgaacctcgtgccatttccacagctgcactaccttgtctcaagcctaactccactgtacactctaacagacgtcaacatcccaccaaggcggctcgatcagatgttttcggacgccttcagcaaggatcatcaattgttgagagccgacccaaaacattccctctatctagcttgcgccttgatggtccgcggaaacgttcaaattagcgaccttaggagaaatatcgagcgacttaagcccagcctgcagtttgtgagctggaaccaggaggggtggaaaacctcattatgctccgtgccacccgtgggccactcacacagtctactggcactggcgaataacacctgcgtgaaaccaaccttcatggaattgaaggagcggtttatgagactctataaaaaaaaggcgcacttacatcactatttacaggtggaagggatggaggaatcttgcttcacagaggcagtcagctctctgagtgccctgatccaggaatatgaccagctcgatgccacgaagaacatgcccgtgcaggatctgccacgcctgtctatagccatgtag

SEQ ID NO: 245584 - DNA, 621 bp, synthetic construct
  misc_feature 1..621: note = Description of Artificial Sequence: Synthetic coding sequence
  source 1..621: mol_type = other DNA
atggaatctgatcagcgaaaggtggtgggagacggcggatctatctcaaaggggaagatttgcagcctgaaggctcgggcagtgctgattgacatggaggagggtgtggtgaatgagatcctccagggcccattgcgcgacgtgttcgatactaaacagctcattaccgatattagcggtagcggtaataactgggccgtcggtcacaaagtgtttggctctctctaccaagatcagatcctggaaaagttccggaaaagcgctgaacactgtgactgcttgcagtgcttttttattatccattcaatgggcggtggcacgggctcggggctcggcacctttctcctgaaggttttggaagatgaattcccagaggtttatcgatttgttactagtatctaccctagcggtgaggatgacgtgatcacgtcgccttacaatagcatcctggcaatgaaagagctgaacgagcacgccgactgcgtcctgcctatcgacaaccagtccctgttcgacattatttccaagatcgatttaatggtgaacagtggtaaactgggcacaaccgttaagccaaagagcctcgtgacatctagctccggggctctcaagaaacagtag

SEQ ID NO: 245585 - DNA, 1356 bp, synthetic construct
  misc_feature 1..1356: note = Description of Artificial Sequence: Synthetic coding sequence
  source 1..1356: mol_type = other DNA
atgccaagagaaataataacgctgcaactcgggcaatgtggcaaccagataggattcgagttctggaagcaactctgcgctgagcacggtatatctcccgaagggatagtggaggagttcgctaccgagggcaccgatagaaaagatgttttcttctatcaggccgacgatgaacactacatccctagggcggtgctgctggatctcgaacccagagtgattcacagcattctaaacagcccttacgcaaaactgtacaatccagagaatatttacctctccgaacacggtggaggggctggaaataactgggcctcaggcttttcgcagggtgagaaaattcacgaggatatattcgatatcatcgaccgcgaggctgacggaagtgactccctggaaggcttcgtgctgtgtcactccatcgccggtggaacgggtagtggtctcggcagctaccttttggagagattgaacgatcgctatccaaagaagcttgtccaaacgtacagtgtgtttcctaatcaggacgagatgagtgatgtggtcgtgcaaccatacaatagccttctgaccctgaagcggcttactcagaatgctgattgcgttgttgtgctggataataccgctctaaaccggattgctactgacaggttgcatatccaaaacccttcttttagccaaattaatcagcttgtgtcaaccattatgtcagcttcaaccacaactctgcggtatccagggtatatgaataacgacttgatcgggttgattgcctctttgatcccaaccccacggctgcacttcttaatgacaggctacacccctctgacaactgaccaatcggttgcttccgtgcgcaaaaccaccgttctggatgtcatgcgaagactgctgcagcccaagaacgtcatggtgagcactgggagggatcggcagactaatcattgctacattgccattctaaatattatacagggggaagttgaccccacacaagtccacaaatcccttcagaggattcgtgagcgcaagctagccaattttattccttggggacccgctagtatacaggtggccttaagcagaaaaagcccttacttgccatccgcccacagggtgtctggcttgatgatggccaaccatacaagcatctcaagcctttttgaaaggacttgccgtcaatacgacaagctgcgcaaacgtgaggcttttcttgagcagtttagaaaagaagacatgtttaaggacaacttcgacgagatggacacttcccgcgagattgtgcaacagctcattgacgagtaccatgccgctacaaggcctgattatatttcctggggaactcaggagcaatag

SEQ ID NO: 245586 - DNA, 1356 bp, synthetic construct
  misc_feature 1..1356: note = Description of Artificial Sequence: Synthetic coding sequence
  source 1..1356: mol_type = other DNA
atgcctcgggagatcatcaccctccagcttggccagtgcgggaaccagatcggttttgaattttggaaacagttgtgcgccgaacacgggatatcccccgaggggatagtggaggagttcgccaccgagggtacagacaggaaagacgttttcttttaccaggccgatgatgagcattatatcccgagagccgttctgctagacttagaacctcgggtgattcacagtatccttaatagtccatatgccaagttgtacaatccagagaacatctatttgagcgaacacgggggaggcgctggcaacaactgggcgagcggcttcagccaaggcgagaaaatccacgaggatatattcgatataatcgaccgagaggctgacgggtccgacagtttggaagggtttgtcttgtgccattccatcgccggaggtaccgggtccgggctgggaagttacctgctggaacgtctgaacgacaggtaccctaagaagctcgtacagacttattctgtgttcccttatcaagacgaaatgagcgatgtcgtcgtacagccttataactcactactgaccttgaagcgtctaacccagaatgctgattgtgtggtagtgctcgacaataccgccctgaacagaatagcaacagatcggctgcatatccaaaacccgagttttagccagattaaccagttagtctccactatcatgtcagcctccacaactactctcaggtaccccggatacatgaacaatgacctgatcggtctcatcgccagcttgattccgacccctaggcttcacttcctgatgactggatatactcccttgacaacagaccagagcgtggcttcagtgcgaaaaacgacggtgctggatgtgatgcggagattgctgcagccgaagaacgtcatggtctcaactggaagagacagacagacaaatcactgttatattgctattctcaatatcatccagggtgaagtggaccctacccaggtacacaaaagcctccagagaatcagggagcgaaagctcgctaacttcattccttggggccctgcatcaatacaggtcgcactctccaggaagtctccataccttccctccgcacatcgcgtttctgggctaatgatggccaaccacacgagtatctcctcgctgttcgagtcttcttgtcaacaattcgacaagttacgcaagcgcgacgcctttttggagcaattcaggaaagaagacatgttcaaagacaatttcgacgaaatggacagatcccgggaagtcgtccaagaactgattgacgaataccacgctgccactcagccagactacatctcctggggaactcaggagcaatag

SEQ ID NO: 245587 - DNA, 2001 bp, synthetic construct
  misc_feature 1..2001: note = Description of Artificial Sequence: Synthetic coding sequence
  source 1..2001: mol_type = other DNA
atgatccatgaactgctgcttgcattgtccggataccccggtagcatctttacctggaataagaggagcggactgcaggtttcccaggattttcccttcctccacccttctgaaacgtccgtgctgaacaggctatgtcgcctgggcaccgactatatccgcttcaccgagttcatcgagcagtatacaggccatgtacagcagcaggatcaccacccgtcccagcagggacagggaggcctgcacggaatttatttacgggcattttgcaccggcctggacagcgtgcttcagccttatcgccaggctctccttgacctggagcaggagttcctgggagacccgcatctttcaatcagccacgtgaactacttcctggatcagtttcagttgctgtttccatctgttatggtggtcgtcgagcagattaagagccaaaaaatccatggttgtcagatccttgagactgtctataagcactcttgtggaggactgcctccggtccgtagcgctctggagaaaatcctggccgtctgccatggggtgatgtacaagcagctttcggcttggatgttgcatgggctacttctggaccagcacgaggagttctttataaagcaggggccatcatccggcaatgtgtctgcccagcccgaggaagacgaggaggatctgggaatcgggggacttaccgggaaacagctccgggaactgcaggacctccgtctgatagaggaggagaatatgctcgcacctagcctgaaacagttttctttgagggtagagattctgccaagctatattccagtgagagtcgccgagaaaatcctttttgtcggcgaaagcgtgcaaatgttcgaaaatcagaacgttaatctgacaaggaagggcagcatactgaagaaccaggaggacacttttgcggctgagttacatcgcttgaagcagcaaccactcttctctctggtggactttgaacaggttgtggacagaattcgctcaacggtggcggagcatctgtggaagttaatggtggaagaaagtgacctcctcggacagcttaaaatcataaaggatttctacctcctaggcaggggtgagttattccaagcattcatcgatacggctcagcatatgctgaaaacccctccaaccgccgtgacagaacatgacgtgaatgtggccttccaacagtcggcccataaagtgctcttggacgatgataatctgttacctcttttacacctgactattgaatatcacgggaaagagcataaggatgcaacccaggcccgagaaggaccttctcgtgaaaccagtccacgtgaagctcctgcctctgggtgggccgctcttggcctgagctacaaagtgcagtggcccttacatattttgtttacccccgctgtcctggagaaatacaatgtggtattcaaatacctcctttcagtgcgcagggtgcaagccgagctacagcactgctgggccctccagatgcagcgcaagcatctgaagtctaatcagacagatgctataaaatggagactgcgtaaccacatggccttccttgtggacaaccttcagtactacctgcaagtggatgtgctggagtcacagttctctcagctgcttcatcagatcaatagtacacgagatttcgagagtatcagactcgcccatgatcattttttgtccaatctgctggcacagagcttcattttacttaaacctgttttccactgccttaacgaaattttggacctgtgccatagtttttgttccctggtgagccaaaacctgggaccgttggacgaacggggtgccgctcaactttccattctggttaagggcttctcccgtcaatcctctctactcttcaagatcttatccagtgtgagaaaccaccagatcaacagcgatctggctcagctattgttaagacttgactacaataagtactacacccaggccggagggactctggggagctttgggatgtag

SEQ ID NO: 245588 - DNA, 1029 bp, synthetic construct
  misc_feature 1..1029: note = Description of Artificial Sequence: Synthetic coding sequence
  source 1..1029: mol_type = other DNA
atggtcgtggtagagcagataaagagccagaagattcacggttgccagatcctagagactgtgtacaagcacagttgtggaggactcccacccgttcggtccgctcttgaaaagatccttgctgtatgccacggagtaatgtataagcagcttagcgcatggatgcttcacggtctcctcctggatcagcacgaggagtttttcattaaacaaggaccctcctcgggtaatgtgtctgcccagccagaagaggatgaagaagacctcggcatcggtggcctgacaggcaagcagttgcgagagctgcaagacctacgactgatcgaggaagagaacatgctggcaccatctcttaagcagttttcactgagagtagagattctgccgtcgtacatccctgtgagagtggccgagaaaatcctatttgtcggggaatctgtgcaaatgtttgaaaatcaaaacgtcaatttaacccggaaaggatccattttaaagaaccaagaggacacattcgcggctgaactccaccgtctcaaacagcagccactcttcagtctcgtggactttgagcaggtagttgacagaatccggtctaccgtggccgagcatctgtggaaactgatggtggaggaatccgacttgcttggtcagctcaagattattaaggatttctaccttctgggaaggggcgaactgttccaagcattcattgatactgctcaacatatgctgaagactccaccaactgccgtgactgaacatgacgtgaacgtagccttccaacagagcgcgcataaagtactgctggatgacgacaacctgctcccactcctgcatcttaccatcgagtaccacggaaaggagcacaaggcagacgctacacaagcccgagaggggccatctagggaaaccagtcccagggaggcccctgcaagtggctgggctgccctgggcctgtcctacaaggtccaatggccgcttcatatcctttttacaccagccgtgctggagaaaaatcggcagttttag

SEQ ID NO: 245589 - DNA, 3075 bp, synthetic construct
  misc_feature 1..3075: note = Description of Artificial Sequence: Synthetic coding sequence
  source 1..3075: mol_type = other DNA
atggcccgacacggtccaccttggagtaggctggatgctcagcaggagagggatgtacgcgagctggtgagaggagttgcgggtctgcaggacgaagctgaccctaattttcagctcgctctcaacttcgcgtggagtaattttcggttccatcgatttctcgacgtaaactcacacaagatcgagaaaacgatcgagggtatttatgagaaattcgtgatccacagcgacctgtcaaaggcagcctcctggaagaggctgacagaagagttcctcaatgccccactgcctagcataaaggaaattaaaacagatgcacactattccatcttgagcttattgctctgtctgagcgactctccctctaactccagctacgtggaaacacccagaaataaagaagtggagaaaaaagatgatttcgactggggaaaatacctcatggaagacgaagagatggacatcggaccatacatggacacccctaattggagtgaggagtccgaagaagagaatgatcaacagccacttagtcgggaggatagcgggatccaggtcgacagaacacccctggaggaacaggaccaaaaccgcaagcttgatccatgtatcagttggaaggacgaaccggacgatcggtcttggcttgagcaccacgttgtccatcagtactggaccgcccgtccgtcccagttcccgcactctctgcatcttcactccaatctcgccgctgtctgggatcagcacctgtacagttcagaccccctctacgtcccagatgacagggtccttgtgactgaaacccaggtaatccgcgaaactctatggctgttgtctggcgtaaaaaagctgttcattttccagctgattgatggaaaggtcacagtgcggaataacattattgtcacacacctgacccattcctgccttcgctctgtcttggaacaaattgcggcatacggacaggtggttttccgcttgcaagagttcatcgacgaggtcatgggtcatagtagtgagtctatgctgcctggctctggaagcgtacctaagaaatctaccgaagctccattcagaacctaccaggcatttatgtgggcactgtataaatacttcatttcatttaaagaggaacttgcagaaattgagaagtgcattatcaacaacgatacgacaatcacgcttgccatcgtagtcgataagctggcgccaagattgagtcagctaaaggtgcttcacaaggtcttcagtaccggcgtggccgaggtgccacctgacactaggaatgtggtcagggccagtcacctgctcaacactttgtacaaagcaatcttggaatatgacaacgtcggggaggcctccgagcagaccgtgtcactcctcttctccctgtgggtggagaccgtacgcccttacctgcagacagtggatgagtggatcgttcatggccacctctgggatggagccagggaatttatcatccagaggaataagaacgtgccagtcaaccatcgtgacttttggtacgcaacctacacactgtacagcgtctcagaaaagactgagaatgaggagaaaatgtccgacaatgccagtgcatcttctggatccgatcagggcccatccagtcggcagcacacaatggtttcatttctgaaacccgttctcaagcaaattattatggccggtaaatccatgcagctgctgaaaaacctccagtgcgcggaatcgacaacctgccaggcaggagcacgagatgccgagcgcaagagcctctacaccctcttcctggagagtgtgcagtcaaggctccgacacggggaagacagcacaccccaggtactgaccgagcaacaagccacaaaggagaatctgatgaagatgcagagtatcgccgaatcacacctggaactggacgacgtgcacgacccactgcttgctatcaactttgcacggatgtatctggagcaaagcgactttcacgaaaaatttgccggaggcgatgtgtgcgtggatcgctcctccgagtccgtgacttgccagacgttcgagttgaccctgagatcatgcttatacccccacatcgacaagcaatacctggattgttgtggaaatctgatgcagaccctgaagaaggactataggttagtcgagtatttacaggccatgcgcaatttcttcttgatggaaggaggggacactatgtatgatttttacactagcatcttcgataaaattagagaaaaggagacttggcagaacgtcagtttcctcaacgtgcagctgcaggaagcggtgggacagagatatcccgaagattcaagccgtctcagcatatccttcgaaaacgtcgacacagcaaaaaagaagcttcccgtacatatcctggacggactcacactgagttacaaggtcccatggcctgtcgatattgtaatatccctcgagtgccagaaaatctacaatcaggtgtttttgcttttgctgcaaattaagtgggccaagtactcactagatgtgctgctgttcggagaactggtgagtactgctgaaaagcctagactaaaagagggtctaatccacgaacaggatactgtcgctcagttcgggcctcagaaggagcccgtccgccagcagattcacagaatgtttctgttgcgcgtgaaactaatgcattttgtgaattcattacacaattacattatgacccgaatcttacacagcacgggattagaattccaacaccaggtagaggaagccaaggacttagatcagctgataaaaattcattaccgatatctgtccactatccatgatagatgcctgttgcgtgagaaagtaagctttgtcaaggaggcgatcatgaaggtcttaaatcttgccttgatgtttgcagacgggtggcaggcagggctggggacatggcggatggaaagcattgagaaaatggaaagcgattttaaaaattgccatatgtttttagtgaccattctaaacaaggctgtgtgtaggggatctttcccgcacctggagtctctcgccctatctctgatggccggtatggagcaatcttag

SEQ ID NO: 245590 - DNA, 3075 bp, synthetic construct
  misc_feature 1..3075: note = Description of Artificial Sequence: Synthetic coding sequence
  source 1..3075: mol_type = other DNA
atggcaagacatggaccaccatggtccaggttggatgctcagcaggaaagggatgtcagagaactagtgcgaggtgtggctggtctgcaggacgaagctgaccctaatttccagttggccctgaatttcgcatggtccaacttcaggtttcaccgattcctggacgtaaatagtcacaaaatcgagaagaccattgaagggatctacgagaaatttgtcatccatagtgatctgtctaaagctgcctcatggaagcgtcttaccgaggagttcttgaatgccccacttccttctatcaaggagatcaagaccgacgcacattactccatcctctctctgttactgtgcctgtcagacagcccttctaacagctcctatgttgagactccgaggaataaagaggtggagaaaaaggatgattttgactggggcaagtacctcatggaagatgaagagatggatatcggaccttatatggatacgcccaattggagcgaagaaagtgaggaagagaacgaccagcagcctctgtcccgagaggattcgggtattcaggtggaccggacaccacttgaagaacaggaccagaacagaaagttggacccctgtatttcttggaaggatgagcctgacgaccgaagctggctcgaacaccacgttgtccatcaatactggacagctaggcctagtcagttcccccactctctgcatctacactctaatctggctgctgtctgggatcaacatctttattccagtgaccccctgtacgtgcccgacgacagggtgttggtcacagagacgcaggtgattcgggagaccctctggctgctctcgggagtcaagaaactgtttatatttcagctgatcgatgggaaagtcactgtgcgtaacaacatcatagtcacgcatctcacccatagttgcctgcgatctgttcttgaacagattgctgcttacgggcaagtggtcttccgtctgcaggagtttattgatgaggtgatgggccattcatcagagtccatgctacccggtagcgggtccgtgcctaagaaatccacagaggctcctttccgaacttatcaggcatttatgtgggctctgtacaagtacttcatttccttcaaggaggaacttgccgagatcgagaaatgtattatcaacaatgacaccactataacgctggctatagtagtggacaagttagcaccaaggctgagccagcttaaagttctccacaaggtgttctctaccggcgtggcggaggtcccccctgatacccggaacgtggttagggcatcacacctacttaatactctatataaggcgatcctcgagtacgacaatgtcggcgaggcctccgagcagacagttagcctgttattcagcctctgggtagagactgtcagaccttatttgcaaacagtggacgagtggattgttcatggccatctatgggacggcgcacgcgagttcatcatccagagaaataagaacgtgccagtgaatcatagggatttctggtacgccacatacacgctgtactctgtgagtgagaagaccgagaacgaggagaagatgagcgataacgcttcggcaagcagtggtagtgatcagggcccatcctctcggcagcacacaatggtatcttttcttaaacctgtgctgaaacaaatcattatggccggaaaatctatgcaactcctcaagaatctgcagtgcgccgaaagtaccacatgccaggctggcgcacgggatgccgaaagaaaatccctctacacactattcttggaatctgtacagagccgactgaggcatggcgaggattctactccacaagtgctcaccgagcagcaggctacaaaggagaacctgatgaaaatgcaatctatcgccgagagccacctggaactggatgacgttcatgaccccctgctagccattaacttcgctcgaatgtacttggagcagtccgattttcacgaaaagttcgctggtggtgacgtgtgtgtcgaccggagcagcgagtccgtcacttgccagactttcgagctcacgctccgctcgtgtttatacccccacattgacaagcagtatctcgattgctgcggaaatctgatgcaaacgctgaagaaagattaccgcttggtggaataccttcaagccatgaggaacttctttcttatggagggcggagacactatgtatgatttctatacttccatctttgacaagattagagagaaagaaacctggcagaatgtgtcatttttaaacgtgcaactccaggaagctgttggtcagcggtaccccgaggacagctcaagattgtcaatttcttttgagaacgtggacactgctaagaagaagctgcctgtccatattctggatggtctgacactcagttataaagtgccctggccagttgacattgtgatttctctggaatgtcaaaagatatacaaccaggtgtttctgctcttactccagattaagtgggctaaatacagccttgatgtccttctgtttggggagctcgtctcaacagccgagaaaccccgtttaaaagaggggctcatccacgaacaggatacggtggcccagtttggccctcaaaaagagccggtccgacagcaaatccaccgcatgttcctcttgcgggtaaaactcatgcactttgtaaacagcctacacaactatatcatgacacggattctgcactccactggtcttgaattccaacatcaggttgaagaagcaaaggacctggatcaactgattaaaattcactatagatatctgagcactattcacgaccgctgcctcctccgcgaaaaagtgtcttttgttaaagaggccatcatgaaggtccttaatttggctctgatgtttgctgacggttggcaggccggactcggaacctggcgaatggaatccattgagaaaatggaatctgactttaagaattgccatatgttcctcgttaccatactgaacaaggcggtctgccgaggctctttcccacactgtgagtatattatgctgaaatatttttacctctgtatcagcctgtag

SEQ ID NO: 245591 - DNA, 1431 bp, synthetic construct
  misc_feature 1..1431: note = Description of Artificial Sequence: Synthetic coding sequence
  source 1..1431: mol_type = other DNA
atgtggaccgggtacaagatcctcatcttctcttacctgaccacagaaatttggatggaaaaacaatatttatcccaaagggaggtcgacttggaagcttatttcaccagaaatcacaccgtgttacagggcacacgctttaagagagctatcttccaaggccagtactgtaggaatttcggatgctgcgaggatcgggacgatggctgcgtgacagagttctacgcagcaaacgccctgtgctactgcgacaagttttgtgatagagaaaactccgattgttgtcctgactacaaatcattttgtcgcgaagaaaaggagtggcctccccacacccagccctggtaccccgagggatgctttaaagatgggcagcattacgaagagggatctgtgataaaggagaactgtaactcctgcacctgttccggccaacagtggaaatgcagccagcacgtgtgcctggtacgttctgagctcatcgaacaggtgaacaagggcgactacggctggaccgcccagaactactcacaattctgggggatgacactagaagacggatttaagtttaggctgggcactctgcctccatcccctatgctgctttccatgaacgagatgacagctagtctgcccgcaacaacagatttaccagagttttttgtggctagttacaaatggcccggatggacccatggaccactggatcagaagaactgcgctgccagttgggcctttagcacagcctcagtagctgctgaccggatcgcaatacagtccaagggccgatataccgccaacctgagccctcagaacctgatctcatgctgtgccaagaatcgccatggatgcaattctggctcaatagatcgtgcctggtggtacctgagaaaacggggtctcgtgtctcacgcctgctatcctctcttcaaagaccagaacgctacaaataacgggtgcgcgatggcctcccgcagtgacggtcgcggaaaaagacatgctactaagccttgccctaacaacgtcgaaaagtccaacagaatctaccagtgcagcccaccctatcgcgtatcgagcaatgagaccgagatcatgaaagagattatgcagaacggtcccgtgcaagccatcatgcaagtgagagaggacttctttcactacaaaactggtatctatagacacgttaccagcaccaacaaagagtctgagaaatatagaaaactgcagacacatgctgtgaagctgactggttgggggactctgcggggtgcacaaggccaaaaagagaagttctggatcgcagcgaatagctggggaaaaagttggggggagaatgggtacttccgaattctgaggggagtgaatgaatctgatatcgagaagttgatcattgctgcctggggccagctcaccagcagtgacgagccatag

SEQ ID NO: 245592 - DNA, 1008 bp, synthetic construct
  misc_feature 1..1008: note = Description of Artificial Sequence: Synthetic coding sequence
  source 1..1008: mol_type = other DNA
atgtggacaggatacaagatcctcatcttttcttatcttacgaccgaaatttggatggaaaagcagtatctctcccagcgagaagtcgacctcgaggcatacttcacccgcaaccacaccgtcctgcaaggaactagattcaagcgggctattttccagggccagtactgtcgaaacttcggatgttgcgaggatagagacgacggttgtgtgacggagttctatgccgcaaatgcactctgttattgcgacaagttctgtgacagagaaaattcagactgttgccccgactacaaaagcttttgccgagaggagaaggaatggcctccccatacccaaccatggtatcctgaaggccgttggacagcacagaattactcccaattttggggcatgaccctggaggacgggtttaagtttcgcctaggcaccctgccaccgagccccatgcttctgagtatgaatgaaatgacccggctggtctcacatgcttgctaccccctcttcaaggatcagaacgcgacgaacaatggctgtgccatggcgagtcggtctgacggcagaggtaagcggcatgctacaaagccatgtcctaacaatgtggagaaaagtaacaggatttaccagtgcagccctccttatagggtcagcagcaacgagacagaaatcatgaaagaaataatgcagaatgggccagtgcaggcgatcatgcaggttcgagaggattttttccactataaaaccggcatatatcggcatgtcacctccactaataaagagtccgagaagtaccgcaaattgcaaacccacgccgtgaaattgaccggctggggcaccctgaggggtgcccaaggccagaaggaaaaattttggattgccgctaactcatgggggaagtcatggggggagaacggatactttaggattttgcggggtgtgaacgagagcgatattgaaaagctgatcattgcagcttggggtcagctgacgtctagcgacgaaccatag

SEQ ID NO: 245593 - DNA, 612 bp, synthetic construct
  misc_feature 1..612: note = Description of Artificial Sequence: Synthetic coding sequence
  source 1..612: mol_type = other DNA
atggagaagcagtatcttagccaacgggaggtcgacctcgaggcctactttacccgcaaccacacagtactgcaggggactaggttcaaaagggctatatttcagggccagtactgcagaaattttggctgctgtgaagaccgagatgacgggtgcgtgacggagttttatgccgcaaatgcactctgttattgtgacaaattttgcgaccgagaaaactctgactgctgccctgactataagagcttttgtagggaagaaaaagaatggcccccacacactcaaccttggtaccccgagggatgtttcaaagacgggcagcactatgaggagggctccgtgatcaaggaaaactgcaactcttgcacgtgctctggacagcagtggaagtgcagccaacacgtctgtctagtgcggagtgagctaatagaacaagtgaataagggcgactacgggtggactgcccagaactacagccagttctggggcatgactttggaggatgggtttaaattcaggcttggtactctccctccttccccaatgctactaagtatgaacgagatgactgtgtcggtgccctcagattcgcgcatgtgtatgtacctctag

SEQ ID NO: 245594 - DNA, 468 bp, synthetic construct
  misc_feature 1..468: note = Description of Artificial Sequence: Synthetic coding sequence
  source 1..468: mol_type = other DNA
atggccagcagatcagacggccgtggtaaacgacatgcgaccaagccatgccctaataacgtagaaaagagcaatcgcatctatcaatgcagccccccatacagagtaagcagtaatgagacggaaataatgaaagagatcatgcagaatggccctgtgcaagccattatgcaggtaagagaagatttctttcattacaaaactggaatctaccgccatgtaacatccaccaacaaagagagtgagaaataccgaaagcttcagacccacgctgttaagctgactggttggggcaccctgcgaggcgctcaggggcagaaggaaaagttttggatagcggcaaactcttgggggaaatcctggggagagaacgggtatttccgtatcctgcgaggagtgaacgaaagcgacatcgagaaacttatcatcgctgcatggggacaactgacttcatcagacgagccgtag

SEQ ID NO: 245595 - DNA, 618 bp, synthetic construct
  misc_feature 1..618: note = Description of Artificial Sequence: Synthetic coding sequence
  source 1..618: mol_type = other DNA
atgcgcgcatggatgttcgtttcaatgcaggccgagatttggatggagaaacagtacctctctcagcgcgaggtggacctggaggcttatttcacaagaaatcacacagtcctgcagggcaccaggttcaaaagagcgatctttcagggccagtattgccggaacttcggatgttgcgaggatagagacgacggatgtgtaaccgagttttacgcggctaacgctctgtgttactgtgataagttctgcgatcgggaaaattcggattgttgtccagattacaagagcttctgcagagaagagaaagagtggccaccacacacccagccatggtatcccgaagggtgttttaaggacggccagcattacgaggagggttctgttatcaaagaaaactgcaatagctgtacctgcagtggacaacagtggaagtgctctcagcacgtttgcctagtgcgatctgaactgattgaacaagttaataaaggggactacggatggaccgctcagaattattcccaattttggggaatgacactggaggatggcttcaagttccgccttgggactttgccccctagtcctatgctgctgtcaatgaatgagatgactgaatag

SEQ ID NO: 245596 - DNA, 3570 bp, synthetic construct
  misc_feature 1..3570: note = Description of Artificial Sequence: Synthetic coding sequence
  source 1..3570: mol_type = other DNA
atgtccgtgaagtcccccttcaatgtgatgtcacgtaataatctagaagctcctccgtgcaagatgacagaaccctttaacttcgagaagaatgagaacaaactgcctccccatgaaagccttagatctcccggtactttacccaatcatcccaactttaggctcaagtctagcgagaacgggaacaaaaaaaacaatttcctcctgtgtgagcagacaaagcagtacctggcttctcaggaagataattccgtcagcagcaacccgaatgggatcaacggagaggtggttgggtcaaaaggcgacaggaagaaactgccagcaggtaactcagttagccctccttccgctgaatcaaattcgcctccaaaggaggtgaatatcaagccaggaaataacgtccggccagctaagtctaagaaactaaacaagctcgtggagaactctctgagtatctccaatcctggtctgttcacttctttagggcctccactgagatcaactacatgtcacagatgtggcctgttcggtagcctgcggtgttctcaatgcaaacagacgtactattgcagcaccgcctgccagaggcgagactggtccgcccactcaattgtgtgccgccctgtgcagcctaacttccacaagctggagaacaagagtagtatcgagactaaagatgtcgaagtcaacaataaatccgactgccccctgggcgtcactaaggaaatcgcaatttgggccgagaggattatgttctctgatctccgttccctccagctcaaaaagaccatggagatcaaaggcaccgtgaccgagttcaagcaccccggagacttctatgttcagttgtacagctcagaggtgctggaatatatgaatcagctctccgcaagcttgaaagagacgtatgctaacgtgcacgaaaaggactatatccctgtaaaaggagaagtttgtatcgccaagtatactgtggatcagacatggaatagagcaatcattcaaaacgtggacgttcagcaaaagaaggcccatgtactgtatatagactatggaaacgaggaaattatacctctgaataggatctatcaccttaacagaaacattgatctcttccccccatgtgctattaagtgtttcgtagctaatgtaatccctgcagagggaaattggtcctcagactgcattaaggctactaaacccctcttaatggagcaatactgcagcattaagattgtcgacatactggaggaagaagtggtgacatttgccgttgaggttgagctgcctaacagcggcaagcttctggaccatgtgttgattgagatgggctacggccttaaaccatccgggcaggactcaaaaaaagagaacgccgaccaatcagaccctgaagacgtcggaaaaatgacaaccgagaataatatcgtcgtggacaaaagtgatctcattcctaaggtccttaccttgaatgttggggatgaattttgcggagtggtcgcacacattcagacccctgaggatttcttttgtcagcaactgcagtccgggcgaaagctcgctgagttacaagcaagcctttccaagtactgtgaccagttaccgccaagatctgacttctacccagcaatcggtgatatttgctgtgctcaatttagcgaggacgaccagtggtaccgggcatcggtattagcttatgcaagcgaagagtccgtgctcgtgggctatgtggattacggcaatttcgagatcctgtccctgatgaggctgtgtcccattattcccaagttgctcgaattacctatgcaggccataaagtgcgtgttggcaggtgtgaaacctagcctcgggatctggacaccagaagcaatctgcctgatgaagaagctggtgcaaaataaaatcatcaccgtgaaagtggtggacaagctggaaaatagctctctggtggaactcatcgataaaagcgaaacccctcatgtttctgtcagcaaggtgctcttggatgcaggctttgccgtaggagagcagagtatggtgactgataagccctcagatgttaaagaaacaagcgtacccctgggagtggagggtaaggtgaaccccctggaatggacttgggtcgaactgggcgtcgaccagactgtagacgtggttgtgtgtgtgatttatagccctggcgagttttattgccacgtgctcaaagaagatgcgctcaagaaacttaacgaccttaataagagtttggcagaacactgtcagcaaaaactgcccaatgggttcaaagcagagatagggcagccttgctgcgctttcttcgctggagacggcagttggtatagagctttggttaaggaaatcctgccaaatggccacgttaaagtgcacttcgtggactacgggaacatcgaggaagtgaccgctgatgaactgcgtatgatcagtagcacatttctaaatctaccctttcaaggaatccgctgccagctggcagacatccagagtcgcaacaaacactggtcggaagaggccatcaccagatttcaaatgtgtgtcgctggcatcaagctgcaagccagagtggttgaggtaaccgaaaatgggataggggtggagctcaccgatctctctacgtgttacccgcgaatcatctcggacgtgctgatcgatgagcatctcgtgctgaagagcgcctccccccacaaggatctccctaatgaccgcttggtcaacaagcacgaactccaggtgcacgtgcaggggctccaggcaacctcctctgcggagcagtggaagacaatcgagcttcccgtcgataagacgatccaagccaatgtgctggagattatcagccccaaccttttctacgcgttgcctaaaggcatgccagagaatcaagaaaagctctgtatgttgaccgcagagttgctcgagtactgcaacgcccctaaaagcaggccaccctatagacccaggatcggagacgcctgttgcgctaaatataccagcgacgacttctggtaccgcgctgtggtcctgggaacatcagacactgacgtcgaagtcctctatgctgactacggcaacatcgagactctgcctctgtgtagggttcagcccatcacctcttcacatctggcgttacctttccaaatcatccgctgcagtctcgaaggtctgatggagctgaatggcagctcatcacagctcattatcatgctgctgaagaatttcatgctgaatcagaacgtaatgttaagcgtgaagggcatcactaagaatgtgcacacagtaagcgtggagaagtgctccgagaacggcacggtggacgtcgccgacaaactagtgaccttcggtttagcaaagaatatcaccccccagaggcaaagtgctctgaataccgaaaagatgtaccggatgaactgctgttgtaccgagctccaaaagcaggtggagaaacacgaacacattctactgtttctcttgaacaatagcacaaatcagaacaagtttatcgagatgaagaagctcttgaaaaaaacagcttctttggggggtaaaccactgtag

SEQ ID NO: 245597 - DNA, 3315 bp, synthetic construct
  misc_feature 1..3315: note = Description of Artificial Sequence: Synthetic coding sequence
  source 1..3315: mol_type = other DNA
atgtccgtaaaatcgccatttaacgtgatgtccaggaacaacctggaagcccctccttgcaaaatgaccgagccgttcaacttcgaaaagaacgagaataagttgccgcctcacgaaagtttgaggtcacctggtacactgcccaatcacccaaattttcgactgaagtcttccgaaaatgggaacaaaaagaacaacttcctgctgtgcgagcagactaaacaatatctggcctcccaggaggataatagcgtaagctctaatccaaatggcatcaacggagaggtggtggggtccaagggcgatcgcaaaaagctccctgccggaaactccgtaagcccaccctccgccgagtccaactcccctcccaaggaggttaacatcaaacctggcaacaacgtgcgaccggctaagtcgaagaaactgaataagctggttgaaaactccctctctatctctaacccgggtctgtttacaagtctgggcccacccctgaggagcaccacatgccacagatgtggtctcttcggcagcttgaggtgctcccagtgtaagcagacatattattgtagtacggcctgccagaggcgtgactggagcgcgcatagtatcgtgtgcaggccggtgcaacccaacttccataaactggaaaacaagtccagtatagaaaccaaagatgtggaggttaataataagagtgattgtcctctcggagtgacaaaggaaatcgcaatttgggctgaacgcatcatgttcagtgacctcagaagcctgcagttgaaaaagaccatggagataaaaggcaccgtcactgaatttaagcatcccggagatttttacgtgcagctgtacagctctgaggtgcttgagtatatgaatcaattatccgcatccctgaaggagacgtatgcgaatgtccacgagaaagactacatccccgtcaaaggcgaggtgtgcattgccaaatacacagtggaccagacttggaaccgcgcaatcattcagaatgtcgatgtccagcagaaaaaggctcatgtgctgtatatagattatggcaacgaagagataatccctctgaaccgaatctatcatttgaaccggaacattgacctctttcccccttgcgcgatcaagtgcttcgttgctaacgtcattcctgcggagggaaactggagtagcgattgcatcaaagctaccaaacctcttctcatggagcagtactgcagcatcaagattgtagatatcctagaggaggaagtggtaactttcgcagtggaggttgaacttccaaattcgggcaaactgctggaccacgtcttgattgaaatgggctacgggctcaagcccagcggacaggattccaagaaagagaatgcagaccagagtgatcccgaggacgtggggaaaatgactaccgagaacaacattgttgttgataagagcgacttgatccccaaagtgctgaccctgaatgttggcgacgagttttgcggtgtcgtcgcccatattcagacccctgaagacttcttctgccaacaattgcagagcgggagaaaacttgccgagctgcaggcctcacttagcaaatattgtgatcagttacctcctcgctcagatttttaccccgcaatcggcgatatttgctgtgcacagttttccgaggacgatcagtggtatagggcctccgtcctagcctacgcaagcgaggagtcagttctcgtcggctacgtggactatggaaatttcgagatactttcccttatgcggctctgccctatcatcccaaaactgctcgagttgccaatgcaggccatcaagtgcgtcctggctggggtcaagccctctttgggaatatggaccccagaagccatttgtcttatgaagaagctggttcagaataagattatcactgtcaaagtggtggacaagctggagaattcctccctggtggagctgatcgataagtctgagactccccacgtaagtgtctcgaaggtgctcttggatgccggatttgcagtaggggagcagagcatggtgactgacaaaccttcggacgtcaaggaaacttccgttccactcggcgtagaaggcaaggttaatcctcttgaatggacttgggtcgagttgggcgtggaccagaccgtggacgttgttgtgtgcgtcatctattcccccggagaattctactgtcatgttttaaaggaagacgccctcaaaaaactgaatgacctcaacaaaagcctggcagaacattgtcagcagaaacttcctaatggctttaaagcagaaatcggccaaccttgttgtgccttcttcgctggggacggatcttggtatcgcgctctggtgaaggaaatccttccaaacggccatgtgaaagttcactttgtcgattacggcaacatcgaagaggtaaccgccgatgagctaagaatgatctccagtacctttctcaatttgccgttccaaggcattcgctgccagctcgcagacatacagtcaagaaataaacactggtcggaagaggcaatcacacgatttcagatgtgcgtggccggaattaaacttcaggcacgtgttgtcgaagtgacagaaaatggtatcggtgtggagctgacagacctgtccacatgttaccctcgaataatctctgatgtgttgatcgacgagcatcttgtattgaagagcgccagcccacacaaggacctgccaaacgataggcttgtgaacaagcatgaactgcaggtgcacgtacagggacttcaggccacctccagcgccgaacaatggaaaactattgagctccccgtggacaaaacgatccaggcgaacgtcctcgaaattatttcccccaatctgttttacgcattacccaaaggaatgcccgagaaccaggaaaagctctgtatgctgaccgcagagcttctagaatactgcaatgctcccaaatctcgtccaccatatagacctcggatcggtgatgcatgttgcgccaaatacactagcgacgacttctggtaccgggctgtggttcttggaacaagcgacacggacgttgaagtgctgtacgccgactatggtaatatcgaaaccttgccattgtgtagggtgcagcccattacatcaagccatctggcactgccctttcagattatcaggtgctccttggaggagaaaatgtaccgtatgaactgttgttgtaccgagctgcagaaacaagtagagaagcacgaacatatcctactcttcctccttaacaactctactaatcagaacaaatttattgagatgaagaagctcctcaagtcctag

SEQ ID NO: 245598 - DNA, 3228 bp, synthetic construct
  misc_feature 1..3228: note = Description of Artificial Sequence: Synthetic coding sequence
  source 1..3228: mol_type = other DNA
atgagcgtgaagtccccttttaacgtcatgagccgaaacaatttggaagccccaccgtgcaagatgaccgaacccttcaactttgagaaaaacgagaacaagttgcccccacacgaatctctcagaagtcctgggactctgccgaaccaccctaattttaggctgaaaagcagcgagaacgggaacaaaaagaacaacttcctgctgtgcgaacaaaccaaacagtatctggccagccaagaggataattccgtgtccagcaatcccaatggaatcaacggtgaagtcgtgggttctaaaggcgatcggaagaaattgcccgcagggaacagcgtgtctcctccttccgccgaaagcaatagcccacccaaggaggttaatatcaaaccagggaataatgtccgtccagccaagtcaaagaagctcaacaagctggtcgaaaattcgctcagcatcagcaaccctggcctcttcacaagccttggccctccgttgcggagtactacctgtcaccgttgtggtctgtttggatctctgcgctgttcacaatgcaagcagacatattattgtagcaccgcctgtcagagacgcgattggtccgcacattcaatcgtttgtcggcctgttcagccgaacttccacaagctggagaacaaatcaagtatcgaaaccaaggacgttgaggtcaataataagtctgattgtcccctgggcgtgacaaaagagatcgccatctgggcagagaggattatgttcagcgacttgcggagccttcagctgaaaaagacgatggaaatcaagggaactgtgaccgaattcaagcatcccggagacttttatgtgcaactgtactcaagcgaagtgctggagtacatgaaccagctctctgctagtctcaaggaaacgtatgctaatgttcatgagaaagactacatccctgtcaaaggagaggtgtgcattgctaaatatacggttgaccagacttggaacagagctatcatccaaaacgtagatgtgcaacagaagaaagcacacgtgctctacattgactatggaaacgaggaaattattccactcaacaggatctatcatctcaaccgaaacatagacctctttccaccttgtgctattaagtgtttcgtggctaatgtaattcctgctgaggggaactggagtagcgactgtatcaaagccacaaagccgctgctaatggaacagtattgttctatcaagattgtggatattctggaggaagaggtggtgacattcgctgtggaggtggagctccccaattccggaaaactgctggaccacgtcttaatcgaaatgggctacggcctgaagcctagcggccaagatagcaaaaaggaaaacgccgatcagagcgatccggaagacgtaggtaagatgactaccgagaataacatagtagtggacaagagcgacctaataccaaaggtgctcactctgaatgtcggcgacgaattctgtggcgtcgtagcccacatccagactccagaggattttttctgtcaacagctacagtctgggaggaaactggcagaactgcaggctagtctgtccaagtactgtgaccagctacctccacgtagcgatttctaccccgcaatcggggacatctgctgcgcacagttctctggggtgaaaccttcactaggcatatggactcctgaggctatatgcctcatgaagaagctggtgcagaataaaatcataacagtgaaagtagtggacaaactggaaaactcaagcctcgtggaattaattgacaagtccgaaaccccccatgtgagtgtttctaaggtgttacttgacgcaggcttcgctgtcggagagcagtccatggtgactgataagcccagcgatgtcaaggagacttcggtccctctgggcgtagagggcaaggtgaatcccctggagtggacttgggtggaattgggggtcgaccaaacagtcgatgtggtggtttgtgtgatttattcaccgggagagttctactgtcacgtcctgaaggaggatgctctgaagaagttgaacgatttgaataagtctttggctgagcattgtcagcagaaactccctaatgggtttaaagccgaaatcggacaaccctgctgcgctttctttgccgacatacaatctagaaacaagcattggtccgaagaggcaatcacaagatttcagatgtgtgttgccggtatcaaacttcaggcaagagtggttgaggtcaccgaaaacgggatcggagtggagttgactgatctgagcacttgttatccaagaattatcagtgacgttttgattgatgagcatctggtcctgaagtctgcctcaccccacaaagaccttcccaatgatcgcctggtgaacaagcacgagcttcaggtccatgtgcaaggcctgcaggccaccagctccgctgagcagtggaaaacgattgagttaccagtggacaaaactatccaggccaatgtcctggagattattagtccaaatcttttttacgcgctgcccaagggcatgccagagaaccaggaaaagctgtgtatgctaacagccgaactgctggagtattgtaacgccccaaagtcaagacctccgtataggccacggattggcgacgcttgctgtgccaagtatacatccgacgacttttggtaccgcgcagtggttctggggacatctgataccgatgtggaggttctgtatgcggactatggaaacatcgaaactcttcccttatgtcgggtgcagcctattacaagctctcacttagccttacctttccagatcattagatgttctctggagggtctgatggagctgaatggctcaagctcgcagcttatcattatgctgctgaagaacttcatgctcaatcagaacgttatgctctcagtgaagggaataacaaagaatgtccacacggtaagcgtagagaaatgttccgagaacgggaccgtggacgtcgccgataagctcgtgacattcgggctggcaaagaatataacgccccagcgacagagcgctctgaataccgagaaaatgtatcgtatgaattgttgttgcacggaattgcagaagcaggtcgaaaagcatgaacatatcctgctattcctcctgaataatagtacaaaccaaaacaagtttatcgaaatgaaaaagcttcttaagaagactgcttccctcggtgggaaacctttgtag

SEQ ID NO: 245599 - DNA, 3342 bp, synthetic construct
  misc_feature 1..3342: note = Description of Artificial Sequence: Synthetic coding sequence
  source 1..3342: mol_type = other DNA
atgagcgtgaagtctccattcaacgtcatgtcaagaaacaatcttgaagcgcctccgtgcaagatgaccgagcctttcaactttgaaaaaaacgaaaataagcttccccctcacgagtccctccggtcaccgggaacactccccaatcatccaaactttagattgaagtcctctgaaaatgggaataagaagaacaactttttactctgtgaacaaactaaacagtatttggccagccaagaggacaatagcgtatcgtctaatcccaacggcattaacggagaagttgtgggctccaaaggagaccgcaaaaagttacccgcaggaaactcggtgtcgccaccaagcgccgaatcaaatagtccgccaaaggaggtgaacataaagcctggcaacaatgtgcgacctgcaaagtcgaaaaagctgaacaagctggtggagaactcactgtccatctccaaccctgggttgttcaccagtctagggccaccattgagatcaaccacctgccaccgatgtggcctgtttggcagtctgcgatgtagccagtgcaagcaaacctattactgctccaccgcctgccagagacgggattggtccgcccactctattgtgtgccgtccagttcagcccaactttcacaagcttgaaaataagtcatccatagaaactaaggatgtagaggttaacaacaagtcagactgccccctgggagtgacaaaggaaattgccatctgggccgaaagaataatgttctcagatctcaggtccctccagttaaaaaagactatggaaattaagggcaccgttactgaattcaagcatcccggtgatttttatgtacagttatattccagcgaggtgctcgagtacatgaaccagctgtccgctagcctgaaagaaacatacgccaatgtgcacgagaaagactatatccctgtgaagggggaggtgtgtatcgcaaagtacaccgtggaccagacatggaacagggccattatacagaacgtagacgtccaacagaaaaaggcccacgtgctgtatatagattatggaaacgaggagatcattcccctaaaccggatttaccacctgaatagaaacattgacctgttccccccatgcgctatcaaatgcttcgtagccaacgttatacctgctgaaggtaactggtcttccgattgcataaaggcgaccaagcctctgcttatggagcagtattgctcaatcaagatcgtggacattctagaagaggaggtggtgacatttgctgtggaggtggaactacccaattctggcaaactgctggaccatgtgctcatcgagatgggctatggcctgaagccatccggacaggactctaaaaaggagaatgctgaccagtccgacccagaggacgttggtaagatgaccacggagaacaacatcgtcgtggacaaatccgacctgatcccaaaggtcctgacactgaatgtgggcgatgaattctgcggcgtggtggcacatattcaaacacccgaggacttcttctgccagcaattacagtccggacgcaagctggccgagttacaggcttcgctgtctaaatactgtgaccagctcccacctcgatcggatttctatcctgctatcggggatatctgctgcgcccagttttctgaagacgatcaatggtatcgagcctccgttcttgcctatgcttctgaagagtctgtgctcgtgggctacgtagattatggcaatttcgagatcttatccctgatgaggctctgcccaattatccccaagctgctagaactgcctatgcaggcaatcaagtgcgtgttagccggagtgaagcctagcctgggaatatggacgcctgaggcaatttgtctgatgaaaaagctggtgcagaacaaaataatcacggtcaaagtggttgataaattggagaacagcagccttgtggagctgatcgataaatctgagaccccccacgtgagcgtcagtaaggtgttacttgatgccggatttgccgtgggggaacagagtatggtcacagacaagcccagcgacgtcaaggaaacctccgtgcctctgggcgtggaaggaaaggtgaatcctctggaatggacttgggtcgagttgggcgttgaccagacagttgacgttgtcgtttgtgtcatttactccccgggtgagttctattgtcatgtgcttaaggaggatgccttgaagaagttgaacgacctcaacaagagcctcgccgagcattgtcagcaaaagctgccaaacgggttcaaagccgagatcggacagccttgttgcgccttcttcgcgggagacgggtcgtggtaccgggctctggtgaaggaaatacttcctaacgggcacgtcaaggtacattttgtggactacgggaatattgaggaggttacagccgatgagttaaggatgatatctagcactttcctgaacttgcccttccagggcatccggtgtcagttggccgacatccagtctcggaacaaacattggtctgaggaggcaattacgagatttcagatgtgtgttgctggaattaagttacaggccagagtggttgaggttacagagaacgggataggggttgaactgactgacctttctacttgctatcctagaatcatctccgatgtgctcattgacgaacacctggtgctgaagtctgcctcaccacataaggatcttcctaacgaccgactggtgaacaaacacgaactccaggtacatgtgcagggcttgcaggctaccagctctgctgagcaatggaaaacaatagaactgccagttgacaagactattcaggccaatgtgctggagatcatctcaccgaacctgttttacgcactgcctaagggtatgccggaaaaccaggagaaactatgtatgctaacggctgagctcctggaatattgcaacgcaccaaaaagccggccaccgtatcgccctcgcattggggacgcatgctgcgcgaagtatacttctgacgatttctggtatcgggctgtagtcctgggtactagtgacactgacgtagaagtgctatacgcagactacggcaatattgagacgcttcccctgtgtagagttcagccaatcacgagctctcatcttgccctgccttttcagattatacgctgctccctggaggaaaaaatgtatagaatgaactgttgttgtacagaactgcaaaaacaggtcgagaagcacgaacacatcctactattccttttgaacaactctaccaatcagaataaattcatagaaatgaagaaattgctgaaaaaaacagcctcactgggcggaaaaccactgtag

SEQ ID NO: 245600 - DNA, 2154 bp, synthetic construct
  misc_feature 1..2154: note = Description of Artificial Sequence: Synthetic coding sequence
  source 1..2154: mol_type = other DNA
atgaatcagttaagtgcgtccttaaaagaaacctatgccaatgtccatgagaaggattatatcccggtgaagggggaagtgtgtatcgccaagtacacagttgatcaggctataaaatgtttcgtggcaaatgtcatccccgcagagggaaactggtctagcgactgcatcaaagccaccaagccgctcctgatggaacagtactgttccattaagatagttgatattttagaagaggaggtagtgacctttgccgtggaggttgagttgcctaatagcggaaaactgttggaccacgtgctgatcgagatgggctacggcttgaagccaagcgggcaggacagtaagaaggaaaacgctgatcaaagtgatccagaggatgttggcaagatgaccacagagaacaacatcgtggtggacaagagcgacctgattccgaaggtcctcaccctgaatgtcggcgacgaattctgtggagtggtggctcatattcaaactcccgaggattttttttgtcagcaactgcagagcggtagaaagctggccgagctccaagcaagcttatctaaatactgcgaccagctgcctcccaggtccgacttctacccggcaatcggggatatctgctgtgctcagttttcaggtgtgaaaccttccttagggatatggaccccagaggctatttgcctgatgaagaagttggtgcagaacaagattatcacagtgaaggtggtggacaaacttgaaaacagctctttagtggagctaattgacaagagcgagacccctcacgtgtccgtgtccaaagtattgttggacgccggattcgccgtgggtgagcagagcatggtcaccgataaaccgtcggacgtgaaggaaacgagcgtgccacttggagtggagggcaaggtgaatcccttggagtggacatgggtggagttgggtgtcgaccagaccgtggatgtggtcgtgtgcgtgatctattctcccggagaattttattgccacgtgcttaaggaggatgcgcttaagaagctgaacgacctgaataagagtctggctgagcactgtcaacaaaagcttcccaatgggttcaaggctgaaattgggcaaccttgttgtgccttttttgctggcgacggatcttggtaccgcgctttagtgaaggagatactcccgaacggccatgtcaaggtccacttcgtcgattacggaaatatcgaggaagtcactgcagacgagctcaggatgatcagctcaacattcctgaatttgccttttcaggggattcgctgccaactcgccgatatacagagtcggaataaacattggagtgaagaggctatcactcgtttccagatgtgcgttgcgggtatcaaactgcaagcgagggtcgtcgaggtcaccgagaatggtattggagtggagctaaccgacctctccacatgctaccctaggataattagcgacgttctcatcgacgaacatcttgtacttaagtccgccagtccccacaaagatctgccaaacgacagactggtcaataaacacgagctacaggttcacgttcaggggctccaggccacatcatccgcagaacagtggaagacaatcgagcttcctgtcgataaaacaatccaggcaaacgtactcgagatcatttcacccaatctgttttacgcactgccaaagggaatgccggagaatcaggaaaagctctgcatgctgacagcagaactactggaatattgcaatgcgcctaagagtcggcctccttataggcccagaatcggcgacgcctgttgcgcaaagtacacatccgatgatttctggtatcgcgctgtggtgttaggtacctcggatactgacgttgaagtcttatacgccgattatgggaacattgaaaccctccccctctgccgagtccagcctattacatcctcacaccttgccctgccatttcagatcattcggtgcagtctggaagagaaaatgtatcggatgaattgttgctgcactgaacttcagaaacaggtcgaaaagcatgaacacattttgctattcttgttgaacaactccaccaaccaaaacaaattcatagagatgaagaagctgctaaaaaaaaccgcgtcactgggcggaaagccgctgtag

SEQ ID NO: 245601 - DNA, 1956 bp, synthetic construct
  misc_feature 1..1956: note = Description of Artificial Sequence: Synthetic coding sequence
  source 1..1956: mol_type = other DNA
atgctgcgcctccagatgacagacggtcatattagctgcactgcagtcgagtttagctacatgagtaagatttcactcaacaccccacccggaacgaaggtgaaactgtccggaatcgtggatatcaagaacgggtttttactcctgaacgacagtaatacaacggtgctgggcggagaagtcgagcacctcatagagaaatgggagctccagagatcactttcgaaacataacaggtcaaacatcggaactgaggggggtccacccccattcgttccattcggtcaaaagtgcgtatcccacgttcaggtcgacagccgggagctcgataggaggaaaactctgcaagtgacaatgccggtgaaaccaacaaacgacaatgacgagttcgagaagcaacgcacggcagccatcgcagaagtcgctaaatctaaagaaaccaagactttcggaggtgggggagggggagcgcgatctaatctgaatatgaatgctgccggtaatcgcaatagagaagtgctacagaaggaaaaaagcactaaaagtgaaggaaaacacgagggcgtgtatagggaacttgtggatgagaaagcactaaagcacatcacagagatgggtttctctaaggaggcatctaggcaagctctgatggacaatgggaataatttggaggccgctctaaacgtcctgttgacttctaataagcagaagcctgtgatgggccctcccctgaggggcagaggtaaggggagaggcagaattaggtctgaggacgaagaggaccttggtaatgccaggccatcagctccctctactttatttgatttcctcgaatcaaagatgggaacactgaacgtggaggaacccaaatctcagccccagcaactgcatcagggacagtacagatcctcgaacactgaacagaacggtgtgaaagataataatcatctgaggcaccctccacgtaacgacacccgacagccaaggaatgagaagccacctaggttccagagggatagtcagaacagtaagagcgtgctggaaggatctggacttcctcggaatagaggatccgaacggccaagcactagtagtgtgtcagaggtttgggcggaggacagaattaagtgcgatcgtccatactctaggtatgacaggacgaaggatacctcctatccactcggctcccagcacagcgatggggcatttaagaaaagagataattccatgcagtcaaggagcgggaaggggccttcttttgctgaggcaaaggagaaccctctccctcagggcagcgtggattacaataaccagaaaagaggaaagcgcgagtcccagacaagcatccccgattacttctatgaccggaagagtcagaccattaacaacgaggcattttcaggaataaaaattgaaaaacacttcaacgtgaatactgactaccaaaaccccgtaaggtccaactcgtttatcggcgtgccaaatggggaagtggaaatgccactcaaggggcgtagaattggaccaattaaaccggctggacccgtgactgcggttccatgcgatgataaaatcttttataactctggccctaaacggcgaagtggaccaatcaaaccagagaagatcctggagagttccattcccatggaatatgcaaagatgtggaagcctggtgatgaatgctttgcgctgtattgggaagacaataaattctatcgagccgaggtggaagccctgcacagctctgggatgacagccgtggtgaagttcatcgactacgggaattatgaggaagttttactgtcaaacatcaagcccattcagaccgaggcctgggaagaggaaggaacctacgatcagacgcttgaatttcggaggggtggtgatggacaacctcgacggtccacaagacccacccagcagttctatcagccgccacgagctagaaactag

SEQ ID NO: 245602 - DNA, 1956 bp, synthetic construct
  misc_feature 1..1956: note = Description of Artificial Sequence: Synthetic coding sequence
  source 1..1956: mol_type = other DNA
atgttgcggttgcaaatgaccgatggacacatatcttgcaccgccgtggaatttagctacatgtctaagatcagtcttaacactcctccaggcactaaagttaaactgtctggcattgtagacatcaaaaacggtttccttctcctgaatgactcaaacaccacagtgcttggcggagaggtggagcatctcattgaaaaatgggagctgcaacgaagcctttcgaaacacaacaggtccaacataggaaccgaaggaggaccccctccgttcgtgcccttcgggcagaaatgtgtgagccatgtccaagtagattcccgagagttagatcggagaaagactctccaggtaacgatgccagtgaagcccacaaacgacaacgatgaatttgagaaacagcggactgcagctattgcagaagtcgcaaagagcaaggagaccaagacattcggcggaggaggcggaggcgctaggagcaacctgaatatgaacgccgctggcaaccgcaaccgtgaagtcctccagaaggagaaatcaacaaagtccgaaggaaagcatgagggagtttaccgcgaattagtggatgaaaaggccctgaagcatattacagagatggggttttccaaggaagcaagcaggcaggctctgatggacaacggcaacaatttggaagctgctcttaatgttctcctgaccagcaataagcagaaaccagttatgggtcccccactgagaggacggggaaaagggaggggtcgcatccgctctgaggacgaggaggacctggggaatgctcgtccttctgcccctagcacactttttgattttttagagagtaagatggggaccctgaacgtggaggagcccaagtcccaaccacagcaactgcaccaggggcagtaccggtcaagcaacaccgaacagaatggtgtgaaagataacaaccatctgaggcatcctcccaggaacgataccagacagccaagaaacgaaaaacccccacgctttcagagggactcccaaaattcgaaatctgtgctggaagggtcaggtctgccccgaaacagaggctcagaacgaccgtccacaagctcagtatcggaagtttgggccgaagaccgcatcaagtgcgacagaccttattccaggtatgacagaacaaaagacacctcataccctctcggctcacagcacagcgacggagcgtttaagaaacgggataactccatgcaatctagatccggcaagggaccttcttttgctgaggccaaggagaatcccctgccacaagggtcggtggactataacaatcagaagcgcggaaagagggaaagtcagaccagtataccggattatttttacgatcgaaagagtcagactataaataatgaggccttttccgggatcaagatcgaaaagcatttcaatgtcaataccgactatcaaaatcctgtgaggtccaactcattcatcggtgtgcctaacggggaggttgaaatgcccctcaagggacgacggatcggtcccatcaaacctgcgggtccagtaaccgccgtgccatgcgacgacaaaatcttctataacagcggaccgaagcggagatctgggccaatcaaaccagagaagatactcgaaagttcaattccaatggagtatgctaagatgtggaagcccggtgatgagtgcttcgctctctactgggaggacaacaagttttatagagccgaagtagaagccctgcacagcagcggaatgaccgctgtcgtgaaattcatcgattatgggaactatgaagaggtactcctatccaacattaaaccaatccagaccgaagcttgggaggaggaagggacatacgatcagaccctcgagttcagacgcggtggtgatggtcaaccacggcgatctactcgcccaacacagcagttctatcagccacctagggcaagaaattag

SEQ ID NO: 245603 - DNA, 390 bp, synthetic construct
  misc_feature 1..390: note = Description of Artificial Sequence: Synthetic coding sequence
  source 1..390: mol_type = other DNA
atgttgcggttacaaatgaccgatggtcacattagctgcacagccgtcgagttctcctacatgagcaagatcagcctaaacacacctcctggcactaaagtgaagctgtctgggatcgtggacatcaaaaatggattccttcttctgaatgacagcaacactaccgtattaggaggtgaagttgagcacttgattgaaaagtgggaactgcagaggtctttgtctaaacacaatcgatctaatattgggacagaaggcggtcctccccctttcgtaccatttgggcagaagtgtgtctcgcacgtgcaggtggacagcagagagctggatagacgcaaaacccttcaggtgactatgccagtgaagccaaccaacgacaacgacgagtag

SEQ ID NO: 245604 - DNA, 1956 bp, synthetic construct
  misc_feature 1..1956: note = Description of Artificial Sequence: Synthetic coding sequence
  source 1..1956: mol_type = other DNA
atgctgaggttgcagatgactgacggtcacatctcctgtacagctgtcgaattttcatacatgagcaaaatttcattgaacacacctcccggaacaaaggtgaagctgtctggtattgtggacatcaagaacggattcttgcttcttaatgactccaatacaacagtgcttggcggagaggtggaacatcttatagaaaagtgggagctacagagatcattatcaaaacataacaggagtaacatcgggacagagggaggccctcccccattcgtgccattcgggcagaagtgcgtgtcacacgtacaggtggactcgcgcgaacttgatcgccgaaagactctgcaggtcacgatgccagtaaagccaacaaatgataatgacgaattcgagaagcagcgcactgccgctatcgcagaagtggccaagtccaaagaaacaaagacttttgggggtggagggggaggggctaggagcaacctgaacatgaatgccgctgggaacaggaacagggaagtcttacagaaagagaagagcactaaatcagaaggcaagcacgagggcgtttatcgggagctggtggacgaaaaggccctgaagcacatcactgagatggggtttagcaaagaggctagcaggcaggccctcatggacaacggcaataatcttgaggctgctctgaacgtcctacttacatccaataagcagaaaccggtgatgggtccccctctcaggggcaggggcaaggggagaggacgcatccggtctgaggacgaggaggatcttgggaatgccaggcctagtgccccatcaactctatttgacttccttgagtcgaaaatgggtaccctgaatgtggaggagcccaagtcccaacctcagcagctgcaccagggacaatacagatcgtccaacacagagcagaacggagttaaggacaacaaccacttgcgccacccccctagaaacgatactcggcagcctcgaaacgagaagccaccaagatttcagcgtgactcacagaattcaaaaagcgttctggagggtagcggcctccctcggaatcgtggctctgaaaggccctcaacctccagcgtgtctgaggtgtgggcagaagaccgtatcaagtgtgatcgaccatattccaggtacgatcggactaaggacacctcttacccattaggcagtcaacacagcgatggcgcttttaagaaacgggataatagtatgcagtcccggagcgggaagggcccatcttttgctgaggctaaggaaaaccccttgccccagggcagcgtggattacaataaccagaaaagaggtaaacgtgagtcacagacatctattcccgattacttctatgatagaaagagtcagacgatcaacaacgaggccttctccgggattaagatcgagaagcatttcaacgtcaatacagactatcaaaaccccgtcagatctaactcctttatcggggtgccaaatggggaagtggagatgccactaaagggcagacgcatcgggccaatcaaacccgctggtcccgtgaccgccgtcccttgcgacgacaaaattttttacaacagcgggccaaaaaggcgttccggacccattaaaccggaaaagatccttgagtcttccatccccatggaatacgcgaaaatgtggaaacccggagacgaatgcttcgctctctactgggaagacaacaagttttaccgcgcagaagtcgaagcactgcattcaagtggaatgactgccgttgtgaagttcatagactatggcaattacgaagaagttctactgtcaaatatcaaaccaatccagactgaggcgtgggaggaggaagggacctacgaccaaaccctggagtttcggcgagggggagatggtcaacctcgcagatccacccgtcccacgcagcaattttatcagcctcctagagcgcgaaattag

SEQ ID NO: 245605 - DNA, 2235 bp, synthetic construct
  misc_feature 1..2235: note = Description of Artificial Sequence: Synthetic coding sequence
  source 1..2235: mol_type = other DNA
atggcccaggtcgcaggagctgctctctcacaagccggttggtacctgtcagacgagggcatcgaagcatgtacctcgtccccagataaggtgaacgtgaacgacatcatcttgatcgcattgaatacagacctgagaactatcgggaagaagtttctcccaagtgacatcaactccggcaaggtggaaaaactggagggtccctgcgttcttcagattcagaagatccgaaacgttgccgcacccaaagataacgaggaatcccaagctgctcctagaatgctgagactgcagatgactgacggacacatttcgtgcacagcagtggagttcagctacatgagcaaaatctcactcaatactcctcctgggaccaaggtgaaactgtcggggatcgtagatattaaaaatggattcctgctcctgaatgattcaaataccacggtgctcggtggagaggtcgagcatctgattgagaagtgggaattgcaacggtccctgtctaagcataatcggagcaacattggcacggagggtggaccgccaccattcgtgccattcggtcagaagtgcgtatctcatgtccaggtcgacagtcgggaattggacagacggaaaacattgcaggtaaccatgcctgtgaagccaactaatgataacgatgaatttgaaaaacagcgcacagctgcaatcgccgaggtggctaaatctaaggaaacaaaaacctttggcggagggggagggggagcgcgaagcaacctgaacatgaatgccgctggtaatcggaatcgcgaggtactccagaaagagaaatcaacgaagagcgagggaaaacacgagggagtttatagagaacttgtcgatgagaaagcattgaaacacattaccgaaatgggcttctctaaagaagcctccaggcaggcgctcatggacaacggcaataatctcgaggctgccctcaacgtcctattaacctccaataaacagaagccagtaatgggtccacccctccgagggcgaggtaaaggccgaggacgcatacgatccgaggacgaggaagatcttggcaacgccaggccttctgctcccagtacacttttcgacttcctggaaagcaagatgggtaccctgaatgttgaagaaccaaaaagccagccccagcaacttcaccaggggcagtataggtcttcaaatacagagcagaatggggtgaaagataacaatcacctgagacacccgcctcgcaatgatactcggcagccacgcaacgagaagccaccgcgtttccaacgggattctcagaactccaagagtgttctcgagggctcaggattacctcgcaatagaggaagtgaacggccaagcacttcgtccgtcagcgaggtctgggcggaggaccgtattaaatgcgacaggccctactctcgttacgacaggactaaggatacaagctatcctctgggatcccagcattcagatggagctttcaagaagcgagacaatagcatgcagtcgcgaagcggaaaaggaccttcattcgccgaggccaaagagaatccccttccccagggctcagtcgattacaacaaccaaaaacggggaaagagggaatctcagacatcaatccccgattacttctacgaccgaaagagtcaaacgatcaataatgaagcgttttctggaatcaagattgaaaaacattttaatgtcaatactgattaccagaaccccgtgcgcagcaatagctttatcggcgtacccaatggcgaagtggagatgccccttaaaggcaggcgaattggccctatcaagcccgctggtcccgtcacagctgtgccatgcgatgacaaaatcttctacaactccggtcccaagcgtcgtagtggccctatcaagccggagaagattctggaatcctccatcccaatggagtatgccaaaatgtggaagcccggagatgaatgcttcgcactgtattgggaggacaataagttttaccgggctgaggtggaggctctacactcttctgggatgaccgcagtcgtgaagtttatagattacggcaactacgaagaagtgctgctgtccaacattaaacccattcagacggaagcttgggaggaggagggcacatacgatcagacactagagttcaggcgcggtggggatggtcaaccgagacgttctactagacctactcagcagttctatcagccacccagagctagaaactag

SEQ ID NO: 245606 - DNA, 3297 bp, synthetic construct
  misc_feature 1..3297: note = Description of Artificial Sequence: Synthetic coding sequence
  source 1..3297: mol_type = other DNA
atgctcgaaggtgatctcgtgtcaaaaatgttaagggcagtgctgcaaagtcataaaaacggcgttgccctgccgaggttgcaaggggagtacaggagtttaacaggtgactggatacctttcaagcagttgggatttcctactctggaggcttatctccggtctgtccccgctgtggtgcgtatcgagaccagcaggagcggggagatcacctgttacgccatggcttgtactgaaacagcccgaattgcccaactggtggcacgccagaggtcctccaaaaggaagaccggcagacaagtaaactgccagatgagggtgaaaaagacaatgcctttttttctagaaggtaaacccaaagcaaccctgcgacagccgggattcgcctctaacttctctgtcgggaagaagcctaatccagcgcctctgcgtgataaagggaactcagttggggtaaaacctgatgcagaaatgtccccatatatgttgcatactacactgggaaacgaggcgttcaaggacatccccgttcagcgtcatgttacaatgagcacaaacaacagatttagccctaaagcctctttgcagcctccacttcagatgcacctctctcgaacctccaccaaagagatgtcagataatttaaatcagaccgtggagaaaccaaatgtgaaaccacctgccagctacacttacaaaatggatgaggttcaaaataggataaaagaaatccttaacaaacataataacggcatctggatttctaagctgccgcacttctataaggagttgtataaagaggacctcaaccaggggatcctgcaacaattcgaacactggccccacatttgcacagtggagaagccttgcagcgggggtcaagacctgctgctgtaccctgcaaaacgcaaacagcttctgcgatctgaactcgacactgaaaaggtacctctgtctcctttaccgggtcctaaacagactccaccgcttaaaggctgccccaccgtgatggctggggattttaaagagaaggtcgcagatctgcttgtgaagtacacttctggcctttgggcttccgcgctgcccaaggcttttgaagagatgtataaagtcaagttccctgaggatgcactaaagaatttagccagtctctccgacgtgtgctcgattgattatatttctggcaacccccagaaggccattctctacgctaagctgcccctgcctacagacaaaatccaaaaggatgcagggcaggcgcacggggacaatgatattaaggccatggtagagcaagaatacttacaggtggaggagtctattgcagaatccgctaatactttcatggaagatatcaccgtccctcctctgatgattccgacagaggccagtccttccgtgctggtagtcgagctgtccaataccaacgaggtggtgatccgatacgtcggaaaagattattcggccgctcaagagctgatggaggacgaaatgaaagagtactatagtaagaatcccaagatcactcctgtgcaagctgtcaacgtgggccaacttttagcggtcaacgcagaagaagacgcttggttacgcgcacaggtgatttcgaccgaggaaaataagatcaaagtgtgctacgtggactacggcttctcagaaaatgtggagaagtcaaaggcatataaactgaaccccaaattctgctcactctcctttcaggcgactaagtgcaaactggccggactggaggtgttgagcgacgatccagacttggtgaaggtagtggagtccctcacctgtgggaaaatctttgccgtcgagatcctcgataaagctgacatcccccttgttgtgctgtatgacacttctggcgaggacgatatcaacatcaacgctacttgcctgaaagccatctgcgataagtcccttgaggtccacttgcaggttgacgctatgtacacgaacgtgaaggtgaccaatatctgcagtgacggtacattatattgtcaggttccctgcaaaggactgaacaagttaagcgacctcctgcggaaaatcgaagactactttcactgcaaacacatgacaagcgagtgttttgtgtctctaccattttgcggtaaaatctgcttgttccattgcaaaggtaagtggcttagagtggagatcactaatgtgcactcatccagagcacttgacgtgcagtttctggactcagggactgtaacctccgttaaggttagtgaactgcgtgagattccacctcggtttctccaggaaatgatcgccatccctccgcaggccatcaaatgttgtttggctgacctgccgcaaagtattgggatgtggacgcctgatgccgtactttggctcagagactctgtcttgaattgtagcgattgcagcataaaagtgacaaaggtcgacgaaacccgcggaatcgcacatgtatatttgtttaccccaaagaattttcctgatcctcaccgctcgattaatcgccagattaccaacgctgatctgtggaaacaccagaaggatgtctttctgtccgccatttcttccggagctgactcccccaattcaaagaatggcaatatgcctatgtctggcaacacaggcgagaattttagaaagaatctgacggatgtgattaagaagtctatggtcgatcacacctccgctttcagtacagaagaacttccacctcctgtgcacctctctaaaccaggtgaacatatggacgtttacgttcctgttgcctgccatcccggttatttcgtcatccaaccatggcaggaaatccacaaactcgaggtgctgatggaggagatgattctgtattactctgtctccgaagagcgacatattgctgtcgaaaaggaccaggtatacgcagctaaagtcgaaaataagtggcatcgggtgctgctcaagggaatcctcaccaacgggcttgtgtcagtttacgaactcgattacgggaagcatgaactcgtgaacataagaaaagtgcagccactagtagacatgttccgcaagctccctttccaggccgtgactgctcagctcgccggtgtgaagtgtaaccagtggagtgaggaggcatccatggtgttcaggaaccacgtggagaagaaaccactggtggcacttgttcagactgtgattgaaaatgcaaatccctgggatagaaaggtggtggtgtacctggtggatacttctcttcctgacaccgatacgtggatccacgactttatgtccgagtacctgattgaactctccaaggtaaattag

SEQ ID NO: 245607 - DNA, 3075 bp, synthetic construct
  misc_feature 1..3075: note = Description of Artificial Sequence: Synthetic coding sequence
  source 1..3075: mol_type = other DNA
atggcgtgcactgaaactgcacgtatcgcacaattggtagcgcgtcagcgcagctcaaagagaaaaaccggcagacaggtgaattgccagatgcgggtgaagaagaccatgcccttctttctcgaaggcaaacccaaggccacgctgcggcagcctggcttcgcgtccaacttctctgtgggaaaaaaacccaaccccgcacccctgagagacaaaggaaattccgtcggcgtcaaacccgatgcggagatgagtccctatatgctgcatacgactctcgggaatgaggcctttaaagacatcccagtgcaaaggcatgtcacgatgtcaaccaacaatcgcttttcacctaaggccagtttacagcccccacttcagatgcacctgagcaggacaagtactaaagagatgtccgataacctgaatcagactgtggaaaagcccaacgttaaacctcccgctagctacacatataagatggatgaagtccagaaccgtatcaaggaaatactgaacaaacataataatggcatttggatttcgaagctgccccacttttataaagaactgtacaaagaggatctgaatcagggaatccttcagcagtttgagcattggccacacatatgtacagtggaaaaaccttgtagtgggggtcaggacctactgctctaccctgcgaagagaaaacaactgctccggtccgaactggacacggaaaaagtgcctctgtctccattgccagggccaaagcagactcccccactgaaaggatgtcctacagttatggccggagattttaaggagaaagttgcggacctgcttgttaagtacactagcggactgtgggcaagcgccttgcccaaggctttcgaggagatgtacaaggtgaagttcccagaggatgcactgaagaatctggctagcttgtctgacgtatgctctatcgattacattagcggcaatcctcagaaagctattttgtacgcaaaacttcctctgccaaccgacaagatccaaaaggacgcaggtcaggcccatggcgataacgatattaaggctatggtggaacaggaatacctgcaagtcgaggaatctattgcggagtccgcaaacacatttatggaggacatcacagtcccgcctctaatgatcccgactgaggcctccccaagcgtgctggtagtggaactgagtaataccaacgaggttgtgatcagatatgtgggcaaagactacagcgctgcacaggaactgatggaagacgagatgaaagagtattactcaaagaatcctaaaatcacccccgtccaagccgtgaacgtcggacagcttctcgccgttaacgccgaggaagatgcatggctaagagcacaggtcatatctacagaggagaacaaaatcaaggtctgctatgtggattacggcttctctgaaaacgtcgagaagtccaaagcttataaactgaaccccaagttttgctccctctcattccaagccacaaaatgcaagcttgctgggttagaggtgctcagcgacgaccctgatcttgttaaagtagtggaaagtctcacctgcggaaaaattttcgcagtggaaattttggacaaagctgacatccctctcgtagtgttatacgacactagcggggaagacgacattaacattaatgctacatgtctaaaggcgatatgcgataagagcctagaagttcacctgcaggtcgacgctatgtacaccaatgtgaaagtgaccaatatttgcagcgatggcactctttactgtcaagtgccctgtaagggactcaataagttgtctgatctgctgcggaagatcgaggactatttccactgcaagcacatgactagtgaatgctttgtgtccctgccattctgcgggaagatatgtctatttcactgcaagggcaagtggctccgggtggaaatcacgaatgttcactcatcccgagcccttgatgtgcaattcctggatagtggcacagtaacttcagtgaaagtctcggaactgagagaaatcccacccagattcctgcaggagatgatcgccattcccccacaggcgattaagtgctgcttggcagacctgccacagagcatagggatgtggaccccagatgcagtactgtggttgcgggactcagtcctcaactgcagcgactgctctattaaggtaaccaaggtcgatgaaacaagggggattgctcacgtgtatttattcacgcccaagaacttcccagatcctcaccgctccatcaaccgacagatcactaacgcagacctgtggaagcatcagaaggacgtctttctgagtgcgattagcagcggggctgacagccccaatagcaagaacgggaatatgcctatgtcaggtaacactggtgaaaacttcagaaaaaacttgaccgacgtgatcaaaaaaagcatggtggatcacaccagcgccttttccaccgaagaattgccacctcccgttcacctaagtaaacccggagaacatatggacgtgtacgtgcccgtggcttgtcatcctgggtactttgttatccaaccttggcaagagattcataagctcgaagtgctaatggaagaaatgatactgtactattcggttagcgaggaaaggcacatcgctgtcgagaaggatcaggtatatgcagcgaaagtggaaaacaagtggcaccgagttttgcttaaaggcatactgactaacggcctcgtctccgtgtacgagctggactatggtaagcatgaactggtgaacatccgtaaagtgcaacccctagtggatatgttccgaaagttgcccttccaggctgtgacagcacagttggccggtgtcaaatgcaatcagtggagcgaggaggcttcaatggtttttaggaaccacgtggaaaaaaaaccgctagtcgctctcgtgcagacagtgatcgaaaacgccaacccgtgggacagaaaagtagttgtgtatttggtagatacatccctgcccgatacagatacgtggattcacgacttcatgagtgagtacctgatcgagctttccaaggtcaactag

SEQ ID NO: 245608 - DNA, 1257 bp, synthetic construct
  misc_feature 1..1257: note = Description of Artificial Sequence: Synthetic coding sequence
  source 1..1257: mol_type = other DNA
atgtatacgaatgttaaagtaaccaacatctgctccgatggaacactctattgtcaggtgccctgtaaaggcttgaacaagctgtccgaccttctgcgaaaaattgaggactacttccactgtaagataactaatgtgcacagtagccgagctttggatgtccagttcctggattcaggcaccgtgacctctgtgaaggttagtgaactgagggagatacctcctaggtttttgcaggagatgatagctatcccacctcaagcaattaaatgttgtctggctgacttgcctcagtctatcggcatgtggacgccagatgcagtgctgtggttgagagattctgtgctaaattgctccgattgctccatcaaggtgaccaaagtggatgaaactagagggatcgcccatgtatatctgtttacacctaaaaacttcccagaccctcaccgctccatcaaccgtcaaattacaaacgctgatttgtggaagcatcagaaagatgtcttcctcagcgccattagctcaggagcagattcacccaattctaaaaacgggaacatgccaatgtctggtaataccggtgaaaacttcaggaagaacctaacagatgtgattaaaaaaagtatggtggaccatacaagcgctttctccacggaggagttaccccctcctgttcatctctctaagcctggagagcacatggatgtctatgtgcccgttgcttgtcacccgggttacttcgtcattcagccttggcaggagattcataagctagaggtgttgatggaggaaatgattttgtactactcggtctccgaagaaagacatatcgccgtggaaaaagaccaggtgtatgccgcaaaagttgagaacaagtggcaccgagttctactgaaagggatcctgacaaatgggctggtgtccgtgtacgagctcgattacggcaagcacgaactcgtgaacatcaggaaagtgcagcccctggttgacatgtttaggaagcttcccttccaggccgtgactgctcaactggccggagtcaaatgcaatcagtggtctgaggaggcttctatggttttcaggaatcatgtcgaaaagaagcctctggtggcgcttgtgcagactgttatcgagaatgccaatccttgggacaggaaagtggttgtttacctggttgacaccagcctgccagatacggatacttggatccatgacttcatgtcagaatacctgatcgagcttagtaaggtcaactag

SEQ ID NO: 245609 - DNA, 2514 bp, synthetic construct
  misc_feature 1..2514: note = Description of Artificial Sequence: Synthetic coding sequence
  source 1..2514: mol_type = other DNA
atgtctctgtcacacctatacagagatggagaagggcgtatcgatgacgacgacgacgagcgggagaacttcgaaattaccgactgggacttgcagaacgaattcaatcctaatcggcaacggcactggcagactaaggaagaggccacatacggagtatgggctgagcgcgattctgatgatgagcgaccaagtttcgggggtaaacgtgccagagactatagtgcccctgtgaattttataagcgccggactgaaaaaaggagccgctgaggaagctgagctggaggattcagatgatgaagagaaaccagtgaagcaagatgattttcccaaagactttggcccaagaaagctgaaaaccgggggaaactttaaaccgtcccaaaaggggtttgccggtggaactaagtcttttatggatttcggctcttgggagcgccacacaaagggaatcggccagaaactgctccagaagatgggatatgtgcctggtagaggtctcggaaaaaatgcccagggaatcatcaatccaattgaggcgaagcagcgcaagggaaagggagctgtcggcgcatacgggtctgagaggaccacgcaatctatgcaggactttccagtggtcgactcagaggaagaggcagaagaagagttccagaaagaactctcccagtggcggaaagacccttctggctccaaaaagaaaccgaaatacagttataagacagtggaagagctgaaagcaaaagggaggattagcaaaaagttaacggcaccccagaaagaattatcgcaggtcaaagtcatcgacatgacgggtagggagcagaaggtctactattcttacagtcaaatatcccacaaacacaacgtcccagatgacggcctccctctgcagtctcagcagcttccacagtccggcaaagaggctaaggcccctggtttcgcactccctgaacttgaacacaatctgcagcttctaattgatcttaccgagcaggagattatccagaacgaccggcagctgcagtatgaacgcgatatggtcgttaacctgtttcacgagctggaaaagatgacggaggtcctggaccatgaggagagggtgatctctaaccttagtaaagtgttggaaatggtagaagaatgcgagcgacggatgcagccagactgtagtaacccactgaccctggatgaatgcgccagaatcttcgagactttgcaagataagtactatgaggagtaccgcatgtctgacagggtggacctggccgtggctatagtataccctctcatgaaagagtatttcaaggaatgggaccctctaaaagactgcacttacggtactgaaatcatctccaaatggaagagtctcttagagaatgatcagttgctgtctcacggcggtcaagatctgtctgccgacgcgtttcacagacttatttgggaagtttggatgccttttgtccgcaatatcgttacgcaatggcagccaaggaactgcgaccccatggtggatttcttagactcctgggtgcacataattccagtctggatccttgataacattctcgatcagctgatcttccccaaactacagaaagaagtcgaaaattggaacccattaactgatacggtgcctatccacagctggatacatccctggcttcccctcatgcaggcgaggcttgagccactctattctcccatccggtccaagctgagcagtgctctgcagaaatggcaccccagtgattcctcagcaaagctgatcttgcagccctggaaagacgtctttacgcccggttcctgggaggcttttatggtcaagaacatcgtgcccaagctagggatgtgcttgggcgagctagttatcaatccccaccagcagcacatggacgccttctactgggtgatagactgggaggggatgatctctgtctcgtctcttgtgggcctgctggagaagcatttctttccaaagtggctgcaggttctgtgctcttggctgtctaattcacctaactacgaggagataacaaaatggtacctgggatggaaatcaatgttcagtgatcaggtcttggcccatccatctgtgaaggataagttcaatgaggctctggatatcatgaatcgagctgtctcctccaacgttggggcttacatgcagcccggtgcccgtgagaatattgcctatctgacccacacagagcggaggaaagatttccagtacgaagccatgcaggaacggagagaagcagagaacatggctcaacgcggaataggtgtcgctgcaagttctgtccctatgaactttaaagacctaatcgaaacgaaagcagaagaacataatatcgtatttatgccggtcatcggcaagagacacgaggggaagcagctttacacattcgggaggatcgtgatttacatcgacagaggtgtagtgtttgtgcagggcgagaaaacttgggttcctacatccttgcaaagccttattgacatggcaaaatag

SEQ ID NO: 245610 - DNA, 2514 bp, synthetic construct
  misc_feature 1..2514: note = Description of Artificial Sequence: Synthetic coding sequence
  source 1..2514: mol_type = other DNA
atgtctttatctcatttatatagagatggcgagggcagaatcgacgatgacgatgacgagagagagaattttgagattactgactgggacctgcagaatgagttcaatccaaacaggcagcgccactggcagaccaaggaggaggcaacctacggagtctgggccgagcgcgacagtgacgatgagcggcctagcttcggcggaaaacgggcaagggactattcagcacctgtcaactttataagcgcgggactgaagaaaggtgccgctgaggaagcggagcttgaggactccgatgatgaggaaaagccagtcaagcaggacgactttcccaaagatttcggaccgagaaaactaaagacaggcggtaatttcaagccatcccagaagggctttgcgggtggcaccaagtcgttcatggacttcggttcatgggaaagacacaccaaagggatcgggcaaaagctcttgcaaaagatgggatacgtcccagggcgaggcttaggaaagaatgcacaggggattataaatccaattgaagcaaaacagaggaagggaaaaggcgcagtgggagcttatggcagtgaaagaaccacacagtcaatgcaggattttccggtggtcgactctgaagaagaggctgaggaagagtttcagaaggaactgtctcagtggaggaaagatccttctggatccaagaaaaagcccaagtatagctataagaccgtcgaagagttgaaagcaaagggcagaattagcaaaaagctcacagcacctcagaaagaattgtcacaggtgaaggttattgacatgacaggtagggagcagaaagtgtactactcatactcacagatttcccataagcacaatgtgcccgatgacgggctgcctctacaaagccagcagctgccccagtctggtaaggaggccaaggcccctgggtttgctctgccagaattagagcacaatctccaactccttatagacctaacggagcaagagattattcagaacgatcgccagctccaatatgagagggatatggtagtcaatctgttccacgaactggagaagatgaccgaggtacttgaccacgaagaaagagtgatctccaacctcagtaaggtccttgagatggtggaggaatgcgagcgccgaatgcagccagactgttctaaccccctaaccctggatgaatgtgctcgaattttcgaaactctgcaggacaaatattacgaagagtaccgtatgtctgatcgagtggacctagcggtggctattgtgtaccccctcatgaaagaatactttaaagaatgggatcccctgaaggactgtacatacgggaccgagatcatctcaaagtggaagagtcttctcgagaacgaccagctgttgagtcacggtgggcaagacctgagtgccgacgcgttccatcgcctaatttgggaagtgtggatgccattcgtgcgcaacatcgtgacgcagtggcaacctcgcaactgcgatcctatggtagactttctggactcctgggtacacataatccctgtgtggattctagataatatcctggaccagctgatctttcccaaactccaaaaggaagtggaaaactggaatccactcacagacactgtgcctattcattcatggatccatccatggcttccgctgatgcaggccagactcgaacccctctactctcccataagatccaagttgagcagtgccctccagaaatggcatccatcggatagctcagccaaactcattctgcaaccttggaaggacgtattcacccccggaagctgggaggctttcatggttaagaatattgtgcccaaactcggtatgtgcttgggcgaattggtgatcaaccctcaccaacagcacatggacgccttttattgggtgatcgactgggaggggatgatcagcgtatctagcctggtgggcctgttagagaagcacttctttcctaaatggcttcaggtgctctgttcatggcttagcaactcccccaactacgaggaaattacaaagtggtacctcggatggaaatccatgttcagtgatcaggtgttggcccacccatctgtgaaggacaaatttaatgaagccttggatatcatgaaccgggctgtgagctctaacgtcggagcttacatgcagcccggtgcacgcgaaaatatagcctatctgacacacacggagcgcagaaaggatttccaatacgaggccatgcaggaaaggagggaagccgaaaacatggcccagagagggattggtgtggccgcttcttccgtgcccatgaatttcaaggacctgatcgaaacaaaagccgaagagcacaatatcgtgtttatgcctgtcatcggtaaaagacacgaaggcaaacaactgtatacctttgggcgtattgtaatatatattgatcgcggtgtagtgttcgttcagggggagaagacttgggttcccactagcctacagtctctgatcgatatggctaaatag

SEQ ID NO: 245611 - DNA, 2514 bp, synthetic construct
  misc_feature 1..2514: note = Description of Artificial Sequence: Synthetic coding sequence
  source 1..2514: mol_type = other DNA
atgtcgctgagccacctgtaccgcgacggtgaagggcgtatcgatgacgacgacgacgaacgagagaactttgaaattactgattgggatctgcagaacgaattcaatcctaacaggcagcgccattggcagacaaaggaggaggcaacatacggcgtgtgggccgagcgcgattctgacgacgagagaccctcattcggtggaaaacgcgctcgcgattattcagcccctgtgaattttattagcgccggactgaagaagggcgctgctgaggaagctgaactggaagactccgatgatgaagaaaaacccgtcaagcaggatgatttccccaaggatttcggcccacggaagctgaaaacaggtggcaacttcaagccctcccagaaggggttcgcaggaggcaccaagagctttatggactttggttcatgggagcgccatacgaagggaattggacagaagctgttgcagaagatgggctacgtgcccggtagggggctaggcaaaaacgctcagggcattatcaaccccatcgaagcgaaacaacgcaaaggaaaaggcgcagtgggcgcttacggttctgaaagaactacacaatctatgcaggatttccccgtggtcgattcagaggaggaggccgaggaggagtttcagaaggaactctctcaatggaggaaggaccctagtggtagcaaaaagaaaccaaagtattcctataagacagtggaggaattaaaggccaagggtcgaatctcaaagaaactgacagctcctcaaaaggagctaagccaagtgaaggtgatcgatatgacagggcgtgaacagaaggtgtactatagctactctcagatttcgcataagcacaatgtgcctgacgatggactcccactgcaaagccagcagctgccacaatcgggcaaggaggccaaagccccaggattcgcactgcccgagctggagcataatctccagctattaatcgatttgaccgaacaagaaattattcaaaatgacagacagcttcagtacgaacgcgatatggttgtgaatctgtttcatgaactcgaaaaaatgactgaggtgctggatcacgaagagcgggtgatttccaacttgagcaaggtgttggagatggtcgaggagtgtgagcggaggatgcagcccgactgcagcaaccccctgactctcgatgaatgtgcccgaatatttgaaaccctacaggacaaatattatgaagaatatcgtatgtccgacagagtggatctagccgtggctatcgtgtacccactgatgaaagagtactttaaagaatgggaccccctcaaggattgtacttacggtacagagattatttcaaaatggaagtctctgcttgagaatgaccagctcttaagccacggcggtcaggacctctccgcagatgcatttcatcgactgatttgggaagtctggatgccgttcgtgaggaatattgttactcagtggcagccaaggaattgcgaccctatggtggactttttagactcatgggtccacataatccccgtttggatcctagataatatcttggatcagctcatattcccgaaactccagaaagaggttgagaattggaaccctttaactgatactgtgcctatccattcctggattcatccatggctgcctctaatgcaggccaggctcgagccactgtattcccccatccggtctaagttgtcctctgcccttcagaaatggcacccttcggactctagcgccaaacttatcctacaaccttggaaggatgtcttcaccccgggatcctgggaggcctttatggtcaaaaacatcgtcccaaaactcggcatgtgtctgggtgaacttgtcattaatcctcaccagcaacatatggatgcgttctactgggtgattgattgggagggcatgatatccgtcagtagtcttgttggtttgctagagaaacatttctttcccaagtggctgcaagtgctgtgcagctggctcagcaatagcccgaattacgaggaaattaccaaatggtacctcggatggaaaagtatgttttctgatcaagtgttggcccacccgtcagtgaaggataagtttaatgaggcgttggatattatgaaccgggcagtgtcctccaatgttggggcttacatgcagcccggtgccagggaaaacattgcctatctcacacacactgagcgacggaaagattttcaatacgaagcaatgcaagaaagaagagaggcagagaatatggctcaaaggggcattggagttgccgcttccagcgtgccaatgaacttcaaggacttaattgaaaccaaggccgaggagcacaatattgtctttatgcccgttatcgggaaacggcatgagggaaaacagttgtatacgttcggacgaatcgtcatctacattgaccgcggagttgtctttgtccagggtgagaagacatgggtgcctaccagccttcagagtttgatagacatggccaagtag

SEQ ID NO: 245612 - DNA, 2514 bp, synthetic construct
  misc_feature 1..2514: note = Description of Artificial Sequence: Synthetic coding sequence
  source 1..2514: mol_type = other DNA
atgagcctgtctcatctgtacagagacggcgaaggcagaattgacgatgatgatgatgagcgagagaatttcgagattactgactgggacctgcaaaatgaattcaaccctaaccgacagcggcattggcagacgaaagaagaagctacctatggcgtgtgggccgagcgcgattctgacgatgaacgccctagtttcggaggtaagcgcgcacgcgattattctgccccagtaaactttatcagtgcgggactgaaaaagggagccgctgaggaggcagagttagaagacagtgatgacgaggaaaagccagtgaagcaagatgacttcccgaaagatttcggccctcgcaaacttaagaccggtgggaactttaaaccaagccagaaggggtttgccggtgggaccaaaagctttatggattttgggtcctgggagcgccacactaagggcattgggcagaagttgctgcaaaagatgggctatgtgccagggcgaggattgggcaaaaacgctcagggcattataaaccctatcgaggccaagcagagaaaaggcaagggagctgtaggggcttacggtagcgaacgaaccacacagtcaatgcaagatttcccggtggtggattccgaggaagaagcagaagaggagtttcaaaaagaactatcgcagtggcggaaggaccctagcgggagcaagaaaaagccgaaatacagctacaagaccgtggaggagctgaaggccaaggggcgaatcagtaagaagctcacggcacctcagaaagagttatcgcaggtaaaggtcatcgacatgacggggagggaacagaaggtgtattacagttacagtcaaatcagtcataagcataatgtgcccgatgatgggctgccccttcaatctcagcagctccctcagtcggggaaggaagccaaagcaccaggttttgcgctccccgagttggagcacaacctccagctcttgattgatcttactgaacaggagattatccagaatgaccgtcaactgcagtacgaacgggacatggtggtgaacctgttccacgaactcgagaaaatgacagaggtcctggatcatgaggaaagagtgatttctaacctaagtaaagtgctggagatggttgaagagtgcgaacgacgcatgcaacctgattgcagcaatcccctcacacttgatgagtgtgcacgcatctttgaaactttgcaggataaatattatgaggaataccgcatgtccgacagggtggatctggccgtggctattgtgtaccccctcatgaaagagtatttcaaggagtgggaccctctcaaagattgcacctacggcaccgagatcatcagtaaatggaagagtctgctcgaaaatgatcagctgctttctcacggtggccaggacttgtctgccgacgcctttcatagacttatctgggaggtgtggatgcccttcgttagaaatatcgtaacacagtggcagccacgaaattgcgatcctatggtcgactttctggatagctgggtgcacatcattcccgtctggattctggataatatcctggatcaactgatttttccgaagctgcagaaggaagtggaaaattggaaccccctgacagataccgttcccatccactcgtggatccatccctggctgccactgatgcaggcgcgactggagcccctctactccccgattcgaagtaaattatcctctgccttacagaagtggcacccttcagactcatcagcgaagctaattttgcagccgtggaaggatgtgtttacccccggaagctgggaagcttttatggtgaagaacatagtaccgaagctgggtatgtgcctcggagaactcgtgatcaacccccaccaacagcacatggatgccttttactgggtaatcgactgggaggggatgatttcggtgagcagtctcgtggggctcctggagaaacattttttccccaaatggcttcaggtcctgtgctcctggctgagcaattctcctaactacgaggaaatcaccaaatggtacctgggctggaaaagcatgttctcggatcaggttctggctcatcctagtgtcaaagataaatttaatgaggcactggacatcatgaaccgtgccgtgtccagcaacgtcggggcatacatgcaacccggagccagagaaaatattgcctacctgacccacacagaacgtcgcaaagatttccagtacgaggccatgcaggagcgtcgcgaggcggaaaatatggcccagcgcggaatcggggtggccgcatcttcagtccctatgaattttaaagacctgatagagaccaaggcggaggagcacaacatagtgtttatgcccgtgattgggaaacggcatgagggcaagcaactctacacctttggtcggatagttatttatatcgacaggggggtagtgttcgtccagggagagaagacatgggtccccacatccctgcagtctcttatagacatggccaagtag

SEQ ID NO: 245613 - DNA, 267 bp, synthetic construct
  misc_feature 1..267: note = Description of Artificial Sequence: Synthetic coding sequence
  source 1..267: mol_type = other DNA
atgagcctgtcccatctgtatagggacggggaaggaaggattgatgacgatgacgacgagagggaaaactttgagataactgactgggacctgcagaacgaatttaaccccaataggcagaggcactggcagaccaaggaagaagccacttacggtgtgtgggctgagcgagactctgacgatgagcggcctagctttgggggaaagcgggcaagggattattctgccccagtgaatttcatatcagctgggctgaagaagggttag

SEQ ID NO: 245614 - DNA, 261 bp, synthetic construct
  misc_feature 1..261: note = Description of Artificial Sequence: Synthetic coding sequence
  source 1..261: mol_type = other DNA
atgtcgctcagtcacctctatagggacggagaaggcagaatagacgatgacgatgacgaacgagaaaatttcgaaatcaccgactgggatctgcagaatgaattcaacccaaacaggcagcgccattggcagactaaggaagaagccacctacggagtgtgggccgaaagagactccgacgacgaacggccttcatttggcggaaagcgggctagggactacagcgctcccgtcaactttatctctgctggactcaagtag

SEQ ID NO: 245615 - DNA, 129 bp, synthetic construct
  misc_feature 1..129: note = Description of Artificial Sequence: Synthetic coding sequence
  source 1..129: mol_type = other DNA
atgagcctgtcccatctctaccgcgacggtgagggtcggattgacgacgatgacgatgaacgggagaattttgagatcaccgattgggacttgcaaaatgaattcaatcccaacaggcagcggcactag

SEQ ID NO: 245616 - DNA, 1569 bp, synthetic construct
  misc_feature 1..1569: note = Description of Artificial Sequence: Synthetic coding sequence
  source 1..1569: mol_type = other DNA
atgagcctttcacatctgtacagggatggtgaagggaggatcgatgatgacgacgacgaacgtgagaacttcgagatcacggactgggacctgcagaacgagttcaacttatttcatgaactggaaaaaatgacagaagtcctcgaccatgaggaacgcgtcataagtaatctgagcaaagtgctggaaatggtcgaggaatgcgagcgacgcatgcagcctgactgcagcaacccccttacgcttgatgaatgtgctagaatttttgaaaccctccaagacaagtactatgaggagtaccgcatgagtgatcgggtcgacttggctgtcgccatagtgtaccctctcatgaaagaatattttaaggagtgggaccccctgaaagattgcacctacggaactgagatcatcagcaaatggaaaagcctgttggaaaacgatcagttactgagtcacggagggcaggatctgtcagctgatgctttccacaggctcatctgggaggtttggatgccgttcgtgagaaatatagtcacccagtggcagccacgcaattgcgacccaatggttgattttttagacagctgggtgcatattataccggtctggatactggacaacattctggatcaactgatatttcctaagttacagaaagaggtggaaaattggaacccattgaccgacaccgtgccaattcactcctggattcatccatggctgcccctcatgcaggctaggctggagcctttgtacagtccgatccggagtaaactgagctcggccctgcagaagtggcatccttccgacagctccgcaaagctgatcctgcagccttggaaagatgtattcacccccggatcttgggaagcctttatggttaaaaacattgtaccaaaactcggcatgtgtctcggagaactcgtcattaatccccatcaacagcacatggacgctttctattgggtgatcgactgggagggtatgatcagtgtgtcctctttggtgggacttctagagaagcattttttccctaagtggttacaagtcctctgctcttggctatccaattctcccaactatgaagaaattaccaagtggtacttaggctggaagagcatgttttctgatcaggttctcgcacacccaagtgtcaaagataagttcaatgaggccctagacatcatgaaccgggctgtttctagcaacgtaggtgcttatatgcaacccggtgccagggaaaatatcgcctacctcacccacaccgagaggaggaaggatttccagtatgaagcaatgcaggagcggagggaagcagaaaatatggcacagagaggaattggtgtggccgcaagttctgtgccaatgaactttaaagacctcattgagacaaaggccgaggagcataatatagtcttcatgccagttataggcaagagacacgaaggcaaacagctttatactttcggcagaatcgttatatacattgaccggggagttgtttttgtacagggtgagaaaacctgggtccccacttccttgcagtcactcattgacatggctaaatag

SEQ ID NO: 245617 - DNA, 576 bp, synthetic construct
  misc_feature 1..576: note = Description of Artificial Sequence: Synthetic coding sequence
  source 1..576: mol_type = other DNA
taaggaaggggtctgggcaaaaatgcacagggaattatcaaccccatagaagccaagcaacggaaaggcaagggagcagtaggtgcttacggctctgaacggacaacccagagcatgcaggactttcctgtagtggactccgaggaagaggctgaggagtggctgtttctcgcagcctccgactgcattttactggtgcaggaattccaaaaagagctgtcccagtggcgaaaggatccctcaggaagtaaaaaaaaaccgaaatatagttacaaaactgtggaggaactgaaggctaaaggcaggatatccaagaaattaaccgcaccccaaaaagaattaagccaagtaaaagtgattgatatgaccggcagggaacagaaagtttactactcatactcacagataagccacaagcacaacgtccccgacgatggcctccctctccagtcccagcagctgccccaatccggtaaggaagctaaagcccctggcttcgcactgcctgagctggaacataatctgcaactgcttatcgatctgactgaacaggagatcatccagaacgatcgttag

SEQ ID NO: 245618 - DNA, 366 bp, synthetic construct
  misc_feature 1..366: note = Description of Artificial Sequence: Synthetic coding sequence
  source 1..366: mol_type = other DNA
atgtctctttctcacctttaccgcgacggagaagggcgaatcgacgacgatgacgatgagagggaaaatttcgagatcacagactgggatctgcagaacgagttcaatcccaaccgacaacgccactggcagacgaaggaagaagctacgtatggggtctgggccgagagggattcagacgatgagcggccatctttcggaggcaaaagggctagagattattccgcccctgtgaatttcatctcagctggactcaagaaaggggcagccgaggaggctgagctggaagactcagatgatgaagaaaaacctgtgaaacaggatgacttcccgaaagatttcgggccacgcaagctgaagacctag

SEQ ID NO: 245619 - DNA, 723 bp, synthetic construct
  misc_feature 1..723: note = Description of Artificial Sequence: Synthetic coding sequence
  source 1..723: mol_type = other DNA
atggaagagagcgtagtgcggcctagtgtattcgttgtggacggacaaaccgatattcccttcactcgcttggggagaagtcacaggagacagtcctgcagtgtggctagagtcggcctgggtctgctgctgttgttgatgggagctggcctggctgtccagggctggtttttattacaacttcattggcgcctgggagagatggtgacccgcctgccggacgggccagcgggttcctgggagcagctcattcaggaacgcaggtcacacgaggttaatccggcagctcacttgacgggagctaattccagtctgactggttcaggagggcctctgctttgggagacgcagctgggtctggcttttcttagagggttgagctaccacgacggcgcactagttgtgaccaaggccggatactattatatctactctaaggtgcagctggggggagtgggttgccccctgggacttgcttctacgatcacccatgggctctacaaacggacaccacgctatcccgaggaattggaactattagttagtcagcagagtccttgtggtcgagctaccagttcctcacgcgtgtggtgggactcctcatttctcggtggcgtggttcatctcgaggctggggagaaggtggttgtaagggtactggacgagcgcctagttagactgagggatggcacccgatcatacttcggtgccttcatggtatag

SEQ ID NO: 245620 - DNA, 954 bp, synthetic construct
  misc_feature 1..954: note = Description of Artificial Sequence: Synthetic coding sequence
  source 1..954: mol_type = other DNA
atgagaagggcatcgcgggattacaccaagtacctcagaggctcagaggaaatgggaggagggccaggtgcccctcatgaaggccctttgcacgctccaccacctcccgctccccaccaacctcccgctgcaagtcgcagcatgtttgtggctctcctgggacttgggctgggtcaggtcgtgtgtagcgtggctctgttcttttacttccgcgcacagatggaccccaacaggattagcgaagatggaactcattgcatttatcggatactgcggctccatgagaacgccgatttccaggatactaccctggagagccaggacacgaagctgatccctgatagctgcagaaggataaaacaggcttttcagggcgctgtgcagaaggagttgcagcacatcgtcggctcgcaacacatacgagctgagaaggcgatggtagatggatcctggctggatctagcaaagaggagtaagctagaggcacagccgttcgcccacctgacaattaatgcaacagatataccctctgggtcccacaaggtcagtttaagtagctggtaccacgatcgcggatgggccaaaatttctaacatgacattctctaacggcaaacttatcgtcaaccaggatgggttctattatctctacgccaatatttgctttcgccaccacgaaaccagtggggatctcgccaccgaatacttacagctgatggtgtatgttacaaaaacttcaatcaagatccctagctcccacactctgatgaagggagggtccaccaagtactggtctgggaactcagagttccacttttactctattaacgtgggaggattttttaaacttaggtccggggaagaaatatccatagaagtgtcgaaccccagcttactggaccctgaccaagacgcaacatactttggagcgttcaaagtccgggatatcgattag

SEQ ID NO: 245621 - DNA, 735 bp, synthetic construct
  misc_feature 1..735: note = Description of Artificial Sequence: Synthetic coding sequence
  source 1..735: mol_type = other DNA
atggaccctaacagaatcagcgaggatgggacacattgcatctaccgcatactccgcctccatgagaacgcagacttccaggacacgacactggagagccaggataccaaactgattcccgactcatgcaggagaatcaagcaggcgtttcagggcgctgtgcaaaaagaattacagcatatagtaggcagtcagcatattcgcgcagaaaaagccatggtagacggttcttggctggatttggccaaaagatcaaaacttgaggctcagccttttgcacacctgactattaatgccaccgatatcccaagcgggtctcacaaagtgtccctatctagctggtaccatgataggggctgggccaaaatttccaatatgactttttccaacgggaagctgattgtcaaccaagacggattttattatttatacgccaatatctgtttccgccatcacgaaacctccggggacctcgcaaccgaatacctgcagctgatggtatatgtgaccaagactagcataaaaataccgagctcacataccctgatgaagggagggtccaccaaatactggtctgggaacagtgaattccacttctattccattaacgtcggcggtttcttcaagctgaggagcggcgaagagatatcaatcgaggtatcaaacccctccctgctggaccctgatcaggacgcgacttatttcggagcttttaaggttcgtgacatcgactag

SEQ ID NO: 245622 - DNA, 735 bp, synthetic construct
  misc_feature 1..735: note = Description of Artificial Sequence: Synthetic coding sequence
  source 1..735: mol_type = other DNA
atggatccaaatcgcatctcagaggatgggactcattgtatctataggatcctgaggctccacgagaacgcagatttccaagataccacacttgagtcccaagataccaaactaatccctgactcatgtagacgaatcaagcaagctttccagggcgcagtccagaaggaactccagcacatcgtcggatcacagcatattagagccgagaaggccatggtcgacgggtcttggctggacctggccaaaagatcgaaactggaagctcagccattcgcacacctcaccatcaacgcgaccgatattccctctggtagtcacaaagtttctttaagttcatggtaccacgatcgtggctgggcaaaaatatctaacatgacattctccaacgggaagctgatagtgaaccaggatggcttttactacctgtatgcgaatatctgctttcgacatcatgaaacttcgggagatcttgccaccgagtatctacaactgatggtctacgtgactaagacgtctattaaaatacccagctcacacacccttatgaaggggggttcgaccaagtattggtctgggaacagcgaattccacttctattccattaatgtagggggtttctttaagttgcgcagtggggaggagataagcatcgaagtgtctaacccaagcctcctggacccggatcaagacgcgacttactttggagcctttaaggttagggatattgattag

SEQ ID NO: 245623 - DNA, 735 bp, synthetic construct
  misc_feature 1..735: note = Description of Artificial Sequence: Synthetic coding sequence
  source 1..735: mol_type = other DNA
atggaccccaatcggatcagcgaagacggaacacactgcatctataggatcttacgacttcatgaaaatgctgatttccaggataccaccctggagtcccaagataccaagctcattccagacagctgtcgacgtattaagcaggcatttcaaggagcagttcagaaggagctacagcatatcgtggggtcgcagcacatccgcgcagaaaaggccatggtcgatgggtcctggctggacttagccaagcggagcaaattagaggctcagccctttgctcatctgaccatcaatgccaccgacatcccctccggttctcataaagtgagtctgagttcttggtatcacgacaggggttgggccaagatctccaacatgacattctccaatgggaaactgattgtgaatcaggatggtttttattacctctacgcgaatatctgtttcaggcaccacgaaacatccggggacctggccacagaatacctgcagcttatggtgtatgtgaccaaaacctctatcaagattccttccagccacactctgatgaaaggcggatcaacaaaatattggagcgggaactcggaattccacttttatagcattaatgtcggcggtttttttaaactccgcagtggagaagaaatttctattgaggtctctaatccatctctgctggatcctgatcaggatgccacctactttggtgcctttaaggtccgcgacatagattag

SEQ ID NO: 245624 - DNA, 735 bp, synthetic construct
  misc_feature 1..735: note = Description of Artificial Sequence: Synthetic coding sequence
  source 1..735: mol_type = other DNA
atggacccaaatcgtattagcgaggacgggacccactgtatctatcggatcctgcgactgcatgaaaacgccgactttcaggacacaaccctggaaagtcaggatactaagctgataccagactcctgtcggcgtatcaagcaggcttttcaaggcgcagtgcagaaggagctgcagcacattgtagggtctcagcacataagggccgagaaggccatggtcgacggttcctggctggatcttgcgaaaaggtctaagctggaagctcagcccttcgcacacctgacgatcaatgcaactgatatcccatccggctctcacaaggtgtcattgtcctcgtggtatcatgatcggggttgggccaaaatcagcaacatgacgttctcaaacgggaagctgatcgtaaaccaggacggcttctactacctgtatgctaatatctgctttagacatcacgagaccagcggagacctggccaccgagtatctccaactcatggtgtatgtgactaagacaagcataaaaatcccatctagtcacaccctcatgaaagggggttcaaccaaatattggagcggtaattctgagtttcacttctactccatcaatgtcggcggtttcttcaagttgaggtctggtgaagagattagcatcgaagtgtccaatccatcacttctggaccctgaccaggatgccacctactttggagccttcaaagtaagggacatcgactag

SEQ ID NO: 245625 - DNA, 750 bp, synthetic construct
  misc_feature 1..750: note = Description of Artificial Sequence: Synthetic coding sequence
  source 1..750: mol_type = other DNA
atggcggcaagacgttcgcagagacgcagagggagaaggggcgagcccggaactgcactgctggtgcccttagctctggggctgggcctggcgttagcgtgcttgggcctcctgttggccgtcgtttcgctcgggagtagagcaagtctctcagcccaggagcctgcccaggaagaactggttgcggaagaggatcaggatccgagcgagcttaacccacagacagaagagtctcaggacccggcaccttttctaaatcgcctggtccgccctcggaggtccgctccgaagggacgaaaaacccgtgctcgcagggccattgctgcccactacgaggtgcacccgaggccgggacaagacggggcacaggcgggagtggatggcactgtatccggctgggaagaagctcgaattaactccagttctcctctgcggtacaataggcaaatcggggagttcatcgtcactagggccggtctgtactacctctactgccaggtgcattttgacgagggcaaagctgtgtatttgaaacttgacctgctcgtcgacggggtgctggcactgcgctgcctcgaggagttttctgcaaccgcggctagctcactgggaccacagttaaggctgtgccaagtctcagggttattggcacttcgtcctggatcaagcctacgcatacggactctgccctgggcgcatctgaaagcagcaccattcctcacttattttgggttgttccaggtgcactag

SEQ ID NO: 245626 - DNA, 993 bp, synthetic construct
  misc_feature 1..993: note = Description of Artificial Sequence: Synthetic coding sequence
  source 1..993: mol_type = other DNA
atggctgcacgccgaagccaaaggcggagggggagaaggggggaaccgggtacagccctgctggtgcctctggccttgggcctgggtttggcattggcatgcctcggactcctgctggctgtggtcagtctgggcagcagggcaagcctgtcggcacaggagccggctcaagaggaactcgttgcggaggaagaccaggacccctccgagcttaacccacaaaccgaggaatcccaggatcccgctcctttcctgaaccgcttggtgcggcctcggagaagcgccccaaaggggagaaaaacaagggccagacgcgcaatcgccgcacattacgaagttcaccctcgccctggacaggacggagcgcaggccggagtggacggtaccgtttcaggttgggaagaggctagaatcaacagttctagtccactgcgttacaatagacagattggagagttcatcgtcacacgtgcagggttatactacctgtactgtcagagctccgatgcactggaggcttgggagaacggtgaaaggtctcggaaaaggagagccgtattaacccaaaagcagaaaaaacagcacagtgtgctgcatctcgttccaatcaacgctacgtctaaagatgacagcgacgtgaccgaggtaatgtggcagccggcactccggagagggagggggctgcaggctcaggggtacggagtgcgaatccaggacgctggggtgtacctactgtactcccaagtcctttttcaggacgtgacatttaccatgggccaggtcgtgtctagagagggccaaggtagacaagagacactgtttaggtgcatccgatcgatgccttcccacccagatcgggcatacaattcgtgctactccgcaggtgtttttcatctgcatcaaggggatatcctttctgtgattatccctcgtgctagggccaaacttaatcttagccctcatggcacgtttttgggctttgtgaaactgtag

SEQ ID NO: 245627 - DNA, 723 bp, synthetic construct
  misc_feature 1..723: note = Description of Artificial Sequence: Synthetic coding sequence
  source 1..723: mol_type = other DNA
atggaagaaagcgtggttcggcctagcgtttttgtggtcgatggtcagaccgatattcccttcaccagactgggccgaagccatcgacgccaatcctgctccgttgcaagggtcggattgggcctgctactcttactgatgggcgctggtctcgctgttcagggatggttccttttgcagctccattggcgtctaggggaaatggtcacccggctgcctgacggacccgctggctcctgggaacaactgattcaggagaggcgaagccacgaggtgaacccggcagctcacctgaccggggctaattctagtctgacaggtagcgggggacctctcctgtgggagacacagctgggtctcgcttttcttagggggctaagttaccatgacggggcactcgttgttacaaaggccggatactattacatttactccaaagtgcagttgggaggagtagggtgtccacttggattagcgagtactatcacacatggtttgtacaaaagaacccccaggtaccccgaggagcttgagctactcgttagtcaacagtcgccttgtggaagggctacaagttcatccagagtgtggtgggatagtagttttctgggaggcgtggtgcatttagaggctggcgagaaggtcgttgtccgggtcctggacgaacgcttggtgaggctacgcgatgggacccgctcctacttcggagcattcatggtgtag

SEQ ID NO: 245628 - DNA, 615 bp, synthetic construct
  misc_feature 1..615: note = Description of Artificial Sequence: Synthetic coding sequence
  source 1..615: mol_type = other DNA
atggaggagtctgtggtgcgcccatctgtattcgtagttgacggccaaacagacatcccttttacgagactcgggcgttctcacaggcggcagagttgttccgttgcaagggacggaccggcaggttcttgggagcagctgatccaggaaagaagatctcacgaggtgaatccggctgcacatctgaccggtgccaacagctccctgacagggagtggtggccctctactctgggaaacacagctcggtctggcttttctcagaggattgagctatcatgacggagccttagttgtgactaaggccggatattactatatttattccaaagtgcagcttggtggcgttggctgtcccctggggctggcaagtaccatcactcacggattgtataagcggacccctcgctaccccgaagagctagagcttcttgtctcccaacagtctccatgcggacgggctactagtagcagccgagtctggtgggactcgtcattcctaggaggcgttgtacatctggaagccggagagaaggtggtggttcgggtgctggatgagaggctcgtgagactccgcgatgggactcgttcgtactttggcgcattcatggtgtag

SEQ ID NO: 245629 - DNA, 525 bp, synthetic construct
  misc_feature 1..525: note = Description of Artificial Sequence: Synthetic coding sequence
  source 1..525: mol_type = other DNA
atgcgacattttctcagtaaagtctattccttcccgatgcgcaaacttatcctgtttttggtgttccctgtcgttagacaaacgccaactcagcacttcaaaaaccagttccctgccctgcattgggaacacgagctgggactggcctttacaaagaacagaatgaactatactaataagtttttgttgatacccgaatctggggattacttcatctacagccaggtgaccttccggggaatgactagtgagtgttccgaaattagacaggccggtaggccaaataagcctgattcgatcacagttgtaataacaaaggtcaccgacagctaccctgagcccacccagttactaatggggacaaaatctgtgtgcgaagttggatcgaattggttccagccaatttacctcggagctatgttttccctgcaggaaggggataaactgatggtgaacgtgtccgatatctcccttgtcgattacacaaaagaagataagactttctttggggcttttctgctttag

SEQ ID NO: 245630 - DNA, 756 bp, synthetic construct
  misc_feature 1..756: note = Description of Artificial Sequence: Synthetic coding sequence
  source 1..756: mol_type = other DNA
atggccgaagatttgggtctgtccttcggcgaaacagctagtgtggagatgcttcccgaacacgggtcctgcagacctaaagcaaggtccagctcggccagatgggctttgacctgctgtttggtcctcctcccctttcttgccggtctgacgacatatctgttggtgagtcaactgagggcgcagggtgaggcttgcgtgcagtttcaagccttaaaagggcaggaatttgccccttcacatcagcaagtctacgcgccattgagggccgacggcgacaagccgagagctcaccttacggttgtgcgccagacacccacacagcatttcaaaaaccagtttcccgcattgcactgggagcatgagctcggcctggcctttacaaaaaacagaatgaattacaccaacaagtttcttcttatccccgaaagcggcgattacttcatttattcccaagtgacgttccggggaatgacctcggagtgcagcgagatccgacaggcaggcaggcctaacaaaccagatagcatcacagtggttataaccaaagtcaccgactcatacccggaaccgacacaactcctgatgggtacaaaaagtgtttgcgaggttgggtccaattggtttcagcccatttacctgggagctatgttctctttgcaggagggcgacaagttaatggtcaatgtttctgatatttcacttgttgactatacaaaggaggacaaaacgttcttcggggctttcctgctgtag

SEQ ID NO: 245631 - DNA, 534 bp, synthetic construct
  misc_feature 1..534: note = Description of Artificial Sequence: Synthetic coding sequence
  source 1..534: mol_type = other DNA
atgtgtctgtctcatctagagaatatgccgctgagccatagccgaacgcagggcgcacagcgctccagttggaagctgtggttgttttgttcaatcgtcatgctgctgttcctatgttcttttagctggctcattttcatctttttgcaactcgagactgcaaaggagccatgtatggccaaatttgggccactaccatcaaagtggcagatggccagcagcgaaccgccttgcgtcaacaaagtcagtgactggaagctagagatcctgcagaacggactgtaccttatttatggtcaggtggcacccaacgccaactacaacgatgtggctccttttgaggtccgtctctataagaataaggacatgatccagacactaacaaataaatctaagatccaaaatgtcggcggaacatatgaattgcatgtgggagatactattgatctgattttcaatagtgaacatcaggtacttaagaataacacttattggggcataatcttgcttgccaacccccagtttatttcctag

SEQ ID NO: 245632 - DNA, 600 bp, synthetic construct
  misc_feature 1..600: note = Description of Artificial Sequence: Synthetic coding sequence
  source 1..600: mol_type = other DNA
atgaccctccacccttctcctatcacctgcgagttcctgtttagcactgccctcatatctccaaagatgtgcttgagccatctagagaacatgccactgtcacactctagaactcagggcgcacagagatcatcctggaaactgtggctgttttgtagcattgtgatgctgctctttctgtgttctttttcatggctcatcttcatcttcctgcaactcgagacagccaaagagccatgcatggcaaagttcgggccattgccctcgaagtggcagatggcatccagcgaacctccctgcgtgaacaaggtgagtgactggaagcttgaaatcctccaaaacggtctctacttgatatacggacaagtagccccaaacgcaaactacaatgacgttgccccattcgaagtgaggttgtacaagaacaaggatatgatccagactttgaccaataaatcaaagatccagaatgttggcggtacatacgagctgcacgtgggagataccatcgatctgatattcaactcggagcatcaagttctcaaaaacaatacatattggggaatcattcttctggccaatcctcaatttattagctag

SEQ ID NO: 245633 - DNA, 552 bp, synthetic construct
  misc_feature 1..552: note = Description of Artificial Sequence: Synthetic coding sequence
  source 1..552: mol_type = other DNA
atggagcgggtccagcccctcgaggagaacgttggtaatgccgcacgtcccaggtttgaacgcaacaagctgctgttggtggccagcgtcattcaggggctgggtttgttgctgtgcttcacttacatctgtctgcattttagtgcactccaggtgtcccaccgctacccccgtatccaatccattaaagtccaatttaccgaatacaaaaaagagaagggtttcattcttacctcccagaaggaggatgaaattatgaaggtgcagaacaattctgttatcatcaactgtgacggattctatctgatttcactgaagggatacttttcccaggaggtgaacatcagtctgcattatcagaaggacgaagaaccgctttttcaactgaagaaggttaggagtgtgaactccttaatggtagccagcctgacatataaggacaaggtatatctgaacgtcaccactgataacacctctttagacgattttcatgtaaatgggggagaattgatactcattcaccagaatccgggtgagttttgtgttctgtag

SEQ ID NO: 245634 - DNA, 402 bp, synthetic construct
  misc_feature 1..402: note = Description of Artificial Sequence: Synthetic coding sequence
  source 1..402: mol_type = other DNA
atggtctcacaccggtacccccgtatccagagtattaaggtgcaattcacggagtataaaaaagaaaagggattcattctgacgtctcagaaggaagatgagatcatgaaggtccagaacaattctgtgatcattaattgcgatggattttatctgatttcacttaaaggatatttttcccaggaggttaatatcagtttgcactatcagaaagacgaggagccattattccagctgaagaaggtgagatcagtgaatagcctgatggttgcgtcactgacgtataaagacaaagtttatctaaacgttaccactgataatacatcccttgatgattttcatgtgaacgggggtgaactgatccttatacaccagaaccccggagagttctgtgtgttgtag

SEQ ID NO: 245635 - DNA, 402 bp, synthetic construct
  misc_feature 1..402: note = Description of Artificial Sequence: Synthetic coding sequence
  source 1..402: mol_type = other DNA
atggtatcccatagatacccacgtattcaaagcattaaggtgcagttcacagagtacaaaaaggagaagggtttcatactgacgtcacagaaggaggacgagataatgaaggtgcagaataatagtgtgatcatcaattgtgatggattctatttgatcagcctcaaaggttatttctcacaggaagtcaacatttccctgcactaccagaaggacgaagagcctttgtttcagctgaagaaggtgcgctcagtgaacagtttgatggtagcctccctaacttataaagataaagtttatctgaacgtgacaaccgataacacatccctggacgactttcacgtcaatggaggtgagttaatcctgatccatcagaatcccggagaattctgcgttctttag

SEQ ID NO: 245636 - DNA, 765 bp, synthetic construct
  misc_feature 1..765: note = Description of Artificial Sequence: Synthetic coding sequence
  source 1..765: mol_type = other DNA
atggaatatgcatcagacgccagtctggatcctgaggcaccctggccaccagccccaagggctagagcttgcagagtgctgccttgggcccttgtcgctggcctcctgctgctgctattactggcggctgcttgtgctgtcttcctggcatgcccatgggcagtctccggggcaagagcctccccaggatctgctgccagccctcgcttgagggaagggccagagctttcgcctgatgaccctgccggtctgttggatcttcgccaggggatgttcgcacagcttgtggcccagaacgtgctcttgatcgacggacctctgagttggtatagcgaccccggtctggctggagtgagcctcacagggggtctgtcttacaaagaggacactaaggaacttgtagtagctaaggctggcgtatattacgtgttctttcagttggagctgcggagagtcgtggcaggagaaggctccggtagcgtatccctggccctacatctccaaccacttcggtcagcagccggagcagctgctttggctctgactgtggacttgccgcctgcctcaagtgaggcccgaaacagtgccttcggctttcaggggaggctgctacacttaagcgcaggccagcggctgggggtccacctgcataccgaagcgcgagcacgacatgcctggcagcttactcagggggcaaccgtgctgggcctctttcgcgtgacccctgagatcccggcaggactgccaagccctagatccgagtag

SEQ ID NO: 245637 - DNA, 1851 bp, synthetic construct
  misc_feature 1..1851: note = Description of Artificial Sequence: Synthetic coding sequence
  source 1..1851: mol_type = other DNA
atggcccctagagctcgtcgtcggagaccactctttgcactgcttctcctgtgtgcgttacttgctagattgcaggtcgccctccagatagctcctccctgtactagcgagaaacactacgagcatctgggcaggtgttgtaacaaatgtgagcccggaaaatatatgagttccaaatgcactacgacctcagatagtgtgtgtctcccatgtgggccagatgaataccttgactcatggaatgaggaggataagtgtctcttgcacaaagtttgtgacactggaaaagcacttgtcgccgttgtggccggaaacagcacaactccacgtagatgtgcttgcacagcaggataccactggagccaggattgcgagtgctgccgcagaaacacagagtgcgctcccggtctgggggctcagcaccctctacagctaaacaaagatactgtgtgcaaaccatgtctcgctgggtactttagcgatgctttctcctcgacagataagtgcagaccctggacaaactgcacgtttctgggaaagagagtagaacatcatggcaccgaaaaatctgacgctgtgtgttcttccagcttaccggctcgcaagcctcctaacgagccccacgtgtacttgcccggactgattatcctcctgctgttcgcgtctgtagccctggtcgcagccattattttcggcgtgtgctataggaaaaaaggcaaggctctgaccgccaatctgtggcactggatcaacgaggcatgtggacgcttgagcggcgataaggagtcgtccggcgactcctgtgttagcacacataccgccaatttcggccaacagggcgcatgcgagggggtgttactcctgaccctcgaagagaagaccttccccgaggatatgtgttatccagatcagggcggagtgtgccaggggacttgcgtgggcggtgggccttatgcacagggggaagacgctcgtatgttaagtctggtaagcaagacagagatcgaagaagactctttccgtcagatgcccaccgaggacgagtatatggaccgtccatcacaacccacagatcaactgctttttcttaccgagccgggatcgaagtccaccccccctttcagcgagccccttgaggtgggcgaaaacgactctctatcccagtgttttacgggaactcagtcgaccgttggcagcgagtcttgcaactgcaccgaaccactctgcagaacagattggaccccaatgtcttcagagaattatctgcagaaagaagtcgattctggacattgccctcattgggccgcatcccccagccccaattgggccgatgtgtgtactggatgtcgaaacccaccaggcgaagattgtgagcctttggtggggtccccaaaacgtgggccactcccccagtgtgcttacggcatggggttgccacctgaggaggaggcctcacgtacggaagcacgcgatcagccggaagatggtgccgatggcagactcccgagctcagctagggccggtgcaggatcgggctccagcccgggtggtcaaagcccagcctccgggaatgtcacggggaactccaactccaccttcattagttcaggtcaggtcatgaattttaagggagacatcatcgtggtctatgtaagtcaaacatcacaagagggtgccgcagcggctgcggagcctatgggccgtcctgtgcaagaggagaccctcgctcggagggatagcttcgctggcaatggcccaagattccccgatccctgcgggggtcctgaaggactgagggaaccagaaaaggcaagcaggccggtacaggagcagggcggtgccaaggcatag

SEQ ID NO: 245638 - DNA, 780 bp, synthetic construct
  misc_feature 1..780: note = Description of Artificial Sequence: Synthetic coding sequence
  source 1..780: mol_type = other DNA
atggcgaggataccgaaaacgttgaaattcgtggtggtgattgtagccgtcttgctgccagtcttagcctactctgcgacaaccgcaaggcaggaagaggttcctcagcaaactgttgccccacaacagcagcgacacagctttaagggcgaagaatgccctgcaggctcacacaggtctgagcacaccggcgcatgcaatccatgtactgaaggcgtagattatacaaatgcatctaataatgaaccatcctgctttccatgcacagtgtgtaagtccgatcagaagcacaagtccagctgcactatgaccagggacacagtttgtcagtgtaaagagggaacttttcgtaacgagaactcacccgaaatgtgccggaaatgttctcggtgcccctccggagaggttcaggtgagcaactgcacaagctgggatgacatccaatgcgtggaggagttcggggctaatgccaccgtggagaccccagcagctgaggaaactatgaacacttctcccggaacccccgctccagccgcagaggaaactatgaacacttcccccggtacaccagcccctgcagccgaggagacaatgactacaagccccggaacccccgcacctgcagcagaggaaacaatgacgactagccctgggacaccggcacccgcagccgaagaaactatgatcacctccccgggaacgccagcctcgagccactatctgtcatgcaccattgtgggtatcattgtgttgattgtcttacttatagtgttcgtgtag

SEQ ID NO: 245639 - DNA, 474 bp, synthetic construct
  misc_feature 1..474: note = Description of Artificial Sequence: Synthetic coding sequence
  source 1..474: mol_type = other DNA
atgactcgagataccgtgtgccagtgtaaggaaggtaccttcagaaatgaaaatagccctgagatgtgccgtaaatgcagccggtgtccctcaggcgaagtgcaggtgagtaattgtacatcctgggatgacatacagtgtgtggaagaattcggtgccaacgcgaccgtcgaaacccccgcagctgaggagaccatgaacacaagcccaggtactccagctcccgcagccgaggaaactatgaacacctcccctggaactcctgcccctgcagccgaagaaacaatgacaacttctcccggtactccagctcccgcagcagaggagacaatgactacttccccgggaacacccgctcctgccgctgaggagactatgatcacaagcccgggtacccctgcttccagccattatctttcctgtaccatagttggtatcatcgtactgatcgtcctgctgattgtgtttgtctag

SEQ ID NO: 245640 - DNA, 834 bp, synthetic construct
  misc_feature 1..834: note = Description of Artificial Sequence: Synthetic coding sequence
  source 1..834: mol_type = other DNA
atggccaggatccctaagacgttaaagttcgtcgtcgtgattgtggccgtcctgctcccagtcctggcatatagcgcaacaaccgccagacaggaagaggtgccccaacagactgttgcacctcagcagcagaggcacagcttcaagggggaagaatgccctgctggatctcatcgaagcgaacataccggagcgtgtaacccctgcactgagggggtggattataccaatgcttcaaataacgagccatcatgcttcccttgtaccgtctgcaagtcagatcagaaacacaaatctagctgcacaatgaccagggatacggtgtgccaatgtaaagagggcacttttcgcaatgaaaatagtcccgagatgtgcagaaaatgttccaggtgtccttctggtgaagtgcaggtgagtaactgcacctcctgggatgacattcaatgtgtcgaagagttcggagccaatgctaccgtggagacccctgccgctgaagagaccatgaatacctcccccggaacacccgctccagcggcagaagaaactatgaacacctctccaggaactcccgctcccgcagcggaggagaccatgacgacatccccagggaccccagcacccgcagctgaggaaacaatgaccacaagccccggtaccccagcgcctgctgcagaggaaacaatgatcacaagccccggaacaccagcttcttcccattacctcagttgcaccattgtgggcattattgtgctcatcgtgctgctcatcgtgccgtatctgaagaagaaaaaaaagaaaaaactgaagaagaaacagaagaggaaaagcaagtag

SEQ ID NO: 245641 - DNA, 1851 bp, synthetic construct
  misc_feature 1..1851: note = Description of Artificial Sequence: Synthetic coding sequence
  source 1..1851: mol_type = other DNA
atggccccacgggctcggaggcgaaggcctctgttcgcccttctgctactttgtgctcttttagccaggttacaggtggccctgcagatcgctcccccttgtaccagcgagaagcattacgaacacctgggacgctgctgcaataagtgtgaaccagggaagtacatgtctagcaaatgcacgacaacgtctgatagtgtgtgtttgccctgtggaccagatgaatatctcgacagttggaatgaagaggacaaatgtctgctacacaaggtgtgtgacacgggcaaggcccttgttgctgtcgtggctggcaactcaactacccccagacggtgtgcctgtacggccggataccattggagccaggactgcgagtgttgcaggcggaatacagagtgtgccccaggcctgggagcccagcatccccttcagctgaataaggacacagtgtgtaagccatgtttagccggatacttttccgacgcattcagcagtacagacaagtgtagaccatggaccaattgtacttttctgggcaaaagagtcgagcatcacggtacagagaaaagcgacgccgtgtgttcctcctcactgccagccagaaagccaccgaacgaacctcacgtgtatcttcctggcctaatcatattactgctgtttgcgtctgtggccctggtggctgcaattatctttggcgtgtgctatcgtaagaaagggaaggctttaactgctaatctgtggcattggattaacgaagcatgcgggaggctatccggggataaagagtcatctggcgattcctgtgtgtccacccacaccgccaatttcggacagcaaggtgcctgcgagggcgtgctgctcctcaccctagaggaaaaaacctttccagaagacatgtgttatcctgaccaaggcggtgtgtgtcagggaacttgcgtgggcggagggccatatgcgcaaggagaagacgcgcgtatgctatcacttgtgagcaaaacagaaatagaagaggacagttttaggcaaatgcctacggaggatgagtacatggacaggcctagccaaccgaccgaccagctactgttcctcacggagccgggttccaagagcaccccaccattctcagagcccctggaggtcggagagaatgactctctgtcgcaatgttttaccggaacgcagtcaacggtcgggtcagagagttgcaactgtactgagccactctgcaggaccgactggaccccaatgtcaagcgagaattatctccagaaggaggtggactccgggcactgtccccactgggctgcatctccgagcccaaattgggcggatgtttgtacggggtgccgaaatcctccaggggaggattgtgagcccttggtgggctcccctaaaagaggaccgttgccacaatgcgcctatgggatgggacttcccccagaagaggaagcctctagaaccgaagcgagggaccagccggaggacggcgctgatggcagactgccgtccagcgccagagctggcgcaggcagtggatccagcccaggtgggcagagtcccgcttctgggaacgtgactggaaatagcaacagcactttcatttcatccggtcaggttatgaactttaaaggagatatcatcgttgtgtacgtttcccagacatctcaggagggtgcggctgcagctgctgaacccatggggagacccgtacaggaagaaactttggccagacgcgattccttcgcgggaaatggccctcgcttcccagacccctgcggcggacccgagggactgagagagccagagaaagcctctaggcctgtgcaggagcagggaggtgcgaaagcatag

SEQ ID NO: 245642 - DNA, 966 bp, synthetic construct
  misc_feature 1..966: note = Description of Artificial Sequence: Synthetic coding sequence
  source 1..966: mol_type = other DNA
gggagcagggctcgctgggcaaccgaggccgcagaggctgctgcacccgcatctctgagtagggcgatggcgccacgggcaagaagacggaggccactgtttgccctgctgttgttgtgtgcactcttagccaggttacaggttgcccttcagatcgcgcctccttgcacatctgaaaagcattacgagcatctagggaggtgttgtaacaagtgcgagccgggaaaatatatgtcatcaaagtgtactactacttctgattcagtttgcttaccttgcggcccagacgagtatctggattcctggaatgaggaagataagtgtctgctgcacaaggtgtgcgacaccgggaaggcacttgtggctgtggttgccggaaatagcaccacccccaggcgctgtgcctgcaccgccggttatcactggagtcaggactgtgaatgctgcaggcgaaacaccgagtgtgcccctggattgggagctcagcatccactccagttgaataaagacactgtatgcaagccctgcctcgctggatatttttcggatgccttctcctccacggacaagtgccgaccttggactaattgtacattccttgggaaacgagttgaacatcatggaacagagaaatcggacgcagtatgctcttcatcgttgcctgcgaggaaacctcccaacggcaacgtgaccggtaactcaaactcgaccttcatttccagcggccaggtcatgaacttcaaaggtgatatcatagtggtctacgtctcccagacatcccaagaaggcgctgcagccgctgcagaaccaatgggacgccctgtgcaggaggagacgctcgccagacgcgactccttcgcgggaaacggaccacggttcccggatccatgtggcggtcctgaaggactgagagaacccgagaaggcctctagacctgtccaagaacagggcggtgccaaagcttag

SEQ ID NO: 245643 - DNA, 1206 bp, synthetic construct
  misc_feature 1..1206: note = Description of Artificial Sequence: Synthetic coding sequence
  source 1..1206: mol_type = other DNA
atgaataacctgctctgctgcgccctagtattccttgacatctccattaaatggaccacacaagagacgtttcctcctaaatacctgcattacgacgaagagaccagccaccagctgctttgtgataagtgcccgcctgggacgtacctgaaacagcactgcactgccaagtggaagaccgtgtgcgcaccgtgcccggaccattattatactgacagctggcacacctcagacgagtgtctctattgcagccctgtgtgcaaagagctgcagtacgtgaagcaggaatgcaatcggacccataatcgagtgtgcgagtgtaaagagggccgttatttggaaatcgagttttgtctcaagcatagatcctgcccaccaggcttcggagtcgttcaagctgggaccccagagcgaaatactgtttgcaaacggtgtcctgacgggtttttctccaatgagacaagcagcaaggctccttgccgcaagcataccaattgctccgtcttcggtttattacttacccaaaaaggcaatgccacccacgataacatctgcagcggcaactccgagtccacccagaaatgtggaatagacgtgactctttgcgaggaggcatttttcagatttgccgtgccaaccaaattcacccctaactggctatctgttctcgtggataatctccctggaaccaaggtgaatgccgagagcgtcgaacgcataaaacggcagcatagtagtcaggaacagacattccagctccttaaactttggaagcaccagaataaggaccaggacattgtcaagaagattatacaggatatcgatttgtgcgaaaatagcgtgcaaaggcatattggccacgccaatcttacctttgagcagctgcgcagcctgatggagagcctccctggtaagaaagtcggggctgaggatattgagaagactataaaggcctgtaagccgagcgaccagattttgaagctgctttccttgtggcggatcaagaacggagaccaggatacactgaaaggcctgatgcacgcactaaagcactcgaagacttaccacttccccaagacggtgactcaatcacttaaaaaaactatccgctttctccattcctttaccatgtataagttataccaaaagttgtttctcgaaatgatcggcaatcaggttcagtctgtaaagatctcatgtctctag

SEQ ID NO: 245644 - DNA, 390 bp, synthetic construct
  misc_feature 1..390: note = Description of Artificial Sequence: Synthetic coding sequence
  source 1..390: mol_type = other DNA
atggctagaggctccctcaggcgactgctccgactcctcgtcctgggactttggctggcactgctgcggtcagtcgctggagagcaggcccctggcaccgctccatgctccaggggttcttcctggtctgccgacctggacaaatgcatggactgcgcctcctgtagagctaggcctcattcagacttctgcctcggctgcgcggcagctcccccagccccttttcggctgctatggccgatcctcggtggtgccctttctttgacatttgtgctgggtcttctctccggttttctggtgtggcgcaggtgccgcaggagagagaagttcactacacctatcgaagagacgggcggagaaggctgccccgctgtcgcactgatccaatag

SEQ ID NO: 245645 - DNA, 285 bp, synthetic construct
  misc_feature 1..285: note = Description of Artificial Sequence: Synthetic coding sequence
  source 1..285: mol_type = other DNA
atggcgagaggttctctcagacggctcctgcgtttacttgtgctcggcctatggcttgcattgttgaggtcggtggccggagaacaggcaccaggtgcagcggctcctcccgcaccctttcgacttctctggcctatcctggggggtgctctgagtctgacctttgtcctgggcctgttgagcgggtttctggtgtggagaaggtgtcgtagacgcgaaaaatttaccacacctattgaggagacaggcggagaggggtgccccgctgtggcactcatccagtag

SEQ ID NO: 245646 - DNA, 882 bp, synthetic construct
  misc_feature 1..882: note = Description of Artificial Sequence: Synthetic coding sequence
  source 1..882: mol_type = other DNA
atgagcggattaggaaggagcagacgcggaggcaggtcaagggtcgatcaagaggagcgcttccctcagggcctgtggacgggggttgcaatgaggtcatgccctgaagaacagtattgggatccccttcttggtacatgcatgtcctgtaagacaatatgcaaccaccagtcccagagaacctgtgccgctttctgcaggagtctgagctgtcgaaaggagcaaggcaagttctatgaccatctgctgcgggactgcatcagttgtgcttcaatctgcggccaacacccaaagcaatgcgcatacttttgtgagaacaaattaaggtcgcccgtgaatctgccgccagagttaaggcggcagcgaagcggggaggttgaaaacaattccgacaacagtggacgctaccaaggactggagcacagggggtctgaggcctctcccgctttgccgggactcaagctgtctgctgaccaagtggctctggtatacagtactctaggcttgtgtctgtgtgccgtcctatgctgtttccttgtggccgtagcttgcttcctgaaaaagcgcggtgatccatgttcatgccaacccaggtcccgacccaggcaaagtcctgctaagagttcccaggatcacgctatggaagcaggatctcctgtatccacaagcccagaaccagtggagacttgtagcttctgtttccccgaatgtcgggctccaacgcaggagtcagccgtcacgccaggtacgccagatccaacgtgtgctggaaggtggggctgccacactcgaactaccgtgctgcagccatgtcctcatattcctgacagcggcctgggcatagtttgtgtaccagctcaagagggcggtccgggagcatag

SEQ ID NO: 245647 - DNA, 747 bp, synthetic construct
  misc_feature 1..747: note = Description of Artificial Sequence: Synthetic coding sequence
  source 1..747: mol_type = other DNA
atgtccggactgggcagatcaagacgcggaggcagaagtcgggtggaccaggaagagaggtggagtctctcgtgcaggaaggagcaaggaaagttttacgatcacctgctacgcgattgcatatcctgtgctagcatttgcggacaacacccaaagcagtgcgcctacttttgcgagaacaagctgagatcaccagttaacctgccgcctgaactgcgcagacagcggagtggcgaggtcgaaaataattcagacaacagtggacgctaccaaggtttagaacatcgcggtagcgaggcgtctcctgctctcccgggtctcaagttatccgccgaccaggtggccttggtgtactcaacacttggactatgtctgtgtgctgtgctctgctgttttttggtggctgtagcgtgcttccttaagaagcggggagacccttgtagctgccagccaaggtctcggcctcgccagtccccagccaagagttcacaggaccatgccatggaggctggaagcccagtctctactagtcctgagccagtggaaacatgctccttctgttttcccgagtgccgtgcgccaacgcaggagagcgccgtgaccccagggacaccagaccctacctgcgctggacgaaagactaaacctccaccagttctgaccgccggaaactgtggggtgcaccgacctccaccggagacttccacgggctcacctcgcggtcagcgcctgctatggactcagtag

SEQ ID NO: 245648 - DNA, 555 bp, synthetic construct
  misc_feature 1..555: note = Description of Artificial Sequence: Synthetic coding sequence
  source 1..555: mol_type = other DNA
atgcggcgaggcccacgatcattgaggggaagggatgctccggcaccaaccccctgcgtccccgcagagtgtttcgacctattggtgcgacactgtgtcgcctgcggccttttgaggacccctcgcccaaaaccagcaggggcttccagtcccgcacctaggactgccctgcagccacaggagagtgtgggagcgggagccggtgaagccgcactgcccctgcccggtttgctgtttggcgcacccgctttgctcggattggcattggtgctggccctcgtgctggtgggcttagtatcatggcgtaggcggcagcggaggctccgaggggcttcttcagcggaggccccagacggcgataaagatgcaccagaaccattggataaggtgattattcttagcccgggtattagcgatgccactgcacccgcatggccaccacccggagaagacccaggtacgacacctcccggacactctgtccctgtgcccgcaacggagctggggagcacagagctagtgaccaccaagaccgcaggcccagaacagcagtag

SEQ ID NO: 245649 - DNA, 852 bp, synthetic construct
  misc_feature 1..852: note = Description of Artificial Sequence: Synthetic coding sequence
  source 1..852: mol_type = other DNA
atggagcctcctggggattggggccctccaccatggcgtagtacccccaaaaccgacgtgctgcggctggtgttgtacctaacatttctgggcgcaccctgctatgccccagccctcccttcatgcaaagaagatgaataccccgtgggatctgaatgttgcccaaaatgctctcccggatatcgggtgaaagaggcttgtggagagttgacgggaaccgtgtgcgagccatgccccccaggcacatatatcgcacatttgaatggtctgtccaagtgccttcaatgtcagatgtgcgatcccgctatgggcctgagagcgagtagaaattgctcccgaacagagaatgcggtatgtggctgtagtcctggtcatttctgtatcgttcaggacggggatcactgcgcagcatgtagagcttacgccacttcttccccagggcagagggtccagaagggaggcacagaaagccaggatacgctgtgccagaattgtcccccaggcactttctctcctaatggcacattggaggagtgccagcaccagacaaagtgctcttggctcgtcacaaaagctggagccggaacatcctcaagccattgggtttggtggttcttaagtgggtcactagtgatcgtgattgtgtgtagcacagtagggctgatcatctgtgtgaagaggaggaagccccgtggagatgtagttaaggtaatcgtgtcggtccagcggaaacgtcaggaggccgagggggaggctactgtcatagaagcgttgcaggcacctcccgatgtgacaacggtggccgtggaggagacaatcccctcatttactggtagaagccccaatcattag

SEQ ID NO: 245650 - DNA, 522 bp, synthetic construct
  misc_feature 1..522: note = Description of Artificial Sequence: Synthetic coding sequence
  source 1..522: mol_type = other DNA
atggagccacctggggactggggaccccctccttggagaagtactccaaagacggatgttctgaggctcgtgctatacctaacattcctgggagccccttgttacgcccctgctctgccgagctgcaaggaggacgagtatcccgtaggttccgagtgctgccccaaatgcagtcccggttatagagtgaaggaggcctgcggcgagctgactggcactgtgtgcgaaccttgtcctccgggtacttatatcgctcacctgaacggactgtctaagtgccttcagtgtcaaatgtgcgaccccgacatcgggtcaccctgtgatctgcggggaaggggccacctggaggccggtgcccacttatcccccggacgccagaaaggtgagccggatcccgaagtggctttcgaatcactcagcgctgagcctcacgcccgactgagtatggctagcgcaccttgtggacaagctggcttacatcttcgggaccgcgcagatggaaccccagggggtagagcttag

SEQ ID NO: 245651 - DNA, 552 bp, synthetic construct
  misc_feature 1..552: note = Description of Artificial Sequence: Synthetic coding sequence
  source 1..552: mol_type = other DNA
atggaaccgcctggagattggggtccaccaccatggagatcaacacccaagactgacgttctgcgtctggtgttgtacctcaccttcttaggcgctccttgctatgcgccagccttaccgagttgtaaggaggatgagtatccggtgggatctgaatgctgtcccaaatgttccccaggttatcgcgtaaaggaggcctgtggagagctcactgggacagtctgtgagccgtgtccgcctggaacttacattgcccatcttaacgggttgtcaaaatgtctgcagtgtcagatgtgcgatcccgctatgggcctaagggctagtcggaactgcagtagaactgagaatgccgtgtgtggctgcagtcctgggcatttctgcatcgttcaagacggcgaccactgtgccgcatgccgagcgtatgccacaagcagcccaggacagcgggttcagaaggggggtacggagtcccaggacacactctgccagaattgtccacctgggacgttcagccccaatggaaccctggaggagtgtcagcaccagacatag

SEQ ID NO: 245652 - DNA, 696 bp, synthetic construct
  misc_feature 1..696: note = Description of Artificial Sequence: Synthetic coding sequence
  source 1..696: mol_type = other DNA
atggagccgccaggggattggggcccacctccatggcgctcaacccccaaaaccgatgttttaagactcgtattgtatctgaccttcttgggggctccatgttacgcgcctgcccttccgtcatgcaaagaagacgagtaccccgtgggttccgagtgctgccctaagtgttctcccggatatcgcgtgaaagaggcctgcggggagctaactgggactgtctgcgagccctgtcctccgggaacctacattgctcacctgaacgggctgtccaagtgcttgcagtgccagatgtgtgatcccgctatggggctgcgggcttcacggaattgttctcgcacggagaatgctgtttgtggttgcagccccggacacttttgcatcgtgcaggatggggaccactgcgcagcgtgcagggcttatgcaactagttcgcccggtcagcgggtccagaaaggagggacagaatcacaagatacgttatgtcagaattgtccgccaggaacatttagtcctaacggcaccctggaagagtgtcagcaccaaactaagtgttcctggctggtgaccaaagctggtgctggcacaagctcatctcactgggtttggtggttcctgagtggcagcctggtgattgttattgtttgtagcacagtagggctcatcatatgtgttaaaaggagaaagcctcgttag

SEQ ID NO: 245653 - DNA, 696 bp, synthetic construct
  misc_feature 1..696: note = Description of Artificial Sequence: Synthetic coding sequence
  source 1..696: mol_type = other DNA
atggaaccacctggcgactggggcccacccccttggaggagcacccccaaaactgacgttctgcggctcgtgctgtatctgacattccttggagctccatgctacgcgcctgccctcccctcctgcaaggaggacgaataccccgtggggagtgaatgctgtcctaagtgctcacctggctaccgcgtgaaggaggcctgtggagaactgaccggtacagtgtgcgaaccttgtccgccaggaacttatatcgcccacctaaatggtttgtcgaagtgcctgcagtgtcagatgtgtgaccccgctatggggctaagagcctcacgtaattgcagtagaaccgagaacgctgtctgcggatgcagccccggacacttttgcatagtgcaggatggggatcactgtgccgcttgtcgggcttacgctactagcagtcccggtcaacgggttcaaaaaggagggactgagtcgcaggataccctgtgccagaactgtcccccaggcacgttcagtcctaacgggacactcgaggaatgccagcaccagacgaagtgcagttggttagtgaccaaggcaggagcaggcacaagctcctctcattgggtgtggtggtttctgtccgggagtttagttatcgtcatcgtgtgcagcaccgtgggactcatcatttgcgtcaagcggcgaaagccccgttag

SEQ ID NO: 245654 - DNA, 696 bp, synthetic construct
  misc_feature 1..696: note = Description of Artificial Sequence: Synthetic coding sequence
  source 1..696: mol_type = other DNA
atggaacccccaggcgactggggtccaccgccttggagaagcacccctaaaacagacgtgctgcgactcgtgttgtacctgaccttcctcggtgctccttgctacgccccagctttgcctagttgcaaggaggacgaatatccggtagggtctgagtgctgcccaaaatgctcccctggctatcgcgtcaaagaggcctgcggcgaacttacgggaactgtatgcgaaccatgtccaccaggcacttatattgcccacctgaacggtctttcgaaatgtcttcagtgccaaatgtgcgatcctgccatgggactaagagcttcccgcaattgtagccgcaccgaaaacgccgtctgcggctgttcgcctggccatttctgcatcgttcaggatggagatcattgtgcagcgtgtagagcatacgcaaccagctcaccaggtcagagggtgcagaaaggaggtacagagtcccaagatacgctgtgccagaattgtcctcctggcaccttctctcccaacggcacactggaggagtgccaacaccagactaaatgttcctggctggtgacaaaggctggagcgggaactagcagctctcactgggtgtggtggttcctatcggggtccctggttatagtcatcgtgtgtagcactgttggactcatcatctgtgttaagcgacggaagccgcgatag

SEQ ID NO: 245655 - DNA, 555 bp, synthetic construct
  misc_feature 1..555: note = Description of Artificial Sequence: Synthetic coding sequence
  source 1..555: mol_type = other DNA
atgctgcaaatggccggacaatgtagccagaacgagtatttcgattccttactgcatgcttgcatcccctgtcagctgaggtgcagcagcaacacccctccattaacctgtcaaagatattgcaacgcgtcagtcaccaattcagtgaaggggaccaacgcgattctgtggacgtgcttggggctaagcttaatcatcagtctcgccgtatttgttctcatgtttctcttaaggaaaatcaattcagaaccccttaaggatgagtttaagaacaccggatcagggctgctgggaatggctaatattgatctggaaaaaagtaggactggggacgagattatactgccacgtggcctcgaatacactgtggaagagtgcacttgcgaagactgtatcaaaagcaagccaaaagtcgactcagaccattgttttcccttaccggcaatggaggagggcgctaccatcctggtgactacaaagacaaatgattactgcaagagtttacctgcggcactcagtgctacagagatcgagaaaagtatttctgctcgctag

SEQ ID NO: 245656 - DNA, 408 bp, synthetic construct
  misc_feature 1..408: note = Description of Artificial Sequence: Synthetic coding sequence
  source 1..408: mol_type = other DNA
atgctgcagatggccggacaatgtagccagaacgaatactttgatagtctactgcacgcatgcatcccatgtcagttgagatgttctagtaatacacctcctctgacctgtcagaggtactgtaatgccaggtccggtctgctgggaatggcgaacattgatcttgaaaagtcaagaaccggagatgaaattatactgcctcgcggattagaatacaccgttgaagaatgcacctgcgaggattgcattaagtccaagccaaaagtcgacagtgatcactgtttccccctcccagcaatggaggaaggcgctactattctcgtgaccacgaagactaatgattattgtaaatcgttacccgcagcgctgagtgccaccgaaatcgagaagagcatcagcgctagatag

SEQ ID NO: 245657 - DNA, 417 bp, synthetic construct
  misc_feature 1..417: note = Description of Artificial Sequence: Synthetic coding sequence
  source 1..417: mol_type = other DNA
atggcaggccagtgctctcagaacgagtacttcgacagcctgctgcatgcttgcatcccatgtcagctgcgctgtagttctaatacacccccattgacctgccagcgctactgtaatgcgagtgttaccaactcggttaaggggaccaacgcaattttgtggacttgcctgggcctgtctctgattatctctctggctgtgttcgtgctgatgttcctcttacggaagattaatagtgagcctctgaaggatgagtttaaaaatacagaaatggagtcccggtcagtggcgcaagctggtgtgcagtggagggatctgaacagcttgcagcccttgcccctgggattcaaacagttctcacatcttagtttacttagcaactgggattataggatcagaagtccaggacatgggtag

SEQ ID NO: 245658 - DNA, 768 bp, synthetic construct
  misc_feature 1..768: note = Description of Artificial Sequence: Synthetic coding sequence
  source 1..768: mol_type = other DNA
atggctcagcatggggcaatgggtgcattcagagcactgtgtggactggccttgctctgcgctttatctctgggccagcggcctactggcggaccagggtgtggccctgggagactgctcctcgggacgggaactgacgccagatgttgtagagttcatacgacccgctgctgtcgagactatcctggagaggagtgctgctcagagtgggactgtatgtgcgtccagccggagtttcactgtggcgatccgtgttgcacgacatgtagacatcatccgtgcccgcctggacaaggcgttcagtcacaaggaaagttctccttcggctttcagtgcattgattgtgcctcgggaacatttagcgggggacatgaaggacattgtaaaccctggacggactgttgttggcggtgccgacggcgacccaagacgcccgaagccgcttcctccccaagaaagagcggtgctagcgatcggcagaggagaagaggagggtgggaaacttgcggctgcgaacctggcaggcctccgggacctcctacagcagcgtcccccagccccggagccccacaagcggctggagctcttcgctcggctctggggcgagccctgttgccatggcagcagaaatgggtgcaggaggggggaagcgatcagcgcccagggccatgcagttctgctgctgccgcaggtccttgtcggagggagagagagacacagagttggcccccttcttctttggccggaccagacggtgtgggttcgtag

SEQ ID NO: 245659 - DNA, 705 bp, synthetic construct
  misc_feature 1..705: note = Description of Artificial Sequence: Synthetic coding sequence
  source 1..705: mol_type = other DNA
atggcacaacatggcgcaatgggggcttttagggcactctgcgggttagcactcctgtgtgctttgagcctgggacaacgacctactggagggccagggtgtgggccaggaagattgctgcttggcactggaacagacgccagatgttgccgagtccacaccacaaggtgctgcagagattatccgggtgaggaatgttgttctgaatgggactgtatgtgcgtgcaacctgagttccattgcggagatccatgttgtacaacctgccggcaccacccatgccctcctggccagggtgttcagagccaagggaagttcagttttggtttccagtgtatagactgcgcgagtggcacgttttcggggggtcatgaaggccactgtaagccgtggacggactgcacacagttcgggttcctgacagtttttccgggaaacaaaacacataatgctgtgtgtgtcccagggtcacctcccgcagagccccttggctggctgacagtagtgctgcttgctgtcgcggcttgtgttttactcctcaccagtgcccagctcgggcttcatatatggcagctccgcaagactcagttgctcctcgaggttccccctagtaccgaggacgccaggagctgccagtttcccgaggaggagaggggggaaagatccgcagaggagaaggggcgtctcggggacttgtgggtttag

SEQ ID NO: 245660 - DNA, 726 bp, synthetic construct
  misc_feature 1..726: note = Description of Artificial Sequence: Synthetic coding sequence
  source 1..726: mol_type = other DNA
atggcacaacatggcgcaatgggagcattcagagctttgtgcgggctggccctgctctgtgccttgtccttaggacagcgacccaccggcggacccggttgcggtcccggtcgattgttattgggaaccggaaccgatgctaggtgctgtcgagtgcatactactcggtgctgtagggattacccaggggaggagtgttgcagcgaatgggactgcatgtgtgtgcagcctgagttccactgcggcgacccttgctgcaccacctgtcgacaccacccttgcccccctggccaaggggttcagtcccaagggaaatttagctttggtttccagtgcatcgactgtgcaagtggcacatttagtggtggccacgaagggcactgtaagccatggaccgattgtacccaatttggtttccttaccgtttttcccggtaacaaaacccacaatgccgtttgcgttccaggttcacctccagcggagcctcttggttggcttacagttgtcctccttgctgttgccgcttgtgtattactgttgacgtccgctcagcttggactacacatttggcaactcagatctcagtgtatgtggcctcgggaaacccagctgctgttggaggttccacccagcacagaagacgcaaggagctgccagttcccagaggaagagagaggagaaagatcggctgaagagaaaggtagacttggcgatttatgggtgtag

SEQ ID NO: 245661 - DNA, 834 bp, synthetic construct
  misc_feature 1..834: note = Description of Artificial Sequence: Synthetic coding sequence
  source 1..834: mol_type = other DNA
atgtgcgtgggcgcacggaggctcggtaggggcccttgcgctgccctgctgctattgggcctgggtctcagtacagtgactggcctgcattgtgtgggggacacttacccgtcaaacgaccggtgttgtcacgagtgccgcccagggaatggtatggtgtctagatgtagcaggtctcagaataccgtgtgcaggccttgcggacctggcttttacaacgacgtggtcagctcgaagccatgcaaaccttgcacctggtgcaacctgagatcaggctctgaacggaaacagttgtgcaccgcaactcaggacactgtctgccggtgcagggccggtacacaaccacttgactcctataaaccaggcgttgattgcgcaccgtgtccacccggtcactttagcccaggcgataatcaagcctgtaaaccctggaccaactgtacactggcaggcaagcataccctgcaacccgctagcaattcctcagatgctatttgtgaagatagggatccccctgccacacagccccaggagacacagggaccccctgctcggccaatcaccgtgcagcccacagaggcctggcccaggacctcacaaggcccaagtacgcgccctgtagaggtccccggaggcagggcagtggccgctatcttggggctgggattggttcttggactgctgggccctcttgcgatcctgctggccctgtacctcttgaggagagatcagcgcctgcctcccgatgcccataagcccccagggggaggtagctttcgtactccaatacaggaggaacaggcggatgcgcatagcactttagccaaaatctag

SEQ ID NO: 245662 - DNA, 399 bp, synthetic construct
  misc_feature 1..399: note = Description of Artificial Sequence: Synthetic coding sequence
  source 1..399: mol_type = other DNA
tgaccaggcgcacctccactgcccccaggcgctcagacaaggcccagacctaggggggtgggtgaaacaaccttagcaatgtggccaggattggccggtctttctcggtcggggagtgaacggaagcagttgtgtaccgcaacacaggataccgtctgtagatgcagggctgggactcagccattagattcttacaaaccaggcgttgattgtgcgccatgccccccaggacacttcagtccaggagacaatcaagcttgcaagccctggacaaactgtacactggcagggaaacataccttgcagcctgctagcaattccagcgacgctatttgcgaggatagggaccctccagcaacgcagcctcaggaaacccagggcccacccgcacgcccttag

SEQ ID NO: 245663 - DNA, 423 bp, synthetic construct
  misc_feature 1..423: note = Description of Artificial Sequence: Synthetic coding sequence
  source 1..423: mol_type = other DNA
atgagagccctggaggggcctggcctgtctctcctgtgtctggtccttgctctcccagccctgctcccagtccccgctgtgcgcggagtggccgaaacgccaacctacccatggcgagacgccgaaacaggtgaacgcctggtatgtgcgcaatgccctcctgggacttttgtgcaacgcccttgtcgacgggacagccctactacgtgcggaccttgccctcccagacattacacccagttttggaactacctcgagcggtgtagatattgcaacgtcttatgtggtgagcgggaggaggaagcgcgtgcgtgccacgcaactcataaccgcgcttgctgtgggtgttgcagacggtgtgcctggccagggtgccccggatggtcaggggcttcggtctccgcaagctcgctgtgtacatag

SEQ ID NO: 245664 - DNA, 903 bp, synthetic construct
  misc_feature 1..903: note = Description of Artificial Sequence: Synthetic coding sequence
  source 1..903: mol_type = other DNA
atgagagctcttgagggaccgggtctctctctactatgcctggtactggccttacccgctttgcttccagtacctgcggtgaggggagtggctgagaccccaacatatccttggagggacgcagagaccggggaacgcctggtctgtgctcagtgtccaccaggtacattcgttcagcggccttgccggagggattcgcctactacttgcggcccatgtcccccacgccattatacacaattctggaattacctggaacgatgccggtactgtaatgtgctctgcggggaaagagaagaggaagccagggcttgtcacgctacccacaaccgggcttgccgatgcaggaccggctttttcgctcatgctgggttttgtctggagcacgccagttgtccacctggtgccggagtgatagctcctggtacgcctagccaaaatactcaatgtcaaccctgtccaccagggacgtttagcgcttcttcatcctccagcgagcaatgtcaaccacaccgaaactgtacagctttaggtctggctttaaacgtgcccggaagttcaagccacgacaccttgtgcacatcatgcacgggtttcccactgtctactcgcgtgcccggtgccgaggaatgcgaacgagctgtgatcgattttgttgcctttcaggacattagcatcaaacggctgcagcggctcctgcaggcccttgaagcacccgagggttggggcccaactccacgtgccggtcgagcagccctccagttaaagctgcgtcgcaggttgactgagctgctgggggctcaggatggggcactgctggtaaggctactgcaggcactgcgcgtcgctcgtatgcctggcttggagcgaagcgtgagagagcgtttcctacccgttcattag

SEQ ID NO: 245665 - DNA, 903 bp, synthetic construct
  misc_feature 1..903: note = Description of Artificial Sequence: Synthetic coding sequence
  source 1..903: mol_type = other DNA
atgcgcgcactcgaggggccaggattgtcattgctttgccttgtgctcgcgcttcccgctcttctacccgtacctgccgtccgcggagtcgccgagacgcctacctatccatggcgtgacgcagagaccggggaacgccttgtatgtgcccagtgcccaccaggcaccttcgtgcagcgcccatgtcgccgagacagcccgaccacttgcggaccatgtccccctagacactatactcaattctggaattacctggagcggtgtagatactgcaatgttctgtgtggcgagcgggaagaagaagccagagcttgccatgctactcataaccgagcatgcagatgccgtactggattcttcgctcacgccggtttttgcctggaacacgcttcctgcccccctggcgctggagtcattgcccctggaactccttctcagaacactcagtgtcagccctgccctccgggaaccttcagtgctagctcaagctcatctgaacaatgtcaaccgcaccgcaattgcacggcgctgggcctggccctcaatgtgcccggaagctccagtcacgatactctgtgcacgtcgtgcacgggctttcctctctcgactagggtgccaggcgctgaggagtgtgagagggccgtgatcgattttgtcgcgttccaggacatatccattaagcgtctgcaaagactgctacaggccctcgaggcacccgagggttggggaccaacccccagagctggacgcgcagcccttcagctcaaactccgtaggaggcttaccgaactgctgggcgctcaggacggtgccctcctcgtacggttgcttcaggctctccgagtggcacgcatgcccggactggaaaggagcgtccgagagcgatttcttcctgttcactag

SEQ ID NO: 245666 - DNA, 1788 bp, synthetic construct
  misc_feature 1..1788: note = Description of Artificial Sequence: Synthetic coding sequence
  source 1..1788: mol_type = other DNA
atgagagtgctattagccgcactaggtcttctcttcctcggcgcactgagagcgtttccacaggataggccatttgaagatacgtgtcacggcaatccttcccactattatgataaagccgtgaggcggtgctgctacagatgccctatgggtttatttccaacacagcagtgcccgcagcgtccgaccgactgtcggaagcagtgtgagcccgactattacctggacgaggccgacagatgcacggcctgtgtgacatgtagtcgggacgacctggtcgaaaagactccatgtgcttggaattcttcgcgggtgtgtgaatgcaggcccggtatgttctgtagcacaagcgcagtaaattcttgtgcaaggtgtttctttcattctgtttgcccggcagggatgattgtgaagttccccggtactgcccagaagaatacggtttgtgagcccgctagcccaggagtgagccctgcctgcgcctcccccgagaactgcaaagaacccagcagcgggacgatcccccaggcaaaaccaaccccagtgagcccagctacttcctccgcaagcaccatgcctgtcagggggggaaccaggttggcccaagaagccgcaagtaagttgacacgggcacctgactccccgagcagtgtgggcagaccatcttccgaccctggtttgagccccactcagccttgtcctgagggttctggagactgcaggaaacagtgtgagcctgactactacttagatgaagctgggaggtgcaccgcttgcgtctcatgcagtcgggacgatctggtggagaagactccatgtgcttggaattctagccgcacgtgcgaatgtcgaccaggaatgatttgtgcgacctcggctactaatagccgagcccgatgtgtgccatatcctatctgtgccgcagagaccgtaacgaaacctcaggatatggcagaaaaggacacaaccttcgaagcaccgccacttggcacacaacccgactgtaacccgacccccgagaacggcgaagcacccgctagtacttcacctacgcagtccttactggttgactcacaagcaagcaaaaccctgcccatccccacctcagccccagtggcccttagcagtactggtaaacccgttttggacgcgggtccagtactgttttgggttatcttggtcctggttgttgtggtcggctcgagcgcctttctgttatgccataggcgggcttgccgcaagagaatcaggcagaagctgcacctgtgctacccagtacaaacctctcagcccaaacttgaactcgtcgattcaaggcctagacgctcgagtacacagctaagaagcggagccagtgtgaccgagccagtcgcggaggagcgcggactgatgtcgcagccgttgatggaaacatgccacagtgtgggggctgcctacctggagagcctgcccctgcaggacgcatctccggctggtggaccctctagccctcgcgacctgccagaacctcgtgtctctaccgagcacaccaacaacaagatagaaaaaatctacattatgaaggccgacacagtgatcgtggggacagtgaaggctgaactgcccgagggcagaggtctcgctggaccagctgagcctgagcttgaggaggagctggaggcagatcatacaccccactatcccgagcaagaaacagagcccccattaggctcatgttccgacgtcatgctctctgtggaagaggagggaaaagaagatcccttgccaactgctgcctccggcaagtag

SEQ ID NO: 245667 - DNA, 399 bp, synthetic construct
  misc_feature 1..399: note = Description of Artificial Sequence: Synthetic coding sequence
  source 1..399: mol_type = other DNA
atgagtcagcctctgatggagacgtgccactctgtgggtgcagcatatctggagtctctcccccttcaggacgccagccctgctgggggaccaagttctcccagggatctgcccgaaccaagggtttccacggagcacaccaacaataagatcgaaaagatttacatcatgaaagcagatactgtcattgttggtaccgttaaagccgaattgcctgaggggcgtggcctagctggtccagccgagccggaattagaagaggagctcgaggctgatcacactccccactacccggaacaagagacagagcctcctctggggtcttgtagtgacgtcatgctgtcagtcgaggaggaaggcaaagaggaccccttacctacagctgcttcaggaaagtag

SEQ ID NO: 245668 - DNA, 1452 bp, synthetic construct
  misc_feature 1..1452: note = Description of Artificial Sequence: Synthetic coding sequence
  source 1..1452: mol_type = other DNA
atgttttgttccacttcagcagtaaactcttgtgcacgctgcttcttccatagcgtatgccctgcaggcatgatcgtcaagtttcctggcaccgctcaaaagaacactgtatgtgagcccgctagcccaggtgtgtcccctgcctgtgcctcccccgagaactgcaaggagccttcctccgggaccattcctcaggcaaagccaacaccagtcagcccggctacatcatccgcctctaccatgcctgttaggggaggtactcgcctggcccaagaagccgcatctaagctgactagagctccagattctcccagtagcgtggggaggccatcatcggaccctgggctgtcgccaactcagccttgtcctgagggctctggggactgtcgaaaacaatgcgagcctgactattatctggacgaggctggtaggtgtactgcctgtgtatcttgctctagagatgacctcgtagagaagacgccgtgcgcatggaactccagtcgcacatgtgaatgtcggcctgggatgatttgtgccacgtccgcgactaattcccgggctcgctgcgtgccttatcctatctgtgctgcagaaacagtgactaaacctcaggacatggcagagaaggataccacttttgaagccccacctttgggcactcagccggattgtaacccaactcctgagaacggcgaggctccggctagcacctcacccacccaaagccttcttgttgattcccaggcctccaaaacactgcccatccctaccagcgccccagtcgctctcagctcaacgggtaaacccgtcttagatgccggacctgtgcttttctgggtaatccttgtcttggtggtagtggtcggttcttcggctttcctgctctgccatagacgcgcatgcagaaagcgcattcgccagaaactgcatctgtgctatccagtgcagacatctcagccaaagttagagctcgtggactctaggccccgaagatcatcgacattgcgttctggggctagcgtgacggagcccgtggccgaagagagggggttaatgagccaaccactcatggaaacttgtcacagcgtcggcgcagcctaccttgagtccctgccgttgcaggatgcctcaccggcagggggtccgtctagccctcgagatctccccgaaccaagggtgagcacagaacacaccaataacaaaatagagaagatatatatcatgaaggctgacactgtgatcgtggggactgtgaaggccgagttgcctgaaggtagggggctagctggacctgcagagcctgagctcgaggaagaactggaggctgatcacaccccccactatcctgaacaggagaccgagccccctctgggctcttgctcggacgtcatgctgtccgtggaggaggaggggaaggaggatcccttacctacagccgcatccgggaaatag

SEQ ID NO: 245669 - DNA, 1437 bp, synthetic construct
  misc_feature 1..1437: note = Description of Artificial Sequence: Synthetic coding sequence
  source 1..1437: mol_type = other DNA
atggcccctctcaggccgctgcttatccttgctctgctggcttgggtggccttggctgatcaagagagctgtaagggccgttgtacggaaggctttaatgttgacaagaaatgtcaatgtgacgagctctgcagctactaccagtcctgttgtacagactacacagcagagtgcaagccacaggtgacacgtggagacgtctttaccatgcccgaggatgagtatactgtctacgatgacggggaggagaagaataatgccaccgtccatgaacaggtcggaggcccatccctgacatcagatctccaggcccagtccaagggcaaccctgagcagacccctgtcctgaaacctgaggaggaggctccggcacctgaagtgggggcaagcaaacctgagggcatagatagcagacccgagactctgcacccaggcagaccgcagcctcccgcagaagaagagctttgcagcggcaagccattcgacgccttcacagacctcaaaaatggcagcctgtttgcatttcggggacagtactgctacgaactagatgaaaaagcagtccgacctggataccccaaactgattcgggacgtttggggtatcgaagggcctattgatgccgcatttactagaattaattgccagggtaagacttacctctttaagggctcccagtactggcgcttcgaggatggggtgctggacccagattatcctcggaatatctcagatgggtttgacgggattcctgacaacgtagatgccgctctcgcactcccggctcacagctatagcggcagagagcgagtgtatttctttaagggcaaacagtactgggagtatcaatttcagcatcagccgtcccaagaggagtgtgagggctcttcactgagtgcagttttcgaacactttgctatgatgcagcgtgactcctgggaggacatcttcgaactgcttttttggggacggacaagcgcgggaacccggcagccccagttcatttctagggactggcacggggtacctggccaggttgacgccgcaatggctggacgaatttatataagcggaatggcccctcgaccaagtctggccaagaaacaacggtttcgccaccgcaaccgtaaaggttaccgatcacagcgcggtcactccagaggccgaaaccagaatagcagacgaccatcaagggctacctggttgagcctcttctccagcgaggagagtaatttaggagccaataattacgacgattacaggatggactggctggtgccagctacttgcgaaccaatccaaagcgttttctttttttctggcgacaagtattaccgggtgaacctcagaacaagacgtgtggatacagtcgaccccccttaccccaggtctattgcgcagtactggcttgggtgccctgcaccaggccatctgtag

SEQ ID NO: 245670 - DNA, 639 bp, synthetic construct
  misc_feature 1..639: note = Description of Artificial Sequence: Synthetic coding sequence
  source 1..639: mol_type = other DNA
atggcagaggccaaatattacctgatacagggcctggtgaacatgtgccaaagcgccttgcaggacaaaaaagattcttatcagcctgtctgtaacattccaatcatcacgagccttaaggaagaggaacgactgattgagagttctaccaagccggtcgtgaagttgctctacaatcgatcaaacaataaatattcctatacgtcaaatagtgacgatcacttgctgaagaatatcgaacttttcgacaaactgagcttgaggttcaatggacgggttctattcatcaaggacgtcatcggcgacgaaatttgctgttggtccttttatggccagggcaggaagctcgcagaggtgtgctgtactagcatcgtatacgccaccgagaaaaaacagacgaaagtcgagttcccagaggctcgcatttacgaggagacattgaacgtgctgttatacgaaacgccccgagtcccagataattctctcctggaagctaccagccgctccaggtcccaggcttcccctagtgaagacgaggaaacatttgaattaagggatcgcgtccggcgtattcacgtcaagagatactctacatacgatgaccggcagcttggccaccagtccacccatcgcgactag

SEQ ID NO: 245671 - DNA, 1965 bp, synthetic construct
  misc_feature 1..1965: note = Description of Artificial Sequence: Synthetic coding sequence
  source 1..1965: mol_type = other DNA
atgtctgaagcaagctccgaggatctggtcccccctctggaggcaggagccgctccttaccgggaagaggaggaagcggcaaaaaaaaagaaggagaaaaagaagaagtctaagggccttgcaaacgtgttttgcgtcttcaccaagggcaagaagaagaaaggacagcccagctcagcagagcccgaagacgcagcaggctccaggcagggactggatgggccaccacctacagtggaggagctcaaagcagccctggagcgcggacagctggaggccgcacggccactgttagcactggagcgggagcttgccgcagcagccgcagcaggcggtgtctccgaagaggagctggtgagaaggcaaagcaaagtggaggctctttatgagctgctgagggaccaagtcctgggggtcctaagaagaccgctcgaagccccacctgaaagactgcgacaggctctcgccgtggtggcagagcaagaacgcgaggatagacaggccgcagctgcgggtccagggacctccggcctggccgctactaggccaagaaggtggctgcaactttggcgaaggggagtggctgaagctgctgaagagcgaatgggacagcgcccagccgcaggagcagaggtgcctgaaagcgtgttcctccatcttggacggacaatgaaagaggacctggaagcagtcgtggagaggctgaaacccctgttcccagctgagttcggcgtagtggccgcttacgcggaaagttatcaccagcacttcgctgcccatttagctgccgttgcacagtttgaactctgtgagcgcgacacgtacatgcttcttctgtgggtgcagaacctgtacccaaatgacattattaattcgcctaaactggtgggagaactgcagggcatgggactgggcagtttgctgcccccaagacagattcggctgctggaagctaccttcctgtcaagcgaagcggctaatgtgagagaactgatggatagagcacttgagcttgaagcaagacgttgggcagaggatgtgccaccgcagcgacttgatggtcactgtcatagcgaactagccattgacattattcagattactagccaggcacaggctaaagccgagtcgatcaccttggacctaggctcacaaatcaagagggtcttacttgtagaacttccagccttcctaagatcataccagcgcgctttcaacgagtttctggagagggggaagcagttgaccaactatcgagctaacgttatagcaaacatcaacaactgtctgagttttcggatgtctatggagcaaaactggcaagttccacaagacacactctctttgttgctgggccctttgggggagcttaaaagtcatgggttcgatacgctattacagaacctccatgaggacctgaagccattattcaaacgattcacacacacccgttgggctgctccagtcgaaaccctcgagaatatcatcgcaactgtcgatactcggctgccagagttttctgagcttcaaggatgctttagggaagagctgatggaagcactccacctgcacttggtcaaagagtacatcatccagctcagtaaagggagactagtgctcaagacagcagagcagcagcagcagcttgctggatacatcctggccaacgccgacacgattcaacatttctgcactcagcatggctctcccgcaacctggcttcagcctgctttaccaaccttggcagaaattattagactccaagaccctagcgccatcaaaattgaggtggcaacctatgctacttgctatcccgattttagtaaaggccatctcagcgccatactggctataaaaggaaatttaagcaactcagaagtcaagagaattaggtccatcctcgacgtcagcatgggggcacaggaaccaagcagaccacttttttcactgatcaaagttggctag

SEQ ID NO: 245672 - DNA, 972 bp, synthetic construct
  misc_feature 1..972: note = Description of Artificial Sequence: Synthetic coding sequence
  source 1..972: mol_type = other DNA
atggatagggccctcgagctagaagccagaaggtgggccgaggacgtgccaccccagagactggacggacattgccactcagaactggcaattgatattatccagatcacatctcaagcccaagccaaagcagagtctatcacactggacctaggttcacagatcaagcgggtgctgctagtcgagctgcctgccttccttcggtcatatcaacgggcatttaatgaattcttagaaaggggtaaacagctgacaaactatcgggctaacgtgatcgctaacattaacaactgtctttctttcagaatgtcgatggaacagaattggcaggtgccacaagacacgctctccctgctgcttggccctttaggagagttgaagagccatgggtttgatactctcctgcagaacttgcacgaagacctgaagcctctgttcaagcggttcactcatactcgctgggccgcaccagttgagaccctcgaaaatattattgccaccgtagacacgaggctgcccgagttttcagagctgcagggctgcttccgcgaagagttgatggaagcactgcatctgcatctcgttaaggagtacatcatccagctgtcaaaggggcgacttgtacttaagaccgcagagcagcagcaacagctggccggatacattctggccaatgctgatactatccagcatttttgtacccagcatggctcgcccgctacatggctccagccagccctcccaaccctcgctgagatcatcagactgcaagatccgtccgcaatcaaaattgaagtcgcaacttatgccacctgctatccggacttctccaaaggccatctgtccgccatacttgccataaagggaaatcttagtaatagcgaggttaagagaatccggagtatactcgatgtctcaatgggggctcaagaacctagcaggcctctgttcagtctgataaaggtcggttag

SEQ ID NO: 245673 - DNA, 600 bp, synthetic construct
  misc_feature 1..600: note = Description of Artificial Sequence: Synthetic coding sequence
  source 1..600: mol_type = other DNA
atggaggcacttcacctgcatctggtcaaagaatatataattcaactcagcaaaggacggctggtgttaaagacagcagaacagcagcagcaattagctgggtacattttggctaacgctgatacaatacagcatttttgcacacagcatggaagtcccgctacatggctgcagccagccctccctacactcgctgagattatccgcctgcaggacccatctgcaattaagattgaagtggctacgtacgccacctgttaccctgactttagcaaaggccacctgtcagcgatccttgccatcaaaggaaatctgtctaactccgaggtcaagcgaatacggagcatcctggatgtcagcatgggtgctcaggagcccagccgccctctgttcagtctcatcaagccaagagctgccgtgagtgggatacagcagtggtggaacggacggcagaattggaaacgtaaaaaggagaaaatgtcaagccgtcttgctggagcctttagggtactctggagggcagtttccactgcgagtatccggagacatatccaggtcgcccctaggcctttgcaggcgggaccagccatgggcccatag

SEQ ID NO: 245674 - DNA, 120 bp, synthetic construct
  misc_feature 1..120: note = Description of Artificial Sequence: Synthetic coding sequence
  source 1..120: mol_type = other DNA
atgagtgaggcttcttccgaggacctcgtgcctcccctggaggccggagccgctccctatcgggaggaggaagaggccgctaagaagaagaaggaaaagaagaaaaagtctaaggggtag

SEQ ID NO: 245675 - DNA, 1965 bp, synthetic construct
  misc_feature 1..1965: note = Description of Artificial Sequence: Synthetic coding sequence
  source 1..1965: mol_type = other DNA
atgagtgaggcatccagtgaagacctcgttcccccactcgaggcaggagcagcaccctatcgagaggaggaggaggctgccaagaaaaagaaggagaaaaagaaaaagtctaaaggactagcgaatgtattttgtgtgtttacgaagggtaagaagaagaaaggccagcctagcagtgccgagcctgaagatgccgctggaagcaggcagggactggatggcccacccccaaccgtggaggagcttaaagccgctctggagcggggtcagcttgaggcagcgcgtcccttgcttgccctagaaagggaattagctgccgcagcagctgcagggggtgtgtctgaagaggaattagtgcggagacagtctaaggtggaggctctctatgaactgctacgcgaccaggttctaggcgtcctcagacgcccactggaagcccctcccgagcggctcaggcaggcgctcgctgttgtggccgagcaagagcgagaggacaggcaagctgctgccgcagggccagggacctctggtttagcggctacgagaccacggagatggctgcagctatggcgccgtggagtggccgaagccgctgaagagcggatgggccagcgccctgccgcaggcgctgaagtgcctgagtccgtttttttgcacctgggccgaacaatgaaagaagatctggaagctgttgttgaacggctgaagcccctctttccagcggagttcggagtagtagccgcatacgcagaatcctaccaccaacatttcgctgctcacctggccgcagtggctcagttcgaactgtgtgagcgggacacctatatgttgctcttgtgggtgcagaacctgtatcccaacgatatcattaactctcctaagttggttggggaactccagggaatgggacttggatccttattacccccacgccagatccgtctgctggaggccacttttttgagctctgaggctgctaatgtgagggaattgatggatagggcacttgagttggaggctcgacgctgggctgaggatgtgccccctcagcgcctagacgggcattgtcactcggagttagccattgatatcatccagataaccagtcaggcccaggccaaggcagaaagtatcacgttagatctaggttctcagattaaacgcgtcctgcttgtggaattaccagcatttctacgatcataccagagagcatttaacgaattcttagaacggggaaagcagctgacgaactacagggccaacgttatcgccaatattaacaactgtctctcttttagaatgagcatggagcaaaactggcaagtgccacaggatactctcagcctccttctcgggcctcttggcgagctgaaaagccacggctttgacacactactgcagaaccttcacgaggacctaaagccgttgttcaaacggtttacccatactagatgggccgctcctgttgaaacgctggaaaatatcatcgcaaccgtggacacccgccttcccgaattctctgaactgcaggggtgctttcgggaagagctgatggaggcgctccatttgcatctggtcaaagagtatataattcaattgtcgaagggacggctggtgttgaagacagccgaacagcagcagcagctggccggttatattctagctaatgccgatacgatccaacatttttgcacccagcatgggagccctgctacgtggctacaacctgctctgcccaccctagcagagatcatcaggctacaagacccgagtgctattaaaattgaagtcgccacgtatgccacatgttacccagactttagcaaaggccacctcagcgctatcttggccatcaaaggtaacctcagtaattctgaggtaaagagaatcagatctatcttagatgtttctatgggagcccaggaacccagccgacccctgttctctttgattaaggtcggttag

SEQ ID NO: 245676 - DNA, 2373 bp, synthetic construct
  misc_feature 1..2373: note = Description of Artificial Sequence: Synthetic coding sequence
  source 1..2373: mol_type = other DNA
atggcagagcaggtgctgccacaggctctctatctgtctaacatgaggaaggccgtgaaaatcagggagaggacccccgaagatattttcaaacctacgaatggcataatccaccacttcaagactatgcatcgatacacgctggagatgttccggacttgccagttctgtcctcagtttagggagataattcacaaagcgctcatcgacaggaatattcaggcaacactagagtcccagaaaaagctgaactggtgtagggaggtcagaaaactggtggccctgaaaactaatggagacgggaactgcctaatgcacgccacaagtcagtacatgtggggagttcaggacactgacttggttttgcggaaggctttgttctcaactctcaaagaaacggacaccagaaactttaaatttaggtggcagctggagtcactgaagtctcaggagttcgtcgagaccggactttgttacgatacacggaattggaacgatgagtgggataacctaattaagatggcctcgaccgatactcccatggccagaagcggcctgcagtacaacagcctggaagagatccacatcttcgtcctgtgtaatatcctgcggagacctatcattgtgatttccgataaaatgttgaggtcactcgagtctggttccaatttcgcgccactcaaggtcggagggatttatctgccccttcactggcctgcccaggagtgttacagatacccgattgtcctgggctatgactcccaccacttcgttcctctcgtgaccctgaaggacagtggaccagagattcgggctgtgccattagtgaaccgcgatcggggacgatttgaagacttgaaagtgcattttttaacggaccccgagaatgagatgaaagagaagctgcttaaggaatacctgatggtaatagaaatcccagtgcagggctgggaccacggaaccacccaccttattaacgccgcaaaacttgacgaagcgaatctgccaaaggaaattaacctggtggatgactattttgagcttgtccagcacgagtataagaaatggcaggaaaattcagagcaggggcgacgcgagggccatgcccagaacccaatggagccctctgtgcctcaactcagtttaatggatgtcaaatgtgagacgccaaattgccccttcttcatgagtgttaacacacagccactttgccatgagtgttcagagcgacgacagaaaaatcagaataaactccccaagcttaatagtaaacccggtccagaagggctgcccggaatggccctgggagctagccgcggtgaggcatatgaacccttagcatggaatccagaggagtccacggggggaccccatagtgctccacctaccgccccatcaccctttctgtttagcgaaactacagccatgaagtgtcggagtccagggtgtccttttaccctcaacgtccagcataatggtttttgtgagagatgccacaatgccagacagctgcacgcatcccatgctcccgatcacacgaggcacctggacccaggaaagtgccaggcttgtctgcaggacgtaacacgaaccttcaacggaatttgtagcacttgcttcaagcgtacaactgctgaggccagcagcagccttagcacctctctgccgcctagctgccaccaacgtagtaaatctgaccccagtaggctggttcggtccccgtctccccactcatgccaccgagccggtaatgacgccccagccggttgtctatcccaggcagctcgaacccccggtgaccgtactggaacgagcaaatgcagaaaagccggatgcgtctatttcgggaccccagaaaacaaagggttctgtaccctttgtttcatcgaatatcgcgagaacaaacacttcgctgccgcttcaggcaaggtgagccctaccgcttcgagatttcagaacaccatcccctgcctggggagagagtgtgggaccttgggtagcaccatgtttgaaggctactgtcagaagtgttttatcgaagcgcaaaatcagagatttcacgaggctaaacgcaccgaagagcagcttaggagtagtcagagacgggacgttcctagaacaacccagagcacatcccgccctaaatgtgcacgagcctcctgtaaaaacattctggcttgcagatcggaagagctgtgcatggagtgccagcaccccaaccagcggatggggccaggcgctcacaggggagagcctgcgccagaagacccccctaagcagaggtgccgggcacccgcttgtgaccactttggcaacgcgaaatgcaatgggtattgtaatgagtgcttccagtttaagcagatgtatggctag

SEQ ID NO: 245677 - DNA, 489 bp, synthetic construct
  misc_feature 1..489: note = Description of Artificial Sequence: Synthetic coding sequence
  source 1..489: mol_type = other DNA
atggctgaacaggtattgccgcaagcgctctacctgtccaatatgcggaaagcagtgaaaatacgggaaaggactccagaagatatcttcaaaccaacgaacggaatcatccaccacttcaaaaccatgcatagatatactctcgaaatgttcagaacgtgccaattttgtccccagttccgcgagattatacacaaggccctgatcgaccggaacatccaagccaccctggaatctcagaaaaagctgaattggtgtcgggaggtgcgcaaattagtcgccctcaagactaatggggatggtaattgcctgatgcacgccacctcacaatatatgtggggggtccaggacaccgatctggtgttgagaaaagctctattctccaccctgaaggagactgacacacggaattttaagttccgttggcagctagagagcctcaagtcacaggagttcgtcgaaaccggcctctgttacgataccaggtag

SEQ ID NO: 245678 - DNA, 81 bp, synthetic construct
  misc_feature 1..81: note = Description of Artificial Sequence: Synthetic coding sequence
  source 1..81: mol_type = other DNA
atggctgaacaggttctccctcaggccttgtacctttcaaacatgcggaaggccgttaaaatacgggagcgtacgccatag

SEQ ID NO: 245679 - DNA, 297 bp, synthetic construct
  misc_feature 1..297: note = Description of Artificial Sequence: Synthetic coding sequence
  source 1..297: mol_type = other DNA
atggccgagcaggtcttgccgcaggctctttacctgagcaatatgaggaaggccgtcaagatccgtgaaaggacacctgaggatatattcaaacctaccaacggaattatccatcacttcaagacaatgcaccgatatactcttgagatgttccgaacctgtcagttctgcccccagttcagggaaattatccataaagccctcattgatcggaatattcaagccaccttagagtcccagaaaaaactcaattggtgtagagaggtgcgcaaactggtcgcccttaaaaccaattag

SEQ ID NO: 245680 - DNA, 813 bp, synthetic construct
  misc_feature 1..813: note = Description of Artificial Sequence: Synthetic coding sequence
  source 1..813: mol_type = other DNA
atggcggaacaggtgctgccgcaggccctgtacctttccaatatgaggaaggccgtgaagattcgggagaggacgcctgaagacatcttcaagcccaccaacggaatcatccatcactttaaaacgatgcacagatacacccttgagatgttccggacttgtcagttctgcccacagttccgtgagatcatccacaaagcgctaatcgacaggaacatccaagctactctagagtcccagaagaaacttaactggtgtcgtgaggtgcgcaaattagtggccttaaagacaaacggggatgggaactgtttgatgcacgccacctcacagtacatgtggggggtccaggacaccgatctcgttcttaggaaggctctgttttccaccctgaaagagaccgatactcgcaacttcaaatttcggtggcagctggagtcactgaagtcccaggagtttgtggaaaccggactctgctacgatacacggaactggaatgacgagtgggataatctgattaaaatggcatcgactgacacacccatggcacgatctggtcttcagtacaatagcctggaagaaatccacatttttgtgctctgtaacattctcagaagacccattatcgtcatttccgacaaaatgctgcgatccttagagagtggaagcaatttcgcccctctcaaggtcggtggcatctacctgcccctgcactggcccgcacaagagtgttatcggtatccgatagtgcttggatatgacagtcaccattttgtcccgttagtcacgctgaaagactcaggacctgatatctag

SEQ ID NO: 245681 - DNA, 2250 bp, synthetic construct
  misc_feature 1..2250: note = Description of Artificial Sequence: Synthetic coding sequence
  source 1..2250: mol_type = other DNA
atggccgaacaggtgctcccccaagccctgtatctttccaacatgcgcaaagcggttaaaatccgggagcggacaccagaagacatatttaaaccaacaaatggcatcatccaccatttcaagaccatgcaccggtacacacttgaaatgtttcgaacctgtcaattttgcccccagtttcgtgagatcatacataaggctcttatagaccgaaatatccaggcaacactggagtcacagaaaaagctgaattggtgcagagaagtgcgcaaattggttgccctcaagacgaacggggacgggaactgtttgatgcacgcaaccagccagtacatgtggggggtgcaagatacagacctggtgctgcgaaaggctctgttctcaactctgaaggagaccgatacccgcaactttaaatttagatggcagttggaaagcctcaaaagccaggaattcgtcgagaccggactttgttatgatacacggaattggaatgatgagtgggataatctgattaagatggccagcacggatactcccatggcccgaagcgggctgcagtataactctctggaggagattcatatcttcgtgctctgcaacattctccgaaggcccattattgtaatcagcgataaaatgttgaggtccctagagtctgggtcgaatttcgcaccactgaaggtcggcggtatttacctgcccttacactggccagcacaggagtgctatcgctatcccatcgtactggggtacgactctcatcacttcgtccctctggtcaccctgaaagattctgggcctgagatcagagcagtgcccctggtgaaccgtgacaggggccgtttcgaagatctgaaagttcactttctgactgaccctgaaaacgagatgaaggaaaagttactgaaggagtacctcatggtaatcgagatccctgtacagggctgggaccacgggaccacacacctgattaatgccgcaaagctggacgaagccaacctgcccaaagaaataaacctagtggacgattatttcgaactggtccaacacgagtacaagaaatggcaagaaaactccgaacagggcaggcgcgaggggcatgcccagaacccaatggagcccagtgtaccacagttgtcgctcatggatgtgaaatgcgaaacaccaaactgcccattcttcatgagtgtgaatacccagccgctgtgccacgaatgtagtgagagaagacagaagaatcagaacaagctgccaaagttaaatagcaaacctggtccagaaggcctgcccggaatggcgcttggggcttcacggggagaggcttatgagcctttggcgtggaacccagaggaaagcaccggcggaccacactctgcccctccaacggctccttctcccttcctcttctcagagaccaccgccatgaagtgcaggagtcccggttgcccgtttactttaaacgtgcagcataacggattctgtgaacgatgtcataacgcaaggcagctgcatgctagccacgccccagatcacacacgccacctcgatccagggaagtgccaggcctgcctgcaggatgtgactcggacctttaatgggatttgcagtacatgttttaagaggacaactgccgaagcgtcaagctctctgagcacttcactcccacccagttgtcatcagaggtccaaatcagatccgagtagactggtacgctcacccagccctcacagttgccatagggctggcaacgacgcccctgcgggatgcctcagccaagcggcacgtacacccggagaccgaacaggaacttccaagtgccggaaggccggatgtgtgtactttgggactccggagaataagggtttttgcacattgtgtttcattgaataccgggaaaacaagcacttcgcggcagcgtctgggaaggtgagtccaactgctagtcgtttccagaacaccatcccgtgtctagggcgtgagtgtggaactctgggctcaacaatgttcgaggggtactgtcagaagtgcttcatcgaagcccagaatcaaaggttccatgaggccaaaagaactgaggagcagctgcgatcaagccagcgacgcgacgtacccaggactactcagtcgacatccagacccaagtgcgcacgagcaagctgcaagaacatactggcatgccgaagtgaggagttatgcatggagtgccagcaccagccagaagacggaccctgggggcctccaggatag

SEQ ID NO: 245682 - DNA, 459 bp, synthetic construct
  misc_feature 1..459: note = Description of Artificial Sequence: Synthetic coding sequence
  source 1..459: mol_type = other DNA
atggcagaacaggtacttccacaggcactgtatctgagcaatatgcgcaaagcagtgaagatcagggagcgtacccctgaagacatcttcaagccaaccaacggcattatccaccacttcaagacaatgcatcgctacacactcgagatgtttcggacatgccagttctgcccccagtttagagaaattatccacaaagctctgatagacaggaacattcaggcaaccttggaaagtcagaagaaactgaattggtgtagggaggtcaggaaattggtcgccttgaaaactaacggtgacggaaactgcctgatgcatgccacttcccaatacatgtggggagttcaggatactgacctggtgttgagaaaagccctgttctctaccctgaaagagaccgatacacgaaattttaaatttcgctggcagcttgaaagtcagatttctggtatctgctag

SEQ ID NO: 245683 - DNA, 645 bp, synthetic construct
  misc_feature 1..645: note = Description of Artificial Sequence: Synthetic coding sequence
  source 1..645: mol_type = other DNA
atggcagagcaggtgctgccacaggctctctacctgtccaatatgagaaaagctgtgaaaatcagggaacgcacccctgaggatatctttaaacctaccaatgggatcatacaccacttcaaaactatgcatcgctacaccctggagatgttcagaacgtgtcaattctgtccacaatttcgggaaattatccacaaggccctgatagatagaaatattcaggcaactctcgagtctcagaagaagttgaactggtgccgtgaagttcgaaaacttgtcgctttgaagaccaacggtgatggcaattgtttgatgcacgccacatctcagtatatgtggggggtgcaggacaccgaccttgtgttgcggaaggcgttgttctcgaccttgaaggaaacggatacccgcaactttaagttccggtggcaactggagtctctcaaaagccaggaattcgttgaaaccggtctgtgctatgacactaggaactggaatgatgaatgggacaaccttatcaagtggttgccccagacccatccctggcccgaagtcgattttagtacaactcactggaagaagtacacctacctgtctttcgcgaccagctcagaaggtcagtccctatcttttcaaactaagtgttag

SEQ ID NO: 245684 - DNA, 2010 bp, synthetic construct
  misc_feature 1..2010: note = Description of Artificial Sequence: Synthetic coding sequence
  source 1..2010: mol_type = other DNA
atggcagaacaggtgctacctcaggccttgtacctttccaatatgcggaaagccgtgaaaatcagagagagaaccccggaagatatttttaagcctaccaacgggattattcaccactttaagaccatgcacaggtacaccctggaaatgttccggacgtgccagttctgcccccagttccgcgagatcattcataaggccctgattgacaggaatatccaggcaacactggaaagccagaaaaagctgaactggtgcagagaggtgcggaagttagtcgccctcaaaactaacggtgacggcaattgcctgatgcatgctaccagccagtacatgtggggtgtccaggacaccgatcttgtactgcgtaaggccctcttttccactcttaaagaaacagatactcggaactttaaattcagatggcagctagagtctctgaagtcccaggaattcgtggagaccggtctgtgctatgacactagaaactggaacgatgagtgggacaacctgattaaaatggccagtaccgacacacccatggctcgcagtggactgcaatataacagtctcgaagagatccacattttcgtgttgtgcaatattctgaggagacctatcatcgtgatctcagacaagatgctccgatctcttgaaagcggctccaactttgcccctctgaaagtggggggtatatacttaccccttcactggccagcacaagaatgctatcgataccccatcgttttgggctacgactcacaccactttgtgcccttggtgactctgaaggacagtggccctgagattcgggcagtccctctggtgaaccgggaccgcggtcggtttgaggatcttaaagtgcattttctgactgatcccgaaaacgagatgaaggagaagctgctgaaggagtatctgatggtcatcgaaatcccagtacagggctgggaccacggaacgacgcatctcatcaacgccgctaagcttgacgaggcgaacctgcccaaggagatcaacctggtagacgactatttcgaattggtgcagcatgagtataagaaatggcaggagaattctgagcagggcaggagagagggccatgcacagaatcccatggaaccatcagtgcctcagctgtctcttatggacgtgaagtgtgaaactcctaactgtccctttttcatgagtgtgaacacacaaccgttatgccatgagtgtagtgaacggcgtcagaaaaaccagaacaagctgccaaagctcaacagtaagccgggacctgaaggattaccaggaatggcgctgggcgcttcccgcggtgaagcttatgagccacttgcttggaaccccgaggaatccactggaggtccccacagcgcaccacctaccgccccttccccctttctcttcagcgagaccaccgccatgaagtgtcggtctcccggttgcccttttacattaaacgtccagcacaacggcttctgcgagcgctgccacaatgccagacaactgcacgcatctcacgcgcctgaccacactaggcatcttgaccccggaaagtgccaggcgtgtctgcaggacgttactaggacctttaacggtatatgttcgacctgcttcaaacgcaccacagctgaggcttcttcgagcttgtcgacatcgctgcctcccagctgccaccagcggagtaaaagtgaccccagccggcttgtgaggtctcctagcccacactcgtgccaccgagccggtaatgacgcgccagcaggctgtctgtctcaggctgctcggaccccaggagatagaacaggcacaagcaagtgcaggaaagccggatgcgtgtactttgggacaccagaaaataaagggttttgcaccctgtttcacagggtgcaacgaaaacagacattttgctgttgtctgagggagtcccagtcccactccgtgcaggtgcccgagcatcacagcgtgcccggtgagggtatgagacatccatggaagcatcacgtctag

SEQ ID NO: 245685 - DNA, 834 bp, synthetic construct
  misc_feature 1..834: note = Description of Artificial Sequence: Synthetic coding sequence
  source 1..834: mol_type = other DNA
atgatcatattgatttatctattcctgctactgtgggaggatactcagggatggggcttcaaggatggtatatttcacaattcaatttggctcgaaagagccgctggtgtttaccacagagaagcaagatcaggcaagtacaaactgacatacgcagaggcaaaggccgtgtgtgagttcgaggggggtcacctggcgacatacaaacagctggaagccgctcggaagatagggtttcatgtgtgcgccgcaggctggatggcaaagggacgcgtcggctacccaatcgtgaaaccaggccctaattgcggtttcggcaagaccgggattatcgactatggaatcagactgaatagatctgagcgctgggatgcctactgctacaacccccacgcaaaggaatgcggaggggtcttcacagatccaaagcagattttcaagagcccaggctttccgaatgagtacgaggacaatcaaatttgttactggcacatcaggctcaaatacggccagcggatccatctgtcatttctcgacttcgacttggaggatgatcccggttgccttgccgattacgtggagatatatgactcctacgatgacgtacatggcttcgtaggaaggtattgtggcgacgaactccccgatgacattatctcaactggaaacgttatgactcttaagttcctatctgatgcttctgtgaccgcaggcggattccagataaagtacgtcgccatggaccctgtgtccaagtcatctcaggggaagaatacatctacaacttcaacaggtaacaaaaatttcctggcagggagattcagtcacctctag

SEQ ID NO: 245686 - DNA, 567 bp, synthetic construct
  misc_feature 1..567: note = Description of Artificial Sequence: Synthetic coding sequence
  source 1..567: mol_type = other DNA
atggcaacagatgtctttaatagcaaaaacttggctgtccaagctcagaagaagatccttggcaaaatggtgagcaaatcaatcgccacgactcttatcgatgacacttccagcgaagtgctcgacgaactctacagagtcacacgggaatacacccaaaacaagaaagaggcggagaaaatcatcaaaaatctcatcaagacagtcattaagctggcgattctttatcggaacaaccagttcaatcaggacgaacttgccctgatggagaagtttaagaagaaggtgcatcaactggctatgacggtggtttccttccaccaagtggattatactttcgatagaaacgtcctttcacggttgctgaatgagtgtagggagatgctacaccagatcattcaaagacatctaaccgcaaagagtcacggcagggtcaataacgtgttcgatcatttctccgattgcgagttccttgccgcactttacaacccttttggcaattttaaacctcacctgcagaaactttgtgatggaatcaacaaaatgctggatgaggaaaacatctag

SEQ ID NO: 245687 - DNA, 597 bp, synthetic construct
  misc_feature 1..597: note = Description of Artificial Sequence: Synthetic coding sequence
  source 1..597: mol_type = other DNA
atgcattctgaggctgaagaatcgaaggaggtagctaccgatgtcttcaactccaaaaatctggcagtgcaggcccagaaaaaaattctggggaagatggtgtctaaatccatcgctactactctcattgacgacacctcatctgaggtccttgacgaactgtacagagtgacccgggaatatacccagaataagaaagaggctgagaaaatcatcaaaaatcttatcaagaccgtgataaaattggcgatcctgtatcgaaataaccaatttaatcaggacgagcttgcattgatggagaagttcaaaaagaaggtccatcagctggccatgacagtggtgagcttccaccaggtcgactatactttcgacagaaacgttttaagtagattgctgaacgagtgtagggagatgctccatcaaataatccagcgacacctgacagccaagagccatgggagagtaaataacgtgtttgatcattttagcgattgcgagtttctggccgcactttacaatcctttcggtaacttcaaacctcacctgcagaaactctgtgacgggatcaataagatgctggacgaggagaacatttag

SEQ ID NO: 245688 - DNA, 597 bp, synthetic construct
  misc_feature 1..597: note = Description of Artificial Sequence: Synthetic coding sequence
  source 1..597: mol_type = other DNA
atgcactccgaggccgaggaatccaaggaggttgctacagacgtattcaattcaaagaacctggcagtccaagctcagaaaaagattctgggaaagatggtaagcaaatccattgctactacgctgatcgacgatacatcctctgaggtgcttgatgagctctacagagtgacccgggaatacacacagaataaaaaggaagccgaaaagataatcaagaacctcattaagaccgttatcaagttggccattctataccgcaataaccagttcaatcaggatgagctggcactgatggagaaattcaaaaaaaaggtgcatcagctggcaatgaccgtcgtttcattccaccaggtggactacacatttgaccgcaatgtgctcagtcggctgctgaatgaatgtagggagatgctacaccagatcatccagaggcatttgactgccaaaagtcatggaagagtgaacaacgtattcgaccacttctccgactgcgagttcttggccgcactctacaacccctttggcaattttaaaccccacctgcaaaaattatgtgacgggatcaataaaatgcttgatgaagagaacatttag

SEQ ID NO: 245689 - DNA, 555 bp, synthetic construct
  misc_feature 1..555: note = Description of Artificial Sequence: Synthetic coding sequence
  source 1..555: mol_type = other DNA
atggaatccttcagctcaaagtcactggcactgcaggccgagaaaaagctccttagcaagatggccggtcgctctgttgcccacctgttcatcgatgagacttcctctgaggtgctggacgaactgtacagagtaagtaaggagtacacgcattcaagaccacaggcccagcgggttattaaagatctgatcaaagttgcgataaaggttgccgttcttcacaggaacggtagctttgggccaagcgagttggcactggctactcgttttcgccagaaactgcgccagggagccatgacagccctgagctttggcgaggttgactttacattcgaggccgcagtcctcgccggactgttgaccgaatgtagagatgtgttgctggaacttgtggagcaccatctcactccaaagagccacgggagaattagacatgtatttgatcattttagtgacccaggcctgctgacggctctatatggcccagacttcactcagcatctcggcaagatatgtgatggactgagaaagttgctggatgagggaaagctgtag

SEQ ID NO: 245690 - DNA, 1296 bp, synthetic construct
  misc_feature 1..1296: note = Description of Artificial Sequence: Synthetic coding sequence
  source 1..1296: mol_type = other DNA
atgtacagaacgaaggtgggccttaaggatcgccagcagctctacaagcttattatctcccagcttctgtatgatggttacatctcaattgctaatgggctgatcaatgaaatcaaaccccagtcagtttgcgcgccatcggagcagctgctgcacctgatcaagctcgggatggaaaacgatgataccgctgtccagtacgcaatcggacggtccgataccgtcgccccaggaactggtatcgacttggaattcgatgcggacgttcagactatgtctccggaggcgtccgagtacgaaacctgctacgtgacctcgcataagggcccttgccgggtggcgacctacagtcgcgacggccagttgatcgcaaccgggtcagccgatgcttcaataaaaattctcgacaccgagcggatgttagccaaaagcgcaatgcctattgaagtgatgatgaatgagacagcccaacagaatatggagaatcaccctgtgatccggaccctgtatgaccacgtcgacgaggtgacctgtttggctttccacccgaccgaacaaatccttgcgagtggctcaagggactatacactgaagctcttcgattatagtaagccatctgccaaaagagctttcaagtacatacaggaagcggaaatgctgaggtcaatcagtttccatccctctggagactttattctggtgggcactcagcatcctactctgcggctctacgatataaacaccttccagtgttttgtgtcctgtaatcctcaggatcaacatacagatgctatttgttctgtgaactacaactcaagtgccaacatgtatgtgaccggctcaaaagatggatgtatcaagttatgggacggagtgagcaacagatgcatcacgacattcgaaaaagcccacgacggggcagaggtgtgtagcgctattttctccaaaaactctaaatatatcttatccagtggaaaggactccgttgccaaactgtgggagatttcaaccggtaggactttggtgagatatacaggtgccggactgagtggacggcaagttcaccggacccaggcagtattcaaccatacagaagactatgttctgttacccgatgaacgaaccattagtctgtgttgttgggactcaagaaccgccgagaggcgcaacctgctaagcctgggccataataacatagtcaggtgcatagtccacagccccaccaatcccggttttatgacttgtagtgatgacttccgggcacgattttggtatcgtagatcaactaccgactag

SEQ ID NO: 245691 - DNA, 621 bp, synthetic construct
  misc_feature 1..621: note = Description of Artificial Sequence: Synthetic coding sequence
  source 1..621: mol_type = other DNA
atggacagcgccggacaggacatcaacctcaattccccgaataagggactactcagcgacagcatgaccgacgtgcctgttgatactggcgtggcggcacgaacgcccgcagtcgagggcctgaccgaggccgaagaggaggagttacgcgctgagttaaccaaagtggaggaggaaatagtaaccttacgccaagtcctagccgcaaaggagaggcattgcggcgagctgaaaagaaggttaggcctcagcactctcggcgagctcaaacagaatctttctaggagctggcatgatgtccaggtgtccagcgcgtatgtgaagaccagtgagaaattgggagaatggaacgaaaaagtgactcagtctgatctttacaagaaaacacaggaaacgctcagccaggccggtcagaagacttccgcagcactgagtaccgtagggtctgccatctcaaggaagctcggagatatgcggaacagcgccaccttcaagtcgttcgaggatcgggtaggaactattaaaagcaaagtggtgggtgaccgcgagaatggtagcgataacctgccttcgagcgctggcagcggtgataagccgctctccgatccagctcccttctag

SEQ ID NO: 245692 - DNA, 561 bp, synthetic construct
  misc_feature 1..561: note = Description of Artificial Sequence: Synthetic coding sequence
  source 1..561: mol_type = other DNA
atggactctgccggtcaggacatcaacctcaatagcccaaacaagggacttctgtccgactctatgactgacgttcctgttgatactggagtggctgcccgtacccctgctgtggaagggctgacagaagccgaggaggaggagctgagagccgagttaacaaaggtggaagaggagattgtaaccctccgacaagttctagctgctaaggagcgtcactgtggggagttgaagagaagattaggactgtcaacgctcggcgagctcaagcagaatctgtcccggagctggcacgacgttcaggtcagttccgcctataagaagacccaggaaactctcagccaagctggccagaagacgtcagccgcattaagtactgtcggatccgccattagcaggaagctgggtgacatgcgtaacagcgccacctttaaaagcttcgaggatagggtgggcactattaagagcaaagtcgtcggtgaccgtgagaacggaagtgataatctgccaagtagtgctggttcaggggataagcccttgagcgatcccgctcccttttag

SEQ ID NO: 245693 - DNA, 630 bp, synthetic construct
  misc_feature 1..630: note = Description of Artificial Sequence: Synthetic coding sequence
  source 1..630: mol_type = other DNA
atggattccgccggacaagacatcaaccttaactcccctaacaagggactgctctccgattcaatgacagacgtccccgtcgataccggagtcgccgctagaacccccgctgtggaaggactgacggaggcagaagaagaagaactcagagcagagctgacaaaggtagaagaggaaatcgtgacactcaggcaggtccttgctgcaaaggagcgccactgcggagagctaaagcgccgtctgggcctatccacactcggtgagcttaagcagaatctttctcgtagctggcacgatgtgcaggtgtcttctgcctataaaaagacccaagagacgctaagtcaggccggacagaagacaagcgccgcactgtccaccgtgggtagcgcaatctctagaaagttgggtgatatgcgtgcacatcctttctcacatagcttctccagttacagcattcggcacagcatctctatgcccgcaatgcgcaacagcgccacttttaagtcgttcgaggaccgtgtgggaacgatcaagagtaaggtagtgggcgatcgagagaacggctccgataacctcccctcgtcggcagggagtggggacaaacctctctctgaccctgccccattctag

SEQ ID NO: 245694 - DNA, 663 bp, synthetic construct
  misc_feature 1..663: note = Description of Artificial Sequence: Synthetic coding sequence
  source 1..663: mol_type = other DNA
atggactccgctggtcaggacataaacctcaactctccaaacaagggcctgctttcagacagcatgacagacgttcccgtggacaccggcgtggccgcacgtacgcctgccgtggaaggactaactgaagcagaggaggaagagctgcgtgcagagttgaccaaagtggaggaggagattgtgaccctccggcaggtgctcgcagctaaagagaggcactgcggcgaactcaagaggcggctgggattgtccacattgggtgagctgaaacagaacttgagccgatcctggcacgacgttcaggtgagcagcgcttacgtgaaaactagtgaaaagctgggggagtggaacgagaaagtcacacaaagcgacttgtacaaaaagacccaggagaccttaagccaggccggtcaaaaaacatccgcagccctcagcaccgttgggtctgctatcagtagaaagctgggcgatatgagctcctatagcatcagacattctatcagtatgcccgctatgaggaattcggccacttttaagagctttgaggacagggtgggtaccattaagagcaaggttgtgggggaccgagaaaatgggagcgataatttgccatcttctgccggttccggcgacaagcccctgagcgatcctgcccctttttag

SEQ ID NO: 245695 - DNA, 603 bp, synthetic construct
  misc_feature 1..603: note = Description of Artificial Sequence: Synthetic coding sequence
  source 1..603: mol_type = other DNA
atggactccgccggtcaggacatcaacctaaatagccccaacaagggtctgctgtcggattctatgacggacgtgcccgtggataccggcgtggcggctagaacacctgccgtggaagggcttactgaagctgaggaggaggagcttagagccgaactgacaaaggtggaggaggaaatcgtgacccttcgacaggtgcttgcggcaaaagaaagacattgtggcgagttaaagagacgcctgggcttgagcaccttgggggaactcaaacagaacctaagccgctcttggcatgatgtgcaagtttctagtgcttacaaaaagacccaggagacactgagtcaagctgggcagaagacatccgcagccctttccaccgtggggtccgctatatcccgcaaactgggagatatgtcttcttatagtattcggcattccatctccatgccagcaatgcggaacagtgctacctttaaaagcttcgaggaccgggtgggtactattaagagtaaggtggtcggtgaccgcgagaacggcagtgacaatttgccttcttctgccggatcgggtgataagccactgtcagaccctgcacccttttag

SEQ ID NO: 245696 - DNA, 492 bp, synthetic construct
  misc_feature 1..492: note = Description of Artificial Sequence: Synthetic coding sequence
  source 1..492: mol_type = other DNA
atggactccgccggacagggcgtggcagcccgaacccccgctgtagaaggacttaccgaggccgaggaagaagaattacgagctgagcttaccaaggtcgaggaagaaatcgtgactctgaggcaggtgctggcagctaaagagagacattgtggcgagctgaaacgcaggctgggacttagtacactcggggagctcaagcagaacttaagcaggtcttggcacgatgtccaagttagcagtgcctacaagaagacccaggaaaccctctcacaagccggacagaagacttccgctgcactctcaaccgtgggcagcgcaatcagcaggaagttgggggacatgcggaacagtgcgacattcaagtcattcgaagaccgcgtgggcaccattaagtccaaggtcgtgggagatcgcgagaatggaagtgacaacttgcctagtagtgccggatccggcgacaaacctttatcagatccagcaccattctag

SEQ ID NO: 245697 - DNA, 3405 bp, synthetic construct
  misc_feature 1..3405: note = Description of Artificial Sequence: Synthetic coding sequence
  source 1..3405: mol_type = other DNA
atgaggttcgggagcaaaatgatgccgatgtttctcactgtgtacttgtccaacaacgaacagcacttcacagaagttccagtcactcccgaaacaatttgtagggatgtggtcgatctgtgcaaggaacccggagagtcggattgccacttggctgaagtctggtgcgggtccgagagaccagtggccgataacgagaggatgtttgatgtgttacagaggtttggaagtcagcgtaatgaggttcgattcttcttgcgtcacgagcgtccacctggacgtgacattgtgagtgggcctcgctctcaggatcctagtctgaagagaaatggagttaaggtccccggagagtatagacggaaagaaaatggagtgaattcaccgagaatggacttaactctcgctgagctgcaagaaatggcgagccggcaacaacagcagatcgaagctcagcaacagctattggccacgaaggaacaaagactgaagttcttgaagcagcaagaccagcgacaacagcaacaagtcgccgaacaggagaagctgaagaggctgaaggaaatcgccgagaaccaggaggcgaaattaaaaaaggttagagctctcaaagggcatgttgagcaaaagagactgtccaatggaaagcttgtagaggagatcgaacagatgaataacttatttcagcaaaaacagcgggaattagtgttggcggtgtcaaaggtggaggagctcacaaggcagcttgaaatgctcaagaacggtcgtatagactctcaccacgataaccagtctgcggttgctgaactcgatcggctgtacaaggagctacaactcagaaataaactcaaccaagagcagaacgccaagcttcagcaacagcgcgaatgtctgaacaaacggaactccgaggtagctgttatggataagcgagttaatgagctcagagaccgtctatggaaaaaaaaggccgctctccagcagaaggagaatcttcctgtgtcttccgatggcaatctaccccagcaggcagcttcggcaccaagccgtgttgctgccgtcggaccatacatccaaagctcgactatgccacggatgccgtctaggcctgagctgttagtgaagcctgctttgccagacggcagtttagtaatccaggcatcggaaggtcccatgaagatccagaccctccctaatatgcgttcgggagccgcttctcagactaaggggtctaaaattcaccccgtgggacctgactggtctccaagtaatgcggatctgttcccatctcaggggtcagcctctgtgccccaaagcactggtaatgccttggatcaggttgatgatggcgaggtacccctgcgcgagaaggaaaagaaggtgcggccattctcaatgtttgacgccgttgaccagtccaacgccccaccgtccttcggcactcttcggaagaatcagtctagtgaagatatcctgcgcgacgctcaggtggccaacaagaatgtagctaaggtgccaccgccagtgcccactaaacccaaacagattaacttgccatacttcgggcaaacaaaccagccaccttctgatattaagcccgacggctcttcccaacagctgtcaactgttgtgccatctatgggcacaaagccgaaaccggctggacagcaacccagggtcctactgagcccctctatcccttcagtgggccaggaccagaccctctctcctggaagcaaacaggagtcacctccagcagcagccgtcaggccttttaccccacagccatccaaagataccttactcccgccattccgcaaaccgcagacagtagctgcgagctcgatctattccatgtatacacagcagcaggctcccggtaagaacttccagcaggccgtccaatctgccctgactaagacgcatacacgcggaccacatttctcatccgtctacggaaaacccgtaatagccgcagctcagaatcagcagcagcacccggaaaacatctattccaatagtcagggcaaacccggaagcccggagcctgaaaccgaacccgtgtctagcgtgcaggagaatcacgaaaacgagagaattcccagacctttatcacccactaagcttcttccgtttctcagcaacccttatcgtaaccaaagcgatgccgatctggaagccctcaggaagaagctgtcaaacgccccacggcctcttaagaaacggagtagcataacggaaccagaaggcccaaacgggcctaacatccagaaacttctgtaccaacgtacaaccatcgcggcaatggaaacaatttcggtgccttcatatccctcaaaatcagccagtgtcaccgctagcagcgagtctcccgttgaaattcaaaatccgtatcttcatgtggaaccagaaaaggaagtagtgtctctagtgcccgagagtttatcccccgaggatgtgggcaacgcttctaccgagaattctgatatgccggctccaagtcccggactcgactatgagccagaaggagtaccggacaatagtccaaacctacagaacaatcccgaagagcccaatcccgaagctccacatgttctcgatgtgtacctcgaggagtatccaccttacccaccccctccgtatccaagcggcgaacccgagggccctggcgaggactccgtgagtatgaggccaccagagattacagggcaggtatcgcttcctccaggaaaacgcacaaacctaagaaaaactggtagcgaaaggattgcccacggcatgagagttaagttcaatccactggcgctcttactcgattctagcttagagggcgagtttgatctggtgcagcgtatcatctacgaagtggatgacccgtcactcccgaacgacgaaggtataaccgcgctacataacgcagtgtgtgccggtcatacggaaatcgtgaagttcctggtgcaatttggtgtcaatgtaaatgccgctgactccgacgggtggacaccacttcattgcgcagctagctgtaacaatgtgcaggtatgcaagttccttgtggaatcaggggcagcagtatttgcaatgacctatagcgacatgcagactgcagccgataaatgcgaagagatggaagaaggctacacccaatgctcccagttcctctacggtgtccaggaaaagatgggcataatgaataagggggtgatctacgctctgtgggactatgaaccacagaacgatgacgagctccccatgaaagaaggggattgtatgaccattatccatagggaagatgaagacgagatcgagtggtggtgggcccgactcaacgacaaggagggctacgtgccacggaacctcctcggactctatccgcgtatcaagcccagacaacggagcttagcttag

SEQ ID NO: 245698 - DNA, 3018 bp, synthetic construct
  misc_feature 1..3018: note = Description of Artificial Sequence: Synthetic coding sequence
  source 1..3018: mol_type = other DNA
atggacctgactctggctgagcttcaggagatggcgagccgacagcagcagcaaatcgaggcccaacagcagttgttggctaccaaggaacagagacttaaattcttaaaacagcaggaccagagacaacagcagcaagttgcagaacaagaaaagcttaagaggctcaaggaaattgccgagaatcaagaggcaaaattaaagaaagttcgcgcactcaaaggccacgtggaacaaaaaagactgtcgaatggcaaactggtagaagaaatcgagcaaatgaataatctcttccagcagaagcagagagagctggtgcttgcagtgtccaaagtcgaagagttgaccagacagctggaaatgctcaaaaatggccgtattgattcccaccacgacaaccaatctgccgtcgccgagttggatcgactctataaggagctccagctgcgcaataaactcaaccaggaacaaaatgcgaaactgcaacaacagcgtgagtgtcttaataaacgcaacagcgaggttgccgtcatggacaagcgtgtgaacgagctacgtgaccgcctctggaagaaaaaggccgctctgcaacagaaggaaaacctgcctgtatcaagtgacggtaaccttccccagcaggccgcatctgctccttcacgcgtggctgctgtgggaccatacatccagagctcaacgatgccgcgaatgccatctcggcctgaactcctggtgaagcccgcactgcctgacgggagcctggtcatccaagcaagtgagggtcctatgaagatacaaacacttcccaatatgaggtctggagcagctagccaaacaaagggtagcaagatccaccccgtgggcccagactggagcccctcgaacgccgacttgtttcccagccaaggctctgcttcggtgccacagtccacaggcaacgcgcttgaccaggttgatgacggggaggtgccgcttcgggaaaaagagaagaaagttagacctttttcaatgttcgacgccgttgaccaatctaacgcaccgccttccttcggaactctccggaaaaaccaaagttctgaggacatcctgcgtgacgcacaggtggcaaataagaacgttgccaaagtgccaccacctgtgcctaccaagccaaaacagatcaacctgccttattttgggcagacaaatcagccgcctagtgacattaaaccggacggcagctcccaacagctctccacagtcgtgccatctatgggaaccaaaccaaaacctgcgggtcagcagccgagagttctgttgagtcctagcatccccagcgtgggccaagatcagacattgagccccggatcgaaacaagagtctccccctgccgctgccgtgagacccttcacaccgcagccctcaaaagatactttactgccccctttccgaaaaccccagactgtggcagccagttcaatctattcgatgtacacccagcagcaggctcccggtaagaacttccagcaggccgtgcaaagtgcactaactaagacacatacccgtgggcctcacttttcaagtgtgtacggcaaacccgttatagccgctgcccagaatcagcagcagcatcctgagaacatctattcaaacagccagggcaaacctgggagtcccgagccagagaccgaacctgtttcaagcgtacaagagaaccacgagaatgaaaggattcctagacccctgagcccaactaagttacttcccttcctatctaatccataccgcaaccagtcagacgctgacctggaggcattgaggaaaaaactgtctaacgccccacgcccacttaaaaaaagatcaagcattactgaacctgaaggtcccaatggaccgaacattcaaaaactcctctatcagagaactacgatagccgctatggagaccatcagcgtcccttcataccccagcaaatccgcctcagtcacggctagctctgaatcccctgtagagattcagaatccatacctccatgtggagcccgagaaggaggtagtttctttggttcccgagtctttatcccccgaagacgtaggcaatgcgtcaaccgagaattccgacatgcctgccccatcccctgggctggactacgagcctgaaggagtccccgataactccccgaatctccaaaataaccctgaggaaccaaatcccgaggcccctcatgttttggatgtatacctggaggagtacccaccttatcctcctccgccatatccctctggagaacctgaggggcctggagaagatagtgtctctatgcgcccacctgagatcaccggtcaggtgtccctgccgcctggcaaacggaccaacctgcgaaagaccggttctgagcgaatagcccacggcatgagagtgaagttcaatcctttagccctcctgctggatagcagccttgaaggggaattcgatctcgtccagagaatcatttatgaggtggatgacccttcactccctaacgacgaggggataaccgcgctgcataacgcagtctgcgcaggccatacagagatcgttaagtttctagttcagttcggtgtgaatgtgaatgccgctgactcagatggttggacgccactgcactgtgccgcaagctgtaataatgtgcaggtgtgcaaatttctggtggagtcgggcgcagccgtgtttgccatgacctacagcgatatgcagacagcagctgacaaatgtgaagaaatggaggaggggtacacccagtgcagccagttcctttacggggtgcaggagaaaatgggaataatgaacaaaggggttatttacgctctgtgggattatgaacctcaaaatgacgacgagctgcctatgaaagagggcgactgcatgacaataatccatagggaggatgaggatgaaatcgagtggtggtgggctcgtctcaacgacaaggaaggatacgtaccaagaaacttactcggactgtaccctcgcattaaaccaaggcagagatccctcgcatag

SEQ ID NO: 245699 - DNA, 1104 bp, synthetic construct
  misc_feature 1..1104: note = Description of Artificial Sequence: Synthetic coding sequence
  source 1..1104: mol_type = other DNA
atggaaacaatcagcgtgccatcctacccaagtaaaagcgctagcgtgaccgcctccagtgagagcccggtggaaatccagaacccttatcttcacgtagaaccagaaaaggaggtagtgtcactggtgcccgaaagtctcagccccgaagatgtgggtaatgcctccacagagaacagtgacatgccagctccctcccccggtctggactacgagccagagggggtccccgataactcacccaatctccagaataaccctgaggagcctaaccctgaggcccctcacgtcctcgacgtttatcttgaagaataccccccttaccctccacccccataccccagcggagagcccgaaggaccaggcgaggactcagtgagcatgaggcccccagagattactggacaggtgtctcttcccccaggaaaaaggactaatctaaggaagacgggcagcgagaggatagcccacgggatgagggttaagttcaaccctctggccctcctcctcgacagcagcctcgagggggagttcgacttagtgcagagaatcatctatgaagtagatgatcccagcctgccgaacgatgagggaatcactgccctccacaatgccgtatgcgccggacacactgagattgtgaaattcctggtgcagttcggggtgaacgtcaacgctgccgattccgatggttggacacccctccattgtgcagcaagctgcaacaatgtgcaggtgtgtaaattcctggttgaatctggggcagctgtgttcgcaatgacctattctgacatgcagactgccgctgacaagtgcgaggaaatggaggagggatacacccagtgtagtcagttcctatatggcgtgcaggaaaaaatgggcatcatgaacaagggtgtaatctacgcactgtgggattatgagccgcaaaatgatgatgaattgccaatgaaggaaggtgattgcatgaccatcatccaccgcgaggacgaagatgagattgagtggtggtgggccaggctgaatgacaaagagggatatgtacctcggaacctattggggctgtaccccaggattaagccaaggcagcgctcccttgcatag

SEQ ID NO: 245700 - DNA, 2043 bp, synthetic construct
  misc_feature 1..2043: note = Description of Artificial Sequence: Synthetic coding sequence
  source 1..2043: mol_type = other DNA
atgaacttcgagacatcaagatgtgctacgcttcaatactgccccgacccgtacatccagagattcgtagagaccccagcccattttagctggaaggagtcctactatcggtccacaatgagccagtctactcaaacaaatgagttcttaagtccagaagtattccaacatatttgggactttctcgaacagcccatttgcagcgtgcagccaatcgaccttaatttcgtcgacgagccatctgaagatggggctactaataagatcgaaatttctatggactgcatcaggatgcaggacagcgacctgtctgatccaatgtggccccagtacactaaccttgggctgctgaattctatggaccaacaaatacagaacggcagcagcagcaccagcccctataataccgatcacgcacagaatagcgtgaccgctccaagtccctacgcacagccctcgagcactttcgatgccctcagccccagccccgctataccctctaacactgattacccaggaccgcatagtttcgatgtttcttttcagcagagcagcaccgcaaagtcagccacctggacatactccaccgagttaaaaaagctgtactgtcagatcgctaaaacttgccctatccagatcaaagtaatgactccgccaccccagggcgcagtaattagagccatgcctgtgtacaagaaggcagagcacgtgactgaggtggttaagaggtgtccgaaccacgagctcagccgggaatttaatgagggacagattgctccgccaagccatcttattcgggttgagggtaactcacacgctcagtacgttgaagatcccataaccggtcgccagtccgtcctggttccatacgagcccccacaagtgggcaccgagttcaccaccgtactgtataattttatgtgcaactcttcctgcgttggtggtatgaatcgcagacccatcctcataattgtcaccctggagacgcgagacgggcaggtgctggggagaaggtgtttcgaagctcgcatctgcgcctgcccgggtcgggatagaaaggccgatgaagacagcatacggaagcaacaggtctccgactctacgaagaacggagacggcacaaagagaccctttcgccaaaatactcacggcatccagatgacatccatcaagaaacgcagatcgcccgatgacgaattgctctacctgccggtcagaggccgtgagacctacgaaatgcttttgaagattaaagagtcactagaactgatgcaatatctacctcagcacacaattgagacctacaggcagcagcagcaacagcagcatcagcacctgctgcagaaacagacatctattcagtcaccctcatcgtacgggaacagttcacctcccctcaataaaatgaattccatgaacaaactaccctccgtttcccagttaattaacccacagcaacggaatgctctcacgcctaccaccatccctgacggaatgggcgctaatattcccatgatggggacacacatgccaatggcaggcgatatgaatggcctgtcccctacgcaagccctccctccaccgctgagcatgccgagcacttcccattgtacaccacctcccccttacccgactgattgtagtatagttagcttcctcgccagactgggctgtagcagttgcctagactatttcaccacccaaggtctgaccacgatctaccagatcgagcactattccatggatgatctggcttccctgaaaattcctgaacagttcaggcacgctatatggaaaggtattctcgatcacagacaactgcacgaattttctagcccctctcacctgctgcgaacgccctcatcagccagcactgtaagcgtaggttcctcggagacgcgcggagaacgggtaattgacgctgtccggttcacactgcgacagacaatctcctttccaccgagagatgaatggaatgatttcaacttcgatatggacgctcgaagaaataaacagcagagaatcaaagaggaaggcgaatag

SEQ ID NO: 245701 - DNA, 1533 bp, synthetic construct
  misc_feature 1..1533: note = Description of Artificial Sequence: Synthetic coding sequence
  source 1..1533: mol_type = other DNA
atgaattttgagacttcaaggtgcgctacactccagtattgtccggacccttatatccaaaggtttgtggaaactcccgctcatttcagctggaaggagagctattatcgttcgactatgagccagtccactcagacaaatgagttcctttctcccgaagttttccagcacatctgggatttcctagagcaaccaatctgctctgtgcagccgatcgatttgaattttgttgacgagccaagcgaagatggcgcaactaataagatagagattagtatggattgtatccggatgcaggacagcgacctttccgacccaatgtggcctcagtatacaaacctcggactactgaatagtatggaccagcagattcagaatggctcttcatccacatcaccgtacaacactgatcatgctcagaactccgtgaccgcccctagtccgtatgcccagcccagctcaacctttgacgccctttccccttccccggcaatcccctcaaacaccgactatcccggtcctcattccttcgacgtcagcttccagcagagcagtacggccaaatctgccacctggacttattcaaccgagctaaagaagctgtactgccagattgcaaagacatgcccgatccagatcaaggtcatgacgccaccccctcagggtgctgtgattagagcgatgccagtgtacaagaaggcagagcatgtcacggaggttgtaaagcgctgtccaaaccacgagctgtctcgggaatttaatgagggccagattgctcctccttctcatctcattagagtcgaggggaacagccacgcccagtacgtcgaagaccccatcacgggcaggcagtccgtgctggtgccatacgaaccaccacaagtgggaactgagtttaccacagtgctgtataactttatgtgtaactcttcctgtgtgggcggaatgaacaggagaccgattctgataatagtgaccctagagaccagggatggccaagtgctcggccgtcggtgttttgaggcccgtatctgtgcatgccccggtcgggatcggaaagctgacgaagatagcatccggaagcagcaagtttccgacagtactaaaaatggcgacgggacaaagagaccttttagacagaatacacatggcatacaaatgacctccatcaagaagaggcgatcgccagacgatgagttgctttatctgccagtgcggggaagggaaacctatgagatgttgttgaagataaaggagagcctggaactgatgcagtatctgcctcagcacactatcgagacataccgtcagcagcaacagcagcaacaccagcatctgttgcaaaagcagacctcaatacagagccccagtagctatggcaatagcagcccacctcttaacaaaatgaacagtatgaataagctcccttccgtgagtcagctaatcaatccccaacagagaaatgcattgacccctaccaccataccagacgggatgggggctaacaggagtggaaagtctgaaaatccatag

SEQ ID NO: 245702 - DNA, 1761 bp, synthetic construct
  misc_feature 1..1761: note = Description of Artificial Sequence: Synthetic coding sequence
  source 1..1761: mol_type = other DNA
atgttatatctggagaataacgctcagacacagttcagcgagcctcagtatacaaacctgggactgctaaactcaatggatcagcagatccagaatggctcttcttccacatccccctataacaccgaccacgcccaaaactcggtcacagctccgtctccttacgcccagccatcatccactttcgatgcgctgagcccctcccctgctatcccctccaacactgattaccctggacctcatagctttgatgtgtcattccagcaatcttccaccgcgaagagcgccacctggacttacagcacggaacttaaaaaactttactgccagatagccaaaacttgccctattcagattaaggtgatgactcctccacctcaaggagccgtcattcgcgcaatgccggtatacaagaaagccgagcatgtgaccgaagtggtgaagaggtgcccaaatcatgagctgagccgggaatttaatgagggccagatcgccccaccaagccacttgatacgtgtcgaaggcaatagccacgcgcagtatgtggaagacccaatcacagggcgtcagagcgtactcgtaccttacgaacctccacaggtcggaaccgaatttacaaccgttttatataactttatgtgcaatagctcttgtgtgggcggaatgaatcgcagacccattttaataattgtgactctggagactcgcgacggccaggtgctgggtcgcaggtgttttgaagcacgcatttgtgcgtgcccgggacgggaccggaaagccgatgaggatagcatcagaaagcagcaagtgagcgacagtacaaagaatggtgacggtactaaaaggcctttccggcagaatacccatgggattcagatgacttccattaagaagcgacgcagtcccgacgatgaattgctctatttgcctgtgcggggaagggagacatacgaaatgctgttgaagatcaaagaaagcctcgagctcatgcagtacctgccccagcacaccatcgaaacatatagacagcagcagcagcagcagcatcagcacttgctacagaagcagacgagcatacagagccctagcagttatggcaattcctcgccaccgctgaataaaatgaattccatgaacaagctcccctcagttagccaattgattaaccctcaacagaggaatgcccttacccctacaacgatccccgatgggatgggagcaaacattcccatgatgggcacacatatgcccatggccggagatatgaatgggctcagccccacccaagccctccccccacccctgagcatgccttctacttcccattgcacaccccctcccccataccctactgactgcagcatcgtcagcttcctggcccgactgggatgttcctcctgtctcgactactttactacgcaaggcctgacgacaatataccagattgagcactattcaatggacgacttggcttctctcaagattcccgaacaatttcggcacgcaatatggaaagggatcctggaccataggcagttgcacgagttcagctcgcctagccacttacttagaacaccttcctcagcgtcaactgtttcagtcggctcatcggagaccagaggtgagcgcgtcatagacgcagtccgattcacactgcggcagaccattagctttccgccaagggatgagtggaacgattttaatttcgacatggacgctcggaggaacaagcagcagaggatcaaggaggagggcgagtag

SEQ ID NO: 245703 - DNA, 1788 bp, synthetic construct
  misc_feature 1..1788: note = Description of Artificial Sequence: Synthetic coding sequence
  source 1..1788: mol_type = other DNA
atgaacttcgaaacctctcgctgcgccactttgcaatattgtccagacccctacattcagcgcttcgtggagacacccgctcacttctcttggaaggagtcctattacagatcaactatgtcccagtcaacccagaccaatgaatttctgtctccagaggtgtttcaacatatttgggactttctcgaacagcccatatgttcagttcagcctattgacctgaattttgtcgacgagccatctgaggatggagccacaaataagatcgagatctcaatggactgcatccggatgcaggattcggatctcagcgaccctatgtggtactcgactgaactaaagaaattatactgccagattgccaagacttgccccatacagattaaggtcatgacacccccacctcaaggggcagttataagggctatgcccgtatacaaaaaggctgaacatgtgaccgaggtcgtaaagaggtgtccgaaccacgaactctcccgggagttcaatgaaggacagattgctccccctagccaccttatccgcgtggaaggcaactcgcatgcccagtatgttgaagatcctatcacagggaggcaaagtgttcttgtaccttacgagccgcctcaggtcggtaccgagttcactactgtcctttacaactttatgtgcaatagttcttgcgttggcggaatgaaccggaggcccatcttaatcatcgtgaccctcgagacgagggacggacaggttctgggacgacggtgcttcgaagccaggatctgcgcatgccccggtagagatagaaaggccgatgaggactcgattcgaaaacaacaggtgagtgactccaccaagaatggggatgggacaaagcggccttttcggcagaacacacacggtatacagatgaccagtatcaaaaagaggcgatcccccgacgatgaactgttatatctgccagtgcggggtagagagacatacgaaatgttgctgaaaatcaaagaatctctggaacttatgcagtatcttccccagcatacaatcgagacatatcgacagcagcagcagcagcagcatcagcatctgttgcaaaagcaaaccagcattcagtccccatctagttacggaaacagcagcccacctctgaacaagatgaactcaatgaacaaattaccgtctgtgagccagttgataaacccccagcagcggaacgccttgacccctaccactattccagatgggatgggcgcaaacattcccatgatgggcactcacatgccaatggccggtgatatgaacggcctctcccccacacaggctctgccacctcccctctccatgccctctacgagtcattgtacccctcccccaccgtacccaacggattgctccattgtgagtttcttagcacgcttggggtgtagcagttgtctcgactactttaccacccaagggctgacaacaatctaccaaattgaacattattctatggacgatttagcttccttgaagattcctgagcagttccgacatgccatctggaaaggaattcttgatcaccgacaactgcacgaattttccagcccctctcatcttctgcggacccctagcagtgcatcaactgtgtctgtgggctccagtgaaacacggggtgaacgggtcatagacgccgtccggttcactcttcgccagaccatctcatttccccctagggacgaatggaacgactttaatttcgacatggatgcccgaagaaataagcagcaaagaattaaggaagagggggagtag

SEQ ID NO: 245704 - DNA, 1668 bp, synthetic construct
  misc_feature 1..1668: note = Description of Artificial Sequence: Synthetic coding sequence
  source 1..1668: mol_type = other DNA
atgaatttcgagactagccggtgcgccactctgcagtattgccccgacccttatatccagcggttcgttgagacccctgcacatttttcctggaaagagtcctactataggagtacaatgtcccagagtacacagaccaacgaattccttagccctgaagtctttcagcacatctgggacttcctggaacaacctatctgctctgttcaacctatcgaccttaatttcgtcgatgagccgagcgaagatggcgcaaccaataagattgagatatcaatggactgcattaggatgcaggatagcgacctcagcgacccaatgtggccccagtacactaatctggggctgctcaacagcatggaccagcagatccagaacggaagtagcagcacaagtccatacaatacggaccatgcccagaactcggtcactgcaccttccccctacgcgcagccgtctagtaccttcgacgctctgagccccagtccagctatcccctccaacaccgactatcctgggcctcactccttcgacgtgtcgtttcagcaatccagcactgcaaaaagtgcgacatggacttacagcacagaacttaagaaactatattgtcagatcgcgaaaacgtgtcccatccaaattaaggttatgacccctccccctcagggagccgtaattcgcgctatgcctgtctacaagaaggctgagcacgttaccgaggtggttaaacgctgcccaaatcacgaactgtcgcgagagtttaacgagggccagatcgctcccccaagccacctaatccgtgtcgaggggaactctcacgcccaatacgtcgaggaccccataactggccgacagtcggtactggtcccttacgaaccacctcaagtgggtacagaattcacgacggtgctctataacttcatgtgcaattcatcttgcgtgggtgggatgaaccgaagaccgattcttataatcgttactctcgagactcgggacggccaagtgctaggacgccgatgcttcgaggccagaatctgcgcctgcccaggacgcgacaggaaagctgacgaggacagtatcaggaaacaacaggtgtcggattcaactaaaaatggggatggtacaaagcgaccttttcgacagaatacccacgggatccagatgacttccatcaagaaacggagatctcccgatgatgaactgctctatttgcccgtgcgcggacgagagacttatgagatgctcctaaagataaaagaaagccttgagttgatgcagtacttaccccaacacacaattgagacgtatcggcagcaacagcagcagcagcaccagcacttactgcagaaacagaccagcattcagtccccatcgtcttatggtaactcctcccccccactgaataaaatgaatagcatgaataagttgccaagtgtgtctcagcttattaacccccagcagcgaaacgcacttacgccaaccacaatccccgacggtatgggagctaatattccaatgatgggaacgcatatgcctatggccggtgatatgaacggcctcagccctacacaagctctgccaccacctctgagcatgcccagtacatcccattgcacaccgccaccaccataccctacagattgttctatcgtccggatctggcaggtctag

SEQ ID NO: 245705 - DNA, 1251 bp, synthetic construct
  misc_feature 1..1251: note = Description of Artificial Sequence: Synthetic coding sequence
  source 1..1251: mol_type = other DNA
atgctatacttggaaaacaatgctcaaacacagttctctgagcctcaatatacaaacctgggcttgttaaattcgatggatcagcagattcagaacgggagttcctcaacatcaccttacaatactgaccacgcacagaattctgtcacagccccatccccatatgcacagccttcgagcactttcgacgccctgagtccttcccccgctatcccctcaaatacagattaccctgggccacattccttcgacgtgtccttccagcagagcagcaccgcaaagagcgcaacatggacctattctactgagttaaagaagctgtactgccagatcgcaaagacctgcccaatccagattaaggtgatgacccctcctccccagggggcagtgatccgcgcaatgcccgtgtataaaaaagcagagcacgtcaccgaagtggtgaaaaggtgtccaaatcacgagttgagcagggagttcaacgaaggacagatcgcgccacccagccacctgattagagtagaggggaattctcatgcacagtatgtcgaagatccaatcacaggtagacaatcagtgctggtgccgtacgagccccctcaagtggggaccgagtttaccacagtcctgtataactttatgtgcaactccagctgcgtcggaggaatgaacagacggccaattcttatcatcgtcacccttgagaccagggacggccaggtgttaggccgaaggtgtttcgaggctcgcatttgtgcctgtccagggagggacagaaaagcggacgaggattccatccgaaagcaacaggtatcagattctactaaaaatggggatggtaccaagagaccatttcgccagaacacccacggtatccagatgacaagtatcaaaaaacgcagaagcccagatgacgagctcttgtacctgccagtgagaggcagggagacatatgaaatgttgttgaaaattaaggaaagcctcgaactgatgcagtacctcccacagcatacaatcgagacttacagacaacagcagcaacagcaacaccagcacctcttacagaaacagactagcattcagtcaccatccagttacggcaattcatcacctcctctcaataaaatgaattccatgaataaactcccaagcgtatcccagctgatcaatccgcagcagaggaatgctctgacccccaccaccatccccgatgggatgggcgctaacaggagcggtaagtcagaaaacccttag

SEQ ID NO: 245706 - DNA, 1386 bp, synthetic construct
  misc_feature 1..1386: note = Description of Artificial Sequence: Synthetic coding sequence
  source 1..1386: mol_type = other DNA
atgctgtatctcgagaacaacgcacagactcagtttagcgagccacagtacacaaacttggggctgcttaatagtatggatcagcagatccagaacggctcctcctcaaccagtccctacaacaccgaccacgcccagaactccgtgacagccccatctccttatgcgcagcctagtagtacgttcgatgcactatctccttctccagccatcccgtcaaatacggactatcccggacctcactcatttgacgtttcttttcagcaatctagcacagcaaagagcgctacgtggacttattccacagagctgaagaaactgtactgtcaaattgctaaaacatgccctatccagattaaggtgatgaccccaccaccccaaggagcagttatccgagcaatgcctgtttacaagaaggccgagcacgtgaccgaggtagtgaaaaggtgtcccaatcacgagctgtccagggaattcaacgaaggccagatagcccctcccagccaccttatcagggttgagggaaattctcacgcacagtatgtagaggatccaattacaggacgccaatcggtcctagtaccgtacgagcctccccaggtaggtactgagtttaccaccgttctgtacaactttatgtgtaacagttcatgcgtcggaggcatgaatcggcgtccaatactgattattgtgaccttggagaccagagacggccaggtcctcggaaggcggtgttttgaggcaagaatctgtgcttgccccggaagggacagaaaggccgatgaagactctatcagaaagcagcaggtgtcggattccacaaaaaacggcgacggcaccaaacgacctttccgtcagaacacgcacgggatccagatgacatctatcaaaaagaggcgcagccccgatgatgagctgctgtatctccctgtcagggggagggagacatatgagatgcttctaaagataaaggaatcactcgaactgatgcaatatctcccccaacacacaatagaaacctataggcagcagcagcagcagcaacaccagcatctactgcagaagcaaacaagcatacaaagtccctcctcttacgggaatagcagcccccctctgaataaaatgaatagcatgaacaagttaccatcagtttcgcagctgattaaccctcaacagcgtaacgcgctcacacccacaactattcccgacgggatgggcgcaaacatccccatgatggggacacacatgccgatggccggagatatgaatggtctgtcaccaacacaggccctacctcctccactgtctatgccatctacatctcactgtactccaccacccccttatcctaccgactgtagtatcgtgcgtatttggcaggtctag

SEQ ID NO: 245707 - DNA, 1464 bp, synthetic construct
  misc_feature 1..1464: note = Description of Artificial Sequence: Synthetic coding sequence
  source 1..1464: mol_type = other DNA
atgaattttgaaaccagtcgatgtgccacgcttcaatactgtccagacccctatattcagcgcttcgtggaaacccccgcacactttagctggaaggagtcctattatcgttccaccatgtctcagtcaacacaaaccaatgagttcttgtcccccgaagttttccagcatatctgggacttccttgaacagcccatatgtagtgtgcagcctatagatctcaacttcgttgacgagccaagtgaagatggggcaaccaataagatcgaaatcagcatggattgtattcggatgcaggactccgacctgagcgatcctatgtggcctcagtataccaatcttggcctgctgaattccatggatcagcagatccaaaacgggtcctccagtacctccccatacaatactgaccatgcccagaattctgttacggcaccctccccttacgctcagcctagcagcacattcgacgcactctccccgagcccggctatcccttcaaacaccgactaccccggaccccattcttttgacgtttcgttccaacagtctagtactgccaaaagtgctacttggacatactctacagaactcaaaaaactttactgccaaattgccaaaacctgccccatccagataaaggttatgacaccacctccccagggggcagtgatccgtgcgatgcccgtttacaagaaggcagaacacgtcaccgaggtagttaaaaggtgcccaaatcacgaactgtcgcgcgagtttaatgaagggcagatcgcccctccttctcacctcatcagggtggaagggaactctcacgcacaatacgtcgaagatccgatcactggcagacagtccgtcctcgtaccctatgagccgcctcaggtgggcactgagttcacaacagtgttgtataacttcatgtgtaattcctcctgtgtgggagggatgaatcggaggccaatcctcattatcgtcaccctcgagacccgggatggtcaggtgctgggcaggcgctgtttcgaggctcgtatttgcgcctgtccaggccgagacaggaaggcagacgaggacagcattaggaagcagcaggtctccgacagcacgaaaaacggggacgggacaaagcgcccttttcgtcagaacacacacgggatccagatgacgtctattaaaaaaagaagaagcccagatgacgagttgctctacctgccagtgcggggtcgggagacgtacgaaatgctcctgaaaattaaagagtcattggagctcatgcagtacctgccccagcacaccattgagacatacagacagcagcagcagcagcagcaccagcacctgctgcaaaaacatttgttatcggcatgctttcggaacgagctggtagaaccaagacgcgagactcctaaacaaagtgatgtttttttccggcacagcaaaccaccaaaccgcagcgtgtacccttag

SEQ ID NO: 245708 - DNA, 1182 bp, synthetic construct
  misc_feature 1..1182: note = Description of Artificial Sequence: Synthetic coding sequence
  source 1..1182: mol_type = other DNA
atgctgtatttagagaataacgctcaaacccagttctccgagcctcaatacactaacctcgggttattgaacagtatggaccagcagatccagaacggttccagtagtacgtcaccctacaataccgatcacgctcagaacagtgtcactgccccatctccctatgcacaaccttcctctacgttcgacgctttgtccccgtcccccgcaattccttctaatactgactatcccggtccacactcattcgatgtgtcttttcagcagtcttcaactgccaaaagtgctacttggacttacagcacagagctgaaaaagctgtattgtcagattgccaagacatgcccgatccaaattaaagtgatgacacctccgcctcagggagcagtgatccgcgcaatgccagtttataaaaaagcagaacacgtcacagaagtggtgaaaagatgtcctaatcatgagcttagccgggagtttaacgagggacagattgcaccccctagtcacctgataagggtcgagggcaactcacatgcccagtacgtcgaggacccaattactggccgtcaatccgtcctcgtgccctacgagcctcctcaggtggggacagaatttaccacggtcctctataacttcatgtgcaattcttcatgtgtgggcggaatgaatagacgtccgattctgatcatagtgacgttagagacccgagatggccaggtcctcggtcggcgttgctttgaagccaggatttgcgcctgcccgggaagagacagaaaggcagatgaggactcaatcagaaagcaacaggtgtctgatagtacaaagaacggcgatggaacgaagcgacccttccgccagaacacccacggaatacagatgaccagcatcaagaagcggaggtcccctgacgatgaactcctttacctgcccgtgagaggtagggaaacttacgagatgctcttaaagatcaaggagtctctggaactcatgcagtacttaccacagcacaccattgagacctataggcagcagcagcagcagcagcaccagcacctgctgcaaaagcatttattaagcgcctgcttcagaaacgagcttgttgagccacgccgagaaacaccaaagcagtctgacgtcttttttcggcattccaagccgccaaatagaagcgtgtatccttag

SEQ ID NO: 245709 - DNA, 2031 bp, synthetic construct
  misc_feature 1..2031: note = Description of Artificial Sequence: Synthetic coding sequence
  source 1..2031: mol_type = other DNA
atgaatttcgaaacaagcaggtgtgctaccctccaatattgtccagatccttatattcagagatttgtggaaactccagcccactttagctggaaagagtcatattacagatccaccatgagccagtcaacccaaactaacgagtttctgtcgcccgaggtgtttcagcacatctgggatttcctggaacagcctatctgcagcgtgcagccaatcgacttgaattttgtagacgagccatcggaggatggggctacaaataaaattgaaatatccatggactgcatcagaatgcaggattccgacttgtcagatccaatgtggccccagtacaccaatctgggactgctcaatagcatggatcagcaaatccagaacgggtcctcttccaccagcccttataatacggatcatgctcagaacagtgtgaccgctcccagcccgtatgcccagccgagctctaccttcgatgccctgtcccccagcccagccattccgtccaatactgactatccgggacctcattcctttgatgtgtcctttcagcagagcagtacggccaagagcgctacctggacctactccactgagctcaaaaaattgtattgccagattgccaaaacctgccctatacagattaaagtcatgaccccacctcctcagggggctgtcatccgggctatgcctgtgtacaaaaaggcagagcacgtgaccgaagtggttaagcgttgtccaaatcacgagctgagccgagaattcaatgagggccagattgcacctccgagccaccttatcagagtggaggggaatagtcacgctcagtacgtggaagatcctattaccgggaggcagtccgtgctggtcccgtatgaaccacctcaggttggaaccgaatttacgacggtcttgtacaatttcatgtgcaatagtagctgtgttggaggaatgaatcgacgacccatacttataattgttaccctagagaccagggatggacaggtactggggagacgttgcttcgaggcaagaatttgcgcatgcccgggtcgggacagaaaggccgacgaggatagcatccggaaacagcaggtaagtgactcaactaagaatggtgatgcatttcgccagaatacgcatggcatccagatgactagtatcaagaagcgcagatccccagacgatgagctgttataccttccggtgaggggaagggagacatacgagatgcttctaaagatcaaagagagcctggagctcatgcagtacctaccccagcacactattgagacttacagacagcagcagcagcagcagcatcagcacctgctccagaaacagacatccattcagtctccttcctcctacggcaatagttcacccccactgaataagatgaactcaatgaacaagctacctagcgtgtcccaactcattaacccccagcagaggaacgcactcacccccaccaccattcctgacggcatgggggcaaacattccaatgatggggacccacatgcctatggccggagatatgaatggcttaagtcccacgcaagctttgccgccacccctgagcatgccttccacaagccactgcacgcccccacccccttacccaaccgattgctccatcgtgtcatttttggcacgtctgggatgctctagctgcctcgactactttacaacccaaggtttgacaaccatttatcaaatcgagcactactccatggatgacctcgcttctctgaagattcctgagcaattcagacacgccatctggaaaggcatcctggaccatcgtcagttacacgagttctcatctccctctcatcttctgcggaccccaagcagcgcctcaacagtcagtgtgggctcctctgaaacacgcggagaacgagttattgacgccgtgaggtttacactgagacaaacgatcagctttcctcccagagacgagtggaatgactttaactttgacatggacgccaggagaaataaacaacaacggatcaaagaggagggggagtag

SEQ ID NO: 245710 - DNA, 1506 bp, synthetic construct
  misc_feature 1..1506: note = Description of Artificial Sequence: Synthetic coding sequence
  source 1..1506: mol_type = other DNA
atgctctatctggaaaataacgcgcagacccagttctccgagtattctactgaactgaaaaaactctactgtcaaattgctaaaacctgtccaatccagattaaagtgatgactcctccaccccagggcgctgtgattcgagctatgcccgtgtataagaaggcagaacacgttaccgaggtagtaaagcgctgtccaaaccatgaactgtctagggagttcaacgaggggcagatagcaccacccagccacctcataagggtggaaggaaatagccacgcccagtatgttgaagaccccattacaggacgccagtctgtgcttgtgccgtatgaaccccctcaggtcggcacggagttcactactgtgctgtataactttatgtgcaatagctcttgcgtcggaggaatgaatcgtcgccctattctgattattgtgacactcgaaacacgggatgggcaagtcctcggcagacgatgcttcgaggcgaggatctgcgcttgtcccggaagggatcgcaaggcggacgaggactccatcaggaagcaacaggtgtctgacagcactaaaaacggagacggaacaaagaggccgtttcgtcagaacactcatgggattcagatgacaagtataaagaagcgcagaagtcccgatgatgagctgctctatttgcccgtccggggacgcgaaacctacgagatgctgctgaagatcaaggaatctttggagctgatgcagtatcttccccaacacactattgagacctacagacaacagcagcagcagcagcatcagcaccttctgcagaagcagacttccatacagtctccatcatcctatggtaactcttctcctccactgaacaagatgaactccatgaacaaacttccaagtgtctctcaactcattaacccccagcagcggaatgccctgacccctactacaataccagacgggatgggtgccaacataccgatgatgggcacacatatgccaatggctggagacatgaacgggctcagtccaacgcaggccctgcccccaccccttagcatgccctccacatcccactgtacgccaccacctccctatcctacagactgctctattgtatctttcctggctagattaggctgcagctcatgcctcgactactttactacccaagggctgactacaatttaccagattgaacactacagtatggatgatctcgcctcattaaagattcccgaacagtttagacatgctatatggaaaggaatcctggaccatcgccagctccatgaattctccagtccatctcacctgctgagaacaccatcttcagccagcacagtgtcagtcggctcaagcgagacgcgtggagagagagtgatcgatgccgtgcgcttcacgcttcgacaaaccatctccttccccccaagggacgaatggaatgactttaactttgatatggatgcacggagaaataaacagcagcgcattaaagaggagggcgagtag

SEQ ID NO: 245711 - DNA, 1749 bp, synthetic construct
  misc_feature 1..1749: note = Description of Artificial Sequence: Synthetic coding sequence
  source 1..1749: mol_type = other DNA
atgttgtacttggagaacaatgcacagacccagttctccgaaccgcagtacacgaacttgggtttactgaacagcatggaccagcagatccagaacgggagcagtagtacctctccttacaataccgatcatgcccaaaatagtgtcaccgcgccatcaccctatgctcagccttcctctacattcgatgcactcagcccatccccagctatccccagcaacactgactaccccggaccacatagctttgacgtgtcctttcagcagtcttcaacagccaagagcgctacttggacttactcaacggagttgaagaaactatactgccaaatcgcgaagacgtgtccgattcagataaaggtgatgacaccccctccccagggcgctgtgatacgcgctatgccagtatataagaaggccgaacatgttaccgaggtcgtgaaacggtgcccaaatcacgaactctctagagaattcaacgaggggcagatagccccacctagccatttgatcagggttgagggtaacagccacgcacaatacgtcgaagaccctatcaccggtcggcagtccgtgctggtcccgtatgaaccaccacaggtgggtacggaattcactactgtactgtacaactttatgtgcaacagtagctgcgttgggggtatgaatcgcaggcccatactgatcattgtaacattagaaactagagatgggcaagttttgggacgccgttgcttcgaggccagaatttgcgcatgcccagggagagatcgcaaggccgacgaggattccatcagaaaacaacaggtgagtgattcaacaaagaacggcgatgcctttaggcagaacacccacggaatccagatgacttcaatcaaaaagcgacgtagtccggacgatgagttgctgtacttgccagtgcgtggtcgtgagacttatgagatgctgctcaaaataaaggagtctctggagcttatgcaatacctcccacagcacaccatagagacatacaggcaacagcagcagcagcagcatcaacacctgctacagaagcaaacctcgattcagagcccttcctcatacggaaactcatcaccaccgctgaataaaatgaatagcatgaacaagcttcctagcgtgtctcagttgatcaatccccagcaacgtaacgctcttactcccacgacaatcccagatggtatgggtgcaaatattccgatgatggggacacatatgcctatggcaggtgatatgaacgggctgtctcctacgcaggccttgccaccgcctctcagcatgccttcgacttcgcactgcactcccccaccgccatatcctaccgactgttcaatcgttagcttcctggcacgcttggggtgcagtagctgcttggactattttacaactcagggcttgaccactatataccagatcgagcactatagtatggatgatctggctagcctaaaaattccggagcagttcagacacgctatatggaaggggatcctagaccataggcagctgcatgagttttccagcccaagtcacctgcttaggactccatcctctgctagcacggtgagtgttggaagttccgaaacaaggggggagcgagtgattgatgccgtgcgtttcacattgcggcagaccataagcttccccccacgggatgagtggaacgattttaatttcgatatggatgccaggcgaaataagcagcagcggatcaaagaggagggagagtag

SEQ ID NO: 245712 - DNA, 567 bp, synthetic construct
  misc_feature 1..567: note = Description of Artificial Sequence: Synthetic coding sequence
  source 1..567: mol_type = other DNA
atgatcatctatcgcgacctgattagccacgatgagatgtttagcgatatctacaaaatacgagagattgctgacggcctgtgcctggaggtggagggaaaaatggtcagccgcaccgagggaaatatcgacgactcactgattggcggtaatgctagcgccgaggggcctgaaggtgagggaaccgagtccacagtgatcaccggggtagatatcgttatgaatcaccatctgcaagaaacttcgttcactaaagaggcgtataaaaaatatatcaaagattatatgaagagtattaaaggcaagctggaagagcaacggcctgaacgcgtgaaaccctttatgacgggcgctgcagagcagatcaagcacatcctggcaaatttcaaaaactaccagttctttatcggggaaaacatgaaccctgatgggatggtggccctcctggattaccgcgaagatggcgtgacaccatacatgattttcttcaaggacggccttgagatggagaagtgcgtcagcacgcgcaagtgggtgaaaattaacaatgtaaaaaagactttctag

SEQ ID NO: 245713 - DNA, 417 bp, synthetic construct
  misc_feature 1..417: note = Description of Artificial Sequence: Synthetic coding sequence
  source 1..417: mol_type = other DNA
atggtgtcaagaacagaaggaaatatagacgactcgctaatcggaggcaatgcctctgccgagggccctgaaggcgaagggaccgaaagcaccgtgatcactggagttgatatcgtgatgaatcatcatctgcaggaaacctctttcacaaaagaagcgtacaaaaagtatatcaaggactacatgaagtccatcaagggtaaacttgaagagcagaggcccgagagagtcaaaccttttatgaccggagcagctgaacaaatcaagcacatcctggccaatttcaagaactaccagtttttcattggagaaaacatgaaccctgacggcatggttgccctgttggactatcgagaagacggggtgaccccatatatgatcttttttaaggacgggctcgaaatggagaagtgttag

SEQ ID NO: 245714 - DNA, 417 bp, synthetic construct
  misc_feature 1..417: note = Description of Artificial Sequence: Synthetic coding sequence
  source 1..417: mol_type = other DNA
atggtttcgagaaccgaagggaacatcgatgactccctcattggcggaaacgcctctgctgagggacctgaaggcgagggtaccgaaagcacagtgatcaccggagtggacatcgtgatgaaccaccacctgcaggagacatcatttacaaaggaagcctacaaaaaatacataaaggactacatgaagagcattaaagggaagctggaagagcagaggcccgagagagtgaagccctttatgacaggagccgcagaacaaattaagcatatcctggctaacttcaagaactatcagttttttatcggagaaaatatgaaccctgatggtatggtggcgctgctggactatagagaagacggcgtaacgccatacatgattttcttcaaagacgggttggaaatggagaaatgttag

SEQ ID NO: 245715 - DNA, 483 bp, synthetic construct
  misc_feature 1..483: note = Description of Artificial Sequence: Synthetic coding sequence
  source 1..483: mol_type = other DNA
atgttctcagatatttataagattcgggaaattgccgatggcctatgcctggaggtggaagggaagatggtttccaggacagagggtaacatcgacgatagtctcataggagggaacgcctctgcagagggccctgaaggcgaagggaccgagtctactgtgatcactggggtggatatcgtcatgaatcaccatctgcaggagacaagtttcaccaaggaggcctacaaaaaatatatcaaggattatatgaagtccattaaggggaagcttgaggagcaacgacccgaaagggtgaagccattcatgaccggtgcggctgaacagatcaagcacatactcgccaattttaagaactaccagttttttatcggcgagaatatgaaccccgacggcatggttgccctgctggattaccgcgaggatggtgtcaccccgtatatgattttctttaaggacggccttgagatggagaagtgctag

SEQ ID NO: 245716 - DNA, 519 bp, synthetic construct
  misc_feature 1..519: note = Description of Artificial Sequence: Synthetic coding sequence
  source 1..519: mol_type = other DNA
atgataatttaccgtgatcttatctctcacgacgaaatgttttcagatatttataaaatccgcgaaattgctgacgggttatgcctcgaggttgaaggcaagatggtttcaagaactgaaggcaacattgacgactctctgattggtggaaacgccagcgctgaggggccagagggtgaaggaactgaatctacagtgattactggggtagatatcgttatgaaccaccacctgcaggagacgtcttttacgaaagaagcctataagaaatacatcaaggactatatgaagtccatcaaaggaaagctggaagagcagcgtcctgaaagggtcaaacccttcatgaccggggcagccgagcagatcaagcatatcctggctaacttcaaaaactaccagttctttatcggcgaaaatatgaaccccgacggcatggtcgctctgctcgactatcgcgaggacggcgttacaccttatatgatcttcttcaaggatgggcttgaaatggagaagtgctag

SEQ ID NO: 245717 - DNA, 1164 bp, synthetic construct
  misc_feature 1..1164: note = Description of Artificial Sequence: Synthetic coding sequence
  source 1..1164: mol_type = other DNA
atggaggatgacgcccctgtcatctatggtcttgaattccaggccagagccctcaccccacagacagcggaaacagacgcaattagattcttggtgggcacccagtcattgaaatacgataaccagattcatataatcgacttcgacgacgagaacaatattattaacaaaaacgtgcttctccaccaggccggtgagatctggcatatctctgcaagtcctgctgaccggggagtgctgaccacatgctataaccgcaccagcgacagtaaggtgctcacgtgcgccgcagtgtggcgcatgcccaaggaactcgagagcggcagccatgagtcacccgatgacagtagctctacagctcagaccctcgagttgctgtgccatctggataataccgcccacggaaatatggcttgtgtagtgtgggagccaatgggagatggtaaaaagatcatcagcctagccgacaaccatatcctgctttgggatttgcaagagtccagttcacaagccgttttggcatcatccgctagtctggagggaaaggggcagctgaagtttaccagcggacggtggagtccccaccacaactgcactcaggtggccaccgctaatgacaccaccttacgcggttgggacacacggtccatgagtcagatttattgtattgagaatgcccacgggcagttagttcgcgacctcgattttaatcctaacaagcagtattacctagcgtcttgcggcgatgactgtaaggtgaagttctgggacacccgtaacgttacagaaccagtgaagaccctggaggagcacagtcactgggtttggaatgtcaggtataaccactcgcatgatcagttggtcttgacaggtagcagcgattcaagggttatactctctaacatggtgtctatttcttcagaaccttttggccacctggttgatgatgatgacattagcgatcaagaggatcaccggagcgaggaaaagtccaaagaaccgttgcaggacaacgtaattgcgacctacgaggaacacgaagacagcgtgtacgctgtcgactggtccagcgcagacccatggctattcgcctcgctcagctatgacggtaggttggttattaatcgtgttccacgtgcattgaagtaccacatactgttgtag

SEQ ID NO: 245718 - DNA, 990 bp, synthetic construct
  misc_feature 1..990: note = Description of Artificial Sequence: Synthetic coding sequence
  source 1..990: mol_type = other DNA
atggccgaagccggaaccggagaaccctcccctagcgtggagggtgaacatgggacggagtacgacacccttccatcagatacagtctctttgagcgactccgattctgacctctcactccctggaggcgctgaggtcgaagctctcagcccaatggggttacctggcgaagaagactctggcccagacgagcctccttcgccgccatctggactgctgcccgcaactgtgcagccctttcatctccgcggtatgagctctaccttttcccagcggtccagggacatctttgactgtctggaaggtgcggctcgacgtgcaccttcctcagtcgcacacacatctatgagcgacaacggaggctttaagagacccctcgccccatccgggagaagccctgttgaaggcttgggccgagcgcaccggtctcctgccagccccagggtgcctcctgttccagattatgtcgcccaccccgaacgctggaccaaatactctctcgaagacgtaactgaagttagcgaacaaagcaatcaggcgacagcccttgcatttctcggcagtcaatcccttgccgctccaactgactgtgtcagcagctttaaccaggatccttcatcgtgcggcgagggtcgtgtgatctttacaaaacctgtccgcggtgtagaggcacggcacgagcgcaagcgcgtgctggggaaagttggggagccaggcagaggcggtctagggaatccagcaacagaccggggagaaggcccagtagagctggctcacctggccggaccaggctccccagaggctgaggaatggggaagccaccatggcggattgcaagaggttgaagctctgagtggctctgtgcacagtggcagcgtgcccggactgcccccagtggaaacagtcggcttccatgggtcaaggaaaaggagccgtgaccactttaggaataaatcatcctctcctgaagaccccggtgccgaagtttag

SEQ ID NO: 245719 - DNA, 798 bp, synthetic construct
  misc_feature 1..798: note = Description of Artificial Sequence: Synthetic coding sequence
  source 1..798: mol_type = other DNA
atggctgaggccggaaccggcctgctgccggcaaccgttcaacctttccacctgcggggtatgagtagtaccttctcgcagagaagcagggatatttttgattgtttggaaggcgcagcacgcagagctccttctagcgtggctcacaccagtatgtcagataacggtggattcaagcgaccattggccccttcaggcaggagtcccgtggaaggactggggagagcccatagatcacctgcctcaccgagggtaccacccgtgccagactatgtggcacacccagaaagatggacaaaatattcactggaagatgtcaccgaggtcagcgaacagtcgaatcaggcaacagccttggcgttcctcggttctcagagccttgccgctcctaccgattgcgtgtcctcttttaatcaggatccttcatcttgcggagaggggagagtgatttttactaagcccgtcaggggtgtggaagccaggcacgagcggaaacgggtacttggcaaagtgggagaacctggaaggggtggcctgggtaatcctgctacggaccggggagaaggcccagttgaacttgcccacctggcaggcccaggatcccccgaagccgaggagtgggggtctcaccatggcggactccaggaagtggaggccctgagtggctcggttcactcaggctcggtgcccggtcttccacccgttgagacggtgggattccacggttcccgaaaacgttcccgtgaccattttaggaataaaagttcctcccctgaagacccaggcgcagaagtttag

SEQ ID NO: 245720 - DNA, 339 bp, synthetic construct
  misc_feature 1..339: note = Description of Artificial Sequence: Synthetic coding sequence
  source 1..339: mol_type = other DNA
atggccgaggctggaaccggggagcctagcccctcagtagaaggggagcacgggacagagtacgacacgctcccatctgacacggtgtccctgtccgattctgattccgacctgtcccttccaggaggcgctgaggtcgaagcgctgagccccatgggactgccaggagaagaagactctggtcccgatgaacccccatcacccccttcggggctgcttcccgcaactgtgcagcccttccatctgagaggaatgagttctaccttttcccagcgctccagagacattttcgactgtctggaaggggctgccaggagggctccctcttccgtggcttag

SEQ ID NO: 245721 - DNA, 612 bp, synthetic construct
  misc_feature 1..612: note = Description of Artificial Sequence: Synthetic coding sequence
  source 1..612: mol_type = other DNA
atggcagaagccggtacgggggaaccaagccccagtgtggaaggagagcatgggacagaatatgatactctgccttctgatacagtcagcttgtctgattcagattctgacttatcactgccgggtggagctgaagtcgaggccctgtcccctatgggcctgccaggggaggaagattccgggccagacgaaccaccaagtcccccatccggcctcctgcctgccaccgtgcaaccatttcacctgcgtggtatgagctcaacatttagccaacggagcagggatatcttcgattgtttagaaggtgccgctcgacgtgcccctagtagtgtagctcacacttccatgtcagacaacgggggttttaagcgacccttagctcctagcggacgctctcccgttgaaggtctcgggagagcccataggagccctgctagccccagggtgccaccggtgcccgactacgttgcacaccccgagagatggacgaagtattcattggaggacgttaccgaagtgtcagagcaatccaaccaggcgacggccctggcatttctcggcagccagtcgttggcggctcccaccgactgtgtctcttccttcaaccaatag

SEQ ID NO: 245722 - DNA, 627 bp, synthetic construct
  misc_feature 1..627: note = Description of Artificial Sequence: Synthetic coding sequence
  source 1..627: mol_type = other DNA
atggccgaagccggaacggggctgttacccgcaacagtccaaccgtttcacctgcgtgggatgagcagtacttttagccagcgatcgagggacattttcgactgcctcgaaggcgcagccagacgggctcctagcagcgtcgctcacaccagcatgagcgacaacggcggttttaaaagaccccttgccccaagcggacgctcgcccgtagaaggactcgggagagcccacagaagcccagcgagtccacgagtgcctcctgtgccagactatgtagcccaccccgagagatggacaaagtatagtctcgaagacgtgactgaggtaagcgaacagtcaaatcaggctaccgcactggccttcctcgggtctcaatctctggcagctcccacagactgtgtgagcagctttaaccaggacccatcatcatgcggcgaaggtcgcgtgatctttacaaagcctgtgcggggtgtggaggccagacacgaaagaaagcgggtcttagggaaagttggcgaaccagggaggggaggtttgggtaaccccgctactgacagaggggaaggtccagtggagctggcacacttggctggccctggaagcccagaagccgaagaatggggatag

SEQ ID NO: 245723 - DNA, 990 bp, synthetic construct
  misc_feature 1..990: note = Description of Artificial Sequence: Synthetic coding sequence
  source 1..990: mol_type = other DNA
atggccgaagccggtactggggagccgtctccgtcagtcgaaggagaacacggaacagaatatgacacactccctagcgacacagtctccctgtcggatagcgactctgatctttccctgcccggtggagcagaggttgaggccttaagtccgatgggactcccaggggaggaggatagtggtccagacgagcccccaagtccaccctccggcttattgcccgctacagtgcaacctttccacttgagaggaatgagttcaaccttcagccagcggtcacgcgacatctttgactgcctggaaggcgcagctcggagggctccgagtagcgtcgctcatacctctatgtccgacaacggcggtttcaagaggcccctggccccttctgggagaagcccagtggaagggctgggacgcgcacatcgatcccctgcaagtccaagagtaccccctgtgcctgactacgtggcacacccagaacggtggacgaaatactcgctcgaggatgtcacagaagtatccgaacaaagtaaccaggccacggcccttgcctttctagggtcccagtctttggctgcacctaccgactgtgtgagcagcttcaaccaggacccttccagctgcggcgagggtcgggtaatcttcacgaaacccgtgcgtggagtcgaagcccgacacgagagaaaaagggtactgggcaaggtgggggagcctggacggggagggcttggcaatccagctacagacaggggcgaaggaccagttgagctggctcacctcgccggaccaggctctccagaagctgaggagtggggctcgcaccacggcggattacaggaggttgaggccctctctggcagcgtacattcgggctccgtccccggactgcctccggtggagactgtaggattccatgggtctcggaagcggagtcgggatcactttcgcaataagagcagctcaccagaagaccctggagccgaggtctag

SEQ ID NO: 245724 - DNA, 333 bp, synthetic construct
  misc_feature 1..333: note = Description of Artificial Sequence: Synthetic coding sequence
  source 1..333: mol_type = other DNA
atggccgaggccggtaccggggaaccaagtccctctgtagagggagagcacggcactgagtatgacactctacctagcgatacagttagcctctcggactccgactccgacctgtccctgcccggaggcgctgaggtggaagccctgagtccaatggggttgccaggcgaggaggatagtggtcccgatgagcctccctccccaccttctggactcctgcctgcaactgttcagccgtttcatctgaggggcatgtcttctacgttctcacaaaggagccgggatatcttcgactgtctggagggcgcagctcggcgtgccccatcaagctag

SEQ ID NO: 245725 - DNA, 576 bp, synthetic construct
  misc_feature 1..576: note = Description of Artificial Sequence: Synthetic coding sequence
  source 1..576: mol_type = other DNA
atggcggaagccggaactggtgaaccttcaccttctgtggaaggagagcatggcaccgaatatgatactctgccctctgataccgtgtccctgagcgacagtgactcagatctctccttgccaggaggagccgaagtggaggctctgtccccaatggggctgcccggagaggaagattccggccctgacgagccgcctagccctccgtcagggcttctgcctgcgaccgtacagccctttcatctgagagggatgagctccactttttcccaacgttcaagggacatcttcgactgccttgagggcgctgcacgtcgcgcaccatcgagcgttgcccacacgtccatgtctgataacggtggctttaagaggcctctggcaccctcagggcgtagccccgtggaagggctggggagggcccaccggagccctgccagccccagggtgcctcccgttcccgattatgtcgcacacccagaaaggtggactaagtacagtcttgaggatgttaccgaggtcagcgaacagagcaaccaggcaaccgccctggcttttcttgggtctcagtcactgtag

SEQ ID NO: 245726 - DNA, 639 bp, synthetic construct
  misc_feature 1..639: note = Description of Artificial Sequence: Synthetic coding sequence
  source 1..639: mol_type = other DNA
atgggaccaatgtggaggatgagaggaggagccactcggagagggtcttgttgcggaggcgatggggcagccgacggtcgcggacctggacggtcaggaagggccaggggcggaggtagccctagcggcggaggtgggggagtgggttggcggggtagggcagacggagccaggcagcagctagaagagcggttcgccgacctggctgccagccatctggaggctatccgcgctcgggatgaatgggataggcagaatgcaagactgcgacaggaaaatgccagactgcgcctcgagaatcgtaggttgaaacgcgagaatagatcactctttcgccaggcgctgcggcttcctggggaagggggaaatggcacccccgcagaggcacggagagtccccgaagaggcatcaaccaaccgtagagcgagagactcagggagggaggacgagccaggctcacctagagctctgcgagctcgactcgagaagctggaggcaatgtacagaagagcgctgcttcagctccatcttgagcagagaggacctcgcccttcaggcgacaaagaagagcagccactgcaggagcctgattcaggactcagaagcagagattctgaaccctcgggaccttggctttag

SEQ ID NO: 245727 - DNA, 1047 bp, synthetic construct
  misc_feature 1..1047: note = Description of Artificial Sequence: Synthetic coding sequence
  source 1..1047: mol_type = other DNA
atgggagctcgtggggcaccgtctaggcgcaggcaggcaggtcgcaggctccgatacttgcccaccggttcgttcccctttctgttgctgctgctcctcctctgtatccaattgggcggtggccaaaaaaagaaggaaaatctgctggcagagaaggttgagcaactcatggagtggtcttcgagacgatcaatctttagaatgaatggggataaattccggaaatttatcaaagcccctccccgaaattactcgatgattgttatgttcactgccctccagccacagaggcagtgctcagtctgtcgccaggccaatgaagagtatcaaatcctcgccaatagctggcggtatagctcggcattctgcaacaaacttttcttttctatggttgactacgacgagggcactgacgtttttcagcagctcaacatgaactccgcccctacttttatgcacttcccaccgaaaggcaggccaaagcgggcagacacttttgacctgcagcggatcggttttgccgcagagcagctagccaagtggatagccgaccggactgacgtccacataagggtttttcggccacccaactattctggcacaatcgccctggcccttttagtgtctcttgttgggggactactttatctgagacgcaacaacttggaatttatttataataaaaccggctgggctatggtgtctttatgcatcgtcttcgcgatgacgtccggccagatgtggaatcatatcagagggccaccctacgcacacaaaaatccacacaacggccaggtaagttacatccatggatcttcgcaagcccagtttgtagcagagagccacattatacttgtgcttaatgcagctataacaatgggtatggtgttgttaaatgaggcggcaacttctaaaggcgacgtcggaaagagacgaatcatttgcctggtcggcttgggactggtggtcttcttcttctcatttttgctgtccattttccggagcaaatatcatggatatccgtacagcgatctcgacttcgagtag

SEQ ID NO: 245728 - DNA, 1044 bp, synthetic construct
  misc_feature 1..1044: note = Description of Artificial Sequence: Synthetic coding sequence
  source 1..1044: mol_type = other DNA
atgggcgcacgtggcgctccctctagaagaaggcaggccggtcgccgactcagatacctgcccacaggttcattcccattcctgctgctgttgcttttattgtgcatccaactgggcggaggtcagaagaagaaagagaatttgctggccgaaaaggtagagcagctgatggaatggtcttcgcgtaggtccatctttagaatgaatggagacaaattccgcaaatttatcaaggctccccctcggaattactctatgatcgtcatgttcacggccttacagccacagaggcaatgttccgtgtgccgtcaagcaaacgaggaataccagatcttagccaactcctggcgatatagctctgcattctgtaacaaactgtttttttccatggttgattacgatgaaggcaccgacgtatttcagcaacttaatatgaattctgccccaacatttatgcatttcccacctaagggaaggccaaaaagggctgacacctttgaccttcagcggattggattcgccgcagagcagctagctaagtggattgccgacagaactgacgttcatatccgggtgttccgaccgcctaactatagtgggaccatagccctagccctcctcgtgagtcttgtgggcggtctgctgtaccttcggagaaacaatctcgagtttatctataacaaaaccggatgggctatggtgagtctctgcatagtttttgctatgacctcaggacagatgtggaatcacattcggggtccaccttacgcccacaagaatcctcataacgggcaagttagctacattcatgggagctcacaagcccagtttgtcgcagagtcccacataatactggtcctgaatgccgcaattactatgggcatggttttgctgaacgaggcggcaactagtaagggagacgtcggcaagaggaggattatatgtcttgtgggtttgggcctggtggtcttttttttcagtttcttattaagcatcttccgctccaaatatcatggctatccctacagttttctcattaaatag

SEQ ID NO: 245729 - DNA, 1047 bp, synthetic construct
  misc_feature 1..1047: note = Description of Artificial Sequence: Synthetic coding sequence
  source 1..1047: mol_type = other DNA
atgggggcacggggagccccttcccgaaggagacaggccggacgtagactgagatatctaccaacaggcagctttccctttctcctgcttcttctgcttttatgtatccagttgggcggaggccagaaaaagaaggaaaacctactggccgagaaggtagaacagctgatggaatggagctctcgcagatcaatcttccggatgaatggggacaaattccgtaagtttattaaagccccaccccgtaactatagcatgatcgtgatgtttaccgcactgcagccccagcgacaatgcagcgtctgtagacaagccaacgaagagtaccagattcttgccaactcttggagatactcctcagcattctgcaataaactgttcttctccatggtggattatgatgagggtaccgatgtcttccagcagttaaacatgaattccgccccaaccttcatgcatttccctcccaaaggtcggcctaagcgtgccgacacattcgacctccagagaattggcttcgcagcagaacagttagcgaaatggattgctgacagaaccgatgtgcatatcagagttttccgtccgcctaattattctggcacaatcgctctggcgctcctcgtcagcctggtgggtggcctgctctacctgcgcaggaacaacttggaattcatatacaataaaaccggatgggcaatggtctccttgtgtatcgtcttcgcgatgacttcaggtcagatgtggaaccacatacggggaccaccgtacgcacataagaatccccacaacggtcaggtctcatacatccacgggtccagccaggctcagtttgtggccgaatctcatattatcctagtcttgaatgccgcaatcacgatgggtatggtgctcctcaacgaggccgctacatccaaaggagacgttggcaagaggcgcattatttgtctcgtgggccttggactcgtggtgtttttcttctcttttttgctcagcatttttcggagcaagtatcacggctatccctactcagatctggacttcgaatag

SEQ ID NO: 245730 - DNA, 1047 bp, synthetic construct
  misc_feature 1..1047: note = Description of Artificial Sequence: Synthetic coding sequence
  source 1..1047: mol_type = other DNA
atgggcgcacgcggtgctccttccaggcgccgacaggcagggagaagattgcggtatctccccacaggctcttttccattccttctcctcctgttactactgtgcattcagctggggggtggccagaaaaagaaagagaatctgctggctgagaaggtcgaacagctgatggaatggagtagcaggaggtccatcttcagaatgaatggggataaatttcggaagtttatcaaagctcctccgagaaactacagcatgatcgtcatgtttacagcccttcagccccagcggcaatgctcagtttgccgacaagcaaacgaagaatatcagattttggcaaatagttggaggtacagctctgctttctgtaataagttatttttctccatggttgactacgatgaggggaccgatgtgtttcagcagctgaatatgaatagcgccccaacattcatgcattttcccccaaaaggtagacccaagcgggcagatacttttgacctccagcgcatcgggttcgcagctgaacagcttgcaaaatggatcgcagatcgaactgatgtccatattagggtctttcgccctcccaattactcgggcaccatcgccctggcgttattggttagccttgtgggcggactgctgtacctgaggcgaaacaacttagaattcatctacaataaaacagggtgggcaatggtttctttgtgcatcgtgttcgcaatgactagcggccagatgtggaatcacatccgcggtccgccatatgcacataaaaatccacacaacggccaggtgtcttatattcacggttcctcacaagcgcaattcgtagcggagagccacatcattttggtgcttaacgctgccattacaatgggcatggtcctgctgaacgaggccgctaccagtaaaggggacgttggcaaacgacggattatctgcttggtgggcctgggcctcgttgtgttctttttcagctttttactgagcattttccggagcaagtatcacggttatccctattcagacctggattttgaatag

SEQ ID NO: 245731 - DNA, 534 bp, synthetic construct
  misc_feature 1..534: note = Description of Artificial Sequence: Synthetic coding sequence
  source 1..534: mol_type = other DNA
atggcccatccagttcagtccgagttcccatcggcacaggagcctgggagcgccgcattcttagatctcccagaaatggagattctgctgacaaaggccgagaataaagacgataagacactgaatctgtctaagacactgtccggccctttagacctggagcagaactcgcaggggctccctttcaaagctatttctgagggtcatctcgaggcaccactgcctcgaagccctagcagggcctcgtccaggcgagctagttctattgccaccacgtcctatgctcaggatcaggaggccccacgtgactatctcatcctggccgtggtggcctgcttctgcccggtgtggcccctcaatttaattcctctgattattagtattatgagccggagctcaatgcaacaggggaacgtggatggcgctcgcaggctggggcgtttagccagactgctgtccattacattgatcattatgggtatcgttataatcatggtggccgtgaccgtgaatttcacggtgcagaagaagtag

SEQ ID NO: 245732 - DNA, 1173 bp, synthetic construct
  misc_feature 1..1173: note = Description of Artificial Sequence: Synthetic coding sequence
  source 1..1173: mol_type = other DNA
atggccgtgtccgaatctcagctgaagaagatggtgtccaaatataaatacagagaccttactgtgagagagacagtgaacgtgataacgctctacaaagacctgaagcccgtcctggatagttacgtgttcaatgacggatctagtagagaactaatgaaccttaccggtaccatacccgtgccatatcggggaaacacttacaatattcccatctgcttatggctactggatacatacccatataaccccccaatctgttttgtcaagcctacctctagcatgacaatcaagactggtaagcatgtggacgctaacggtaagatatacttaccttacctacacgagtggaaacacccgcagtcggacctacttggccttatacaggtcatgatcgtggtgtttggagatgagcctcctgtgttttctcgaccaatctcggctagctatcccccatatcaagctacggggccacccaacacctcctacatgccgggaatgccaggtggcattagcccatatccatctgggtaccctcccaatccttctggctacccgggatgtccatacccgcctggcggaccatacccagcaacaactagctcccaatatccgtcacaaccacccgtgacaaccgttggaccttcacgcgatggaacgatctcggaggacacgattcgcgcaagcctgatctccgccgtgtccgataagttaagatggcggatgaaagaggagatggaccgggcacaggctgaattgaatgcgcttaaaagaacggaggaggatctcaagaaagggcatcagaagctggaagagatggtaacacgcttagatcaggaggttgccgaagtagataagaatattgaactgttgaagaaaaaggacgaagagcttagctccgcccttgaaaaaatggagaatcagtctgaaaataacgacattgacgaagtcatcattccgactgcccctttatacaagcaaattctcaacctgtacgctgaggaaaatgcaatcgaagatactatcttttacctgggagaggccctgcggcgaggcgtcatcgacctcgatgtgttcctgaagcatgtgaggcttctctctcgtaagcagttccaattgcgagcattaatgcaaaaggccaggaaaacagccggacttagcgacctatactag

SEQ ID NO: 245733 - DNA, 858 bp, synthetic construct
  misc_feature 1..858: note = Description of Artificial Sequence: Synthetic coding sequence
  source 1..858: mol_type = other DNA
atggccgtgtcagagagtcagctcaagaaaatggtgtcgaagccccaaagcgaccttctcggcctaatccaagtgatgatcgtggtttttggagacgagccgccagttttctcacgacctatctcagcaagctaccccccatatcaggctaccggtcctcccaatacgagttatatgcctggcatgcctggtgggatctccccttacccttccggatacccacccaatcccagcggttacccaggatgtccttacccgccaggaggcccatatcctgcgaccacatcttcacagtatcccagtcagccaccagttacaacagtgggaccaagcagagatggaactattagcgaggacactattagggcctcgctcatctccgctgttagcgataaactcagatggcggatgaaggaggagatggatagggcacaggccgaactcaacgccttgaagagaacagaggaagacttgaagaagggccaccaaaaactcgaggagatggtgactaggctagatcaggaagttgccgaagtagacaagaatattgagctgttaaaaaaaaaggatgaggagctgagctccgcccttgagaagatggaaaaccagagtgaaaataatgatatagacgaggtaattatccctactgccccattatataagcagatcctcaacctgtatgctgaagaaaacgccattgaggatacaatcttctacctgggggaagccctgagacgtggcgttatagaccttgacgtttttttgaagcacgtgcgtctgctgtctcgaaagcagtttcagctgagagctctgatgcaaaaagcacgaaagactgcaggactctccgacctttattag

SEQ ID NO: 245734 - DNA, 972 bp, synthetic construct
  misc_feature 1..972: note = Description of Artificial Sequence: Synthetic coding sequence
  source 1..972: mol_type = other DNA
atggctcggggacctggcctggccccacccccactcagactgccactgttgctcctcgtcctcgccgctgtgactggccacactgccgctcaagacaactgcacttgccccacaaacaagatgacagtgtgttctccggacggaccaggcggtcggtgccagtgtagggcactcggtagcggaatggccgtggactgttctacactcacctccaagtgtttactcttgaaagcccgtatgtcagccccaaaaaacgctcgcaccttggtcaggcccagcgaacacgcgttagtcgacaacgacggactgtatgatccagactgcgatcccgagggcagattcaaagccaggcagtgcaatcagacatctgtgtgttggtgcgttaactccgtgggtgtgagaagaactgacaaaggcgatctgtctctgaggtgtgacgagctggttcgaactcatcacatcctgatcgacttaaggcacagacccaccgccggagcctttaatcatagtgatctggacgctgaactgaggcgcctgttcagagagcgttatcggctgcacccaaaatttgtggctgccgttcactacgagcagccgaccatccagattgaattgaggcagaatacatcccaaaaagcagcaggagacgtcgacatcggggatgcggcatattacttcgagcgcgacatcaagggggaaagtctgtttcagggtcgaggcggactggatctgagagtgagaggagagcccctgcaggtcgagaggacccttatctactacctagatgagattccacccaagtttagcatgaaaaggcttacggccggacttatcgctgtcatagtcgtcgtggtggtcgccctcgtggcaggaatggccgtcttggtgattacaaatcgacggaaatcgggaaagtacaaaaaagtggaaattaaggagctgggagagctgagaaaggagcccagcttatag

SEQ ID NO: 245735 - DNA, 1353 bp, synthetic construct
  misc_feature 1..1353: note = Description of Artificial Sequence: Synthetic coding sequence
  source 1..1353: mol_type = other DNA
atgggagccccacctgggtacaggccctcagcctgggtgcacctccttcaccaactgcctagagccgattttcaactcaggccagttccatctgtctttgcaccccaggaacaggaataccagcaggcactcctccttgttgccgctttggcaggactgggcctgggtcttagcctgatcttcatagctgtctacctgatccggttttgttgttgcaggccacccgagccccctggaagtaaaatccccagccccggaggcggatgtgtcacatggtcatgtatcgtcgccttacttgccggttgcacaggtattggtattggattctacggaaattccgaaacaagcgacggcgtgtctcagttgtccagtgccctcttgcacgctaatcatactctttccacgattgaccacctggttcttgaaacagtggagcgcttgggagaggcggtacggaccgagctcaccactttggaagaagtgttagaacctagaacagagcttgtggcggcagccagaggagctaggagacaagcagaagccgctgcccagcagttacagggtctggccttttggcagggcgtgccactgtctccgcttcaggtggccgaaaatgtgtcttttgtggaggagtaccggtggctggcttatgtgctccttctgctgcttgaactcttggtgtgtttgttcactttactgggactggctaaacagtcaaagtggctggtgatcgttatgactgtcatgagcctgctcgtcctggtgttgtcgtggggatctatgggcctcgaagcagccacagccgtagggctgtctgacttctgctcaaaccctgacccatacgtgttaaatctaacacaggaggaaacgggactgtcctccgatatcctctcatattacctgttatgcaaccgggcagtgtccaatccatttcagcagagactgacactgtctcagagagccctggcaaacatccacagccagctcctcggcctggagcgtgaggctgtcccccagtttccttcggcacaaaagcctctgctatctctggaggaaactctaaacgtgacagaggggaactttcatcagctggtagccctgctgcattgtcgctctttgcacaaggactacggagccgctctgcgaggtctctgcgaagatgctctcgagggcttgttgtttctgctgttattttccctcctgtccgcaggggcattagccaccgccctgtgttcgttgccgcgagcctgggcactgtttcctccgtccgatgattacgatgatacggatgatgacgaccctttcaacccccaggaaagcaagcgattcgtccagtggcagtcttctatttag

SEQ ID NO: 245736 - DNA, 1383 bp, synthetic construct
  misc_feature 1..1383: note = Description of Artificial Sequence: Synthetic coding sequence
  source 1..1383: mol_type = other DNA
atgggtgcaccacccggatacaggccgtctgcatgggtccaccttctgcatcagctcccccgtgccgacttccagttaaggcctgtcccttctgtgttcgccccacaggagcaagaataccagcaggctttgctcctggtagccgcattggcaggccttggtcttggacttagcctaatttttatagctgtgtatcttattcggttctgttgttgtcgcccaccagaacctcccggatcaaagatcccaagtcccggagggggttgtgtgacttggtcctgtattgtggcccttctcgcaggatgcactgggattggtatcggattttatggtaattccgagaccagtgacggtgtcagccaactctctagcgccctgctgcatgccaatcatacactttccacaatagatcacctggtgttagagaccgttgaacggttaggcgaggctgtcaggaccgagctgacgactctggaggaggtgttggaaccacgtacagaactggtagctgccgcacgtggtgcgaggagacaagcagaggcggcagctcagcagttacaagggctcgctttttggcagggcgtgccgctgtctcctctgcaggtggctgaaaatgtcagctttgtggaggagtacagatggctcgcctacgtcctgttactgctgctggagctgttagtctgcctttttacgttgctaggactggccaaacagtctaagtggctcgtgattgtcatgaccgttatgtccctgctggtactggtgctttcatggggtagcatgggactggaggccgcaactgcagtcggactgtctgatttctgtagcaacccagatccctatgtgctgaacttaacccaggaagaaaccggactgtcaagtgacatcctgagctattatctcctgtgcaatcgcgctgtgtctaacccattccaacaaaggttgacgctgagtcagcgcgctctcgcaaacattcattcccagttactgggcctggagagagaggcagtgcctcagttcccatcagcgcaaaaacctttgctgtccctggaggaaaccctaaatgtcacagagggcaattttcaccagctcgtcgccctcctccactgccggtcactccataaagattacggggcagcgctgcgcggtctctgcgaggacgccctggagggactgttgttccttctcctgttcagtctactgtcagccggagctctcgccacagccctgtgttctctccctcgagcgtgggccctattccccccacgcaatcccagtgctctgtgctctgggagccggttaagcgagccgctgctgcccgctgggctggagccgggaagtccactgaggtccttccctggatgccggcgacgtccacactag

SEQ ID NO: 245737 - DNA, 1362 bp, synthetic construct
  misc_feature 1..1362: note = Description of Artificial Sequence: Synthetic coding sequence
  source 1..1362: mol_type = other DNA
atgggagcaccacctggttacaggccatctgcctgggttcatctgctccaccagctgccgagagccgatttccaattgagacctgtgccttcggtgttcgctccacaggagcaagaatatcaacaggaccagagttcactggctgttacccagagaccccctcccaccactccactacaccggcttcggcctcgcccaaggctcacccctgctcttgcgagacgacccccagaggccgcaaggggtgacccaagaccccagagtccccctgaagctctcctgctggtagctgcgctggctggcctcggtctgggcctgagtctaatcttcattgccgtgtacctcattaggttctgctgctgtcgacctccggaacctcctggctcaaagattcccagtcccggaggagggtgtgttacctggtcgtgtatagtcgcattactggctggctgcactggcatagggatcggcttttatggtaactcagagacgtcagatggcgtctcacaactcagcagcgcattactccatgcgaaccataccttgtcgaccatcgaccacttggtcctggagaccgtcgagcggctgggagaagccgtccgtactgagctcacgacacttgaggaggtcctcgagcccaggacagaactcgtggccgcagccagaggggcaaggcgacaggcggaggctgcggcacagcagttgcagggcttggcattctggcagggagtgcctttgagccccctgcaggttgcggaaaacgtctctttcgtggaggaatacagatggctggcctacgtgctgctgttgctgttagaactgctggtttgtttatttacgttgttaggattggcgaagcagagcaagtggcttgtgatcgtgatgaccgttatgtccttactggttctcgtgctgagctggggcagtatgggcctggaggctgccaccgccgtgggcttaagcgatttctgcagtaatccggatccctacgtgctgaatcttacccaggaagaaaccggacttagctccgaagccgactccgtgccagcctcatccggccaacatcccctgccggctgccggtccgggagcgaggagctgtgcatccgtcccgttttctgccgaggcgtcagcagtgctgggaggcgacagtgagtgcgaccgcagaaaatttccgccagtaggcggtactgcaaccttacctcagcccgctcaagggttgtggtgttctcctgccggacctgtgcgcaggcgtccagggagacccgctcttcctgccaccctgctgccagccgtgtgtcggtccgcaggacattgtcccctgcagcccgcacctagcctaggcccactacctacgcagtag

SEQ ID NO: 245738 - DNA, 1356 bp, synthetic construct
  misc_feature 1..1356: note = Description of Artificial Sequence: Synthetic coding sequence
  source 1..1356: mol_type = other DNA
atgggggctcccccagggtatcgcccttcagcctgggtacacctgttgcaccaactcccacgagcagactttcagctgcgcccagtccctagcgtatttgccccacaggaacaggagtaccagcaagccctgctgcttgtcgctgcactcgccggactcgggctcgggctaagcctgattttcattgcagtgtacctgatccgtttttgttgttgtagaccacccgagcctccaggatccaagatcccctctccaggaggaggctgcgtgacttggtcatgtattgtggcacttttagccggttgtactggtataggtatcggtttctatggtaactccgagaccagcgacggagtgtctcagctaagctctgctttgctccatgcaaatcatacactcagcaccatcgatcaccttgtgttagagactgtggagagattgggtgaagctgtgagaactgaactgacaacactggaggaggtcctggaaccaaggactgagctggtggccgctgcaaggggggctcggagacaggctgaggccgcagctcagcagttacaaggactggccttctggcagggcgtgccactgagccctctccaggtcgccgaaaacgtgagcttcgtcgaggaatacaggtggctggcatacgtgctgctgcttctgctcgagctgctggtctgtctctttactctgttgggcctggccaaacagagcaaatggcttgtgatcgtgatgaccgttatgagcctgttagtgctggtgttgtcatgggggagcatgggactcgaggccgctaccgccgtcggactctccgatttctgctctaatcctgatccttacgtgctgaatctcacccaagaggagacaggcctgagttcagacatcctgtcttattacctcctgtgcaatcgagccgtgagcaatccatttcagcagagactgaccttaagccagagagctctggctaatattcactcgcagttactggggcttgaaagagaggctgtgcctcagtttccgtcagctcaaaagcccctcctatctctggaggaaaccctgaatgtgactgagggcaattttcatcagctggtggcattactgcattgtcgaagcctccacaaggactacggggcagccctgcggggactctgcgaggatgcgctcgagggcctgttgtttctcctactgttttctctgctgagtgctggcgctctggccacagcactctgctctttacccagagcctgggccctgtttcctccatcagatgattatgatgacacagatgacgatgatcccttcaacccgcagcaggaatctaagagatttgtccagtggcagtctagcatctag

SEQ ID NO: 245739 - DNA, 1155 bp, synthetic construct
  misc_feature 1..1155: note = Description of Artificial Sequence: Synthetic coding sequence
  source 1..1155: mol_type = other DNA
atgactaggcgtgggagacgcagatccagtcatttcctcgggcctcctgctggggctgcgggatgcacacagagaagaagtcgggaactggccgctgccgcaatgtcccaccagaccggcattcaagcctctgaggacgtgaaggagatcttcgctagagccagaaatggcaagtataggctgctgaaaatctcaattgagaatgaacaactcgttatcggatcttattctcaacctagtgatagctgggataaagattacgatagctttgtgctgccgctcctcgaggacaagcagccgtgttacattctgtttaggctggacagccagaatgctcagggttatgagtggatttttatagcctggtcccctgatcattctcacgtgagacagaagatgttatacgcagctacgagggcaactcttaagaaggaatttggaggtgggcacattaaagatgaagtatttggaactgtaaaggaggatgtgagcctacatgggtacaagaagtacctactcagccagagcagtcccgctcctctcaccgcggcagaggaagagctgaggcagatcaagattaacgaggtacagactgacgtaggggtggacactaagcatcagacactgcagggagtggctttcccaatatctagagaggccttccaggcgctcgagaaacttaacaatcgccaactgaattacgtgcagctcgagatcgatataaagaacgagattatcatactggccaatacaacaaacacagagctgaaagacctgcccaagcgaattcccaaggactccgcaagataccactttttcctatataaacactcccacgagggagactatctcgagtctattgtctttatttatagtatgcctgggtacacttgctctatccgggagcgaatgttatacagcagctgcaaatccaggttactggagatagtcgagaggcagcttcagatggatgttattcgtaaaattgagatcgacaatggggatgaactgaccgccgactttctgtatgaggaggtgcaccccaagcagcacgcccataaacaaagcttcgcgaaaccaaagggcccagctggcaagcgcggtatcagaagattaatccggggtcctgcggagactgaggccactacagattag

SEQ ID NO: 245740 - DNA, 1053 bp, synthetic construct
  misc_feature 1..1053: note = Description of Artificial Sequence: Synthetic coding sequence
  source 1..1053: mol_type = other DNA
atgagtcaccagactgggattcaggctagtgaggatgtgaaagagattttcgcacgtgctaggaacggaaagtaccgattgctgaagatttcaatcgagaatgaacagctcgtgatcgggagttatagccagccttctgactcgtgggataaagactatgacagttttgttctccctctcctggaggacaagcaaccttgttacatactgtttagattggacagtcagaacgcccagggatatgagtggatcttcattgcttggtcccctgatcactcacatgttagacaaaagatgctgtatgcagcgaccagggccacactcaagaaagaatttggaggaggccacatcaaagacgaggtttttggtacagtcaaagaggacgtgtctctacatggctataaaaaatatttgctctcacagtccagtcctgctcccctgacagctgctgaagaggaattacggcagatcaagattaatgaggtccagactgacgtgggggttgacaccaagcatcagacccttcaaggcgtcgcatttccaatttctagagaggcctttcaagccctggagaagcttaacaacagacagctaaactatgtccagctagaaatcgatattaaaaacgaaatcattatccttgcaaacactactaacaccgagctcaaggacctccctaaaaggattccaaaggattctgctcgctaccacttctttctatacaaacacagtcacgagggggactatctggagagcatcgtgtttatttacagcatgcccggatacacctgttctatacgggagagaatgctgtactcatcctgcaaatcccggctgctggagattgtagaaagacagttacagatggatgtcatccgtaagatagaaatagacaacggggacgaacttactgccgacttcctatatgaagaggtccacccaaagcagcacgcgcataaacagtccttcgccaaacctaaggggccagccggaaaacgcggaatccgcaggcttatccgcggtcccgctgagactgaagcgaccactgactag

SEQ ID NO: 245741 - DNA, 1074 bp, synthetic construct
  misc_feature 1..1074: note = Description of Artificial Sequence: Synthetic coding sequence
  source 1..1074: mol_type = other DNA
atgtcacaccaaaccgggattcaggcatctgaggacgtcaaggaaatcttcgctagggcccgaaacgggaagtatagactgctgaaaattagcattgagaacgaacagcttgtgattgggagttactcacagccatccgacagctgggataaagactacgacagctttgtattacctttattagaagacaagcagccttgttatatcctgttccgcctggattcgcaaaacgcacagggttacgaatggattttcattgcctggtccccagatcattcacatgtccggcagaagatgctctacgctgctacaagagccacactaaagaaagagtttgggggaggccatattaaggatgaggtgtttggcacggtgaaagaagacgtctctcttcacggttacaaaaagtatctcctatcacagagtagtccagctcctttgacagctgccgaagaagaactcaggcagatcaagatcaacgagtctccagaggaccacataggtgtccagaccgatgtgggcgtggacacaaagcatcaaacgttgcagggggtggcattccctatttccagggaggcatttcaggctctcgaaaaactgaataaccgccaactgaactatgtgcagctggagatcgacattaagaatgaaatcatcatcctcgccaacacgactaatactgagctcaaggatcttcccaaacgcatacccaaagactccgcgaggtatcactttttcctctataagcacagccatgagggcgactacctggagagtatcgtgttcatttattcaatgccaggatacacctgctccattcgagaaagaatgctttacagttcttgtaagagccgattgttggagatcgtggaacgtcagctgcagatggacgtgatccggaaaatcgaaatagataatggggacgagttgaccgcagacttcttgtacgaggaagtgcatccaaagcaacacgctcacaagcaatcttttgctaaaccaaagggcccagccggaaagcgagggatcaggcggctgatccgcggtcctgccgagacagaggcaaccacagactag

SEQ ID NO: 245742 - DNA, 1050 bp, synthetic construct
  misc_feature 1..1050: note = Description of Artificial Sequence: Synthetic coding sequence
  source 1..1050: mol_type = other DNA
atggctcaccagacaggtatccacgcaacagaggaactgaaagaattttttgcaaaggcccgagctggtagcgtccgacttatcaaagtggtcattgaggacgaacaactggtgctcggagcttcccaggagccagtgggcagatgggaccaggattacgatagagctgtcctgccgcttctggatgcacagcaaccttgttacctcctctaccgcctggattctcagaatgcccagggatttgagtggttattcctggcctggagtcccgataattcacctgtacggttgaagatgctatacgctgccacgcgagcaaccgtgaaaaaagaattcggaggtggtcacatcaaagacgagctgttcgggacggtcaaggatgacctctctttcgccggttatcagaagcacctttcctcatgcgcggctcctgcaccactgacatcagccgaaagggaactgcaacagatacggatcaacgaggtcaaaactgaaatatccgtggaaagtaaacatcagactctccaggggcttgcctttccacttcagcccgaagctcagcgggctctccagcagctcaaacaaaaaatggtcaactacattcagatgaaactagacctggaacgtgaaactattgagctggtccacaccgaacctacagacgttgctcaactgccttcccgggtgccacgcgatgccgctaggtatcacttctttctctataagcatacacacgaaggagaccctttggagtccgtggtattcatctactccatgcctggttacaaatgtagcattaaagagcgtatgctgtatagctcctgcaagagtcgccttttggacagcgttgaacaggactttcacctcgagatagctaagaagattgagatcggggacggcgcagaactgaccgctgagtttctgtacgatgaggtccatccaaaacagcatgcatttaaacaggcttttgcgaaacctaaggggcctggcggtaagcggggtcacaaacgtctgattagagggcctggcgaaaatggggatgattcatag

SEQ ID NO: 245743 - DNA, 483 bp, synthetic construct
  misc_feature 1..483: note = Description of Artificial Sequence: Synthetic coding sequence
  source 1..483: mol_type = other DNA
atggaagagggttcgagctctcctgtttccccagtagattctttgggaacgtctgaagaggaattggagcgacagccaaagcgattcggacggaagcggaggtacagcaagaagagcagcgaagacggaagccctacaccagggaagcgagggaagaaaggtagtccctccgctcaatccttcgaggaactgcagagccagcggattctggccaacgtccgagagcggcagagaacacagtctttgaacgaggccttcgcagctctccgcaaaataattcccacattgccgtctgacaaactgtccaagatccagaccctcaagttggccgctcgctacatcgattttttataccaggtcttgcagagcgatgagatggataataagatgacttcatgcagttacgtggcccacgaacggctatcctatgcctttagtgtgtggaggatggaaggcgcatggtccatgtccgcgtcgcactag

SEQ ID NO: 245744 - DNA, 1476 bp, synthetic construct
  misc_feature 1..1476: note = Description of Artificial Sequence: Synthetic coding sequence
  source 1..1476: mol_type = other DNA
atgaaccccgcagcagaagcagagttcaacatactgttagctactgacagctacaaggtgacgcattataaacaataccctcccaacacatcgaaggtgtacagctatttcgagtgcagagagaagaaaactgagaattctaaactgcggaaagtgaaatacgaagagactgtcttttatggactgcagtatattctgaacaaatacctcaaagggaaagtagtaactaaggagaaaatccaggaggctaaggatgtctacaaggaacacttccaagacgatgtgtttaacgaaaaggggtggaattatatacttgaaaagtatgacggtcacctgcccatcgagataaaagcagtgcccgaaggcttcgtgatccccagagggaacgtcctttttacggtggaaaatacagaccctgaatgttattggctgactaactggatcgaaacaatacttgtccagagctggtatcccattacagtggccaccaactcacgagagcagaagaagattttggctaagtacctcctcgagaccagtggaaacctcgacggtctggagtacaagcttcatgattttggctatcggggagtatcgagccaggagacagctggcatcggagcctctgcccaccttgtgaacttcaaagggacggacaccgtcgcaggtctggcactaattaagaagtactatggaacaaaagatcccgttccaggctactcagtgcctgctgctgagcacagtacaattacagcctggggaaaggatcacgaaaaggacgcattcgagcacattgtgacccaatttagctctgtgccggtaagtgttgtgtcagacagctacgacatctacaacgcctgcgagaaaatttggggagaggacttgcgccaccttattgtgtcccggtctactcaggctccactcataatccgccctgacagtggtaaccctctggacactgtgctgaaagtcttagaaatccttggaaagaagttccccgttaccgagaatagtaagggttataaactcctccctccttacctcagagtgatacaaggcgacggggttgacataaataccctccaggaaatcgtcgagggtatgaaacaaaaaatgtggagcatagaaaatatcgctttcggttccgggggaggtctgctgcagaagctcacgcgtgatctgttgaattgctcttttaagtgtagctatgtggttacaaacgggttgggaattaatgtgtttaaagatcctgtcgcagaccccaacaagaggtctaagaagggcagactgagcctgcatcgcacaccagcaggcaactttgttacactggaggagggcaagggtgacttggaggagtacggccaggatctgctccatacagtatttaagaatggtaaagtgacaaagagctattcctttgatgagatccgaaaaaacgcccagttaaacatcgagttagaggccgcacaccactag

SEQ ID NO: 245745 - DNA, 672 bp, synthetic construct
  misc_feature 1..672: note = Description of Artificial Sequence: Synthetic coding sequence
  source 1..672: mol_type = other DNA
atgaagctccactacgtggcggtgctgactctggccatcctgatgtttctgacttggctaccagagtctttgagctgtaacaaggccctgtgtgcttccgacgtgtctaagtgtttgatccaggagctgtgccagtgccggccaggggaagggaattgctcctgctgtaaagaatgcatgctctgtctaggtgcactgtgggatgagtgctgcgattgcgttggcatgtgcaatcctcgcaactactctgacactcctcctacgtccaagagtaccgtggaggaattgcacgaacctattccaagcctgttccgcgcacttaccgaaggggacactcagctgaactggaatattgtgagttttccggtggctgaggagctcagccaccacgaaaacttggtgagcttcctcgagactgttaatcagccgcatcatcagaacgtgtctgttccatccaacaatgtgcatgcgccttattccagcgataaggagcacatgtgcacggtagtgtatttcgatgactgcatgtctattcaccagtgtaagatcagctgcgagtctatgggcgctagcaaatatcggtggttccacaatgcttgttgcgaatgtatcgggccagagtgtatcgactacggttcaaagaccgttaagtgtatgaactgcatgttctag

SEQ ID NO: 245746 - DNA, 2451 bp, synthetic construct
  misc_feature 1..2451: note = Description of Artificial Sequence: Synthetic coding sequence
  source 1..2451: mol_type = other DNA
atggcggtgagtctggacgatgacgtgcccttgattctcactctcgacgagggtggctcagccccattggcccctagcaacggtcttggccaagaggagttgcctagcaagaacgggggaagctacgccattcatgatagccaagcacccagtctgtccagcggaggcgagtccagtccctctagtccagcccacaactgggagatgaattatcaggaggcggcaatatatctgcaggaaggcgagaacaacgataaatttttcacgcatcctaaagacgctaaagccttagctgcctacctcttcgctcacaaccacctgttctatctcatggagttagcgactgccctgctcctgctgctgctaagcctttgcgaagctcctgcagtgccggctctgcgactgggaatctacgtacatgccacccttgagctttttgcacttatggtggttgtgtttgagctgtgtatgaagctgcgctggctggggcttcataccttcatccggcataagcgtacaatggtgaagacaagcgttttagtggtgcagttcgtggaagctattgtcgttctggttcgtcagatgagtcacgtccgcgttacgcgcgctctgagatgtatattcctcgtggactgccggtattgcggcggagtgcggaggaatcttagacagattttccagagcttgcctcccttcatggacattctcctgctactgttgttctttatgatcatttttgctatcctcggtttttacctgttttcccccaacccgtctgatccatacttttcaaccctggaaaatagcattgtttctctctttgtcctcctcacgaccgctaattttcccgacgtaatgatgccctcctacagccggaacccttggtcttgcgttttcttcatagtttatctgtccatagagctgtactttattatgaacctcctcctggctgtggttttcgacacatttaacgatatcgagaagaggaaattcaagtcactactgctgcacaaaagaactgccatacagcacgcttataggctactgattagtcaacgccgacccgcaggcattagctaccgccagtttgaaggcttgatgcggttttataaacctaggatgagcgccagggagcgctatctcaccttcaaagcccttaatcagaacaatactccactcttaagcctcaaagacttttatgacatctacgaggtggccgctctgaaatggaaagccaagaaaaatcgcgagcactggttcgacgaactccccaggactgccctcctcattttcaaaggaatcaacatcctcgtcaaaagtaaggccttccagtacttcatgtatcttgttgtggcggtgaatggcgtatggatcctcgtggaaaccttcatgctgaagggcggaaactttttctctaagcacgtcccctggagctacctggtctttctgactatttacggagtcgaactctttctcaaagtggctggacttggacctgttgagtacctctccagcggctggaatctgtttgacttcagcgtaacagtgtttgctttcctgggtctgctcgcccttgctcttaatatggagcctttttatttcattgtcgtactccggccactgcagcttctgagactgtttaaactgaaagagcggtacaggaatgtcctggatactatgttcgaactgctgcccagaatggcctctctagggctcacccttctgattttttattactcgttcgcaatcgtcgggatggagttcttttgtgggatcgtttttcccaattgctgtaacacgtcaacggtggccgacgcatatcggtggaggaatcacaccgttgggaatcgcactgtggttgaagagggatattactatctgaacaacttcgacaacatcctcaactcatttgttacccttttcgagctgacagtggtgaacaactggtacataatcatggagggtgtcacctcacagacttcccattggtctcgactttatttcatgaccttttatatcgtcaccatggtggttatgactatcatcgtggcctttatcctcgaggcattcgtgtttagaatgaattactcacgaaagaaccaagactctgaggtggacggaggaattaccctagagaaagagatcagcaaggaggagctggtggccgtcctagagctttatcgggaagcgcgaggggcaagttccgatgtcacccgcctgctggaaacccttagtcaaatggagcggtaccaacagcacagcatggtttttctcggccgacggtccagaacaaagtcagatctgtcactcaaaatgtatcaggaggagatccaggagtggtacgaggaacacgctcgcgagcaggagcaacagcgtcagctctcttcatcagctgcaccagcggctcagcagccacccggatctagacaaaggagccagactgtgacatag

SEQ ID NO: 245747 - DNA, 2247 bp, synthetic construct
  misc_feature 1..2247: note = Description of Artificial Sequence: Synthetic coding sequence
  source 1..2247: mol_type = other DNA
atgaattaccaggaagccgcaatataccttcaggaaggcgagaataatgataaattttttactcatcccaaggacgcaaaggcgctggcagcatacctgtttgcgcataaccatttgttttatctgatggaattagccacagcactgcttttattactcctttccctgtgcgaggccccagccgtcccagcactgcgactgggtatttacgtccatgctaccctggagttgttcgcgctaatggtggttgtttttgaactgtgtatgaagttacgctggctggggctccacacattcattaggcacaagagaacaatggtcaagacaagtgtcctggtggtgcagtttgtcgaagcaatagtggttcttgtgcgacagatgtctcatgttcgtgtcacaagagccctgagatgcattttcctcgtcgattgtaggtactgtgggggagtgcgtcgaaacctgcgacaaatcttccagtccttacctcccttcatggacatattgctcctcctgctcttctttatgatcatatttgccatcctcggattctatcttttctccccgaatccttcggacccctacttcagcacgctcgagaactcaatcgtgtccctgtttgtgctactgacgacagccaatttcccagacgtgatgatgccatcctacagccgaaacccctggagctgtgttttttttatagtctatctcagtattgagctgtacttcataatgaacctactgctagccgtcgtctttgataccttcaatgatatcgaaaagaggaagtttaaatccttgctgttgcacaagcgtaccgcaattcagcacgcttatagattactgatttcccaaagacggcctgcagggattagctatcgccagtttgaaggcctgatgcggttctacaaaccgagaatgagcgccagggaacgctatctgacattcaaggccctgaaccagaacaacacgcccctcctgtcactgaaagatttctatgacatctatgaggtcgctgcactaaagtggaaggcgaagaagaatcgagagcactggtttgatgagttacctcgcactgccctgcttatttttaaaggcattaacattctcgttaaaagtaaggccttccagtacttcatgtatcttgtggtcgctgtcaatggcgtgtggattctcgtggaaacttttatgttgaaggggggaaactttttttccaagcacgtcccgtggtcatacctggtgttcctgactatttatggggtggagcttttccttaaggtcgccggactcgggcctgttgaatatctatcgagcggctggaacttattcgatttcagcgtcactgtatttgccttcttgggactattagcattggcactgaatatggaaccattctactttatcgtcgtactcagaccgttgcagcttctgcggcttttcaaactgaaggagagatatagaaatgtactggatacaatgtttgaactgctgccacggatggcctctctcggcctgaccctgctcattttttactacagctttgctatcgtgggcatggaattcttttgtggaatcgtgtttccgaattgctgtaacacgtccactgtcgccgacgcctacagatggcgcaatcatacagtgggaaaccggactgtcgttgaggagggctattattatctcaataatttcgataacatcctgaattcatttgtgactttgtttgaactcactgtggtcaataactggtacatcatcatggagggcgtgacatctcagacctcgcattggagtaggctgtactttatgacattctacatcgtcaccatggtcgttatgactatcatcgttgcatttatcctggaagcattcgtctttagaatgaactattcacggaagaaccaggactccgaggtcgacgggggaatcacgttggagaaagagatctccaaggaggagcttgtggcggtgctggaactctacagggaagccagaggcgcatcatcagatgtgactcggctgcttgagacgctctcacaaatggagaggtaccagcagcattcgatggtctttttaggtagaaggtcccggaccaagtcagacctctcactgaaaatgtatcaggaggaaatccaggagtggtatgaggagcatgctcgcgaacaggagcagcaaagacagctgtcttcaagtgctgctcccgcagcccagcaacctccaggatcccgccagcgatcccagaccgtcacttag

SEQ ID NO: 245748 - DNA, 2667 bp, synthetic construct
  misc_feature 1..2667: note = Description of Artificial Sequence: Synthetic coding sequence
  source 1..2667: mol_type = other DNA
atggagtcatgctacattgcccaggcaggcctggaattgttgggatctagttcctcaccaacacttacttcccagtcagcagaaatcacagaagacgcctcaaatgggggtgtcagtgagcagcatccatggcccagtggctttgagcgcgagctgaaacccgaaaccatcagctcaccaggctatcacatcctccgggctacaggagaggaaaacatggccgtctctttggacgacgacgtgccgcttatactaaccctcgatgagggcggtagcgcacccctagccccaagcaacgggctgggacaagaggaactcccttccaaaaacgggggtagctatgcaattcacgacagccaggcacccagtctgagctccggcggtgagtctagcccttcctccccagcacacaactgggagatgaattaccaagaagccgctatctacctgcaggaaggcgagaacaacgataaattcttcactcatcccaaagatgcgaaagccctcgcagcctacctttttgcacacaaccacctgttttatcttatggagctagctaccgccctgttgctcctgcttctatccttatgcgaagcacctgcagtcccagctctcaggctgggaatctacgtacatgcgactctggaactgtttgcactgatggtagtcgtatttgagctgtgtatgaagctgcggtggcttggccttcacactttcatccggcataaaagaaccatggtcaagacgtctgtgctggtggtacagtttgttgaagcgatcgtcgtgctggttcgccaaatgagccacgttagagtcacccgcgctctgcggtgcatattcctggtggattgtcgctattgcgggggtgtgagaaggaacctgcgacagatatttcagtctttgcccccttttatggatattctcttgttattactgttctttatgataatcttcgctattctcggtttctacttattttctcctaaccctagcgacccgtacttctctaccctagagaactccatagtgtctctattcgtcctcttaaccaccgccaattttccagatgtgatgatgccttcatactctcgcaatccatggagttgcgtgtttttcattgtctatctctccatcgagctctacttcattatgaatctcttgctcgccgtggtgttcgatacttttaatgatatcgaaaaacgaaaatttaagtccctgctgctccataagcgaactgccatccaacacgcttatagactcctgatatctcaacggaggccagctgggataagttacaggcagtttgagggattgatgcgattctataaacctaggatgtcagccagggaaaggtatctgacattcaaggctctgaaccagaataacaccccactgctgtcactaaaggatttctatgacatctacgaggtggctgccctgaagtggaaagctaagaagaatcgcgagcattggttcgatgagctgccccgaaccgccttgctgatctttaagggcataaatatccttgtaaagagcaaagcctttcagtatttcatgtacttggtggtagccgtcaatggcgtatggatcctcgtcgaaaccttcatgctgaaaggcggaaacttcttttcgaaacatgtgccatggtcgtatctcgtgttcttgaccatctacggcgtcgaactcttcctgaaagtcgcgggattaggccctgtcgagtacctctcctcgggttggaacctttttgatttctccgtgaccgttttcgcattccttgggctgctcgccctggcactcaatatggagcctttttattttatcgttgttctgcggccactacaactcctgagactgtttaagctgaaggagcggtacaggaacgttctcgacactatgttcgagcttctgcctaggatggcgtcacttggactgaccttgctgatcttctattattctttcgccatagtgggtatggaatttttttgtggcattgtcttcccgaattgctgtaacacaagcaccgtagctgacgcctacagatggcgcaatcacaccgtgggcaacagaacagtggtcgaggagggctactattacttaaataattttgacaacattctaaattcatttgttacattattcgagctgaccgtcgtcaataactggtatattatcatggagggcgttacgagtcagacaagccactggagccgactgtatttcatgactttctacatcgtgactatggtggttatgacgatcattgttgcattcatcctggaagcattcgtattcagaatgaactactctcgtaaaaaccaagattcagaagtggatggcggtattacattggagaaggagatttctaaggaagagcttgtggccgtcttggaactctaccgcgaagcgaggggagccagcagcgatgtgactagactgttggaaaccctgagtcagatggaaaggtaccagcagcattcgatggtttttctaggaagacggtcccgaaccaaatcagatctgtctctgaaaatgtatcaagaggaaattcaggaatggtacgaagaacacgctcgggaacaggagcaacagcgccaactgtcttccagcgccgcacctgctgcccagcagcccccaggctcccggcagcgatctcagacggtgacttag

SEQ ID NO: 245749 - DNA, 2667 bp, synthetic construct
  misc_feature 1..2667: note = Description of Artificial Sequence: Synthetic coding sequence
  source 1..2667: mol_type = other DNA
atggagagttgttatatcgctcaagccggtttggagctcttgggctctagcagttcaccaacactgacaagtcagagcgctgaaattacagaagatgcgtcaaatggaggagtgtctgagcagcatccctggccttctggattcgagagggagttgaagccagaaaccatttccagtcctggataccacatcctcagggccactggcgaggagaatatggcggtatccctggacgatgatgtcccccttatcctcacgctggatgaaggaggctcggctccactggccccaagtaacggtctgggacaggaggaacttccttccaaaaacgggggaagctatgccattcacgactcccaggcaccaagcctgagcagtgggggagagagctctccgtcttcccctgcccataactgggaaatgaactaccaggaggccgctatctacctgcaggaaggcgaaaacaatgataagttttttacacaccctaaagatgcgaaagcgctggccgcttatctattcgcccataaccacctcttctacctgatggaattggccacggccttattgctcctcctcctgagcctgtgcgaggcgccagccgtacccgctctccgcctgggaatttacgtgcatgcaacattggagctctttgccttgatggtggtagtgtttgaattgtgcatgaaactgcgctggctgggcctccacacattcatccgacacaagaggactatggtgaagacttccgtgttggtcgttcagtttgtcgaggccattgtggtgctggtcagacaaatgtcacacgtaagagttactcgagccctcaggtgcatctttctggtcgactgtcgctactgtggcggtgtccggaggaatcttagacaaatatttcagtctttgccacccttcatggacattctgttactgttgctgttctttatgattatttttgcgatactgggcttctacctcttttcacccaatccctctgacccatatttctccactctcgaaaactcaattgtcagtctttttgtgcttctaactacagccaatttccctgatgtcatgatgccaagctactcaagaaacccttggtcctgtgttttcttcattgtatatctttccatcgagctttactttataatgaaccttctgcttgcagtggtttttgacacattcaacgatattgagaaacgcaaatttaagtccctgttgctgcacaaacggaccgctatccagcatgcataccggcttctgatttcacagcgcaggccggcagggatatcttatcggcagttcgaaggcctgatgcgcttttataagcccagaatgagtgccagagagcgctacctcactttcaaagccttgaatcagaacaacacacccctgttgagcctcaaagatttctacgatatctacgaagtagccgctctcaagtggaaagccaagaagaacagggaacactggtttgacgaactcccaagaacggcactcctcatattcaaaggtattaacatcctggttaagtccaaggcttttcagtattttatgtatctggtggtggccgtgaacggggtgtggatcctggttgaaacgtttatgcttaaagggggtaatttcttttctaagcatgtgccttggtcctacttagtcttcctgactatctacggggttgagctcttcttgaaagtagccggacttgggccagttgagtatctttcttcgggttggaatctatttgacttttcggtcactgttttcgcctttctcggacttcttgccctggctctcaatatggaacctttttattttatagtggtgctgaggcccttacagctgttgcgcttatttaaactcaaggagcggtatcggaatgtgttggatacaatgttcgagctcttgcccagaatggcaagcctcggcctgacactgctgatattttattatagcttcgcgatcgtcggcatggaatttttctgtggaattgtgttccccaattgctgcaatacttcgacggttgccgatgcctaccgctggagaaatcataccgttggtaataggaccgtggtggaagaaggctattattaccttaacaactttgataatatcctaaactctttcgttacactgtttgaattgaccgtagttaataattggtatataattatggaaggtgtgacgagccaaacctcccattggtcccggctctactttatgaccttctacattgtcactatggtagttatgacaattattgtggcctttattctggaagccttcgttttccgcatgaattactcacgtaaaaaccaggattctgaggtggatggcggaatcacactagaaaaggaaatcagtaaggaagagctggtcgccgtgcttgaactctacagagaggctcgcggagcatctagcgacgtgaccaggcttcttgagaccctgagccagatggagagataccagcagcactccatggtctttctggggaggaggtcccggacaaagagtgatctcagtttaaaaatgtaccaggaggagatacaggagtggtacgaggaacacgccagagaacaggagcaacagcgacaactgtctagctccgcagcaccagctgcccaacagcccccaggatcccggcaaaggagccaaactgtgacctag

SEQ ID NO: 245750 - DNA, 258 bp, synthetic construct
  misc_feature 1..258: note = Description of Artificial Sequence: Synthetic coding sequence
  source 1..258: mol_type = other DNA
atggccgtgtctctggatgatgacgtgcctcttattttaaccctcgacgaagggggtagtgccccactggcaccatctaatgggctcgggcaagaagaacttccctctaagaacggtgggagctacgccatccatgactcccaggcaccctccctcagttctgggggagagtctagcccgtcctccccagctcataattgggagatgaattaccaggaagcagcaatttatttgcaggagggagagaataacgattag

SEQ ID NO: 245751 - DNA, 303 bp, synthetic construct
  misc_feature 1..303: note = Description of Artificial Sequence: Synthetic coding sequence
  source 1..303: mol_type = other DNA
atggcagtcagcttggatgatgatgtgcctctaattctcacattagacgaagggggatccgccccactggccccatcaaatggactggggcaggaagagttgccctccaaacgtaggtgttgtatgctttgcagctcaaagcagaaaccatggattccatgtagggtgatctccgatgttgcctgcaaggccgcttcttgttttgagggcgctagcggcccttgcgacatctccatgtgggaatgctatagagtttgtaagcaaatggctgctgctatgccctctaccacaccccgaccctag

SEQ ID NO: 245752 - DNA, 2259 bp, synthetic construct
  misc_feature 1..2259: note = Description of Artificial Sequence: Synthetic coding sequence
  source 1..2259: mol_type = other DNA
atggccgaaccgcaggcagaatcagagccactcctgggaggtgctcggggaggcggtggggactggcccgctggtcttaccacgtacagatcgatacaggtgggcccaggtgccgctgcaagatgggatctttgtatcgaccaggccgtggtgtttattgaggacgcaatccagtaccgttccatcaatcatagagtcgacgcctcttcaatgtggctgtataggcgatactattcgaatgtgtgtcaacgaaccttgtcctttacgatcttccttatattgtttctggccttcatcgaaactccaagctccttgacatcgaccgctgacgtaaggtatagggctgcaccctgggagccaccatgcgggctgaccgagtcagttgaggttctgtgtctcctggtgtttgctgcagatctgtccgtgaagggctacttgttcgggtgggcccatttccaaaaaaacctttggttactcggatacctggttgtcttggtggtgtcgcttgtcgactggaccgtaagcctgagcctggtctgccacgaacctcttcggatcagacgtctattgagacctttttttcttctgcagaattcttcgatgatgaaaaagacattgaagtgtattcgttggtccttaccagagatggcaagcgtgggtttactgcttgccatccatctctgcctcttcacaatgttcggaatgctgttattcgccggaggaaagcaggacgatgggcaagaccgcgaacgactcacctacttccagaacttaccggaatccctaacctctctgctggtgctgttaactaccgctaataacccagatgtgatgatcccagcgtactccaagaaccgcgcttacgccattttctttatcgtgttcaccgtcataggctcccttttccttatgaaccttttgacagccatcatctacagtcaattccgcggatatcttatgaagtcacttcagacgtcactatttcgtcggagactgggcaccagggcggcttttgaggtattaagttcgatggtcggggaaggcggtgcctttcctcaggcagtgggggtgaagccacagaatctgctccaggtcttgcaaaaggtacagttggactcttcccacaaacaggccatgatggaaaaggtaaggtcatatggctctgtgctactcagtgccgaggagttccagaaactgttcaacgagttagatagatccgttgtcaaggaacacccgccacgaccggagtatcagtccccctttctgcagtcagctcagtttctgtttggccattattacttcgattacctgggtaacctgattgctcttgcaaacctagtctctatttgcgtgtttcttgtgcttgatgccgatgtcttgcccgcagaacgagatgactttattcttgggattcttaattgtgtgtttatagtatactacctgctggaaatgctgctgaaggtgttcgcgctcgggttaagaggctacctctcgtaccccagcaacgtgttcgatggcctgctgactgtcgtgctgctcgtgcttgagattagcaccctagctgtgtaccgcctgccccaccctggctggaggcctgaaatggtaggcctgctaagtctctgggacatgacccgcatgctgaacatgctgatcgtcttccgatttctccgcattatcccctcaatgaaactgatggcagtggtggccagcaccgttctcgggctcgtgcaaaatatgagggcattcggtggaatactggtggtggtgtactacgtcttcgctatcattggtatcaacctattccgaggcgtgatcgtcgccctacccggaaattcaagtttagccccagccaacgggtccgccccatgtgggtcattcgaacagctggagtactgggccaataactttgacgacttcgccgcagctctcgtaactctctggaacttaatggtggtcaataattggcaagttttcctcgatgcctaccgaaggtatagcggcccttggagtaaaatttacttcgtcctgtggtggctcgtctccagcgttatctgggtgaacctgttcctggccctgattctggagaactttttacataaatgggacccgagaagtcatctgcagccactcgcgggtaccccggaagccacctaccaaatgaccgtggaactgttatttagggacattcttgaggaacctggcgaggacgagctcaccgaacggctctcccagcacccccacctgtggctctgtcgatag

SEQ ID NO: 245753 - DNA, 1407 bp, synthetic construct
  misc_feature 1..1407: note = Description of Artificial Sequence: Synthetic coding sequence
  source 1..1407: mol_type = other DNA
atgtggctgtacagaagatactactccaatgtctgccagaggaccttatcttttactatttttcttatcctgttcctggctttcatcgaaacccctagcagcctcacgtccacggccgacgtgagataccgagccgctccatgggagccaccatgcgggcttacagaatcagtggaggttctgtgtttattggtgttcgctgcggatctcagcgtgaaggggtacttgttcggatgggctcacttccagaagaatctatggctcttaggctacctggtagttctggtcgtgtcccttgttgactggaccgtgtcattgtcacttgtttgccatgagcccctccgcatccggaggctgttacgccctttctttctgctgcagaattcatccatgatgaaaaaaaccctcaagtgcattagatggtccctcccggagatggcttcggtgggactcttgttggctatacacctctgcctgttcactatgtttggcatgctactgttcgccggaggaaaacaggatgacgggcaagatagggaaagactaacatatttccagaacctgcccgagtccctcaccagtctcctggtcctcctgaccacagcgaataatccagacgtgatgatccctgcctactcgaaaaaccgcgcatacgctatcttcttcatcgttttcacagtgattggatctctcttcctgatgaatcttctgaccgctattatttacagccagttccgtgggtacctgatgaagtcgcttcagacaagcctgttccggaggcggttgggaaccagggctgccttcgaagtgcttagttctatggtgggtgaggggggagccttcccgcaggcaacaagacgcggaccctctacctctctgagattctgccgcgctcccagttcttcttctgcaaccacaacattaacgacctggggaacctctagtccctggcagacctggtgtccattcgcttgctcctggtgctggatgcagatgtgctgcttattgagtgtgatgacaagctcctggggcttttcgactgcatcgtccctgtgtactacctgttggcgctgctgtagccgcagcctgccctgggcttgtgaaggaacgtgtcccacccctgctacatgcttaactggatccagccctttatcctgctggcggcctgagatggtgggcttactgtcgctttgggatatgactaggatgctaaatatgttaattgttttccggtttctgcggattattccctccatgaaacttatggccgtcgtggcatccacagtgctcgggttagttcagaacatgagggctttcggaggtattctcgtacctggcccatgccagtggctgggggctctgtgggagctgcgagcggctggtgtactgggacagcagctgaggtag

SEQ ID NO: 245754 - DNA, 1584 bp, synthetic construct
  misc_feature 1..1584: note = Description of Artificial Sequence: Synthetic coding sequence
  source 1..1584: mol_type = other DNA
atgattctatctagttataacaccatacagtccgtcttctgttgctgttgctgttgtagcgtccagaagcggcagatgcgtacccaaattagcctctccacagacgaggaactgcctgagaagtatactcagcgacgcagaccgtggctgagccagttgtctaataagaagcagtcaaatacaggcagagtccagccctcaaaaagaaaacctctgcctccgctgcccccaagtgaagtggccgaggagaagatacaggtgaaagctctgtacgacttcctgccacgtgaaccttgtaacctggcactgaggcgggcagaggaatatttgatcctggagaaatacaacccacactggtggaaggccagggacagacttggaaacgaaggtcttattcctagcaactatgtaacagagaataaaataactaacctcgagatttatgagtggtaccacagaaatattacccgtaaccaggccgaacacctgttaaggcaagagagcaaggaaggggcttttatcgtgcgggactctcggcatctgggatcttataccataagtgtgtttatgggtgctcgcagaagtactgaggccgctatcaagcactaccagatcaaaaagaatgacagcggccagtggtatgtagccgagaggcacgcttttcagtcaattcccgaattgatatggtaccaccagcataacgctgccggtctgatgaccaggttacgttacccggtgggactgatggggtcatgcttgcccgcaacggccggattctcttatgaaaagtgggaaattgacccaagcgagctcgcttttataaaggagatagggagcgggcaatttggcgtagtgcacctgggcgaatggaggtcccatattcaggtggccatcaaagctatcaacgaggggtccatgtccgaggaagattttatcgaagaagcgaaagtgatgatgaaattgagtcattctaaactggtgcaactgtatggagtctgcatacagagaaagcccctgtacatcgttactgaattcatggaaaatggctgtctactgaattacctgagggaaaacaaaggcaagcttaggaaagagatgttgctgtcggtgtgtcaggacatttgcgagggtatggaatacctggagaggaatggatacattcatcgggacttggcagctaggaactgtcttgttagcagcacttgcatcgttaagatcagtgacttcggcatgacccgctacgtgctggacgacgagtacgtaagcagttttggtgcgaaatttccaatcaaatggtccccacctgaggtgtttctgtttaataaatacagcagcaagagtgatgtgtggtcctttggggtcctgatgtgggaggtttttacagagggaaaaatgcccttcgagaataaatcaaatcttcaggtcgtcgaagctattagtgaaggatttaggttataccgaccccacctcgccccaatgagtatttacgaggtgatgtactcatgctggcacgaaaaaccagagggaaggccgacttttgccgagctccttagagccgtgacagagatcgctgagacctggtag

SEQ ID NO: 245755 - DNA, 342 bp, synthetic construct
  misc_feature 1..342: note = Description of Artificial Sequence: Synthetic coding sequence
  source 1..342: mol_type = other DNA
atgggtggcctagaaccctgttcaaggctgcttctgctgccgctgctactggcggtcagcgggctgcgtccggtccaggcgcaagcacagagcgattgctcttgttcaacagtcagcccaggcgtcttagcagggatcgttatgggtgatttggtgctcactgtgctcatcgctctggccgtgtatttcctgggacgcctggttcccaggggcaggggcgctgcagaggcggcaacgaggaagcagagaatcaccgaaacagagagcccttatcaggagctgcaaggacagcgctccgacgtgtattctgaccttaatactcagaggccctactacaaatag

SEQ ID NO: 245756 - DNA, 339 bp, synthetic construct
  misc_feature 1..339: note = Description of Artificial Sequence: Synthetic coding sequence
  source 1..339: mol_type = other DNA
atgggcggtctcgagccatgttctaggcttctcctgcttcccctgttgctcgccgtctcggggctgaggccagtgcaggcgcaggcacagagcgactgtagctgttcaaccgttagcccaggcgtacttgccggaattgtcatgggcgacctagtgctgacggtgctgatagccctggccgtttatttcctgggaagactggttcctcgtgggaggggcgctgccgaggccacacgaaagcaacgcatcactgagactgaatctccctaccaggaactccagggccaaagaagcgacgtctactccgatctgaacacacagaggccatactataagtag

SEQ ID NO: 245757 - DNA, 309 bp, synthetic construct
  misc_feature 1..309: note = Description of Artificial Sequence: Synthetic coding sequence
  source 1..309: mol_type = other DNA
atgggaggtttagagccatgttcacggctgttgctacttcctctgctactggccgtgagcgattgtagctgttccactgtttcgcccggagtacttgccggtatagtaatgggcgacctggttttaacagtgctcatagcgctggccgtatactttctggggcgattagtgccccgtggccgtggggctgcggaggctgccaccaggaaacagaggattactgaaaccgagagcccataccaggagttgcagggacaaaggtccgacgtgtattctgacttaaacacccagcggccatactacaagtag

SEQ ID NO: 245758 - DNA, 339 bp, synthetic construct
  misc_feature 1..339: note = Description of Artificial Sequence: Synthetic coding sequence
  source 1..339: mol_type = other DNA
atgggcggactggaaccatgtagtaggctcctgctgttacctctgcttctggccgtctctggcctccggccagtgcaggcacaagcccagtctgactgtagctgttcgaccgtatcccctggtgtgcttgctggcatcgtgatgggcgacttggttctcaccgttttgatcgccctcgctgtttacttcctcgggagactggtcccgcgaggcaggggggctgccgaagcaacacggaaacagcggatcacggaaaccgaatccccatatcaagaactccagggccaacgaagcgacgtgtatagcgatctgaacacacagcggccatattataagtag

SEQ ID NO: 245759 - DNA, 2673 bp, synthetic construct
  misc_feature 1..2673: note = Description of Artificial Sequence: Synthetic coding sequence
  source 1..2673: mol_type = other DNA
atggccctgcgcagaagcatggggcgacccggacttcctccactacccctcccaccccctcctaggctcggtttgctgctggctgccctagcaagtcttcttctccctgagtctgcagccgctggcttgaagctgatgggcgctccagtgaagcttactgttagccaagggcagcccgttaagctcaactgtagcgtagaagggatggaggagcccgacattcagtgggttaaggatggggcagttgtgcaaaacctcgaccagctctatatcccagttagcgagcagcactggattggcttcctgtcactaaagtcagtggagagatccgatgccggacggtactggtgtcaggttgaggatgggggtgaaacagagattagtcagcctgtgtggctaactgtggagggagtgcccttttttaccgtcgaaccaaaggacctcgcagtccctcccaatgccccattccagttgtcctgcgaggcagttgggccacctgaaccagtaaccatcgtgtggtggaggggcactacaaagattggcggtcctgcgcctagcccttccgtactcaatgtgactggagtgacccagagcaccatgttctcttgcgaggctcacaacctaaagggccttgcctcttccaggacagcaaccgtccacttacaggcactgcccgcagccccattcaacatcactgtcacaaagttgagttcctctaatgcgagcgtggcttggatgccaggtgcggacggccgagcactgcttcagtcctgcaccgtacaggttactcaggcccctggcggatgggaggtgcttgcagtcgtggttcctgtgccccctttcacctgtctgctccgggatttggtgcccgctacaaactatagcttaagagtgagatgcgctaacgcccttggcccttccccctacgcagactgggtcccattccaaactaagggcctggcccctgcatccgcgccacagaatctgcacgccatccgcaccgactcaggactcattttagagtgggaggaggttatccccgaggctcccctcgaaggccctttgggaccgtacaaattgtcctgggtgcaagataacgggactcaagacgaactcaccgttgagggaactcgggctaatctgactggatgggacccacagaaggacttaatcgtgcgggtgtgtgtgtctaatgcggtggggtgcggtccatggagccaacctctggtggtgagtagccacgacagggccggacagcagggcccaccacatagtcgtacctcttgggtgccggtggttctcggcgtgctgaccgcgctggtgactgcagccgcattggccctgattttactacggaagagaagaaaggaaacccgctttgggcaggccttcgacagtgtgatggcgcgaggcgagccagcggtgcacttcagggcagccagaagttttaatagagaacgccctgagaggatcgaggccaccttggattccctgggtattagcgatgagctgaaagaaaagctggaggatgtgctgatccctgagcagcagttcacgctgggtcggatgctgggcaagggcgagttcgggagcgtgagggaggcacagcttaagcaggaggatggctcgttcgtcaaggttgcagtgaagatgctgaaggctgacattatagcatcttccgacatcgaagagttcctgagggaagccgcttgtatgaaggagttcgaccatccacacgtcgccaagctcgtgggcgtctcactgcggtctcgggctaaaggcagacttccaatccctatggtcattcttccattcatgaagcatggtgatttgcacgcattcctactggcaagccggattggtgagaatccattcaatctgcccctccaaacgctgatccgttttatggtagacattgcttgtggaatggaatatctgtctagtagaaattttattcacagagacctcgcggcacggaactgtatgctcgctgaggacatgacagtctgtgtggccgatttcggtctaagcaggaaaatttatagtggagactattaccgccagggatgtgcaagcaaactccctgtgaagtggctggccctggagagtctcgctgataatctctatacagtccaatcagatgtgtgggccttcggagtaaccatgtgggaaataatgacacggggacagacaccctatgccggtatcgagaacgctgagatttacaattacttaattggcggtaaccggttgaagcagccacctgagtgtatggaagacgtgtacgacctgatgtaccaatgttggtctgcagatcctaaacagcgcccatcttttacctgtctgcgtatggaacttgaaaatattttggggcagcttagtgtgctttccgcttcccaggaccccctgtatatcaatatcgaaagggcggaagaaccaaccgcaggaggatccttggagctgccaggacgggaccagccttatagtggcgcaggggacgggagtggaatgggtgccgttggcggaactccgagcgactgtagatatatcctgactccaggcggtctggccgaacaaccaggacaagcagagcatcagcccgagagtcccctgaacgagacccaacggctgcttctgctgcaacaggggctgcttccgcactcaagctgctag

SEQ ID NO: 245760 - DNA, 2529 bp, synthetic construct
  misc_feature 1..2529: note = Description of Artificial Sequence: Synthetic coding sequence
  source 1..2529: mol_type = other DNA
atggaagaacctgatatacagtgggtgaaggatggtgctgtggtccagaacctcgatcaactgtacatccctgtgtctgagcaacattggattggttttcttagcctgaagtcagtcgagcgcagtgatgccggacgttactggtgccaggttgaggacggcggtgagaccgaaatcagccagcctgtatggctgactgtggagggtgtacctttttttaccgttgagcctaaggacttagctgtgccgcctaatgccccattccaactttcctgcgaggctgtcggtcccccagagccggtcacaatcgtttggtggcgcggaacgactaagatcggcggacccgctcccagcccgagcgtcctaaacgtgacaggcgtcactcagtctacaatgttctcgtgcgaggcccacaacttgaagggactcgcttccagcagaactgccacagtgcacctgcaggccctccctgctgcccctttcaatatcaccgtgacaaagctcagctcatctaacgcttcggtggcctggatgcccggagcagatggcagagccctgctgcaatcttgcacagtacaggtgacacaggcccctggcggatgggaagtgctggccgtcgttgttccggtaccaccatttacatgcctcctcagggatctggtgcctgctaccaactattccctgagagttagatgcgccaacgcccttggaccatccccctacgccgattgggtcccgtttcagaccaaaggattagcgcctgcttccgctcctcagaatcttcatgccataagaacagattctggtctcatattggagtgggaagaagtgattcccgaagcgccactggagggacctctcggtccctataaactctcctgggtgcaagataacggcacacaggatgagctgactgtggagggaactcgggcaaacctaaccggctgggatccacaaaaagatcttattgtccgagtatgcgtctcaaacgcagttgggtgcggcccatggtcccaaccactcgtggtgtcttcccacgatagggcaggtcagcaggggccaccgcactccaggacttcatgggtcccagtggtgttaggagtgttgacagcccttgtcaccgcagcagccctggccttgatcctgctccggaagcgaaggaaggagaccaggttcggtcaagcttttgactcagttatggccagaggggagcctgctgttcactttcgagcggcacggagcttcaaccgggaacgcccagagagaatcgaggccaccctcgattctctcggcatcagtgacgagttgaaagagaagctggaggacgtcctcatccccgaacagcagtttacgctgggtagaatgctcggtaagggggagttcggcagcgtgcgggaggctcagctgaagcaggaagatgggtccttcgtcaaagtggcagtcaaaatgctgaaggcagatattatagcctcttcagacatagaagagttcctgagggaagctgcatgcatgaaagaatttgatcatccccatgtcgccaagctggtgggcgtgtccttgaggtcccgagccaaggggagattgccaattcccatggttatactcccgttcatgaagcatggggatctccacgcatttctcctagcatcgcgcatcggagagaatccattcaacctgccgctgcagacactaattcgcttcatggtcgatatcgcttgcggtatggagtatcttagtagccgcaattttatacatagggatctcgctgccagaaattgtatgctggctgaagatatgacagtgtgtgtggccgacttcgggcttagccggaagatctactccggcgattattaccgacagggatgcgcctccaagttgcccgtgaagtggctggctctggagagtttagccgacaatctgtacaccgtccaaagcgacgtctgggcatttggcgttactatgtgggagatcatgacacgcggtcagaccccatacgccggaatcgaaaacgcagaaatctacaattacctgattggagggaacaggctcaaacagcccccagaatgcatggaagatgtgtacgatctgatgtaccaatgctggagcgccgatccaaagcaaaggcctagctttacctgtctgcggatggagttggaaaatattctgggtcaattgtctgtcctcagcgctagccaggaccctctctatatcaatatagaacgcgcagaggagccgaccgctggcggttcactcgaacttcctggaagggaccagccatacagtggggctggagacggctcaggcatgggtgcggtaggcggtactccatccgattgtcgctacatccttacccccggaggtctggccgagcagccgggacaggccgagcaccagcccgaatcccctctcaacgaaacccagcgtctgttattattgcagcaggggcttcacactgtggcggtttctccccaggccgagggcatcggcgcaatctggcccgcactcgttgccactgagctggcagattag

SEQ ID NO: 245761 - DNA, 741 bp, synthetic construct
  misc_feature 1..741: note = Description of Artificial Sequence: Synthetic coding sequence
  source 1..741: mol_type = other DNA
atgacaatggacaagtccgagttagttcagaaggcgaaactcgctgaacaggcggaaagatacgatgatatggccgcagcaatgaaggcagtgacggagcagggccatgagctgagtaacgaggagcgtaatcttcttagcgtagcttacaagaatgtggtgggtgcacggcgttctagctggcgggtgatctcatccattgaacagaaaacggaaaggaacgagaagaaacaacagatgggtaaagagtatcgcgaaaagattgaagccgagctgcaggacatttgcaatgatgtgctggaactcttggacaaatatctgattcccaacgctactcaacctgagagcaaggtgttctatcttaagatgaaaggcgactattttagatatctcagcgaggttgcttcaggcgataacaaacagaccaccgtctcgaattcccagcaggcttaccaggaggccttcgaaatctctaaaaaggaaatgcagcctacccaccctattaggctcgggcttgcgctcaatttctccgtgttctattacgaaattttgaacagcccagaaaaggcatgttccctcgccaagacggctttcgatgaggctattgctgaactggatacactgaacgaggaatcttacaaggattctactttaatcatgcagctgctgagagataatttaactctgtggaccagcgaaaatcagggggatgagggagacgccggtgagggcgagaactag

SEQ ID NO: 245762 - DNA, 741 bp, synthetic construct
  misc_feature 1..741: note = Description of Artificial Sequence: Synthetic coding sequence
  source 1..741: mol_type = other DNA
atgactatggacaaatccgaactggtgcagaaagccaagctggccgaacaggcagaacggtacgacgatatggccgctgccatgaaggccgttactgagcagggccacgaactgagcaatgaagaacgtaatctcctctctgtagcctacaagaacgtggtaggggctcgcaggtcttcatggcgggttatcagttcaattgagcagaagaccgagagaaacgaaaagaagcaacagatgggcaaagagtacagagagaaaatcgaggccgagctgcaggacatttgtaatgacgtgctggagctgcttgataagtatttaattcctaatgcaacacagcccgaatcgaaggttttctacttgaagatgaagggagattacttccgatatttgtcagaagtggcatcaggtgataacaaacaaacaactgtgtcaaattcacagcaggcataccaagaggcattcgaaattagtaagaaggagatgcagcctacccaccccattaggctggggcttgccctaaattttagtgtcttttactacgaaatcctcaactctccagagaaagcctgtagtctggccaagactgcctttgatgaagccatcgccgaactggacacactcaacgaggagtcgtataaagatagcacactgatcatgcagctcctgagagataacctgactttatggactagcgagaaccagggtgacgagggagacgccggagagggcgagaattag

SEQ ID NO: 245763 - DNA, 303 bp, synthetic construct
  misc_feature 1..303: note = Description of Artificial Sequence: Synthetic coding sequence
  source 1..303: mol_type = other DNA
atgacgatggacaagagcgaacttgttcagaaggctaagctggccgagcaggccgagcggtatgacgatatggcagcagcaatgaaggccgtgaccgagcaggggcacgaactgagcaatgaggaacgcaatctactgtccgttgcgtataaaaatgtggtcggcgcacggaggtcctcttggcgcgttattagctccatcgagcagaagaccgagagaaatgaaaaaaagcaacagatgggcaaggaataccgggagaaaattgaggccgaactacaagatatctgtaatgatgtgctgtag

SEQ ID NO: 245764 - DNA, 225 bp, synthetic construct
  misc_feature 1..225: note = Description of Artificial Sequence: Synthetic coding sequence
  source 1..225: mol_type = other DNA
atgacgatggacaaatcagagctcgtgcaaaaggctaaactcgccgagcaggctgaacgatatgacgacatggcggctgcaatgaaagcagtcaccgagcaggggcatgaattgtcaaatgaggaaaggaacctgctgagcgtcgcctataagaatgtcgttggagccaggcgatcaagttggagagtgatttctagtatagagcagaagactgaaagaaattag

SEQ ID NO: 245765 - DNA, 768 bp, synthetic construct
  misc_feature 1..768: note = Description of Artificial Sequence: Synthetic coding sequence
  source 1..768: mol_type = other DNA
atggacgaccgagaggacttagtttaccaggccaagctggccgaacaggcagagcggtacgatgaaatggtcgaatccatgaagaaggtggccggaatggacgtggaattaactgtggaggagcgtaacttattaagtgttgcatacaagaacgtgatcggggctcgtcgcgcttcatggcgaatcatctcgtcaatcgagcagaaggaggaaaataagggcggtgaggataagttgaagatgatccgggagtataggcagatggttgagaccgagctgaagcttatatgctgcgacattttggatgtgttggacaaacatcttatcccggctgctaataccggggagtctaaagtcttctactacaaaatgaagggtgactaccacagatacctggctgaattcgcgactggaaatgatcgcaaggaagctgctgagaactcactcgtcgcttacaaagcagcatctgatatcgccatgactgagctgcccccaacccacccaattcgattaggcctggctctgaacttttcagtgttctactatgagatcctgaactctcccgatagggcatgcaggttggccaaggcggcattcgatgacgccatcgctgagctggatactcttagtgaagagtcttataaagatagcactctgataatgcagttattgcgcgacaatctgactctgtggacctccgatatgcagggcgacggcgaagaacaaaacaaggaggcactgcaggatgtcgaggatgaaaaccagtag

SEQ ID NO: 245766 - DNA, 702 bp, synthetic construct
  misc_feature 1..702: note = Description of Artificial Sequence: Synthetic coding sequence
  source 1..702: mol_type = other DNA
atggtggaatcaatgaagaaggtcgctggcatggatgtcgagttgacagttgaggagaggaatttactctcggtggcctataagaatgttattggcgcaagaagggctagctggcggattatttccagcatcgagcagaaggaggagaataagggcggtgaagataaactgaaaatgattagagagtatagacagatggtcgaaacagaactgaaactgatctgctgcgatatactcgacgttctggacaagcatctcatccccgctgcaaacacaggggagtctaaggtgttctattataagatgaaaggggactatcatcgttacttagccgagtttgctacagggaacgaccgcaaggaagcagccgagaatagtctggtggcctacaaggcagcctccgatattgcgatgactgagcttcccccaacacatcccatcaggcttggtctggcacttaattttagcgttttctattatgagattcttaacagtcccgatcgggcatgtcgcctggcgaaagctgccttcgatgacgcgattgcagagctggataccctgtccgaagagtcctacaaagacagcactctcatcatgcagctgttgagagataacctgacgctgtggaccagtgacatgcaaggcgacggcgaggaacagaataaagaggccctccaggatgtggaggatgagaatcagtag

SEQ ID NO: 245767 - DNA, 744 bp, synthetic construct
  misc_feature 1..744: note = Description of Artificial Sequence: Synthetic coding sequence
  source 1..744: mol_type = other DNA
atggtggatagggagcaattggtccaaaaagccaggctggcggagcaggctgagcgctatgatgacatggcagccgctatgaaaaatgtgactgaactgaacgagccgctgagtaacgaggagcgaaacttgctgtccgttgcctataagaatgtggttggcgctcgtcgatcatcctggcgggttatctcatcaatcgagcagaagacttcggccgacgggaacgagaagaagattgaaatggtccgagcctaccgagaaaagatcgagaaagagctcgaggcggtctgccaggatgtcctatcactgctagacaattacctcattaagaattgctccgagacacagtacgagagtaaggttttctatctgaagatgaaaggcgactattatcgctacctcgccgaagtagctactggcgaaaagagagcgactgtcgtcgaatcatctgagaaggcctactcggaagctcatgagatcagcaaggaacacatgcagccaacgcacccaatcagacttggcttggccttgaattactctgtgttttattatgagattcagaatgcgccagaacaggcctgtcacctggcaaaaacggccttcgatgatgccattgctgaactcgacacgttaaacgaggactcctataaggattctaccctgatcatgcagctactgcgcgacaatcttactctttggacttccgatcaacaagatgacgacggcggtgaaggcaacaactag

SEQ ID NO: 245768 - DNA, 624 bp, synthetic construct
  misc_feature 1..624: note = Description of Artificial Sequence: Synthetic coding sequence
  source 1..624: mol_type = other DNA
atggtcgaccgggagcagctggtgcagaaagctcgattggctgagcaggccgaacgatatgacgacatggccgcagctatgaagaatgtcacagagctcaacgaacctctgtcaaatgaagagcgtaacttgcttagcgtggcttacaagaacgtcgtcggggctaggcgcagttcatggcgcgtaatcagctctatagagcaaaagactagcgcagacggcaatgaaaaaaaaatcgagatggtgagggcgtaccgcgaaaagatcgagaaggagctggaggcggaagtcgctactggtgaaaagagagccactgttgtggaaagcagtgaaaaggcttactccgaagcacacgaaattagcaaagagcacatgcagccgacacatcctattaggctcggcctcgcactgaactacagcgttttctattacgagattcagaacgcccctgagcaggcatgtcatctcgccaagacagcgttcgacgatgcaatcgccgagctcgacactcttaacgaggacagctacaaggacagtacactgatcatgcagttgctgagagacaacctcacattatggacctccgaccagcaggatgacgacggaggagaggggaataactag

SEQ ID NO: 245769 - DNA, 678 bp, synthetic construct
  misc_feature 1..678: note = Description of Artificial Sequence: Synthetic coding sequence
  source 1..678: mol_type = other DNA
atggctgcagcaatgaagaacgtaaccgagctgaacgagcctctcagcaatgaggagaggaatctactctcggtggcatataagaatgtggtaggcgcacgcaggtcaagctggagggtcattagctcaatagaacaaaaaacgagtgcggatggcaatgagaaaaagatcgaaatggtgcgagcttatcgggagaaaatcgaaaaagagctggaggctgtatgtcaggatgtgctgagcttactcgataactatctgattaagaactgttcagagacccagtacgaatccaaagtcttttacctgaaaatgaaaggagactactacaggtacctcgccgaggtcgcaaccggggagaagagggccaccgtcgtcgaatcctccgagaaggcttacagcgaggcccatgaaattagcaaggaacatatgcagcctacacaccccatcagactcggactggcgcttaactactccgttttctattatgaaatccagaacgctccagaacaggcctgtcacttggctaaaactgcctttgatgacgctatagctgaactagacacactgaacgaggattcatataaggattccacactgattatgcagctgttgagagataatctcactctctggacgagcgatcagcaggatgacgatggtggagagggtaataattag

SEQ ID NO: 245770 - DNA, 738 bp, synthetic construct
  misc_feature 1..738: note = Description of Artificial Sequence: Synthetic coding sequence
  source 1..738: mol_type = other DNA
atggataagaacgagctggttcagaaggccaagttggctgagcaggcagagcgctacgacgatatggcagcctgcatgaaatctgtgaccgagcagggcgctgaactgtcaaacgaggaacggaatctcctctccgtcgcctacaaaaatgtggtgggtgcacgacgatccagctggagagtggttagttcgatcgagcagaaaaccgagggggcagagaagaagcagcaaatggctcgggaatatcgtgaaaaaatagaaacagagctaagagatatttgcaacgatgtcttgagtctgctggagaaatttttgatccccaacgccagccaagcagaatctaaagttttctatttgaagatgaagggcgactactataggtatctagcagaagttgcggcaggcgacgacaaaaagggcattgtggaccagtcacagcaggcttaccaagaagcattcgaaatcagcaagaaggaaatgcagcctactcatccaatccggctcggcctggctctaaacttttccgtgttttattacgagattctgaacagcccagaaaaagcctgttctctggcaaagaccgcgttcgatgaggccatagcagaactagacacccttagtgaagagagttataaggattctacacttataatgcagctgcttagagacaatctgaccctgtggacctcagatacccagggagatgaagctgaggccggagaagggggagaaaattag

SEQ ID NO: 245771 - DNA, 507 bp, synthetic construct
  misc_feature 1..507: note = Description of Artificial Sequence: Synthetic coding sequence
  source 1..507: mol_type = other DNA
atggcacgcgaataccgagaaaagatcgagacagagctgagagatatctgtaacgatgttctgagcctgcttgaaaagttcctgattccaaatgccagtcaagctgaatctaaagtcttttacctgaaaatgaaaggagactattatagatacctagcagaggtggctgcaggcgacgataagaaaggtattgtggaccagagtcagcaagcttatcaggaagccttcgagatctcaaaaaaggaaatgcagcccactcaccccattcgactgggattggccttgaatttctctgtgttttattatgagatactgaatagccctgaaaaggcctgttcccttgctaaaactgccttcgatgaagctatcgcagagctggatactctatccgaggaaagctataaagacagcacattaatcatgcaactattgcgagacaatctcaccctgtggaccagcgacacacagggcgacgaggcggaagctggggagggtggtgaaaactag

SEQ ID NO: 245772 - DNA, 738 bp, synthetic construct
  misc_feature 1..738: note = Description of Artificial Sequence: Synthetic coding sequence
  source 1..738: mol_type = other DNA
atggataagaacgaactcgttcagaaggcaaagttggctgagcaggccgagagatatgatgacatggcagcttgcatgaagagtgtgacagaacagggggcagagctgagcaatgaggaaaggaatctgctgagtgtcgcctacaagaacgtggtgggggcacggaggtcctcttggagggtggtgtctagcatcgagcagaagaccgagggagcagaaaagaaacagcaaatggctagggagtatcgcgagaagatagaaacagaacttagagacatctgtaatgatgtgctgagcttacttgagaagtttctgattccaaacgcctcacaagctgagtctaaggtcttctatttgaaaatgaagggtgattactatcggtatttggcagaggtcgcagcaggcgacgacaaaaaggggatcgtggatcaaagccaacaagcataccaagaagcgttcgagatttctaagaaggaaatgcagccgacgcaccctataaggctagggctggccctgaacttttcagttttttactacgagattctgaactcccccgagaaggcttgttccctagctaaaacagcttttgatgaagctattgctgaactcgatacattgagcgaggagtcgtacaaggactctactttaattatgcagcttcttagagacaatctcaccctctggacaagcgatacgcagggagacgaagccgaggctggggagggtggtgagaattag

SEQ ID NO: 245773 - DNA, 738 bp, synthetic construct
  misc_feature 1..738: note = Description of Artificial Sequence: Synthetic coding sequence
  source 1..738: mol_type = other DNA
atggataagaatgaactcgtgcagaaagcgaagcttgcggagcaggctgaaagatatgatgatatggccgcttgcatgaaatcagtgacggagcagggtgccgagctgagtaatgaagaaagaaacctgctgtcggtggcctataagaatgtggtgggcgcaagacgctcatcatggcgagtcgtgagcagcatcgaacagaaaacagagggcgcagagaagaaacagcagatggccagagaatacagggaaaagatcgaaacagagctcagagacatatgcaacgatgtgctcagcctcctcgagaagtttctcatacccaatgcttcacaggcagagagtaaggtgttctatcttaaaatgaaaggagattattaccgatacctggcagaggtagccgcaggcgacgataagaagggtatcgtagaccaaagccagcaggcgtatcaggaagcttttgagatatctaaaaaagagatgcagcccacacacccaatcaggctggggcttgctctgaacttcagcgtgttttattacgagatccttaacagcccagagaaagcctgctctctggctaagactgcatttgacgaagccatcgccgagctggacacactctcggaagagtcttataaggactctaccctgatcatgcagctgcttagggacaaccttactttgtggacatctgatacacagggagacgaggccgaggcgggtgagggcggtgagaattag

SEQ ID NO: 245774 - DNA, 738 bp, synthetic construct
  misc_feature 1..738: note = Description of Artificial Sequence: Synthetic coding sequence
  source 1..738: mol_type = other DNA
atggacaagaatgagttagtgcaaaaggctaagctggccgagcaggctgagcgctatgatgatatggccgcttgcatgaaatcggtgacagaacagggcgctgagctcagcaacgaagagcgaaatctcctgtccgtagcttacaagaacgttgttggcgcacggcgatctagttggcgcgtagtgtcctcaatcgagcagaagacagagggcgcagagaaaaagcagcagatggcacgtgagtatagggagaaaatcgaaacagagctgagggacatatgcaatgacgtgctctcgttgctagagaaattccttatacccaatgcctctcaagcagagtccaaggttttttatctcaagatgaaaggagactactaccgttacctagccgaggtggcggcaggagatgacaagaaaggaattgtggaccagagtcaacaggcgtaccaggaagcatttgagattagcaagaaagaaatgcagccaactcatcccatccgtctgggtcttgccctgaattttagcgtgttttattacgagattctgaactctcccgagaaggcctgttccctcgccaaaaccgcctttgacgaggcgatagctgaactggataccctgtcagaggaaagctacaaggactccacgctgattatgcagctgctgcgtgacaacctgacattgtggacatcagatacccagggtgacgaagctgaggctggagaaggcggtgagaactag

SEQ ID NO: 245775 - DNA, 738 bp, synthetic construct
  misc_feature 1..738: note = Description of Artificial Sequence: Synthetic coding sequence
  source 1..738: mol_type = other DNA
atggacaaaaacgaactggtgcagaaggccaagctggcggaacaggctgagaggtacgacgatatggccgcttgtatgaagagtgtaaccgagcagggggctgagctgagcaacgaggagagaaacttactgagcgtcgcctacaagaatgtcgtgggcgctcgtcgcagcagttggcgggtggtgtcctccattgaacagaagactgagggggcagaaaagaagcaacagatggccagggagtacagagagaaaatcgaaacagaattgcgggatatctgcaatgacgtgctctctcttctggagaagttcttaattcctaacgcttcccaggccgagtctaaggtattttaccttaaaatgaaaggtgactactatcgctacctggctgaagtggcagctggagatgataagaagggaatagtcgatcagtctcagcaggcctatcaggaggcctttgaaatcagcaagaaagagatgcagcccactcaccccatccggctggggctggcacttaacttctccgtgttttattacgaaattctgaactctcctgagaaagcttgctcactcgcaaaaacagcattcgatgaggcgatagctgaactggatacgctctccgaggaatcatataaggattccacacttataatgcagttgttgagagacaacctcacattatggacctccgatacccagggggatgaggcggaagccggagagggtggagagaactag

SEQ ID NO: 245776 - DNA, 738 bp, synthetic construct
  misc_feature 1..738: note = Description of Artificial Sequence: Synthetic coding sequence
  source 1..738: mol_type = other DNA
atggacaagaatgaactggtgcagaaggcaaaacttgccgagcaagcagagcgctacgatgacatggcagcctgcatgaagagcgtgaccgagcagggagccgagctcagcaatgaggaaaggaacctgctctctgttgcttacaaaaatgtggttggggctcgacggtcctcttggcgcgtggtctccagcatagaacagaagacagagggggcagaaaagaaacagcagatggcccgagagtaccgcgagaagatcgagacagagcttagagacatttgtaatgacgtcctttccctactggaaaagttcctgattcccaatgcctcccaagccgagagcaaagtgttctacctcaagatgaaaggggactattatagatatttggccgaggtggccgctggcgatgataaaaagggaattgtggaccagtctcaacaggcctaccaggaggccttcgaaatatcgaaaaaagaaatgcagcctacacatccaattagactgggactagccctgaacttttccgtcttctactacgaaatcctgaatagtcccgagaaggcatgttccctcgccaaaaccgctttcgacgaggcaatcgctgagctcgatactctcagcgaagaaagctataaggatagtacactgataatgcaacttctgagagataacctcaccttatggacatccgatactcaaggcgatgaagccgaagctggcgaaggtggagagaactag

SEQ ID NO: 245777 - DNA, 297 bp, synthetic construct
  misc_feature 1..297: note = Description of Artificial Sequence: Synthetic coding sequence
  source 1..297: mol_type = other DNA
atggacaagaatgagctggtccagaaggctaagctcgcggagcaggcagagcggtacgatgatatggccgcatgcatgaagagtgtaaccgagcagggcgcagagctgtccaacgaagaacgaaatctgcttagcgtcgcttacaagaacgtggtcggggctcgcaggtcctcctggcgggtggtctcctcaatcgagcagaaaacagagggagccgaaaagaaacagcagatggccagggagtatcgtgagaagatcgagacagagttacgcgacatttgcaacgatgtgctatag

SEQ ID NO: 245778 - DNA, 738 bp, synthetic construct
  misc_feature 1..738: note = Description of Artificial Sequence: Synthetic coding sequence
  source 1..738: mol_type = other DNA
atggacaaaaatgagctcgtgcaaaaagcaaaacttgccgagcaagctgagcggtatgacgatatggccgcttgtatgaagtccgtcactgagcaaggggcagaactctctaatgaagaacggaacttgctttctgtcgcgtataaaaacgtcgtcggcgctcgccgttccagctggagggtggtgtcaagtatcgagcaaaagacagaaggtgcagagaaaaagcagcagatggccagggaatatagagagaagattgagaccgagctacgggatatttgcaatgacgtgctgtctctcctggagaaattcctgattcccaacgcgagtcaggcagagtcaaaagtgttttacttgaagatgaaaggcgattattaccgctatctcgcagaggtggcggctggggacgacaagaagggaattgtggaccaatctcagcaggcgtatcaagaagctttcgaaatctcaaagaaggagatgcagcccacccatcccataaggttgggcctggctttgaacttctccgtattctactacgagatactaaactcaccggaaaaggcttgctcactggcaaagactgcgtttgacgaagctattgctgagctcgacaccttaagcgaagagtcctataaggactctacccttatcatgcagcttctccgcgataatctgacgctgtggaccagcgacacccaaggcgacgaggcagaagccggtgagggaggcgagaattag

SEQ ID NO: 245779 - DNA, 279 bp, synthetic construct
  misc_feature 1..279: note = Description of Artificial Sequence: Synthetic coding sequence
  source 1..279: mol_type = other DNA
atggacaaaaacgagttggtgcaaaaggcgaagctggcagagcaggcggaacggtatgacgacatggctgcctgtatgaagtccgtgacagagcaaggtgcagagttgagtaatgaagaacgaaatttgttaagcgtggcttacaaaaatgtggtcggcgctcgtcgtagttcctggcgggtggtcagtagcattgagcaaaaaacagaaggagcagaaaagaagcagcagatggctcgggagtatagagaaaaaatagagacggagctacgggactag

SEQ ID NO: 245780 - DNA, 738 bp, synthetic construct
  misc_feature 1..738: note = Description of Artificial Sequence: Synthetic coding sequence
  source 1..738: mol_type = other DNA
atggacaagaatgagctagtgcaaaaggccaaactagccgagcaggccgaaagatatgacgatatggccgcatgtatgaaaagtgtaacagagcagggtgccgaactctcaaatgaagaacgcaatctgctcagtgtcgcttacaagaacgtcgttggggcacgcaggagtagctggagagttgtctcttccatcgagcagaagaccgagggagccgagaagaaacagcagatggccagggagtacagagagaaaattgaaacagagctgcgtgacatctgtaacgatgtcctctccttattggagaaattcctgatcccaaacgccagtcaggccgaatcaaaggttttctacctgaagatgaaaggcgactattacaggtatctagctgaggtggccgcaggggacgataaaaaggggatagtggaccagtctcagcaggcataccaggaggcttttgagatctctaagaaggaaatgcagcccacgcatccaatccgacttgggctggccctgaatttcagtgtgttttactatgagatcctgaactcacctgagaaggcctgtagtctggcaaagaccgccttcgatgaagctatcgctgaactggacacactgagcgaggagtcttacaaagatagcacgttgatcatgcagctccttagagataatctcactttgtggacttctgatacacagggcgacgaggccgaggcaggggagggtggcgagaattag

SEQ ID NO: 245781 - DNA, 507 bp, synthetic construct
  misc_feature 1..507: note = Description of Artificial Sequence: Synthetic coding sequence
  source 1..507: mol_type = other DNA
atggcaagggaatatcgcgaaaaaattgagaccgagctgagggacatttgtaacgacgttctgtctctgctggaaaagttcttgatccctaatgcaagccaggccgaaagcaaagtgttttatctgaagatgaagggcgactattaccgatatctggcagaggtggcagcaggagacgataaaaaaggcattgtggatcagagtcagcaagcctaccaggaagcatttgaaatctctaaaaaagagatgcaaccaactcaccccatccggttaggtttggccctgaacttctcggttttctactacgaaattctgaatagcccagagaaggcttgctccctcgccaaaaccgcatttgatgaagccatcgctgagcttgacacgctgagcgaagagagctacaaagatagtactctgattatgcagttacttcgcgacaatctgacactgtggacatcagatactcagggagacgaagccgaggcaggcgagggaggcgagaactag

SEQ ID NO: 245782 - DNA, 378 bp, synthetic construct
  misc_feature 1..378: note = Description of Artificial Sequence: Synthetic coding sequence
  source 1..378: mol_type = other DNA
atgaagggcgattactatcgctaccttgcagaagtcgctgctggagatgacaagaagggtattgtggaccagtctcagcaggcctaccaggaagcgtttgaaatttctaagaaggaaatgcaacctactcatcctataaggcttggactggcattgaatttttcggtcttctactacgaaatcctcaactccccagagaaggcatgcagcctagccaagaccgctttcgacgaggccatcgctgagctagacacgctgtctgaggaaagctacaaggactccactctcatcatgcaactgctgagggacaaccttaccctatggacatccgacacacagggcgacgaggcggaggctggagagggcggagaaaattag

SEQ ID NO: 245783 - DNA, 414 bp, synthetic construct
  misc_feature 1..414: note = Description of Artificial Sequence: Synthetic coding sequence
  source 1..414: mol_type = other DNA
atggacaagaatgagctggttcagaaagccaaattggctgaacaggccgaacgatacgatgatatggccgcatgcatgaaatccgttacagaacaaggtgcagagctcagcaatgaagagaggaatctgctgagcgttgcatataagaatgtggtgggagcccgacgcagttcatggcgcgtcgtcagcagtatcgaacagaagactgagggagcagagaaaaagcagcagatggcccgagaatatagagagaaaatcgagactgaacttcgcgatatttgcaatgacgtactgtctctcttggagaagtttcttatccccaacgcctcccaagccgagtcaaaggtattctacctgaaaatgaagggagactactaccgctatttggccgaggtcgccgcaggggatgactag

SEQ ID NO: 245784 - DNA, 741 bp, synthetic construct
  misc_feature 1..741: note = Description of Artificial Sequence: Synthetic coding sequence
  source 1..741: mol_type = other DNA
atggacaaaaatgaactggtgcagaaggccaaacttgccgagcaagccgagcgttatgacgacatggcagcgtgcatgaagtctgtgaccgaacaaggagccgaactctcgaacgaggaacgcaatttactctcagtcgcgtataaaaacgtagtgggggcaaggagaagcagttggagagtggtgtccagtattgaacagaaaaccgaaggggctgaaaaaaaacaacagatggcccgagaatatagagagaaaatcgagaccgaactgagggacatttgcaacgacgtcctcagccttttagaaaaattccttattcctaacgcctcccaggctgagtccaaggtgttctacctgaagatgaaaggcgactactatcgctatctggcagaagttgccgcaggagatgacaagaaggtgcggtttggcgtatcctatcctgggatcgtggatcagagccagcaggcctaccaggaggcatttgaaatcagcaagaaagaaatgcagcctacgcatcccatccggctgggcctggctctgaatttcagcgttttctattacgagatccttaactcccccgaaaaagcttgttcattagcaaagacagccttcgacgaggccatcgcggaactggacacactttcggaagaatcatacaaagacagcacgctgataatgcagcttttgagagacaacctcacgctttggacatcagatacacagggcgatgaggccgagtag

SEQ ID NO: 245785 - DNA, 513 bp, synthetic construct
  misc_feature 1..513: note = Description of Artificial Sequence: Synthetic coding sequence
  source 1..513: mol_type = other DNA
atgtctcaaccctgcagaaagttatggcgacacaattacgagacatcctcatgcatcgagtttttgaagagcctcttagagaagttcctcatccccaatgcgagtcaagctgaatctaaggtattctatttgaaaatgaaaggagattactacaggtacctggcagaggtagccgcaggagatgacaagaagggcattgttgatcagtctcagcaggcgtatcaggaggctttcgagataagcaaaaaagagatgcagccgactcacccaatcagactggggcttgcgctaaacttctccgtcttttattacgagatattgaatagtcctgaaaaagcttgctccctggcaaaaactgcttttgacgaagctattgcggaactggacacacttagcgaagaatcgtataaggactctactctcattatgcagttgctgagggataacctgacgctttggaccagcgacactcaaggggacgaggctgaagctggcgagggaggcgaaaactag

SEQ ID NO: 245786 - DNA, 378 bp, synthetic construct
  misc_feature 1..378: note = Description of Artificial Sequence: Synthetic coding sequence
  source 1..378: mol_type = other DNA
atgaagggagattactatcgctatttggcggaagtggcagccggtgatgataaaaaagggatcgtagaccagagtcaacaggcttatcaggaagctttcgagatctccaaaaaagaaatgcagcctacacatcctatccggcttggccttgcccttaatttctctgttttttactacgaaattttgaactccccagagaaggcctgctctttggcgaaaaccgcctttgatgaagcgatagcagagctggacacgctgagcgaggagagctataaagatagcactctcatcatgcaactgctccgagataacctgaccctgtggacctccgacacccagggtgatgaggcggaggccggtgaaggtggagaaaactag

SEQ ID NO: 245787 - DNA, 228 bp, synthetic construct
  misc_feature 1..228: note = Description of Artificial Sequence: Synthetic coding sequence
  source 1..228: mol_type = other DNA
atggataaaaacgaactcgtccaaaaagcaaaattggccgaacaggcggagcggtatgatgatatggctgcttgcatgaaaagtgtcacagaacagggagcagagttgtcaaacgaagagagaaatctgcttagcgtcgcatataagaacgttgtgggagccaggaggtcctcctggagagttgtctcatctattgagcagaagaccgaaggtgctgaaaaaaagtag

SEQ ID NO: 245788 - DNA, 393 bp, synthetic construct
  misc_feature 1..393: note = Description of Artificial Sequence: Synthetic coding sequence
  source 1..393: mol_type = other DNA
gtattctacttgaaaatgaaaggcgactattatagatacctggcagaagtggctgccggagacgataaaaaagggattgtcgatcaaagccagcaagcctaccaggaagcttttgagatttctaagaaggagatgcaaccaacacaccccatcagattgggattggcactgaatttctcggtcttttactacgaaattctcaatagccctgagaaagcgtgttcgctggcaaagactgcattcgatgaggccatcgcagagctcgatacgctgtccgaagagtcttacaaagacagcactctgataatgcaattgcttagagacaacctgacgctttggacttcagatacacagggcgacgaagccgaggcgggtgaggggggagaaaattag

SEQ ID NO: 245789 - DNA, 159 bp, synthetic construct
  misc_feature 1..159: note = Description of Artificial Sequence: Synthetic coding sequence
  source 1..159: mol_type = other DNA
atggataagaatgaattggtccagaaggccaaactggccgaacaggcagaaagatacgacgacatggctgcttgcatgaagagcgtcaccgaacagggtgctgaactgtccaatgaggagagaaaccttctgtcagttgcttacaagaacgtcgtgtag

SEQ ID NO: 245790 - DNA, 1224 bp, synthetic construct
  misc_feature 1..1224: note = Description of Artificial Sequence: Synthetic coding sequence
  source 1..1224: mol_type = other DNA
atgccaacacccgatgccactactccacaagcgaaaggcttcagaagagccgtctccgagctagacgcaaaacaggccgaagctatcatggtgagaggtcagtcgccaaggttcattggacgacggcagagccttatcgaggacgctcgcaaggaaagagaggctgccgtggcggctgcagccgctgccgtcccttccgagccgggtgaccctcttgaggccgtcgcatttgaagagaaggagggcaaggctgtgctcaatctcctgttctcacccagagcgacaaaaccttccgccttgtcacgcgcagtcaaagtttttgaaacatttgaggccaagatccatcatcttgaaactcggccagcccagcgacccagagctggtgggccacacttagagtacttcgtacgcctcgaagtgcgcagaggagatttggccgcattgctttctggagtccgtcaggtgagtgaggatgttcgctctccagcaggtccaaaggtaccctggtttcctcggaaagtctccgaacttgataagtgtcatcatttggtcacgaaatttgaccccgatctggatctggaccaccctggattctccgatcaagtgtaccgccagagacggaagctgattgcagagattgcgttccagtacaggcacggggatcccatcccgagagtcgagtacacggcggaggagatcgccacatgggactgctgtcacgagctgttgggacacgtacctatgctcgcagatcggacatttgcacagttttcccaggacatcggccttgcctctctcggggcatctgatgaggagatagagaaattgtccacattatattggttcaccgtagagtttggactttgcaagcagaacggagaggtcaaggcctacggggcaggcttgcttagcagttatggcgaattgctgcactgcttatctgaggaaccagagatccgtgcgttcgacccggaggcggcagccgtgcaaccttaccaggatcaaacataccaatccgtgtacttcgtgtccgagtcttttagcgacgcaaaggataaactgcggtcatacgccagccgtatacaaaggcccttcagtgtgaagtttgatccatatacgctggccattgatgtgttggattcacctcaggccgtaaggcgttctcttgagggagtgcaagacgagctggacacccttgcccacgcgctgtcggcgattggatag

SEQ ID NO: 245791 - DNA, 1494 bp, synthetic construct
  misc_feature 1..1494: note = Description of Artificial Sequence: Synthetic coding sequence
  source 1..1494: mol_type = other DNA
atgcctacacccgacgcaaccacaccacaagccaagggattccggagggcggtcagtgagctcgacgccaagcaggcagaggccatcatgtccccacggttcattggaaggcgtcaaagtctgatagaagacgctcgaaaggagagagaagccgctgttgcggcagccgctgcagcagttcctagtgaaccaggcgatcccctagaggcagtcgcctttgaggagaaagaaggaaaggcggtccttaacctgctcttttcccccagggcgacgaagcccagtgctctgtctagggcagtaaaggtgtttgagacattcgaggctaaaattcatcaccttgaaaccagaccggctcaaagaccgagggccggagggcctcaccttgaatacttcgttagacttgaggtgcgtcgaggtgatcttgccgctcttctgtctggtgtacgtcaggtatcagaagatgttcgctcgccagctggcccaaaggtcccctggtttccacgaaaggtgagtgagcttgacaaatgtcatcaccttgtgaccaagttcgaccctgatctcgacctggaccacccgggtttcagtgatcaggtgtatagacagcgcaggaagctgatcgctgagatcgcttttcagtacagacacggcgaccccatccctagagtggaatacaccgccgaagagatcgccacatggaaggaggtttacaccactcttaaaggcttatatgccacccacgcctgcggagaacatttggaggcctttgcattgcttgagaggttcagcggctatcgggaagataacattccacaacttgaggatgtctctagattcttgaaggagaggacaggattccagcttcgccctgtggcaggattactttccgctagggattttttagcctccctggccttccgggtgttccaatgcacccagtacatccgccatgcgtcctcaccaatgcactcccccgagcccgattgttgccacgagctactcggacatgtgcctatgctggccgaccgaacgttcgcccagtttagccaggatatcggccttgcttcactgggtgcgagtgacgaggaaatcgaaaagctgagtacactgtattggttcaccgtggaatttggcctgtgcaagcagaacggagaagtgaaagcttatggagccggtctactctccagctatggcgagctccttcactgtttgtcagaagaaccggagattcgcgcttttgaccctgaagctgccgctgttcagccctaccaagaccagacttatcaaagcgtgtatttcgtgtcggaaagcttcagtgacgcaaaggacaagttacgcagttacgcttcccgtattcagcgtcctttctccgttaagtttgacccatacacacttgccatagatgtcctggattctccccaagccgtgaggaggagcctggagggcgtgcaagatgagctagatacgcttgctcacgcgctgagtgcaatcggctag

SEQ ID NO: 245792 - DNA, 1575 bp, synthetic construct
  misc_feature 1..1575: note = Description of Artificial Sequence: Synthetic coding sequence
  source 1..1575: mol_type = other DNA
atgcctacccctgacgccaccactccacaagctaaagggtttcgccgagctgtttcggagctcgatgctaagcaggcagaggccatcatgggcgcacctggcccatcacttaccggtagcccatggccaggcactgctgcccctgctgcatcttacacccctacccctaggtcccccagattcattggcagacggcagagcctaattgaggacgcccgaaaggaacgagaagcagctgtggctgccgcagctgcagccgtgccctctgagcctggtgatccactggaagctgtagccttcgaagagaaagaaggcaaagctgtgctaaatcttttgtttagccctagagctacaaagccctctgcactgagccgagctgtcaaagtgtttgagactttcgaggcaaagattcaccatctagagactagacctgcccaaagacctagggctggcggtccccatctggagtacttcgtccgacttgaagtgcgtaggggcgatttagctgcgctattatcgggcgtgcgccaggtttctgaagatgtcagaagccccgcaggacctaaggtgccgtggttccccagaaaagtgtccgagctagataagtgtcatcacctggtgaccaagtttgatcctgacctggatcttgatcaccctggattctcggaccaggtgtacagacagaggcggaagctgattgccgagatcgccttccaataccgccatggggaccctattccacgcgttgaatacactgctgaggaaatagctacatggaaggaagtatatactacccttaaagggctttacgccacccacgcttgtggcgagcatctggaagcctttgccctgcttgagcgcttcagtggataccgagaggataacattccacagctggaagatgtgtcgcggttccttaaagagaggaccggattccagctccgaccagtcgcaggacttctaagtgctagggactttttggccagtttagcattccgcgttttccagtgcacacagtatatacgccatgccagctctccaatgcactctcctgagcctgactgttgtcacgagctgttgggtcacgtgccaatgcttgctgataggacatttgcccagttctcccaagacatcggtctggcctctctaggggcttccgatgaggaaattgaaaagctctcaacactgtactggtttaccgtggagtttggactttgcaagcaaaacggggaagtaaaggcatatggcgctgggctgttatcctcttacggggaactgttacattgtctttcagaagaacccgagatccgggcatttgaccctgaagccgcagctgtgcaaccttaccaagatcaaacttaccagtctgtgtactttgtgagcgagagcttctctgatgctaaagacaagttgcggtcatatgccagtagaattcagaggcccttttccgtgaaattcgacccgtatacactggctatagacgtgctggactctccgcaagcagtccgcagaagtctcgaaggggtgcaggatgagttagacaccctcgcccatgctctctctgccatcgggtag

SEQ ID NO: 245793 - DNA, 1587 bp, synthetic construct
  misc_feature 1..1587: note = Description of Artificial Sequence: Synthetic coding sequence
  source 1..1587: mol_type = other DNA
atgccaacaccggacgcaacgaccccacaggcgaaaggcttcaggcgtgctgtttcagagctagatgcgaagcaggcagaagcaatcatggtgcgagggcagggagcaccaggtcccagcctcactgggagtccctggccagggaccgccgctcctgcagcgagctacacacccacccctcggagcccaaggtttatcggtcgaaggcaatcacttatagaggacgccagaaaggagagagaagcagcagtcgcagctgctgcagccgctgtgcctagcgagcctggcgaccctctggaggccgtcgcctttgaagagaaggagggaaaagctgtgctgaacttgctcttttcacctcgggcaactaagccttcagctctcagtcgggctgtgaaggtgttcgaaaccttcgaagccaagatacaccatctcgagactcggcctgcacagcgcccacgggcaggagggcctcatctagaatatttcgtccggctagaagttaggcggggagatctggctgccctgctaagtggtgtgagacaggtgtcggaggatgtgagaagccctgcagggcctaaggtgccatggtttccacgcaaggtatcagaactcgataagtgccaccacctcgtgacgaagttcgatccagatttggatttggaccacccgggatttagtgatcaggtctatagacagcggaggaagctgatcgcggagatcgcctttcagtaccggcatggagatccaatccctagagttgagtacacagcagaagaaatcgccacttggaaggaggtgtacacaaccctgaaagggctgtatgcgacccacgcctgtggggagcatctggaagccttcgcactgttggagcgtttctccggataccgagaagataacatcccgcagctggaagatgtgagtaggtttcttaaggaacggacggggttccaacttcgtcccgtagcgggactcctaagcgcccgtgactttttggcgagcttagcttttagagtgttccagtgtacacagtacattaggcacgcctcctcaccaatgcatagccctgaaccggactgttgtcatgagcttctaggtcatgtgcctatgctggccgatcgcacctttgcccagttctcacaagatatcggcctagcgtcgttgggcgctagcgacgaagagattgagaaactctccactctgtactggtttaccgtagaatttgggctgtgtaagcaaaacggagaagtcaaagcatacggggctgggttgttgtctagctacggagagttactgcattgcctgtctgaggagcctgagatcagggctttcgaccccgaggcggcagcagttcaaccataccaggaccagacttatcagagtgtatattttgtctccgagtcttttagcgacgctaaggataagctccgatcttacgcaagcagaatacagaggcccttttctgtgaagttcgacccctatacactcgcaatcgatgtgctggactctccacaggctgtgcgccgtagccttgagggcgtgcaggacgaattggataccctagcacatgccctttcagctattggttag

SEQ ID NO: 245794 - DNA, 3564 bp, synthetic construct
  misc_feature 1..3564: note = Description of Artificial Sequence: Synthetic coding sequence
  source 1..3564: mol_type = other DNA
atgcccctgagacattggggaatggccagagggtcaaaaccagtgggcgatggcgcacagcccatggcagccatgggtggcctcaaggtgctcctgcactgggccggacccggtggcggagaaccgtgggtcaccttctcagaaagttcactgaccgccgaagaggtttgcattcacatcgcacacaaggttggtataacccctccctgtttcaacctgtttgccctgtttgatgcccaagcccaggtgtggcttccccctaaccacatattggaaattccacgggacgcttccctgatgctctacttccggattagattctactttcggaactggcacggaatgaaccctagggagcccgcagtatacaggtgcggcccaccagggaccgaggcgtcctccgaccaaaccgcacaggggatgcagttactggatccagccagctttgagtatctgttcgagcagggaaaacacgagtttgttaacgacgtggcttcactctgggagctctctacggaagaggagattcaccattttaagaatgagagcctgggaatggcatttctgcacttatgtcacttggctctacggcacgggattccattggaggaagtggccaagaagacttcattcaaggactgcatccctcggtccttccggaggcacatcaggcagcacagtgccctgacaagactgagactgcgcaacgtgtttaggcggttccttagggactttcagcccggaaggttaagccagcagatggtgatggtgaaatacctggctactctggagcggttagcccctaggttcggcaccgaaagggtgccggtctgccatctaagacttcttgcccaggcagagggcgagccatgttacattcgggacagtggcgtcgcccctacagaccccggtcccgaatcagcggctggcccacccactcacgaggtactcgtgaccggaaccggtggcatccagtggtggcctgtcgaagaggaagttaacaaggaagaggggtcttcaggatcttctggccgtaacccccaggcttcccttttcggcaagaaagctaaagctcacaaggctgtggggcaacctgccgacagacctcgagaacccctctgggcgtatttctgtgactttagagacatcacacatgtagtgctgaaggagcactgtgtgagcatccaccgacaggataataagtgcttggagctgtcactacccagcagagctgccgctctgtcctttgtctctcttgtggatgggtactttaggctcactgcggatagttcgcattacctgtgccatgaagtcgcgccaccccgactggtgatgtcaataagagacggcatccatggaccattgctagagcctttcgtacaagcaaaattaaggcctgaagacggattgtatctgatccactggtcaactagccacccgtatcggctgattcttactgtggcacaacggtcccaggctcccgacggcatgcaaagcctccgattgaggaaattccccatagagcaacaagacggggcttttgtactggaaggctggggaaggagcttccccagcgtgcgggagctaggcgctgccctgcaggggtgcctgctgagggctggtgacgattgtttttctctgaggaggtgctgtctcccccaacctggcgaaacaagcaacctgataattatgaggggggctcgtgccagcccacgcacattgaacctatcacaactgtcctttcatcgggtggaccaaaaggagattacgcagcttagccacttgggacagggcactaggaccaatgtttatgaaggtaggctccgggtcgaggggtccggagaccctgaagagggcaagatggatgatgaggaccccctggttccagggagagataggggtcaggagctacgcgtcgtgcttaaagtgctggatccttcacaccacgacattgccctcgcattttacgaaacagcttctctcatgagtcaggtgtcccatactcacctagcgttcgtacacggtgtctgtgtcagaggccctgagaacatcatggtcacagagtatgtagagcatggcccactggacgtttggctcagaagggagcggggtcatgtgccgatggcctggaagatggtagtggcccagcagctggcctctgccctgagctatctagaaaataagaatctggtgcatgggaacgtctgtggcaggaatatcctgctcgcgaggctaggcctcgctgaaggaaccagtccatttattaagctctctgatccaggagtgggactcggagctttatctagagaggaaagagtggaacgtataccttggttggcccctgagtgcctgcccggtggcgctaacagcctttccactgcgatggacaagtggggattcggtgccacgctgttagaaatatgttttgatggagaagcaccactgcagagcaggtctcctagcgaaaaagaacatttctatcagcgtcagcatagactgcccgaaccctcctgtccacaattagccaccctcacatcccagtgtctcacatatgaaccaacacagcgtcctagcttcaggactattttacgcgatttgactaggctgcaaccacacaacctggcggatgttttgacagtgaatcccgactcacccgcttctgaccctacagtgttccacaaacgatatctcaaaaagatccgggacctgggcgagggccacttcggaaaggtttctctgtattgttatgacccaacaaacgacggaaccggtgagatggtggccgttaaagctttaaaggcagattgcggaccccaacaccgatctgggtggaaacaggaaatcgatatcttgagaacactgtaccatgagcacatcattaaatataagggatgttgcgaggatcagggagaaaagtcactccagctggtgatggaatatgtgcccttgggatcgctgagggattatcttccgcgacatagcatcggtctggcccagttgctgctcttcgcccaacagatttgcgagggaatggcatatctgcatgcccagcactatattcacagggacctcgctgcgcgaaacgttttgttggataacgataggctagttaagatcggggacttcggcctggccaaggcagttcccgaaggccatgaatattatcgagttagggaggatggggattcaccagtcttctggtacgcccctgagtgcctgaaagagtataaattctactatgcatcagacgtgtggtcatttggggtcacactgtacgaattgcttactcactgcgactccagtcaaagtcctccaactaaatttctggaactcatcggaattgcccagggccagatgaccgtcctcagactcactgaattgctggagaggggggaacgattaccacggccagacaagtgtccgtgtgaggtatatcatctaatgaagaattgctgggagaccgaagcatcgttccgcccaaccttcgaaaacctgatcccaatcctaaagaccgttcatgagaaataccaggggcaggcaccgtctgtatttagcgtgtgttag

SEQ ID NO: 245795 - DNA, 3564 bp, synthetic construct
  misc_feature 1..3564: note = Description of Artificial Sequence: Synthetic coding sequence
  source 1..3564: mol_type = other DNA
atgcctctgcggcattggggcatggcaaggggatcaaaacccgtgggggacggggcacagcctatggcagcaatggggggtcttaaagtcctcctgcattgggcaggccctggagggggagagccatgggtgacattctccgaatctagtctaacagccgaagaggtctgcattcatatagctcataaggttggcataacacccccttgtttcaatctatttgcgttgtttgacgcccaggcccaggtgtggttgccacctaatcacattctcgagattcctcgtgatgctagcctgatgctctatttcaggatcagattttatttccggaattggcacgggatgaacccacgggaacccgctgtgtacaggtgtggccctcctggaactgaagctagctctgaccagaccgcccaggggatgcagctgttagatcccgcatcctttgagtacctttttgaacagggcaagcatgagttcgtaaacgatgttgcttcgctatgggaattgagtaccgaggaggagatacaccatttcaagaacgaatccttagggatggcctttctgcacctctgccatctggcacttagacacggcatacctcttgaggaggtggcaaaaaagactagctttaaggattgtattcctaggtccttccgtcgccacattcgccagcactcagctttgactcgactccggctacggaacgtgtttcggcgatttctccgagactttcagccgggaagactcagccagcagatggtgatggttaagtacctggcgacactggagcgcctggcccctaggtttgggacagaacgcgtccccgtgtgccatctgcgactgctggctcaagcagagggcgagccctgctacatcagggattccggggtggctccaacggatcctggcccagagtccgccgcaggtcctcctactcacgaggtgctggtaaccgggacagggggaatacaatggtggccagttgaggaagaggtgaataaggaggaaggatcatccggcagtagtggaagaaatccccaagctagcctattcggcaagaaggcaaaagcacataaggcagtgggtcagccagcagaccggccacgagagcccctttgggcttacttttgtgatttccgagacatcactcacgttgtgctgaaagaacactgtgtctccattcaccggcaggataataagtgtctcgagctgtcacttcccagcagggcagccgctctgagctttgtatctttggtggatggctatttcaggctgacagccgattcctctcactacctctgccatgaggtcgctcctcccagactggtgatgtctataagggacggtattcacggccctctgctcgaaccatttgtgcaggcaaagctcaggcccgaggacggactgtacttaatacattggagcacctcccatccataccgcctaatccttaccgttgcgcagcggtcccaggcacctgatggaatgcagtctctcagacttagaaaatttcctatagagcaacaagacggcgcattcgtgctcgaaggttggggtcggagcttcccatccgtgcgcgagctgggggcagctttacaggggtgtcttctgcgggctggggacgattgtttctctctcagaaggtgctgcctcccccagccaggtgaaacttccaatcttatcataatgcggggagctcgcgcatcacccagaaccctaaacctatcccagctgagtttccacagagtggaccaaaaggagattactcagttgtcccacctcggccagggcactcggacgaatgtttatgaggggaggctcagagtcgagggtagcggcgacccggaggaaggaaagatggatgacgaagacccgttggtgcccggtagagatagggggcaggagctccgcgtcgttctcaaggtcttggacccctcccaccacgatatcgccttagcattttatgaaaccgcttcacttatgtcccaggtgtcgcatacacaccttgcttttgttcatggggtgtgcgttcgcggtcctgagaatatcatggtgacagaatatgtggagcacggaccgcttgatgtgtggcttagaagagaacggggtcatgttcccatggcctggaaaatggtagtcgctcagcagttagcctcggctctttcctatctcgaaaataagaatctggtccatgggaatgtctgtgggagaaacatcctccttgcaaggctgggactggccgagggcacttcccctttcattaaactgtccgacccaggcgtgggactcggggctctcagtagggaagaacgggtggaacgcattccctggcttgccccagagtgtcttcccggaggcgcaaattccctgtccaccgcgatggataaatgggggttcggcgcaacgctcctcgagatctgcttcgatggcgaggccccactgcagtctagatcccccagcgaaaaggagcacttctatcagcggcaacaccggcttcccgaaccttcctgcccccagctggcaacgctcacttcccagtgccttacctacgagcctacccagcgcccatctttcagaacaattttaagggatctgactcgactgcagcctcataaccttgccgatgtccttactgtaaaccccgatagccctgccagtgatcctacagtttttcacaagaggtacctaaaaaagatccgggatctgggtgagggacactttggcaaagtatccttgtactgctacgatccgactaatgacggtaccggtgaaatggtggcagtcaaggccctaaaggccgattgtggcccacagcatcgctcaggatggaaacaggagatagacatccttcgcacactgtaccacgaacatattataaaatacaagggatgttgtgaagaccagggcgaaaagtcccttcagctagtgatggaatatgtccctcttgggtctcttcgggattacctgcccagacactcaatcggcctggcacagcttcttctttttgcacaacagatttgtgaggggatggcttaccttcacgcacagcactacatacacagagatctcgcagcgcgaaacgtcctcctggacaatgatagactggtgaagatcggagattttggactggcaaaggcggtgcctgagggacatgaatattaccgcgtgagagaggacggggattcacccgtgttctggtatgctccggaatgtctgaaagaatacaagttttactatgcttcagacgtctggtcctttggtgtgacactatacgagctactgacacactgtgactcctctcagtcccctccgacaaagtttctagagctgatagggattgcacagggccagatgactgtcttaagactcactgagttgctggagagaggagagagacttccccgtcccgataaatgtccatgtgaggtgtaccaccttatgaagaattgctgggaaacagaggccagcttcaggcctaccttcgagaacttaatccctattctgaagacagtccacgagaagtaccagggccaggccccatctgttttttctgtctgttag

SEQ ID NO: 245796 - DNA, 357 bp, synthetic construct
  misc_feature 1..357: note = Description of Artificial Sequence: Synthetic coding sequence
  source 1..357: mol_type = other DNA
atgcctctccggcactggggaatggctcggggtagcaagcccgtgggcgacggggctcagccaatggccgcaatgggtggtctgaaggtactgttgcattgggccggacccggtggaggagaaccctgggttaccttttccgagtctagtctgaccgcagaagaggtgtgtattcacatagcacataaggtgggtattacaccaccctgttttaacttgttcgctttgttcgacgcacaggcccaggtgtggttacccccaaatcatattctcgaaattccaagagatgcctccttgatgctatacttcaggattcggttttacttcagaaactggcacgggatgaacccaagatag

SEQ ID NO: 245797 - DNA, 2805 bp, synthetic construct
  misc_feature 1..2805: note = Description of Artificial Sequence: Synthetic coding sequence
  source 1..2805: mol_type = other DNA
atggtgatggttaagtacttggccacgctcgagcgacttgccccacggtttggcacggaacgcgtccccgtctgtcatcttaggctcctggcacaggccgaaggtgaaccctgttacataagagacagtggcgtcgctccaacggatcccggaccggaaagtgccgcaggaccgcctacgcacgaagtcctggtgactggtaccgggggaattcagtggtggcctgtcgaggaagaagtaaacaaagaggaggggtctagcggtagctcaggacggaatccccaggccagtctgtttggtaagaaggccaaagctcataaagcagtgggccaacccgctgaccgcccacgcgagcctctctgggcctatttctgcgacttccgcgatattacacatgtggtgctaaaagaacattgcgtatccatccacaggcaggataacaagtgcctggagctttccttaccatcacgcgcagccgcactgagctttgttagcctggtggatggttacttcaggcttaccgcggattcgtcacattacctgtgccacgaggttgcaccccctcgactcgtaatgtcaatccgagatggcatccacggtccactccttgaaccttttgttcaagccaaactgcggccagaagatggcttgtacctcatccattggtctacatctcacccctacaggctcatactgaccgtggcgcagaggtcacaggcacctgacggaatgcagtccctaagattgaggaaattccccattgaacagcaagatggggcttttgttctggagggctgggggagaagctttccctcagtgagagagcttggtgccgcattacagggatgtttgctgcgggcaggggatgattgcttctctcttagacgctgttgcctgccacagccgggagagacctctaacctgatcatcatgcgcggagctagggccagtccccgtacactgaatctgtctcaactgtcctttcatcgagtggatcaaaaagaaatcacccagctatcccacttgggacagggtacacggactaatgtgtacgagggtcgtctccgagtcgagggaagtggagacccggaagaaggcaagatggacgacgaagacccgctcgtcccgggtagagacagagggcaagaattgagggtggtactgaaggtgcttgaccccagccaccatgatatcgcccttgcgttctatgaaacagcgtccctgatgtcacaggtatcacacacgcacctggcctttgtgcacggggtgtgcgtgagggggccagagaacatcatggttaccgagtacgtcgagcacggacctctagatgtgtggctgcgaagggagaggggacatgtgccaatggcttggaagatggtggtggcgcagcagctggcatccgctctgtcatacttggaaaataagaacctggtgcacgggaatgtctgtggcaggaatatcttactggcccgattagggcttgccgaaggtactagcccattcattaaactctctgatccaggggtgggcctcggagcactgagccgggaggaacgcgtagaacgtattccttggctggccccagagtgcctccccggaggcgcaaactctctgtctactgcaatggataaatggggcttcggagccacactgttggaaatctgttttgatggtgaagcacctctacaaagcagatctcctagcgaaaaggaacacttttatcagagacagcatagactcccagagccatcttgtccgcagcttgccactctgacaagtcagtgtctaacatacgagccgactcagcgcccaagctttcggactattctgcgggacctaacgaggctccagccacacaatctggccgacgtgctgacagtaaaccctgattcacctgcatccgacccaacagtctttcataaaagatatctgaaaaagatcagagatctcggcgaaggacacttcgggaaggtgagtctttactgctacgatccaaccaatgatggaaccggcgagatggtggcagtgaaagcattaaaggccgactgcggcccacagcatcgcagcggttggaagcaggagatcgacatcctgcgcacgctgtaccatgagcacatcattaaatacaaaggctgttgcgaagaccagggcgagaagtcactccagcttgtgatggaatatgtgcccctggggtctctgagagactacctacccagacacagtatcggactggcacagctgctgctattcgcgcagcagatctgcgagggcatggcttacctacacgcacagcactacattcaccgtgacctagcggctaggaacgtattactggacaatgaccggctcgtgaagataggtgacttcgggcttgcgaaagctgtgcccgaggggcacgaatactaccgcgtcagggaagacggcgacagccctgtgttttggtatgcgccagaatgtcttaaggagtacaagttttattatgccagtgacgtctggtcttttggagtaactctctatgaactgctgacacactgcgatagctctcagagccccccaacgaagtttctggaattgataggaatagctcagggtcagatgacagttctgcgactgaccgagctgcttgaaagaggagaacggcttcctaggcccgacaagtgtccctgtgaggtgtaccacctgatgaaaaactgctgggagactgaagcgtccttcaggcctaccttcgaaaacctgatccctatcctcaagaccgtgcacgagaaatatcaaggacaggccccatctgtgtttagcgtgtgttag

SEQ ID NO: 245798 - DNA, 1986 bp, synthetic construct
  misc_feature 1..1986: note = Description of Artificial Sequence: Synthetic coding sequence
  source 1..1986: mol_type = other DNA
atgctccccgaagcaggatctttatggctgcttaagttattaagggacattcagctcgcacagttctactggcccatcttggaagagctgaatgtgacccgtcccgagcattttgattttgtaaaacctgaggatctggacggcatcgggatggggcgaccagcacaaagacgcctctctgaagccctgaaaaggctgagaagtggcccaaagagtaagaattgggtatataagattctgggagggtttgcacctgagcacaaggagccaactctgccttccgacagccctagacacctgccagagccggaggggggactaaaatgtctcatccctgaaggagcagtttgtcgaggggagctgctggggtccggatgttttggtgtggtgcaccgcggactgtggacactacccagtggcaagtccgtccctgtggcagtgaaatctctgcgagtggggccagaggggccaatggggaccgagctgggcgacttccttagggaggtgtccgtgatgatgaacctcgagcacccgcacgttctgcgcctgcatgggctcgtgctcggtcagccactgcagatggtcatggaacttgcacctctgggttccctccacgcgcgtctaacagcaccagctcctaccccccctctgctggtcgcgctcttgtgcttgttcctgagacaactcgccggtgccatggcctacctgggggcaagaggcttggtgcatcgggatcttgctacacggaacctgttgctggcctcgccaaggaccataaaagtggcagacttcggtttggtgagaccgctggggggagctaggggtagatatgttatgggcggtccgaggcccatcccctatgcatggtgcgcacctgagtccctgcgccacggagctttttcatcagccagtgatgtctggatgttcggcgtgactctctgggaaatgttctcaggaggggaggaaccctgggctggggtgcctccatacttgatcttgcagcgtctggaagaccgcgcacgtctgcctcgtcctccactttgctcccgggctctgtactctctggctctgaggtgttgggcaccgcatccggctgaccgtccctcttttagccatctggaagggctcctgcaggaggccggtccttccgaggcgtgctgcgttcgtgatgtgaccgagcctggagcgctgcgcatggagactggcgaccctattacagtaatcgagggaagtcctgacagcaccatctggaagggccagaatggaagaaccttcaaagtaggctcctttcccgcttctgctgtaaccctggctgatgccggaggattaccggctacccgccctgtgcatagaggaaccccagcaagaggcgatcagcacccaggcagtatcgacggggatcgcaagaaagctaatctctgggacgctccgccagcacggggtcagcgtagaaatatgcccctggaacgaatgaaagggatctcgaggagcctggaatcggtgttaagtcttggacctcgaccgacagggggaggttcgtccccacctgaaatccgccaagcgagggcggttccgcagggaccaccgggactccctccaaggccccctctgtctagctcctccccgcaaccatcacagccctcaagagaaaggctgccttggcccaaacggaagccaccccacaatcaccccatgggcatgcctggtgcaagaaaggccgctgccctgagtgggggtctcctgtccgatccagagctacagaggaagatcatggaggtagagctttctgtgcatggcgttactcatcaggagtgtcagactgctctgggtgcaactggaggagacgtggtgtccgcgattcggaatctgaaagtggatcaactcttccaccttagtagtcggtccagggccgattgttggagaatcctggagcattaccagtgggacctgtccgccgcttctaggtacgtgctcgctcgcccttag

SEQ ID NO: 245799 - DNA, 1986 bp, synthetic construct
  misc_feature 1..1986: note = Description of Artificial Sequence: Synthetic coding sequence
  source 1..1986: mol_type = other DNA
atgctgccggaagcgggatccctgtggctgctcaagttgttgcgggatatccagcttgcacagttttactggccgatcctggaggaattgaatgtgacccggccagagcacttcgattttgtcaagcccgaggacctcgatgggattgggatgggcagacctgctcagcggcgactttctgaagccctcaagcgccttcggtctggtccaaagtccaagaattgggtatacaagatcctgggcggattcgccccagagcataaagagcctaccctccccagcgatagcccgaggcacctacccgagcctgaaggcggtttgaagtgccttattcccgagggggctgtgtgtaggggggagctcctcggttctggatgctttggagttgtccaccgtggactttggactttgccctctgggaagtctgtgcctgtggctgttaagtcgctgagagtggggcctgagggccctatggggacagaactgggggatttcctgagggaagtgtctgtaatgatgaacctggagcatccacacgtcctgagacttcacggtctggttctggggcaacctctacagatggtcatggagcttgctcccttggggtccttacacgctcggcttaccgccccagccccaacccccccactgctggtggcgctgctgtgcctgttcttaagacagttagcgggtgccatggcttacctcggcgcaaggggcctcgtgcaccgtgatctggccactaggaatctactactggcctcacctcgcaccataaaagtcgcagacttcggccttgtccggccactgggtggagcgagaggccgatacgtgatggggggacccaggccaattccatacgcttggtgtgcaccagagtcactgagacatggcgctttttccagcgcttctgacgtgtggatgtttggtgtcacgctgtgggagatgttcagtgggggtgaagagccttgggctggagtgcctccatacctgatccttcagaggcttgaagacagggctagattaccacgtccaccgctctgtagccgcgcactgtattccttagctctgagatgttgggcccctcaccccgcagaccgccctagcttctcccacctggagggcctcttacaggaggcagggccatctgaggcctgctgtgtgcgagatgtgactgaaccaggcgcactgaggatggagaccggggaccctattacagtgattgaaggctccccagattccacgatttggaaggggcagaacggtagaacatttaaggttggttcttttccagccagtgccgtgacgcttgcagatgccggaggcttgcccgcaaccagacccgtgcaccgcggtaccccggctcgcggtgaccagcacccaggcagcatcgacggcgacaggaaaaaagccaacttgtgggatgccccacccgctcgtgggcaaaggcgcaacatgccactggagcgaatgaagggaatatcacgatccctggaaagcgtgctgtcgctgggccctcgtcctacggggggtggctcaagtccaccagaaattcgacaggcacgggctgtgccccagggtcctccagggctaccaccccgtcctccacttagcagctcatctcctcagccgagccagccaagtcgcgagcgcctcccctggcccaaaagaaagccacctcacaaccacccaatgggcatgccaggggctagaaaggctgccgcacttagtggcggtcttttatcagatcctgaacttcagagaaaaattatggaggtagagctgtccgtccacggcgttacacatcaggagtgtcagaccgcactcggtgccacgggaggcgacgtagtgtccgccattcgcaacctgaaagtggatcagctgttccatctgtctagtcgctctcgtgccgactgctggcgaattctggagcactaccagtgggacctgtcagcagcctcccgatatgttctggcgagaccctag

SEQ ID NO: 245800 - DNA, 1587 bp, synthetic construct
  misc_feature 1..1587: note = Description of Artificial Sequence: Synthetic coding sequence
  source 1..1587: mol_type = other DNA
atgcagcccgaggaaggaactggatggctgttagaactcctcagcgaggtccaactgcagcaatactttctgaggctgagggacgatctcaacgtgacgcgtctctctcatttcgaatatgtcaagaacgaggatctcgagaagatcggtatgggcaggccaggccagcgtcgactttgggaagctgtaaaaagacgaaaggccctgtgtaaacgaaagtcctggatgtccaaggttttttccgggaaacggctggaagcagaatttccccctcaccactcacagtctacattccgaaaaaccagccccgctcctggcggaccagctggcgagggacccctgcagtccctcacatgtctgattggggagaaggatctgcgactgctagagaagctgggagacggaagcttcggggtcgtccgtcgaggagagtgggatgctccaagcggcaaaactgttagtgtcgcggtgaaatgcctcaagccagatgtgctgtcccaacctgaagcaatggacgacttcattcgagaggttaatgcaatgcactctctcgaccaccggaatcttattagattatatggggttgtcctaaccccaccaatgaaaatggtaaccgaattggcacctttgggtagcctgctcgaccggctgcggaagcaccaaggacatttcctattaggaactttatctaggtatgccgtgcaggtggccgaaggcatggggtacctcgaaagcaaaagattcatccatagggacttggccgcaaggaatctgttattggcaactcgggacctcgttaagattggagacttcggcctcatgcgggcactgcctcagaacgatgaccactacgtcatgcaagagcaccgcaaggtgccttttgcctggtgtgctcctgagtcactcaagacaaggaccttttcacatgcttctgacacttggatgttcggagtaaccttgtgggaaatgttcacctatggccaggaaccatggattggtttgaatggcagccagattctgcacaaaattgacaaggaaggcgaaaggctgcctcgccctgaagactgtccccaggacatatataatgtcatggtgcaatgttgggcgcacaaacccgaagatagaccaacgttcgtggctttacgtgatttcctcctagaggcccagccgactgatatgagggctttgcaggacttcgaggaacccgacaagttgcacattcaaatgaatgacgtgattactgtgatcgaaggacgggctgaaaactattggtggcgaggtcagaacactcgcactctgtgcgtgggcccatttccgaggaacgtggtaacgagcgtggccggactgtccgctcaggacatcagccaacccctgcaaaattcctttatccataccgggcacggagactccgatccacggcattgctggggctttccagacagaattgacgaatgccctttttctgccttttctcctggacatccccctgccgaaacctgcggccaagtcctgtggaccggacgcagagaggcttgcgcctctgaccccaggttgcatcccgtgagtagtaggacgaagggcctctag

SEQ ID NO: 245801 - DNA, 3117 bp, synthetic construct
  misc_feature 1..3117: note = Description of Artificial Sequence: Synthetic coding sequence
  source 1..3117: mol_type = other DNA
atgcaacccgaagagggaacaggctggctcctggagctgctgtctgaagtgcagttgcagcagtactttctgaggcttcgtgatgacctgaacgtcacccgtctctcgcatttcgagtacgttaagaatgaggatcttgaaaagataggcatgggtagacccggacaacggaggttgtgggaggcagtcaaaaggcgaaaagcactttgtaaacgcaaatcctggatgagcaaggtgttctcaggcaaacgattggaggccgaattcccccctcatcattcccaaagcacattcagaaagaccagtcccgcacctggaggacccgcaggcgaagggcctttgcagagtctgacatgcctgatcggagaaaaagacctacgcctgcttgaaaaattaggggatggaagcttcggagtggtccgacgcggtgagtgggacgctccctctggcaagacagtcagcgtagcggtcaagtgcctgaagccagacgtgctaagccagcctgaggccatggacgacttcatcagggaggtaaacgctatgcattcactggatcatcggaacctcatacgcctatacggagtcgtacttactccaccaatgaaaatggtgacggagcttgcaccactggggtctctgctcgaccgcttgagaaaacaccaggggcacttcttattgggaactcttagccggtacgccgtgcaggtggcagaagggatgggatacttggagtcaaaacgatttattcaccgagatctggccgcacggaatcttctcctggcgactagagaccttgtaaaaattggcgatttcgggctcatgagggctctcccacagaacgacgaccattacgtcatgcaagaacatcggaaagttccttttgcttggtgtgcacccgagagcctcaagacccgtactttctcccacgccagcgatacctggatgtttggagtcaccctgtgggaaatgttcacctatggtcaggaaccttggataggcttgaatggatcccagattctccacaagatcgataaagagggggagaggctgcctcggcctgaagattgcccacaagatatctacaacgtcatggtccagtgctgggcccataaaccggaagatagaccaacgtttgtggcactccgcgattttttgctggaggctcagccaacagacatgagagctctccaagactttgaggagcccgacaagctacatatacagatgaatgacgttattacagttatcgagggccgagcagaaaattattggtggaggggccagaacactcgaacattgtgtgtgggccctttccctcgtaatgttgtaaccagcgttgccggactgagcgcccaggacattagtcagcccttacagaacagttttatacacaccggccacggagattccgatccacggcattgttggggatttcctgaccgcattgatgagttgtatctgggcaacccaatggacccaccggatctgctgtctgtggaactgagcaccagcagaccccctcagcacctagggggtgttaagaagcccacttacgacccagtgagcgaagaccaagaccctttgtcctccgacttcaaacgactaggtctgcgcaaaccagggctacctcggggtctgtggctggccaaaccctccgcccgtgtccccggaactaaagcatcaaggggcagcggtgcagaagttaccttgatcgactttggggaagaacccgtggtgccagccctgaggccatgcgcaccttcactcgcacagctcgctatggatgcctgtagcctgctggacgaaacaccgccacaaagtcccaccagagctctccccagaccactccatcctaccccagtggttgattgggatgcgcgacctctgcctccccctccggcatatgacgacgtggcccaggacgaagatgactttgagatatgtagtattaattccactttagtcggggcaggcgtgccagcagggccaagtcaaggccaaacaaattacgcctttgttccagagcaggcacggcctccaccgccacttgaggataacctgtttctcccaccccagggtggtggtaaaccacccagttcagcccagaccgctgagatttttcaagcgttacaacaggagtgtatgcgtcagctacaagcgcctgcgggtagccctgcccctagcccttcacccggaggggatgataagccccaggttcctcccagagtgcctattccccctcgcccaactcgccctcacgtgcagcttagtcccgctcctccaggggaagaagagacttcgcagtggccagggcctgcttctcctccgcgagttccaccacgagaaccgctgagcccgcagggcagtagaacaccatctccccttgtgccacccggatcctctccacttcctccccgactgtctagctcacctggtaagacgatgcccactacacaaagcttcgcttcagaccctaaatatgctacgcctcaagtaatccaggcaccaggtcctcgggcaggcccttgcatcctcccgattgtgagggacggcaaaaaagtgtccagcacacattactacttgttgccagaaaggccaagctatctagaacgctatcagaggttccttcgggaggctcagagtccagaagagcccaccccactccccgtcccattacttctgcctccccctagcacacccgcacctgccgctccgactgccaccgtaaggcccatgccacaagctgcgctggatccgaaggctaacttttcaaccaacaactccaatccaggagcaagaccccctccacccagggcaaccgcaaggctgccgcagcgcggatgtcctggggatggcccagaggcaggcaggcccgcagataaaattcagatggccatggtccatggcgtcaccaccgaggagtgccaggctgccctgcagtgtcacggctggagtgttcaaagggccgctcagtatttgaaggtcgaacagcttttcggcctggggttaaggcctaggggagagtgccacaaagtgctggagatgttcgattggaatctggagcaggcgggttgccacctgctgggaagctggggcccagcccatcacaaacgctag

SEQ ID NO: 245802 - DNA, 3261 bp, synthetic construct
  misc_feature 1..3261: note = Description of Artificial Sequence: Synthetic coding sequence
  source 1..3261: mol_type = other DNA
atgctagaggctaggcctccacggactcaaggaagtgacgccgctggagctgcagctggccgtgggctacgagccctgcttctcagtcttaccgccgcagccggtatctggggtagtatgggagagcggagcgcctaccagcgcctggcgggaggagaggaaggacctcagagattgggcggagggagaatgcagcctgaggagggtacaggctggctgctagaacttttgtctgaagtgcagcttcagcagtattttctgcgattgcgcgacgacttaaacgtgactcggctgtctcattttgagtacgtgaaaaatgaggacctggaaaaaatcggaatggggaggcctggacagaggcgcctttgggaggcagtaaagcgcagaaaagccctctgcaagcggaaatcctggatgagcaaggtgttctcgggaaagcggttagaggccgaattccctccccaccacagtcaatctaccttcaggaagacttctcccgctcccggagggcctgcaggcgaaggtccactgcagagcctaacgtgcctgatcggtgaaaaggacctgcgcctgcttgaaaaactcggcgatggatcctttggcgtggtgaggaggggagagtgggacgcgccatctggtaaaactgtgagtgtcgccgtgaagtgtttaaagcctgacgtcctgtcccagcctgaggccatggacgacttcattcgtgaggtgaacgcaatgcattctctggatcacaggaacctgatccgcctatacggtgtggtactgaccccacctatgaagatggtcactgaactcgcccctctgggttcgcttctggaccgactgcgcaagcatcagggacattttctgcttggaaccctgtccagatacgcggtgcaggtggcggagggtatggggtacctcgaaagtaaacgctttattcatagggatctggccgcaagaaacttgctcctcgccacccgggatctcgtaaagataggagacttcgggcttatgcgcgctctcccacaaaacgatgaccactatgtgatgcaggagcacagaaaggtgcccttcgcttggtgtgccccagagagcctcaagacaagaacgttctcacatgcctcggatacctggatgtttggcgttactctgtgggaaatgttcacctatgggcaagagccatggataggcctcaatgggtctcagatcctccacaagatcgataaagaaggcgagagactgccccgtcctgaagactgcccgcaggatatttacaacgtgatggtacagtgttgggcccataagcctgaagatcgccctacatttgttgcactgagagatttcctgctggaggcgcaacccacagatatgcgagccctgcaggactttgaggaacctgacaaactgcatatccagatgaatgacgttattactgtaattgagggcagggccgaaaactattggtggcggggtcagaatacccgcacgctgtgtgtggggccttttcctcggaatgtggtgacgtccgtggcaggcctcagcgcccaggacatctcacagccactgcagaatagctttatccatacggggcatggagattccgatcctcggcattgttggggcttccctgacagaatcgacgagctgtatctgggtaatccaatggatcctccagacttgctgtcagtcgagctttctacaagcagaccccctcagcatctaggcggagttaagcgcgagccgcctcctcgaccgcctcagcctgccttctttactcagaagcctacttacgatcctgtctccgaggatcaagatcctttgagttccgattttaagagactgggcctccgcaagcctggactccctagaggcctgtggctggcaaagccatccgctagagtgccaggcacaaaggcatctcgtggatctggggcagaggtaactctgatagacttcggcgaggagccggttgtaccagccctcagaccttgtgccccatcccttgcacagctcgctatggacgcctgttccctactagacgagactcctcctcagagtccaacacgcgcattgcctaggccactgcacccgactcccgtagtggactgggatgcaaggcctctgccccctccacctgcatacgacgacgttgcccaggacgaggatgatttcgaaatctgcagcatcaattctacactcgtaggggctggtgtgccggcagggccaagccaggggcaaaccaattacgccttcgtacccgaacaggcccgtcctccacctccactggaggataatctcttccttccgccacagggagggggtaaaccgcctagctccgcccagactgcagagattttccaagccctgcagcaggagtgcatgagacagctgcaggcaccggcaggtagccccgcaccatctccctcccctggcggtgatgataagccccaagtgcccccacgcgtccctattcccccaaggcctactcggcctcatgttcaattatctcccgcaccacccggtgaagaggaaacctcacaatggcctggtccagcctctcccccaagagtgcctcccagagagcctctatcaccccagggatctcggacacccagccctctagtgcctcctgggagttctcctctaccaccccgactgagcagcagtcctggaaagacaatgccaacaacacagagcttcgcctccgaccctaagtacgccacccctcaggtcattcaagcacctggtccaagagcagggccttgtattctgcctatcgtgagggatgggaaaaaagtttcctctacccattattacctcctgcccgagcgtcctagctacctggagaggtaccagaggttcctaagggaagcccagtctcctgaggaacctacaccgctccccgtgcctctattgttgcctcccccttctacacccgctccagccgcacccaccgctaccgtcagacccatgcctcaggcagctctggatccaaaggccaacttctccactaacaacagcaatcccggagctaggcctccaccccctcgtgcaaccgcccgtctcccgcaacgcggatgtccaggcgatggtcctgaggccggacggccagccgataagatccagatggtcgaacaattgttcgggctgggactgcgtccacggggagaatgtcataaggtactagaaatgttcgattggaaccttgaacaggccggttgtcatctgctggggagctgggggccagcccaccacaagcggtag

SEQ ID NO: 245803 - DNA, 3117 bp, synthetic construct
  misc_feature 1..3117: note = Description of Artificial Sequence: Synthetic coding sequence
  source 1..3117: mol_type = other DNA
atgcagcctgaagaaggtactggctggctacttgaactcctgtctgaggttcagctccagcaatacttcctcagactgagggatgacttaaatgtgacgcgattgtctcacttcgagtacgtgaaaaacgaagacctggagaagattgggatggggcgtcccggacagaggcgtctgtgggaggccgttaaaaggcgaaaggccctgtgtaaacgcaagagttggatgtcaaaggtgttcagtggaaagagacttgaagccgagtttcctccccaccatagccagtccacctttcgcaagacctcacctgcaccaggcggtccagccggagaggggccactccagtcactgacgtgcctgatcggtgagaaagaccttcgcctgttagagaagttgggggacgggagtttcggagtcgtaaggcgcggtgaatgggatgccccaagcgggaaaacagtctcagtggctgtcaagtgcctcaagcctgacgtccttagccagccggaggcaatggatgacttcatccgtgaggtgaacgctatgcacagcctggatcatagaaacctaatccggctgtacggggtggtgctgactcctcccatgaagatggtgacggagctggctccattagggagccttctggatagactgcgtaagcaccaggggcactttctcctcggcactctctctagatacgctgtgcaggtggctgaaggcatgggctacctggaatccaaacgatttattcatcgcgacctcgcagccagaaatctgcttcttgccacccgtgacttagtgaagataggggactttgggttgatgcgcgctctcccccagaatgatgaccactacgtgatgcaggaacatcgcaaagtgcccttcgcgtggtgtgcccctgaatctctgaaaacccggacatttagtcacgctagcgacacctggatgtttggagtaacactttgggaaatgtttacctacggtcaagagccatggattgggctgaatggctctcagatcctgcacaagattgataaggaaggggagcgactgccaagacccgaggactgtcctcaggacatatacaacgtgatggttcaatgttgggctcacaagcctgaggatagacctactttcgtcgccctccgggacttcctgctggaagcccagccgaccgatatgagagcattacaggactttgaggagccagacaaactgcatatacagatgaacgacgtgataactgtcattgaaggccgtgcggaaaattactggtggcgcggacagaatacccgcaccctctgtgtaggaccctttccaagaaacgtggtgaccagtgtcgcagggcttagcgcccaggacatctcacagcccctccagaactcttttattcatactggccacggtgatagcgaccccagacattgttggggatttcccgaccgcatcgatgagctgtacctcgggaaccctatggatccccctgacctgctttctgtagaactgtctacatcccgccctccccaacacctaggtggggtaaagaagccgacctacgaccctgtgtcagaagatcaggatcccttatccagcgatttcaagagactgggcctccgtaagcccggactgccacggggactgtggttggccaagccctccgcccgagtacccggtaccaaggctagccgaggaagtggtgcagaggttacactgatcgacttcggggaagaacccgttgtccccgcattacgcccatgtgcgccaagtcttgcccaacttgctatggatgcctgctccttattggacgagacaccaccacagagccctacacgggcacttcccagaccattacaccctaccccggtagtggattgggatgccagaccactcccccctccgccagcatatgacgacgtggcccaggatgaggatgattttgaaatttgctcgatcaattccacgctcgtgggggctggagtgccagccggaccttctcaaggccagaccaactatgcgtttgtgcctgagcaggccagacctccaccaccactggaagataacctgtttctcccacctcaagggggtggtaagccaccttcttcagcacagacagccgagatcttccaagcattgcaacaagagtgtatgcggcagttgcaggctccagccggtagtccagcaccctctccttcccccggaggagatgataaaccccaggtcccgccacgcgtccctattcctccgcgaccaacacggcctcatgttcagctatcccctgcacccccaggcgaggaggagaccagccaatggcccggacccgcaagccccccaagagtgccacctcgcgaaccactcagcccccagggaagcagaactcctagtcctttagtccccccagggagtagccctctgcctcctaggctcagctcttctcccggaaagactatgcctaccacacagtcctttgctagcgaccctaaatacgccacacctcaggttatccaggcgcctgggccacgagcgggaccctgcattctgcctattgtacgcgatggtaaaaaagtctcctctacgcattactacttgcttcctgaaaggcctagttacctcgagcgctaccaaaggttcctcagggaggctcagtctccggaagagccaacacctctgccagtcccgctgcttctgcccccacccagtacgcccgctcctgcggctcctaccgcaacagtccgtccaatgccacaagcagccttggaccctaaagccaacttcagcaccaataactccaatccaggggctcgcccacccccaccaagggccaccgccagattaccgcaaagggggtgtcccggagacgggcctgaggccggaaggccagccgacaagatacaaatggccatggtccacggggtgaccacagaagaatgtcaggcagcccttcagtgccatggctggtcagttcagcgcgcagcccagtacttgaaagtggagcaactctttggattaggacttcggccacgaggggaatgccataaggtcctggaaatgttcgactggaatctggagcaggctgggtgccacttgctggggagttgggggcctgcacaccataagcggtag

SEQ ID NO: 245804 - DNA, 294 bp, synthetic construct
  misc_feature 1..294: note = Description of Artificial Sequence: Synthetic coding sequence
  source 1..294: mol_type = other DNA
atgcagcccgaagagggcactggatggttactggagctcctgtctgaagtgcaactgcaacagtactttctgaggctccgggacgatcttaacgttacaagactatctcattttgagtatgtgaaaaatgaggacctggagaaaattgggatgggtagacctggacagaggcgcctgtgggaagccgtcaagaggcggaaagctctgtgcaagaggaagagctggatgtcaaaagtattttccggaaagaggttggaggcggagtttccacctcatcattctcaatctacctag

SEQ ID NO: 245805 - DNA, 1827 bp, synthetic construct
  misc_feature 1..1827: note = Description of Artificial Sequence: Synthetic coding sequence
  source 1..1827: mol_type = other DNA
atgagccaggaaggtgattatgggaggtggaccatctcatcatctgacgagagtgaagaggagaaacctaagccggataagccttcaacatcatcactattgtgtgctcggcagggcgctgccaatgaacctcggtatacttgctccgaggctcagaaagcggctcacaaacgcaaaatcagtccagtcaagttctcaaataccgactctgttctgccaccgaaaagacagaaatctggttcccaggaagatctggggtggtgtctgtccagctccgatgacgaacttcaacccgaaatgccccagaagcaggcggaaaaggtagttatcaaaaaggagaaagacatttcagctccaaacgatggtaccgcacagaggactgaaaatcatggagcccctgcttgccacagacttaaggaggaagaggatgaatacgagacctctggcgaaggtcaggacatctgggatatgctcgacaaaggcaaccctttccagttctatcttacccgggttagtggggttaaacccaaatataattcaggagcactgcacattaaggacattcttagcccactgttcgggaccctcgttagtagtgcccagttcaactattgttttgacgtggactggctggtgaaacagtatccccctgagtttagaaaaaaacctatcctgctggtgcacggcgataaaagggaagccaaagctcacctgcatgcacaggccaagccgtatgagaatatttcgctatgtcaagccaagcttgacattgcttttgggactcaccacaccaaaatgatgctgttgttatatgaagaaggcctacgggtggtaatccacactagcaatctaatccatgccgactggcaccaaaaaacccaggggatctggctgtcccccctttacccacgtattgccgacggtacacacaaatcaggggaatctcccacgcacttcaaggcagacctcatcagctacctgatggcttataacgctccgagcctgaaagagtggatcgatgtgattcacaagcacgacctgagcgaaaccaacgtatacctgatcggatccaccccagggagattccagggatctcagaaagataactggggacatttccggctgaagaagctgctgaaggatcacgctagttcgatgcccaatgccgaatcttggcccgtggtgggccagttttccagtgtaggctctctcggggcagatgaatccaagtggttgtgcagcgagttcaaggagagtatgctgactctggggaaagagtcaaagacacccggaaagtcttcagttccactgtatctcatataccctagtgtagaaaacgtgcggacatctctcgaggggtatccagccggaggttcgctgccatattccattcagacagccgaaaaacagaactggctacacagctatttccacaagtggtcggcggagacttccggaagatctaacgccatgcctcatatcaagacgtacatgcgcccttctccagatttttcaaaaatcgcgtggttccttgtgacatcagctaacctgagcaaagcggcatggggagcattagagaagaatggcacacagcttatgatccggtcatatgagctaggggtgctttttctcccatcggcatttggcctcgactcgtttaaagttaaacagaagttttttgccggatcccaggagcctatggccacattccctgtcccgtatgatttaccccctgaactgtatgggtccaaagatagaccatggatctggaatataccatacgtgaaggctcctgacacccacggtaacatgtgggtgccctcatag

SEQ ID NO: 245806 - DNA, 1110 bp, synthetic construct
  misc_feature 1..1110: note = Description of Artificial Sequence: Synthetic coding sequence
  source 1..1110: mol_type = other DNA
atggtgatctctgagcggcttcggctaactagtatgccacgcccatcattaactcgcacttctctctcagcgagaaaaatgatgcttctcctgtacgaagagggccttcgcgtggtgatccatacttcaaacctgatacacgccgactggcatcagaaaacgcaaggcatttggctgtcgcccttgtaccccaggattgcagatggcacccacaagtcaggggagtcccctacccattttaaagcagacttgattagttatctgatggcctacaacgcgccatcccttaaggagtggattgacgtgattcacaagcacgatctgtccgagacgaatgtgtatcttattgggtctacaccgggtaggttccagggaagccaaaaagataattgggggcacttccgcttgaagaagctcctgaaagaccacgcctcttccatgcctaatgctgaatcttggcccgtcgtcggacagtttagttccgtcggatcactcggtgcggacgagtccaaatggttatgctcagagtttaaagaatctatgctcacgctgggcaaggagtccaaaacccctggcaaatcgtctgtgcctctgtacttgatttatcccagcgtggagaacgtgagaacctccctggaagggtaccctgcgggtggtagcctcccctattccatccaaacagccgaaaaacagaactggctgcattcgtatttccataagtggagcgcagagaccagcgggaggtctaatgctatgccacatatcaagacctatatgaggccaagtcccgatttttccaagatcgcctggttcttagttacgtccgcaaatttatctaaagccgcttggggggctctggagaagaacggcactcagttgatgatccgaagctatgaacttggggttctgtttcttcccagcgcattcggactcgatagtttcaaagtgaagcagaagttcttcgccggttcgcaagaaccaatggccaccttcccagttccctacgacttgcctccagagctttatgggtccaaggaccggccatggatatggaacatcccatatgtaaaagccccagacactcatggtaatatgtgggtcccttcatag

SEQ ID NO: 245807 - DNA, 1827 bp, synthetic construct
  misc_feature 1..1827: note = Description of Artificial Sequence: Synthetic coding sequence
  source 1..1827: mol_type = other DNA
atgagccaggagggcgactatgggaggtggaccattagctctagtgacgagtctgaagaggagaaacccaaaccagataaaccctcaacctcgtccctgctatgtgctcggcagggcgcagctaatgaaccacggtatacctgctcagaagcacaaaaggccgctcacaagaggaaaatctctcctgtgaagttttctaacaccgatagcgttctaccccctaagaggcagaagagtggttcccaggaggacctgggatggtgcctttcttccagtgacgatgaactgcagccagagatgccccagaaacaggcagaaaaagttgtgatcaaaaaagagaaagatatctctgcccctaatgatggtaccgcccagcgcaccgaaaatcacggcgcacccgcatgccatcggctcaaagaagaagaagacgagtatgagacctcaggagagggtcaggatatctgggatatgctggacaagggtaaccccttccagttctatctgacgcgcgtaagcggcgtcaagccaaagtacaatagcggcgctctgcacattaaagacatcctgtccccactgttcgggacgttagtgagttctgcgcagttcaactactgctttgacgtggactggctcgtcaaacaatacccaccggagtttcggaagaaacccattctcctagtgcacggtgacaagcgcgaagctaaggcccacctgcacgcccaggcgaagccgtacgagaacattagcctctgtcaggctaaactcgacattgcattcggtacacaccatacaaagatgatgctgctcctgtacgaggaaggacttcgcgtggtgattcacacttcaaatctgatccatgctgactggcaccaaaagacccaggggatctggctatctccactataccccagaattgccgatggaacacacaaatcaggcgagtcccccactcacttcaaagccgacctcatctcttacctcatggcatacaacgctccctccctgaaggaatggatcgatgtgatccataagcacgacctctccgaaacaaacgtgtacttaataggatctacccccggaagattccaggggtcccagaaggataactggggtcacttcagattaaagaaactgctgaaagaccacgcgtcatctatgccaaatgctgagtcttggcccgtggtgggacagttcagtagcgtggggtctttaggggcagatgagagtaaatggctgtgttccgagttcaaggaaagcatgctcacactcggcaaagaatcaaaaactccaggaaaatctagcgtcccgctctatctgatttaccccagtgtggaaaacgttagaactagcctggaggggtatcctgctggagggtctctcccctactccatacagaccgcagagaaacagaactggctccactcctactttcacaagtggtcagccgaaacatcaggtcgttccaatgccatgccgcatatcaaaacgtatatgagaccttctcccgacttttccaagatcgcctggtttctggtgacctcagctaacctgtcaaaggctgcatggggggctttagaaaagaacggcactcagctgatgatacggtcctatgagctcggagtgctattcctcccttccgcgttcgggctggatagcttcaaggtcaagcagaagttcttcgctggaagccaggaaccaatggcaactttccctgtgccctacgacctgccgccagagttgtatggcagcaaggacagaccctggatatggaacatcccttatgtgaaagcacccgatacacatggcaatatgtgggtgccgtcctag

SEQ ID NO: 245808 - DNA, 897 bp, synthetic construct
  misc_feature 1..897: note = Description of Artificial Sequence: Synthetic coding sequence
  source 1..897: mol_type = other DNA
atgtctcaggagggggattacggtcgctggactatcagctccagtgacgaatccgaagaagagaagcccaaaccagataagccgagtacatcgtcactgctgtgcgccagacagggcgctgccaacgagcccagatatacatgtagtgaagcacagaaagctgcccataaaagaaagatcagccctgttaagttttctaacacagatagtgtgcttccaccaaagagacagaagtctgggtcccaggaagaccttggctggtgcctctcctcctcagacgatgaattgcagccagagatgcctcagaagcaagctgagaaggtggttatcaagaaggagaaagacatctccgcccctaacgatggaacagcccaaagaactgaaaatcacggagcgcctgcatgccacaggttgaaagaagaagaggatgagtacgaaactagtggcgaaggacaggatatctgggacatgctcgataagggtaacccctttcagttctacctgacccgggtttcaggggtcaagccaaaatacaatagcggcgctctgcatatcaaggatatccttagcccactctttggtacactagtatccagcgctcagttcaattactgtttcgacgtagactggttggtaaaacagtacccccctgagtttaggaagaagccaatcctcctcgtccacggagataagcgagaggcgaaagctcacctgcatgcccaggcaaaaccctacgagaatatcagtctgtgccaagcgaaattggatatcgcgtttggtactcaccatactaagatgatgctgcttctgtacgaagagggattgcgggtggtgatccacacgtctaatttaatacacgcagactggcaccagaagacacagggcactcacctctag

SEQ ID NO: 245809 - DNA, 441 bp, synthetic construct
  misc_feature 1..441: note = Description of Artificial Sequence: Synthetic coding sequence
  source 1..441: mol_type = other DNA
atgagccaggagggcgattacgggagatggactatctccagtagcgacgaatctgaagaggagaaaccgaaaccagacaaacccagcacatctagtctcctctgcgccaggcagggggctgcgaacgagcctcggtatacatgttccgaagcccagaaagcagctcacaagcgcaaaatcagccctgtaaagttcagtaatacagacagtgtcctgccgccaaagcggcagaagagtggctcacaggaggatctcggctggtgtctctcttcctccgatgacgagctgcagcctgaaatgccccagaagcaagctgaaaaagtcgtcattaagaaagaaaaggatatctctgcgcctaacgatggaactgcccagagaacagaaaaccatggagctcctgcctgccaccgactgaaagaggaggaagacgagtatgagtag

SEQ ID NO: 245810 - DNA, 447 bp, synthetic construct
  misc_feature 1..447: note = Description of Artificial Sequence: Synthetic coding sequence
  source 1..447: mol_type = other DNA
atgtcccaggaaggtgactatggccgatggacaatctcatcctctgatgaatcagaggaggagaagccaaaaccagataaacccagcacatcatcccttctctgcgcccgtcaaggagccgctaatgagccacgctacacatgctcagaagcccagaaggcagcgcataagagaaagatttctccagtaaaattcagtaatactgatagtgttctcccccctaagcgacagaagtctgggtctcaagaagacttgggatggtgcctttcatcctccgacgacgaattgcagcccgagatgcctcagaagcaggcagaaaaggtggtcatcaagaaggaaaaggacattagcgcaccgaatgacgggaccgcccaacgtacagagaaccacggggcaccagcctgtcatcgcctcaaagaggaggaagacgagtatgagacgtcttag

SEQ ID NO: 245811 - DNA, 840 bp, synthetic construct
  misc_feature 1..840: note = Description of Artificial Sequence: Synthetic coding sequence
  source 1..840: mol_type = other DNA
atgtcccaggagggggattatggccgatggaccatctccagctctgacgagagcgaggaggagaaaccaaagcccgacaaacccagtacttcatccttactttgcgcaaggcagggagccgctaacgagcccaggtacacctgtagtgaggcccagaaagcagcccacaaacgcaagataagcccagtgaagttttccaataccgattccgtcctgcctcctaagagacagaagagtggctctcaggaagacctaggatggtgcttaagtagtagcgacgacgaactgcagccggaaatgcctcagaaacaagcggagaaggttgtgataaaaaaggaaaaagatatttcagcacctaacgacggaactgcccagcgcactgaaaaccacggggctccagcatgtcatcgactgaaggaggaggaggatgagtatgaaacaagtggcgaaggacaggacatttgggacatgttggacaaagggaacccttttcagttctatttgacacgcgtgagtggcgtcaagcccaaatacaattccggcgcactccacattaaggacattctgtcgcctctcttcgggaccctcgttagtagcgcacagttcaactactgtttcgatgtcgattggttggtgaaacagtatccccctgagttccgcaagaaacccatactcctggtccacggtgacaaacgggaggccaaagcccatctgcacgcccaggctaagccttacgaaaatatctctttgtgccaggctaaactggatattgcatttgggacgcatcacactaagatgatgctgctgctctacgaggaggggttgcgagtggtgatttag

SEQ ID NO: 245812 - DNA, 486 bp, synthetic construct
  misc_feature 1..486: note = Description of Artificial Sequence: Synthetic coding sequence
  source 1..486: mol_type = other DNA
atgtcacaggagggcgattacggcagatggaccatctccagctcggacgagtcagaggaagagaaacccaagcccgataagcctagcacttcctcgctcctgtgtgccaggcaaggggctgccaacgagcctcgctacacatgctcggaggcccagaaagctgcccataagaggaaaatatctccagtgaaattttccaacaccgattccgtcctaccaccaaagaggcagaagtccgggagtcaggaggatctagggtggtgtctttcaagctccgatgatgagctgcagcccgagatgccgcagaaacaggctgaaaaggtcgtcattaaaaaggagaaggatatctctgcgccaaacgacggcactgctcagcgtacagagaatcacggggctccggcttgccaccgtttgaaggaggaggaagatgaatatgaaacaagtggagaggggcaggacatatgggatatgctcgacaagggctag

SEQ ID NO: 245813 - DNA, 456 bp, synthetic construct
  misc_feature 1..456: note = Description of Artificial Sequence: Synthetic coding sequence
  source 1..456: mol_type = other DNA
atgagtcaggagggcgactatggcaggtggactatcagtagtagcgatgagtcagaggaggagaagcccaaacccgataagccttccacctcctccctgctatgcgcccgacaaggagccgctaatgagcctcgatatacctgctcagaggcacagaaagcagctcacaaacgcaaaatctcccccgtgaaattttcgaacaccgattcggtcctgcccccaaaaagacaaaaatctggttcccaggaagacctcggctggtgtctctctagtagtgacgacgagctgcagccagagatgccccagaagcaagcagaaaaagtcgttattaaaaaagagaaagatatctccgctcctaatgatggaacggcccagaggaccgagaatcatggggctcctgcttgccaccggttgaaggaagaagaagatgaatatgagacatctggcgaaggttag

SEQ ID NO: 245814 - DNA, 1113 bp, synthetic construct
  misc_feature 1..1113: note = Description of Artificial Sequence: Synthetic coding sequence
  source 1..1113: mol_type = other DNA
atggtcggcaagctgaaacaaaatcttcttctcgcatgcctcgttatttcgtccgttaccgtgttctacttaggccagcatgccatggaatgtcatcatagaattgaggaacgctcccaacctgtgaaactcgaatccacacgcacaactgtgaggactggccttgatcttaaggccaataaaacattcgcataccataaggatatgccccttatctttataggaggcgtgccgagatcagggacaacactcatgagggccatgctggacgctcatcctgacattcgctgcggcgaggagacaagggtgatccctcgcattctggctctcaaacaaatgtggagtaggtctagcaaggagaagattcgactagatgaggccggtgtgacagacgaggtgttggattcggccatgcaggcatttctgctagaaattatcgtcaaacatggagagcctgctccttacttatgtaataaggacccctttgccctaaagtctctgacatacctatctcgcctgttccccaatgccaagtttctgctgatggttcgcgatggcagagctagtgtccattctatgattagcaggaaggtcaccatagcagggttcgacttgaactcctaccgcgattgtctgactaagtggaacagagccatagagaccatgtataatcaatgtatggaagtgggatataagaagtgcatgcttgtacattacgaacagctggtgttgcacccagagagatggatgcgtacgctgctgaaattccttcagataccttggaatcattccgtcctccaccacgaagagatgatcgggaaagccggaggcgtctcccttagcaaagttgagcggagtaccgatcaggtcataaaaccggtcaatgtgggggctttgtcaaagtgggtggggaaaatcccacctgatgtcctccaggatatggccgtcattgctcccatgctggcgaagctgggatatgacccctatgcaaatccaccaaattacggaaagcctgatcctaaaatcattgaaaacaccagacgggtgtacaaaggtgagttccagctgccggacttcttaaaggagaaacctcagactgagcaggtggaatag

SEQ ID NO: 245815 - DNA, 129 bp, synthetic construct
  misc_feature 1..129: note = Description of Artificial Sequence: Synthetic coding sequence
  source 1..129: mol_type = other DNA
atggtgggcaaactaaaacagaatctcctgttggcctgtttagttataagctctgttactgttttctatctcggtcaacacgctatggagtgtcaccacagaatcgaagagcgctctcagccagtctag

SEQ ID NO: 245816 - DNA, 423 bp, synthetic construct
  misc_feature 1..423: note = Description of Artificial Sequence: Synthetic coding sequence
  source 1..423: mol_type = other DNA
atggtcggtaagctaaaacaaaacctgctgcttgcttgtttagtgatttccagcgtcactgtgttttatctggggcagcatgctatggagtgccatcataggattgaggagcggagtcaaccagttaaacttgagagcacaaggactacggtcagaacagggctggacctgaaagcaaacaaaacgtttgcataccacaaagacatgccattgatcttcatcggaggcgtgcctaggtccggcactaccctgatgcgggcaatgttggacgcccaccctgatatacggtgtggcgaagagactcgggtcattccaaggatcctggccttaaaacaaatgtggtcccgcagctcgaaggaaaaaatccggttggacgaagcgggagtcacggacgaggtgctggatagtgcaatgcaggcatag

SEQ ID NO: 245817 - DNA, 1083 bp, synthetic construct
  misc_feature 1..1083: note = Description of Artificial Sequence: Synthetic coding sequence
  source 1..1083: mol_type = other DNA
atggttggaaagttgaagcagaacctcctgcttgcttgtcttgtgatctccagcgtgaccgtattctatctgggccagcatgccatggaatgccaccaccgcatagaagagcgaagccagcctgtgaagctggagagcaccagaacaacagtgagaacaggcctcgaccttaaagccaataagactttcgcctatcacaaggatatgcccctaatttttatcgggggagttcccagatctggaacgactcttatgcgcgctatgctagatgctcatcctgatatccggtgtggggaggaaaccagggttatcccgagaatactggccctgaaacagatgtggtcccgttcttctaaggagaagatccgactggacgaggctggagtgactgatgaggttctggactccgcaatgcaagccttcctgctcgagatcatcgtcaagcatggcgagccagcaccgtatttatgtaacaaagaccccttcgctcttaagtcccttacctacctatctcgactgttccctaacgccaaatttctcttaatggtaagagacggccgtgcctctgtgcactcaatgatctcacggaaagttaccattgcaggctttgatctgaatagctacagggattgtctaacaaaatggaatcgagctatcgagacgatgtacaaccagtgtatggaagtcgggtataagaagtgcatgctggtccactacgaacagctggttctgcaccccgaaagatggatgcgcactcttctaaaatttctgcagattccatggaaccactccgtgctgcatcacgaggaaatgatcggtaaagcaggcggagtgtccctcagtaaagttgaacggagtaccgaccaggtcattaagcccgtgaacgttggagctctctccaagtgggtgggcaagatcccacccgacgtcctgcaagacatggcggtgatcgcccctatgcttgcaaaactgggttacgacccttacgctaaccctcccaactatggcaaaccagaccccaagatcatagaaaacacaaggcgcgaaagactgctgccgtttcaacaaaagggcaacagctag

SEQ ID NO: 245818 - DNA, 1134 bp, synthetic construct
  misc_feature 1..1134: note = Description of Artificial Sequence: Synthetic coding sequence
  source 1..1134: mol_type = other DNA
atgaggctgagtgtccggagggtactgctggctgctggctgcgccctggttctagtgctggctgtacagcttgggcagcaggtgctggagtgcagggccgtcctcgccggtctgagatcccccaggggggcaatgaggcccgagcaggaagagctcgtgatggtggggacgaatcacgttgaatatcggtacggcaaggctatgcctctgatattcgtgggtggcgtgcccaggagtgggaccacccttatgcgcgctatgttggatgctcaccctgaggttcgctgtggagaagagaccagaataattcctcgcgtactggccatgcgacaggcatggagcaaaagcgggcgtgaaaaactgcggctggatgaagctggtgttactgacgaggtcttagacgctgccatgcaggcctttattttagaagtgattgcaaaacatggggagcccgcacgggtcctgtgcaacaaggaccctttcacccttaaatcaagcgtgtacctgtcacgactgtttcccaattccaagtttctgctgatggtgagggacggccgtgcttcagttcatagcatgatcaccaggaaagtgaccattgcaggtttcgatttatcctcgtacagagattgcttgaccaagtggaataaagctattgaggtgatgtacgcacaatgcatggaggtgggcaaagaaaaatgtctccccgtctactatgaacaacttgtgttacatcccaggaggtctctgaagctgattctggactttctgggtatcgcatggtctgacgcggtgttacatcacgaggatctgatcggcaaacccggaggcgttagcctaagtaagattgaaagaagcacagatcaggtgataaaacccgtgaacctggaagctctgtctaagtggacggggcacattcccggtgatgttgttcgtgacatggcacagatcgccccaatgcttgctcagctgggctatgacccatatgccaaccctcccaactatggaaacccggaccctttcgtgatcaataatacccagcgtgtcctaaaaggggactataagactcctgccaacctgaagggttacttccaggtgaatcagaattctacatcctcccacctcggtagctcctag

SEQ ID NO: 245819 - DNA, 1134 bp, synthetic construct
  misc_feature 1..1134: note = Description of Artificial Sequence: Synthetic coding sequence
  source 1..1134: mol_type = other DNA
atgaggctctcagtccgcagagtgctgctggcagctggctgtgcgctcgtgctggtccttgccgtgcagctgggccagcaggttttagaatgtagggccgtgctggccggattgaggtcaccaaggggcgcaatgaggcccgagcaggaagagttggttatggttgggactaaccacgtagagtacagatatgggaaagccatgccactgatttttgttggaggcgtgcccaggtcagggactacacttatgcgagccatgctggatgctcaccccgaggttcgttgcggagaggagacccgcatcatcccaagggtattggcgatgcgacaggcatggtccaagtctgggagagaaaagctgcgcctggacgaagccggagtgaccgatgaggtactcgacgcagctatgcaagccttcatcttggaggtgattgcaaagcacggggaacccgctcgcgtactctgtaacaaggaccctttcaccctgaaatccagcgtgtatctctcacgactcttccctaacagcaagttcctgttaatggtccgcgacgggcgagcaagcgttcattccatgataactcggaaagtgacgattgccggtttcgacctctcgtcctatcgagattgcctgaccaagtggaacaaagcgatcgaggttatgtacgcgcagtgtatggaggtgggtaaggaaaagtgtctacccgtctactacgaacaactcgtcctacaccctagacgcagtctgaaactgatacttgatttcctcggaattgcctggagcgatgcagtcttgcatcacgaagacctgattggcaaaccaggcggagtgtccctatctaagattgagcggagtacagaccaggtgataaagcctgttaacctcgaagcactttcaaagtggacaggacatatccctggcgacgtggtccgggatatggcccagattgcgccaatgctcgctcaactcgggtacgatccctacgccaatcccccaaactacggtaacccggacccgtttgtgattaacaatacgcaacgtgtgttgaagggcgactacaaaacacccgcaaatctcaagggatactttcaggtgaaccagaactcgactagttcccacctcgggagcagctag

SEQ ID NO: 245820 - DNA, 1134 bp, synthetic construct
  misc_feature 1..1134: note = Description of Artificial Sequence: Synthetic coding sequence
  source 1..1134: mol_type = other DNA
atgagacttagtgtgaggcgggtgctgttggcggctgggtgcgctctggtcctggtcctcgccgtacagttggggcaacaggtgttggagtgcagagccgtcctcgccggactgaggagcccaaggggagctatgaggcctgagcaggaagagctggtgatggtcgggaccaatcacgtcgaataccgatacggcaaagctatgccactgatcttcgttgggggagtgccaagatctggcactaccctaatgcgtgccatgctggatgcacacccggaagtccgatgtggggaagagacacgcatcatcccaagagtgctggctatgaggcaagcatggtctaagagtggcagggagaaactgcgactcgatgaggctggcgtcaccgatgaagtgctggacgcagctatgcaagcattcattttggaggtcattgcgaagcatggtgagcccgctcgcgttctgtgtaacaaagacccgtttactcttaaaagctctgtctaccttagtcggttatttcccaactctaaattcctattaatggtaagggatggccgagccagcgtccattcaatgattactcgcaaggtcacaatagccggtttcgatttgagcagctatagggattgtctcactaagtggaacaaagctatagaggtgatgtacgcacagtgtatggaggtcgggaaggaaaagtgcctacccgtatattacgaacagctggtgctccacccacggcgttcgctgaagctgatactcgactttttaggcatcgcgtggtcagatgctgtcctgcaccacgaagacctcatcggtaagcccggaggggtgtctctaagcaagatagaacgttccactgaccaagttatcaagcctgtcaacctggaggcactgtcaaagtggaccggccacatccccggagatgtagtacgtgacatggcacaaatcgcaccgatgctggcacaacttggctacgatccttatgccaatccacccaactatgggaatcccgacccgtttgttatcaataatacccagcgcgtgctgaagggcgattacaagacccccgctaatctgaaggggtactttcaggtcaaccagaactccacttcctcccacctggggtcttcttag

SEQ ID NO: 245821 - DNA, 195 bp, synthetic construct
  misc_feature 1..195: note = Description of Artificial Sequence: Synthetic coding sequence
  source 1..195: mol_type = other DNA
atgcgtctcagcgttcgccgtgtactgctggccgcaggttgtgcacttgttctagtccttgcggtccagctgggacagcaggttttggagtgcagagctgtgctcgcaggacttaggtccccacggggtgcaatgcgacctgaacaggaggagctcgtgatggtgggcacaaaccatgtggagtataggtattag

SEQ ID NO: 245822 - DNA, 429 bp, synthetic construct
  misc_feature 1..429: note = Description of Artificial Sequence: Synthetic coding sequence
  source 1..429: mol_type = other DNA
atgcgactctcagtgaggagggtcctactcgccgcaggatgcgccctagttctggtgctcgctgtgcagctcggtcagcaggtgctggagtgtagagccgtgttggcgggtctgcggtcgcccagaggagccatgcgcccagagcaggaggagttagtaatggtgggtaccaaccacgtcgagtatcggtatggtaaagccatgcctctgatcttcgtgggcggagtacccagatctggcacgacccttatgcgggcaatgctggatgctcacccagaagtacggtgcggtgaggagactcgcatcatacccagggtgctcgcaatgagacaagcctggtcgaagagcggacgcgaaaaactgcgcctggacgaagcaggagtgactgacgaagtcctcgacgcggctatgcaggcttttatactgtag

SEQ ID NO: 245823 - DNA, 144 bp, synthetic construct
  misc_feature 1..144: note = Description of Artificial Sequence: Synthetic coding sequence
  source 1..144: mol_type = other DNA
atgagactgtccgtgcgccgagtgttgctcgccgcaggctgcgctctggtcctagtcttggcagtgcagctaggtcagcaagtcctggagtgcagagcggtactggcaggtctacgatcccctcggggagctatgcgtccttag

SEQ ID NO: 245824 - DNA, 147 bp, synthetic construct
  misc_feature 1..147: note = Description of Artificial Sequence: Synthetic coding sequence
  source 1..147: mol_type = other DNA
atgcgcttaagcgttcgacgagtactgctcgccgctggctgcgcgcttgttcttgtactcgccgtgcagcttggccagcaggtgctggagtgccgagccgttttagccggactgcggagccctcggggtgcgatgagacccgagtag

SEQ ID NO: 245825 - DNA, 363 bp, synthetic construct
  misc_feature 1..363: note = Description of Artificial Sequence: Synthetic coding sequence
  source 1..363: mol_type = other DNA
atgcgattatccgtgcggagggttttgctggccgctggttgcgctctggtactagttctggccgtccagctaggtcaacaagttctggaatgtcgcgctgtcttggctggcctgagaagcccaagaggcgcaatgcggccagaacaggaggaattggtgatggtcggcactaatcatgtggagtataggtatggcaaagcaatgcctctcatcttcgtcggtggtgtgcctaggagcgggactactttaatgcgcgctatgctggatgcccatcccgaggtgagatgcggggaggaaacccgcattatccctagggttctggccatgcgccaagcctggtccaagtcgggcagagaaaagtag

SEQ ID NO: 245826 - DNA, 933 bp, synthetic construct
  misc_feature 1..933: note = Description of Artificial Sequence: Synthetic coding sequence
  source 1..933: mol_type = other DNA
atgcctttaatttttgttggtggagtacctcggtcgggcacaactctgatgcgggctatgcttgacgctcacccagaagttcgttgcggagaggaaactaggataattcctagagtgctggcaatgcggcaggcatggtccaagagtggaagagaaaagttacgactggacgaggctggggtcacagatgaagtgcttgatgccgcaatgcaggcgtttattctggaggtgatcgcgaagcatggcgaacccgctcgcgtgttatgtaacaaagacccttttacactgaaatcctccgtgtacctgtctcggctctttcctaatagcaaattcctcctgatggttagggacgggagggcgtcagtgcactcgatgattacaagaaaggtaactatcgccggattcgatctgagtagttatcgtgattgtttaaccaaatggaataaagcaatagaagtgatgtatgcacagtgtatggaggtggggaaggagaaatgcctgcctgtgtactacgaacaattagtcctgcatcccagacgatccctgaaactcatcctggacttcttaggcattgcttggtcagacgccgtcctacaccatgaagatttaatcggaaagcctggtggcgtgagccttagcaaaattgagcgatccacagaccaagtcatcaaaccagtgaatctagaggctctttccaaatggacgggacatatccccggagatgtcgtccgcgatatggcacaaatcgccccaatgctggcacagctgggctacgatccctacgctaacccaccaaattacgggaatcctgatcccttcgtgatcaacaacacgcagcgggttctgaagggagactacaagactccggctaacctgaaagggtatttccaggtgaatcagaacagcaccagttcacatttaggttcctcatag

SEQ ID NO: 245827 - DNA, 1587 bp, synthetic construct
  misc_feature 1..1587: note = Description of Artificial Sequence: Synthetic coding sequence
  source 1..1587: mol_type = other DNA
atgggtgatgccccaagcccggaggaaaagctccaccttattacaagaaacctccaggaggtgctgggagaggaaaaattaaaggagatcctcaaggagagagagttaaagatctattggggcaccgccacaacaggcaagccccatgtggcttacttcgttccaatgtccaaaatagcggatttcctgaaggcaggttgtgaggtcaccatcctgttcgccgatctgcatgcttacctagacaacatgaaggctccatgggagcttctagagctgcgcgtgtcctactacgagaacgtgattaaggccatgctggaaagcatcggagttccacttgaaaagctgaagtttataaaggggaccgactaccagttgagtaaagagtacaccctggatgtgtaccggctgtctagtgtcgttacacaacatgattctaaaaaagccggtgcagaagtggtgaagcaggtggaacatccccttttgagcggattactgtaccctggattgcaagcactcgatgaggaatatctcaaggtggacgcccagtttggtggaatcgatcagcggaaaatttttactttcgcagagaaatatttgccggctctgggttactccaaaagggttcatctgatgaacccgatggtacctgggttaaccggatccaagatgagctcctcagaagaggagagcaagattgatttattagatcggaaggaggacgttaaaaaaaaattgaagaaagctttttgcgagcctggcaatgtagaaaacaacggggtcctgagcttcataaagcatgttctgtttcccctgaagtcagagttcgtaatccttcgcgacgaaaagtggggcggaaataagacgtatacagcgtacgtcgatttggaaaaggactttgccgctgaagtagtccatcctggagatctgaagaacagcgtcgaggtcgccctgaacaagttactggacccaatccgcgagaaatttaacacaccagcactgaagaagctggcgtcggctgcctaccctgacccaagcaagcagaaaccaatggccaagggcccagcaaaaaacagtgaaccggaagaggtaatcccctccagactagatataagggtgggtaagatcattaccgtggaaaagcaccctgatgccgacagcctttatgtagagaaaattgacgttggcgaagctgagccccgaaccgtggtgtctgggctggtgcaattcgttcctaaagaggagttacaggacaggcttgtggtagtcctatgcaacctgaaaccccaaaaaatgcggggagtcgaatcacaggggatgttactgtgcgctagcatcgaaggcattaatcggcaggtcgagccattggatcctccagccggatccgcacctggggaacatgtgttcgtgaaaggctatgagaaaggtcaaccggatgaagagttgaagcccaagaaaaaggtcttcgagaagctgcaggcggatttcaagatctcagaggagtgtatagcacaatggaagcaaacaaacttcatgacgaagctcggctcaatcagctgcaagtccctgaaaggaggaaacatcagctag

SEQ ID NO: 245828 - DNA, 1434 bp, synthetic construct
  misc_feature 1..1434: note = Description of Artificial Sequence: Synthetic coding sequence
  source 1..1434: mol_type = other DNA
atggcagcccctattctgaggtccttttcttggggcagatggtctgggaccttaaaccttagcgtactcctaccactcggcctgcgcaaggctcattccggcgctcaggggctgctggccgctcagaaagcacgcggtcttttcaaggatttcttccctgagactggcaccaagatcgagcttcccgagttgttcgacaggggtacggcgtcatttccacagaccatctactgtgggttcgaccctacagctgattcactgcacgtgggccatttactagctcttttaggactgtttcaccttcagagggctgggcacaatgtcattgccctggtgggtggggctacagcccgactcggagacccaagtgggagaactaaggaacgtgaagctctggaaaccgaaagagtcagggcaaatgccagagcccttcgcctcgggctcgaggcactggcagctaatcaccaacagttatttaccgacggtcgcagttgggggtcatttactgtgctggacaactccgcatggtaccaaaagcagcatctagtggactttctggccgctgtcggtgggcactttaggatggggaccctgctgagccgacagtccgtccagctccgactcaagtctccagagggtatgagcctggccgagtttttttaccaggtgctgcaggcctatgatttctactacttgtttcagcggtatggctgtcgggtgcaactgggtgggtcagaccaacttggtaatataatgagcggttacgaattcatcaacaagttgacgggagaggatgtctttggaatcacagtccctcttataacaagcactactggggcaaagctcggtaaatcagccggaaacgctgtctggctgaaccgcgacaagacatcaccatttgagctctaccagtttttcgttcgtcaaccggatgactccgtggaaagatacctgaaactgttcaccttccttccactgccggagatcgaccatataatgcagcttcacgtgaaagaacccgagcgcagaggaccgcagaaacggctggctgcagaagtgacaaaactggttcacgggcgtgagggactcgatagtgctaagcgttgcacacaagctttgtatcattcttccattgatgcactcgaggtcatgtcagaccaggagctcaaggagctcttcaaagaggcacctttcagtgaattttttctagaccctggaacctccgtgctcgacacatgtcgaaaggcgaacgccatccctgacggtccgagaggttaccgaatgataacagaagggggtgtgtccataaaccaccagcaggtcactaatcctgagagtgtcctgatcgtcggccagcacatcctgaaaaacgggctgagtctactcaaaattggcaaacgaaacttttacatcatcaaatggctgcagttatag

SEQ ID NO: 245829 - DNA, 723 bp, synthetic construct
  misc_feature 1..723: note = Description of Artificial Sequence: Synthetic coding sequence
  source 1..723: mol_type = other DNA
atggcagaatacctggcttccatcttcgggacggagaaggacaaagtcaactgtagtttctatttcaagatcggcgcatgcaggcacggagacagatgctcacggctccacaataagcccacctttagccagactattgcgctgctgaatatctaccggaaccctcagaattcctcacaatcagctgatggacttaggtgcgcagtatctgatgtcgaaatgcaggagcattatgacgagttcttcgaggaggtatttactgagatggaagagaagtacggagaagtggaggagatgaacgtgtgtgacaatctgggagaccatctggtgggcaacgtgtatgttaagtttcgaagggaggaggacgccgagaaggcagtgatcgacttgaataatcgctggttcaatggccaacccatccatgcagagcttagtcctgttactgatttccgtgaagcctgctgcagacagtatgaaatgggggaatgcacgaggggagggttctgtaactttatgcacctgaaacccatctccagggaactccgccgtgagttatatggcaggcggcgtaagaagcaccgctcacgttcacgcagcagagagagacgatcaaggtcccgggaccgcggaaggggaggaggcggaggaggcggtgggggaggaggcggacgcgagagagaccggagacggagcagagacagggagcgttcgggacgcttttag

SEQ ID NO: 245830 - DNA, 723 bp, synthetic construct
  misc_feature 1..723: note = Description of Artificial Sequence: Synthetic coding sequence
  source 1..723: mol_type = other DNA
atggccgagtatcttgcttccatcttcgggaccgagaaagacaaggtgaactgttcgttctacttcaagattggcgcttgccgccacggcgataggtgcagcaggctacacaacaagccaaccttcagtcagactattctgatccagaacatttaccgtaacccacagaattcagcacagaccgcagacggtagccattgtgcggtttctgatgtggaaatgcaggagcactacgacgagttttttgaagaggttttcactgagatggaagagaagtatggcgaggtggaagagatgaacgtgtgtgacaaccttggggaccatctggttggaaacgtgtacgtgaagtttcgccgagaggaggacgcggagaaggccgtgatcgacttgaataaccgttggtttaatggccagccaattcatgccgagctgtccccggtgactgacttccgcgaggcctgttgtcgccaatatgagatgggagagtgtacgagaggcggtttttgcaacttcatgcatctcaaaccaatctccagagagctacggcgagaactttacggacggagaagaaaaaagcaccgttcacgctctcgctccagagagcggagatctaggagccgggaccggggaagaggagggggaggaggaggtggtggaggaggcggtggacgagaaagggatagacgaaggagcagggacagggaacgctctggaaggttttag

SEQ ID NO: 245831 - DNA, 504 bp, synthetic construct
  misc_feature 1..504: note = Description of Artificial Sequence: Synthetic coding sequence
  source 1..504: mol_type = other DNA
atgcaggagcattacgacgaattctttgaggaggtctttacagaaatggaggaaaagtatggggaagttgaagagatgaatgtatgcgataatctgggcgaccatctagtgggcaatgtgtatgtaaagtttcggagagaggaggatgctgaaaaggctgtgattgatttaaacaatcgctggttcaacggccagccaattcacgctgaactgtcaccagttactgacttccgcgaggcatgttgccggcagtatgagatgggagaatgtactcggggtggcttctgtaacttcatgcacttgaaaccaatttctagggagttaaggagagaactgtatggccgacggcgtaagaaacatcgatccagaagtcggtctcgagagcgcagaagcaggagcagagaccggggaaggggcggtggaggaggtggcggaggcggaggtgggggacgtgagcgggaccggagaaggtcacgcgaccgcgagcgatcaggccgattctag

SEQ ID NO: 245832 - DNA, 504 bp, synthetic construct
  misc_feature 1..504: note = Description of Artificial Sequence: Synthetic coding sequence
  source 1..504: mol_type = other DNA
atgcaagaacactatgacgaattcttcgaggaggtgttcacagagatggaagagaaatacggtgaagtggaggagatgaacgtttgtgacaacctgggggatcatctggtcggtaacgtgtacgttaagttcaggcgcgaagaggacgctgagaaagccgtcatcgacttaaacaaccggtggtttaatggccaaccaatccacgccgagcttagccctgtcactgatttcagagaggcatgctgtaggcagtatgaaatgggggaatgtactagagggggattttgcaacttcatgcatctcaagccaatctccagggaattaagacgcgagctgtatggcaggagaaggaaaaagcaccgctcacgctcccggtcccgcgagagaagatcccggtctagagatagaggacgtggcggtgggggtggaggtggcggaggaggcggaggacgcgaacgagatagacggcgatcaagagaccgagaaagatcaggccgtttctag

SEQ ID NO: 245833 - DNA, 1218 bp, synthetic construct
  misc_feature 1..1218: note = Description of Artificial Sequence: Synthetic coding sequence
  source 1..1218: mol_type = other DNA
atgttcgttcaagaggagaagatctttgcgggaaaggtgctgcgcttgcatatctgcgcctcggatggagcggaatggctcgaagaggctacggaagacacgagtgtggaaaagctaaaggagaggtgtctaaagcactgcgcccacggctctctggaagatccgaagtctattacacaccacaagctcattcatgcagcttcagagcgcgtgttgtccgacgctcgaaccatactagaggagaacattcaggatcaggatgtactactactgatcaaaaaacgcgctccatcaccgctcccaaagatggcagacgtgagcgctgaagagaagaaaaaacaagaccagaaagcaccagacaaagaagctattctgcgcgctacggctaacctaccatcttacaacatggacagagcagccgttcaaacaaacatgcgggacttccagacagaactgagaaaaatcctggtctctttgattgaggtagctcaaaagttgcttgccctgaacccggatgctgttgaactattcaaaaaggccaacgccatgttggacgaagatgaggatgagagggttgatgaggccgcactgcggcagttgacagaaatgggatttcccgagaatagagcaaccaaggcccttcagctaaaccacatgagcgtgcctcaagcaatggagtggcttattgagcatgctgaggaccccacaatcgacacccccctccctggacaggctccacccgaggcagagggcgcaacggctgccgcatctgaagccgctgccggagcctcagcgacagatgaggaagccagggatgagctgaccgagatcttcaaaaagatccgaaggaagcgggaatttcgtgccgacgctcgagcggttatttccctgatggagatggggttcgatgaaaaggaggtcatcgacgctctgcgcgtgaacaacaaccagcaaaacgctgcgtgcgaatggcttcttggcgaccgaaaaccatctcctgaggagctggacaaaggaatcgatccagactcacctctatttcaagccatactcgacaacccagtggtgcagctcgggttgaccaatccaaaaactctgctcgcatttgaggatatgctggaaaaccccttgaactccactcagtggatgaacgaccccgagaccggccctgtcatgctgcaaatcagtaggatctttcaaaccctgaatcgaacttag

SEQ ID NO: 245834 - DNA, 540 bp, synthetic construct
  misc_feature 1..540: note = Description of Artificial Sequence: Synthetic coding sequence
  source 1..540: mol_type = other DNA
atggcagcctcacaagttctgggcgaaaagattaacatcctgtcaggcgagactgtgaaagcgggtgacagggacccactcgggaatgattgccctgagcaggataggctgccccagcggtcctggcgacagaaatgcgcgtcctacgttcttgctctgagaccttggagtttctccgcctcccttacacccgtcgccctcggtagcgccctggcttacagaagccacggcgtcctggatccacggttattggtgggatgcgcggtcgcggtattggccgttcacggcgcaggcaacttggtgaatacctattatgatttcagtaagggtatcgaccacaagaaaagcgatgaccgcactctggtggacaggatcctggaaccgcaggatgttgtccggttcggggtgttcttatatacactcggctgtgtgtgcgccgcttgcctttactatttgtccccgcttaagctagaacatttggcccttatttacttcgggggactatcaggttcctttctgtatacaggagtcctgatctag

SEQ ID NO: 245835 - DNA, 1017 bp, synthetic construct
  misc_feature 1..1017: note = Description of Artificial Sequence: Synthetic coding sequence
  source 1..1017: mol_type = other DNA
atggctgcttcacaagtgttgggcgagaagatcaacattctgagcggtgagacagtgaaggcgggagatagagatcccttgggtaacgattgtccggagcaggacaggctcccccagagatcatggaggcagaagtgcgcctcttatgtgttagcccttaggccctggtctttttctgctagccttaccccggttgctctcgggagcgccctcgcttataggtcacacggtgtgctggaccctaggctgctggtcgggtgcgctgtggccgtcctggcggtgcatggagccggtaatctggtcaacacttattatgatttctccaaaggcatagaccataaaaagtctgatgaccgtaccttggtggatcgcatactcgaaccccaagatgtggttcgtttcggagtctttctctacactttaggatgcgtatgcgccgcatgcctatattatctctcccccctcaagctcgagcatctagccctgatctatttcggtggtctgagtggatctttcctatatacgggcggaattggctttaagtacgttgctcttggggacctaatcatactgattacctttggacctttggcagtgatgtttgcctatgccatccaggtcggttcgcttgccatcttcccacttgtctacgccataccactagccctaagcacagaggctattctccactctaacaataccagggacatggaatccgatcgggaagccggaatcgttactctcgcaattctcatcggccctacttttagctacatcctgtataatacacttttattcctcccgtatctagttttttctatcctcgccactcattgcactatcagcctggcattgcctctccttacaattccgatggcattcagtctggagaggcagttccggtctcaggcctttaataagctgcctcaacgaacagctaaactcaatctgcttctcggacttttctacgtgtttggcatcatcctggcgcctgccggatctctgccaaagatctag

SEQ ID NO: 245836 - DNA, 3405 bp, synthetic construct
  misc_feature 1..3405: note = Description of Artificial Sequence: Synthetic coding sequence
  source 1..3405: mol_type = other DNA
atgtccgaaccccaccgagtgcaatttacttccctgccaggatctctcaaccccgcatttctgaaaaaaagcagaaaagaggaggccggtgcgggagagcagcatcaagactgcgagcctgcggctgctgccgtgaggatcactctcacactgttcgagcctgaccacaaaagatgccccgaatttttctatcccgaactggtcaagaacattagagggaaggtaaaggggctgcagcctggcgacaaaaagaaagacctgagcgatccctttaatgacgaagagaaagaacggcataaggtggaggccttagccagaaaattcgaggaaaagtacggcggaaagaagcgtagaaaagacaggatccaagatctgatcgacatgggttatggatatgatgaatccgactcctttatcgataactccgaggcgtacgatgagctcgtgcctgcaagtcttacaactaaatacggcggattctatatcaacagcggcacacttcaatttaggcaggctagcgaatcggaagatgattttatcaaagagaaaaaaaagaagtcccctaaaaagcgtaagctgaaagaagggggagaaaagattaagaagaaaaagaaggatgatacctacgacaaggaaaagaaatctaaaaagtcgaaatttagcaaggctgggtttacggccctgaatgctagcaaagaaaagaagaagaagaaatactccggcgctctgagcgtaaaggagatgctcaagaaatttcagaaggaaaaagaagcgcaaaaaaagcgcgaagaagaacacaagcctgttgcggtcccttcagcagaagctcagggtctcagagaactagaaggcgcttctgatccactcctgtcactgtttggctctacatcagacaatgatctgctacaggccgctacggccatggatagcctgaccgatctagacctggaacatcttctgtccgagagtcctgagggctctccattcagagacatggacgatggaagcgactcgcttggggtgggactcgatcaggagttccgccagccatctagcctgcccgaggggcttccagcgccactggagaagagggtcaaagagctggcccaggcggcaagggctgcagaaggtgagtcaaggcagaagttcttcacacaggatattaacggcatactgcttgatattgaagcccagactcgagagttgagcagccaggtgcgttctggtgtatacgcttacctggcgtcctttctgccgtgtagtaaagacgcgctgctaaaacgtgcgagaaaactacacctttatgaacaggggggtagacttaaggagccattgcagaagctgaaggaggctatcggtcgcgcaatgccagagcagatggctaagtatcaggacgagtgccaggcccacacccaggccaaggttgctaagatgttggaggaggagaaggacaaggaacagagggaccgaatctgtagcgatgaggaggaggatgaggagaagggaggcaggaggattatgggaccccgtaagaagttccagtggaacgatgagatcagggaattattgtgccaggtggtaaaaattaagctcgagtcacaggaccttgaacgtaacaataaggcgcaagcttgggaagactgtgtgaagggcttcctagacgcggaggtgaagccactctggccaaaagggtggatgcaggctcggacactattcaaggaatcccgcagaggacatggacacctgactagcatattagccaaaaaaaaggtgatggctcccagtaaaattaaggtaaaagagtctagcacgaagccagataagaaggtatccgtgccttccggtcagattggcggtccaatagcactgccttctgatcaccagacgggaggactctcgatcggagccagctctagagagctcccaagtcaggcctcaggcggtcttgctaatcctcctcctgtgaacctggaggattcgttggacgaggacctcattcgcaacccagcctcctcagtcgaggccgttagtaaggagctggccgcactaaactcaagggccgcaggaaatagcgagtttactcttcctgccccaagcaaagctccagcagagaaggtgggcggtgtcctctgcaccgaagagaagcgcaacttcgccaaaccaagcccatcagcgcctccacccgcttcaagtctccagtcgcccttgaactttcttgccgagcaggctctggctttagggcagtcctctcaagaaaagaagccagaatccagcggatataaggaacttagttgtcaggccccattgaataaaggtcttcccgaggtccaccagtctaaggccaagcaccactccctgcctcgcacctcacatggcccacaggtggctgtgcccgtgcctggccctcaggtcaaggtgtttcacgccggaacacagcagcagaagaatttcacgccaccttctccttttgccaataaactgcagggccctaaggcctcgcccacccagtgccataggagcctgctgcaacttgtgaagactgctgctaaagggcagggctttcatcccagcgccccagccacctctggaggtcttagtgcgtcttcatctagttcccataagaccccggcttcctccagctccgctctgtctcatccagccaagccgcattcagtaagcagcgccggatcaagttacaagaataacccgtttgcatcttcgatcagcaaacacggcgtgagtagtgggagctctagcagcggtggcacacccgtgcagtcatccgttagtggatcacttgtgccgggaatccagcctccaagcgtaggtcaagcaacaagcagaccagtgcccagttccgccggtaaaaagatgccagtgagccaaaagctgacccttgtcgcacccccagggggtcctaacggtgacagctcggggggtacacaaggagtcgcaaagctgctgacgtctccctctctgaaaccctctgctgtttcctccgtcactagttcaacttccctctccaagggggcatccggcacagtactcttggccggaagctcactcatggccagcccctacaaatcctctagcccaaaactctccggcgctatgagctctaacagcctgggtatcatcaccccggttccaattccggttcatgtgctttcttttagcgcagattcttccgcaaaggctggagtgagcaaagacgcaattgtcactggccctgctcctggaagttttcaccacggcctaggccactctctcttggccggtctgcatagtagtcccccacacgctgctccccttccacacgcagctgtccccactcacatcccccaatcactaccaggagccagtcagcttcacggtaagggcccagcggtcccacggaaactctag

SEQ ID NO: 245837 - DNA, 3405 bp, synthetic construct
  misc_feature 1..3405: note = Description of Artificial Sequence: Synthetic coding sequence
  source 1..3405: mol_type = other DNA
atgtccgagccacatagggtgcagttcacaagcctcccaggtagcctgaaccctgcctttctgaagaagagccggaaagaggaggctggcgcaggggaacagcatcaggattgcgagcctgctgccgcagccgtgcgcatcactcttacactttttgagccagaccacaagaggtgtccagaatttttttatcccgaactggtgaagaacatacggggaaaggtaaaaggtcttcagcctggggacaaaaagaaggatcttagcgaccctttcaatgacgaagaaaaagaacgccacaaggtggaagccctagctagaaagttcgaggagaaatacggaggtaaaaagcggaggaaagaccgtatccaagacctcatcgacatgggctacgggtacgacgaaagcgacagctttatcgacaactctgaggcatacgacgagctggtgcctgcaagtctcaccaccaagtatggaggcttctatattaattctggcacgctgcaatttaggcaggcaagtgaatcagaggacgacttcatcaaggaaaaaaaaaaaaaatcccccaaaaaaagaaaactgaaggaaggtggagaaaagataaaaaagaaaaagaaggatgatacgtacgacaaggagaagaagtcgaagaaaagtaaattcagtaaggctggcttcacggccctgaacgcttccaaggagaagaaaaagaaaaagtactctggggcactgagtgtaaaggagatgctcaagaagttccagaaagaaaaggaagcccagaaaaaaagagaggaggaacataagcccgtcgcagttccatccgcagaagcccaggggctaagggagctcgagggagcgtcagatccactactgagcctgtttgggagcacaagcgacaatgaccttctgcaggcagcgactgccatggacagcttgacggacctagacctggagcacttactgtcagaatctcctgaagggtcaccattccgagatatggatgacggctctgactctttaggcgttggcctggaccaagagtttagacagccttcctctctgcccgaaggactgcctgccccactagaaaagcgcgtgaaagagttggcgcaggctgcacgagccgctgagggcgaaagccgccaaaaatttttcactcaagatataaatggaatcctccttgacatcgaggcccagaccagagaactcagctcccaggtgagaagcggggtgtacgcttatttggcctctttccttccctgcagcaaagatgctttactgaagcgggctcggaagcttcacctgtacgaacaggggggacgcctgaaggagccgctgcaaaagcttaaagaagccattggcagggctatgcctgagcagatggccaaataccaggacgagtgccaggcccatacacaggccaaggtcgctaagatgctggaggaggagaaagacaaggaacaaagggacagaatttgtagcgacgaggaggaggacgaagagaaaggtggcaggaggattatggggccacgaaaaaagtttcagtggaacgacgaaattcgagaactcctgtgccaggtggttaagatcaagctggaatcccaggacctcgaacggaataataaagctcaggcctgggaagattgcgtgaaagggtttctggatgccgaggtgaagcctctatggcccaaaggttggatgcaggctagaacactctttaaagaaagcagacggggacatggccatttaacatccattctcgccaagaaaaaagtaatggctccctctaaaatcaaagtgaaggagtcctcaactaaacccgacaagaaggtttccgtcccatcaggccagatcgggggaccgatcgccctgccatccgatcaccagactggtggactctctatcggcgcttctagtagggaactgcccagccaggcgtccgggggactcgctaatcctccacccgttaacctcgaggactccctggatgaggacctgattagaaaccctgctagctcagtggaggccgtgagcaaggaacttgcggctctgaactccagagctgcgggaaacagcgagttcaccttaccagctccgagcaaggctccagcagagaaagtgggtggtgtgctgtgtactgaagaaaagcgaaacttcgcgaagccttccccctccgcaccccctccagcaagctctctgcagagtcctctgaatttcttggccgaacaggccctagccctgggacagtcatcacaggaaaagaaacctgagtcctctgggtataaagaactgtcttgccaagcccctctgaataaggggctcccagaggtgcaccagtctaaagccaaacatcattctctccctcggacttcacacgggcctcaggttgcggttcccgtgcctggaccacaggtcaaagtatttcatgccggaacgcagcagcagaagaatttcaccccaccctccccattcgccaacaagctccagggccctaaagcaagccccacacagtgccaccgatcgctgctccaactagtaaaaacagccgcaaaagggcagggctttcatccttctgcgccagcaactagtgggggtctttccgctagttcttcctcctcacacaaaacaccagcaagttccagcagtgctctttcacaccccgctaaaccacattccgtgtcgagcgccggtagctcatataaaaacaaccctttcgcatccagcatatctaaacacggcgtctcttcaggatcttcatcctcagggggaaccccagtgcagagtagcgtttccggaagccttgtgcccggaatccagccaccctccgtgggtcaggcaaccagcaggccagttccgtcctccgctggcaaaaaaatgcccgtttcacaaaagctgacattggtggcaccgccaggcggtcccaatggggatagctctgggggtacccagggcgtggctaagctcctgacgagcccctccctcaaaccctccgcagtgagctcagtgacctctagcacttctctatctaagggcgcttccggaacggtgctgctggctggcagcagccttatggcctcaccttataaaagctcttctcccaagctcagtggggcaatgagcagcaactctctggggataatcacacccgtgcctattcctgtgcatgtgttaagtttttctgcagactcctcagcaaaggcgggtgtcagcaaagacgcgatcgtgactggaccagccccagggtcctttcatcacggcctcggacactcgctcctggcaggcttgcactcatctccccctcacgccgctccactcccccatgctgccgttcccacccacatcccgcagtccctccccggagcctctcagctccacggcaaaggacctgcagttcctaggaagctgtag

SEQ ID NO: 245838 - DNA, 3315 bp, synthetic construct
  misc_feature 1..3315: note = Description of Artificial Sequence: Synthetic coding sequence
  source 1..3315: mol_type = other DNA
atgagcgagcctcatagggtacaattcaccagccttcctgggagcctgaatccagcattcctaaagaagagtagaaaggaggaggcaggcgctggggagcaacaccaagattgcgagcctgcagccgcagctgtccgcataacattgaccctattcgagccggaccacaaacgctgcccggaatttttctatccagaactggtgaagaatatccggggaaaagtgaagggcctccagccaggcgacaaaaagaaagacctgagcgaccctttcaatgacgaggaaaaagagcggcacaaagtggaggcattagcccgaaagtttgaagagaaatatggcggaaagaaaaggcggaaggataggattcaggatctgattgacatggggtacgggtatgatgagtctgactctttcatagacaattcggaggcatatgatgaattggttcctgcttctctgactacaaagtatggcggattctatatcaattctggcactcttcagttccgtcaggcctccgagtcggaggacgattttattaaagagaaaaaaaaaaaaagtcctaagaagcggaaactaaaggagggtggggagaagatcaaaaagaagaaaaaggacgacacatacgataaagagaaaaagtccaagaagagcaagtttagtaaggctggtttcaccgctcttaatgcttctaaggaaaagaaaaagaaaaaatattccggcgctctcagcgtcaaagagatgttgaagaagttccagaaggagaaagaggcacaaaagaaaagagaggaagagcacaagccagtcgcagtgccatcagcagaagcccagggactccgggagctggaaggagccagtgatccactgctatcgctgttcggctctacctcagacaacgatctactgcaggcggctaccgctatggactccctgaccgatctggacctggagcacctactgtcagaatcccccgagggctctccattccgcgatatggatgatgggagcgattcccttggtgtgggcctcgatcaggagtttagacagccttcatctctgccagaggggctgcctgcacctctcgagaaaagggtaaaggaactggcgcaggctgcaagggcagccgagggagagtcccgacagaagtttttcacacaagacatcaacggcattctgctagacatagaagcccagacacgggaactgagtagccaggtgaggagtggagtgtatgcctacctcgcctccttcctgccatgtagcaaagacgccttgttgaagagggccaggaaactacacctatatgagcagggaggcaggctgaaggagcccctccagaagttaaaggaagccataggccgagctatgcccgagcaaatggctaagtaccaagacgagtgccaggctcacacacaggccaaagtcgcgaagatgctggaggaggagaaggataaagaacagagggatcgaatctgcagtgacgaggaggaagatgaggaaaaggggggacggcgaatcatggggccacgcaaaaaattccagtggaacgacgagatacgtgagctcttgtgtcaggtggttaagattaagctggagagtcaagacctggaacgtaacaacaaggctcaggcttgggaggactgcgtcaagggctttttggatgcggaggtcaaacctctttggccaaagggctggatgcaggcacggacgttattcaaggagtcccgtcggggtcatggccatctgacatcaatcctcgctaagaaaaaggtcatggccccatccaaaattaaggtgaaagaatctagtactaaacctgataagaaggtgagcgtgccttcgggtcagattggcggaccgatcgcactgccatcagatcaccagaccggtggattaagcattggtgcctccagcagagaactcccaagccaagcatccggcggattggctaatcctccgcctgttaatctggaagattccctcgacgaggacctaatcaggaatcctgcaagtagcgtggaggccgtgagtaaggagctggccgctctcaatagtcgtgcagccggaaattctgaatttacgcttcctgccccaagtaaggccccagctgaaaaggtggggggagtgctgtgtacagaggagaaaagaaatttcgctaagcctagcccttcagcgccacccccagcttccagtcttcagagtccgctgaacttcctggctgaacaagctctggcgctcggacaaagctcacaggagaagaagcccgagagctccgggtataaagagctatcttgtcaggctcctttgaataagggcctgcctgaagttcatcagagcaaggcaaagcatcacagcctccctcggacgtcgcacggtccacaggtcgccgttccagttcctggccctcaggttaaagtgtttcacgccggtactcagcagcagaagaacttcactcccccatctccatttgcaaacaagctccagggcccaaaggcctctcccactcaatgtcacagatcccttctgcaactcgttaaaacagcagctaagggccaggggttccatccttccgctcccgctacctcggggggattaagcgcctcctcttcttcttcccacaaaaccccggcatcttctagcagtgccctctcacatcctgctaaaccccattccgtgtcgagcgccggaagctcatacaaaaataaccccttcgcaagtagcatctctaaacacggtgtttcgtcaggatcctctagttcaggcggaacccctgtacaatcaagcgtgtctggaagcttggtaccaggtatccagccaccctcagtgggacaggctacaagccggccagtgccaagttctgctggaaagaaaatgccagtgtcacagaagttaacacttgtggctcccccaggcggtccaaatggcgactcgagcgggggaacacaaggtgtggccaagttactaacgtcacctagcctgaagcctagtgccgtatcatcggttacatcctctaccagcctctcaaagggcgcaagcggaaccgtgcttctggctggatccagtctgatggcctccccttacaaaagttctagtccaaaactcagcggagcaatgtcaagcaacagtttgggcattatcaccccggtgcctatccctgtgcacgtgctctctttctcagcagactcatccgccaaggctggcgtcagcaaggacgctattgtgaccggcccagctccaggctctttccaccacgggctggggcattccgcttcccagctccacggaaagggccctgcggtcccacgcaagctgtag

SEQ ID NO: 245839 - DNA, 3795 bp, synthetic construct
  misc_feature 1..3795: note = Description of Artificial Sequence: Synthetic coding sequence
  source 1..3795: mol_type = other DNA
atgtccctgcaaagggagcccccacgaccggagcccccaccaccatttcctcccctgcccttacagccaccccctcccagggaatcggcctcacgggctgaacagccccctaggccaccccgagagactgtcaggcttgagctggtgctcaaagaccccacagatgaatcatgcgtggagttcagctatcctgagcttcttctgtgtggcgaacagcggaaaaaactgattcacacagaggatccatttaacgacgagcatcaggaaaggcaggaagtcgaaatgctggctaaaaagtttgagatgaagtacggcggtaaaccgagaaagcacagaaaggaccggctgcaggacctgattgacattggtttcggatacgacgagactgaccccttcatcgacaattccgaggcctatgatgaactggtgcctgcatcccttacgacgaagtatggtgggttctacatcaataccgggactttgcagttcagacaagcctctgataccgaagaagatgacattaccgataatcaaaagcacaagccacccaaggtaccgaagatcaaagaggatgacatagaaatgaagaagaggaagagaaaggaggagggcgagaaagagaagaagccaagaaagaaggttcccaaacagttgggcgtggtggccttgaatagtcacaagtccgagaaaaagaagaagaggtacaaggatagcctttcgctcgctgccatgattcgcaagtttcagaaagaaaaagacgctctgaaaaaagaaagtaatcccaaagtacccgtgacactgtcaacaccatccctaaataagcccccatgcgcagctgcagcattagggaatgatgtccccgatctcaacctgagctccggggatcccgacctgccaatattcgtaagcactaatgaacatgagctctttcaggaagccgaaaatgccctggaaatgctcgatgacttcgactttgaccgcctcctggatgccgcatcggacggatcccctttaagcgagtctggcggtgagaacggtactaccactcaacccacatacactagccaagtgatgccaaaagtggttccaactttacctgaggggctgccagtgttgcttgaaaagcggatcgaggatcttcgagtggccgctaagctgtttgatgaggagggaaggaagaagttctttacgcaagatatgaacaatattctcctagacatcgagctgcagcttcaggaactgggcccagtaatcaggagtggcgtgtactcacacctggaggcgtttgtcccctgtaacaaagaaactctggtgaagcgactgaagaagctccacctcaacgtgcaggacgacagactccgcgaacctctgcagaaactgaaactcgcagtgtcgaacgtcatgcccgagcagttgtttaagtaccaggaagattgccaagccagatctcaggctaaatgcgctaagctacagactgatgaggaaagggaaaagaacggatcagaggaggacgatgatgagaagccgggaaaacgtgttatcggaccacgtaaaaagtttcactgggacgacacaatcaggacattactatgtaacctcgtcgaaatcaagctgggatgttatgagctggagcctaataagtcacagtctgctgaggattacctgaaatccttcatggagacagaggtgaagcctctgtggcctaaaggctggatgcaagcgaggatgttatttaaggaaagtaggagcgtgcacaaccacctcacttctgctccggcaaaaaaaaaggttatcccagctcctaaaccaaaggtcaaggaggtcatggttaagacacttcccctgcattcctttcctactatgttgaaagaatgctccccaaaaaaggaccagaagaccccaacatctctggttgcaagtgtttcagggccaccaacctcttcctctactgcagcgattgccgctgcgtcaagcagcagcgccccagcgcaggaaaccatctgccttgacgatagcctagatgaagacctgtcgttccacagcccttctctagacctggtctccgaggcactggccgtgatcaataacggaaacaagggcccacctgtagggagccggatcagtatgcctacaacaaagcccagacccggattacgggaggagaaactggcttctattatgtctaaattgcctctggcaacaccgaagaaactcgattcgacccagaccactcactcctcttctctaatcgctggacatacgggaccggtgccaaaaaagccccaggacctggcccataccggcatttcaagcggtttgatcgcgggaagttcaatacagaacccgaaggtctccctggagcccctgcccgctcgactgctgcagcagggattacagaggagctcccaaattcatacctcgagctcgagccagactcacgtgtcctcgtctagccaagctcaaatcgccgcatcgtcccatgcactgggtacctcagaagcccaggacgcctctagcctgacacaggtcaccaaagtgcaccaacattcagctgttcagcagaactacgtcagcccactgcaggccaccatcagcaaatcccagactaatccagtggtcaaactgtctaacaatccacagctgtcatgttcttcgagtctgatcaagacatccgataaacccttaatgtatcggctgcccctgagtactccatctcctggaaacggcagccaaggaagtcatcctctggttagtcgaaccgtgccctccaccacaacatcctcaaactacttagccaaggctatggtgagccagataagtactcaggggttcaagtcacccttcagcatggccgcaagccccaaactggccgcaagtcctaaacccgcaactagcccaaaaccgttgcccagccccaaaccaagcgcttcacctaaaccctcactgagtgctaaaccctccgtctccactaagttgatcagcaagagcaatcccacgccgaagccaactgtgtccccaagtagtagctcacctaacgctctcgtggctcaggggtcccactcatctacaaactcgccggtgcacaaacagccaagcggcatgaacatttcgagacaaagcccaaccttaaatttgcttccttcttctaggacctccggtctgccaccaacaaagaatctccaggcgccttccaagctgaccaacagttcgagtacggggacggtgggaaagaattccctgagtggcattgccatgaatgtccctgcctccagagggtccaacctgaattcaagtggagcaaataggacttctctgtcaggcggtactggatctggaactcagggggcaaccaaacctttaagcacaccacatcggccatccaccgcatccgggagctctgtagtaaccgcctctgtccagagtacggctggcgcatccctgctggctaatgctagtccgttaactctgatgaccagccccctaagcgtgaccaatcagaatgtgacaccctttgggatgctaggtggccttgtacccgtgactatgccgtttcaattcccgcttgaaatcttcggatttgggaccgacacagccggtgtgacaacaacaagtggatctacgtccgctgccttccatcattcccttacccagaatctgctgaaagggctccagccgggtggcgctcagcatgccgcaaccttgagccactcacctctgcccgctcacctccagcaggcctttcacgatggagggcagagtaaaggagataccaagcttccccgaaaaagccagtag

SEQ ID NO: 245840 - DNA, 4044 bp, synthetic construct
  misc_feature 1..4044: note = Description of Artificial Sequence: Synthetic coding sequence
  source 1..4044: mol_type = other DNA
atggcagaacccaggcgagtcgccttcatctcactgtccccagttcgtcgtcgcgaggccgaataccccggaccagagagggaacccgaatatccccgtgagcctcctaggctggaaccccagccgtacagggaaccagctcgggctgagccccctgctccaagggaacccgcaccaaggtcagacgctcaaccaccaagtcgggagaaaccattgcctcagcgggaggtctcccgggctgagcctccgatgtcattacagcgggagcctccaaggccagagcccccaccgccatttcctccactccccttgcagccgcctccgcctcgcgaatcagccagccgggctgaacaaccccctaggccaccccgagagactgtcaggctggagttggttctgaaagaccctaccgatgagtcttgcgtggagttttcctaccctgagttgcttctgtgcggcgaacaaagaaaaaaactgattcataccgaggacccatttaacgatgagcaccaggagcgccaggaggtggagatgctagcaaagaagtttgagatgaaatacggagggaaacctcgcaaacaccgtaaagacagactgcaggatctcatcgacattgggttcggatatgacgagaccgaccctttcatagacaacagtgaggcgtacgatgaactggtaccagcgtctctgacaaccaagtacggaggattttatatcaacactgggacattacagtttcgacaagctagcgataccgaagaggatgatattactgataaccagaagcacaaaccaccaaaggttcccaagattaaggaggacgatatcgagatgaaaaaaaggaagaggaaggaggaaggagaaaaggagaaaaagcctcggaaaaaggttccaaagcagcttggggtggtcgccttgaactcacacaaatctgagaaaaaaaagaaacgctacaaggacagccttagtttggccgctatgattcgcaagtttcagaaagagaaagatgcgctgaagaaggagagcaatccaaaggtgcccgtcacactctccacaccctctctgaacaagcccccttgcgccgctgcggctctcggaaatgacgttccagatctgaacctatcaagcggcgatcctgatctgcctatttttgtaagtacgaatgagcacgaactattccaggaggccgagaacgccctggagatgttggacgatttcgatttcgacaggctgcttgatgctgcatcggatggcagtcctctgagcgaatctggtggtgagaatggcaccactacacagccaacttatacctctcaggtgatgcctaaggttgtgcctactctgcccgaagggttacctgttcttcttgagaagcggattgaggatttgagagtggctgctaagctcttcgacgaagaagggagaaagaaatttttcacacaggacatgaacaatatcttgctcgatattgagctgcagctgcaggagctggggccagtgattcgatcgggagtatatagtcatctcgaagcatttgtgccttgcaataaggaaacattagtgaagaggctaaaaaagctgcacctcaacgtgcaggatgaccgattaagagagcccctgcagaaactaaagttggctgtgtccaacgttatgccagagcaactgtttaagtaccaggaggactgtcaagcccgatctcaagctaaatgcgccaagttgcaaacagatgaggagcgagaaaagaatgggagtgaggaagacgacgacgaaaaacctggaaagcgagtcatcggtccccgtaaaaagtttcattgggacgacaccattaggacgttgttgtgcaacctggtggaaataaagctcggatgctatgaactggagccgaacaaaagccagtcagctgaggattatcttaagtcatttatggaaacggaggtgaagcctttgtggcccaagggttggatgcaggctagaatgttgttcaaggaatcgagatcggtgcacaaccatctgactagtgctccggctaaaaagaaagtcatccccgctcctaaaccaaaggttaaggaggtaatggtaaaaaccctgcctctgcatagcttcccaacgatgctgaaggaatgttctccaaaaaaggatcagaagactcccactagcttagtggcctccgtgagcggacctcccaccagttcctctacagctgccatcgcagcggcttcctcatcatcggccccagcccaggagacgatctgtctagatgactcactcgacgaagacttatcttttcactccccctctcttgacctggtgtccgaagccttagctgtgattaataatgggaacaagggtcccccagtgggttcacgtatcagcatgcccactacgaaacctagacccggactgcgggaggagaaactcgcgtcaatcatgtctaaacttccactggccaccccaaagaaactggatagcacacaaacgacgcacagctccagtctcatcgcaggtcacacaggccctgtaccgaagaagccccaagacctagcccatacgggaattagcagcggtctgattgccggatctagcatccagaatccgaaggtgagtctggagccactcccagctcggctgcttcagcagggcttgcagcgttcatcccagattcacacatctagttcgagccagactcacgttagttcctcttcacaagctcagatcgctgccagctcccatgccctaggcacctccgaagcccaggatgcctcatctctgacacaggtcacaaaggtgcaccaacatagcgccgttcagcagaactatgtttccccgcttcaggccaccatatcaaaatcccagactaacccggtggtgaagcttagtaataaccctcagctgagttgcagcagttctttaatcaagaccagcgataaacccctgatgtaccggctccctctttccacccctagccccggtaacggctctcagggctcacaccccctggtgtctcgaactgtgccctccaccactacttctagcaactacctggccaaagccatggtttcccagatttctacacagggttttaagtcgcctttttccatggccgcttcacccaaattggctgcctcccctaagccagccacgagccctaagcccttgccctcccctaaaccttcagctagtcccaaaccatctttgtcagccaagccaagtgttagcaccaaactaatctcaaaatcaaatccgacaccgaagcccacggtgtctccaagctctagctccccgaatgccttggtggctcaaggatcccactcttcgaccaacagccccgtgcataaacagccctccgggatgaacatcagtcgccagagccctacactaaacctcctcccaagttcccggacctcaggcctcccccctacgaagaacctgcaggccccttccaaactcacaaactcttctagcactggaactgtgggaaaaaactcactgtccggcatcgccatgaatgtgcctgctagtcgtgggtctaacctgaatagttctggagcaaacaggacctctctgtccggcggaaccgggagcggaacccagggggcaacaaagccactgagcactccccatcgcccttcaaccgccagcggctctagtgtcgtgacagcttctgtccaatcaaccgctggtgcttccctcctggcaaatgccagcccactgacactaatgacatctcccctgtcagtgacaaaccagaacgtgacccctttcggtatgcttggcggacttgtccctgtaacaatgccttttcaatttccactggagatcttcgggttcggcacagacacagcaggcgttacaaccaccagcggatcaacttcagcagcatttcatcacagtctgacacaaaaccttttgaaagggcttcagcctgggggagcccagcacgccgcaaccctctcacatagtcctctgccagcccatcttcagcaggcttttcacgacgggggacagtccaagggagacacgaaattgcctagaaagtcccaatag

SEQ ID NO: 245841 - DNA, 1686 bp, synthetic construct
  misc_feature 1..1686: note = Description of Artificial Sequence: Synthetic coding sequence
  source 1..1686: mol_type = other DNA
atggcggagagtggtgaatcggggggtcctcctggatcccaagattccgctgcaggagctgaaggcgctggcgctcccgcagctgctgcatctgcagaacccaaaattatgaaggtcacagtcaaaactccaaaggagaaggaggagttcgccgttcctgaaaattctagcgttcagcagttcaaagaagaaattagcaaacgctttaagtcccacaccgatcagctcgttcttatttttgccggaaagatccttaaagatcaggataccttgtcacagcatggaatccacgatggcctgaccgtccacctcgtcatcaagacacagaacaggccccaggatcattctgcccagcagaccaacacagccggaagcaatgtcaccacttcaagcacacctaactccaactcaactagtgggtccgcaacctcaaatccatttggtctgggtggcctcgggggtctggcgggtctgtcctccttaggactcaatacaaccaactttagcgaactgcaatcacagatgcagcgtcagctgctgagcaacccggagatgatggtgcagatcatggagaatccatttgtgcagtccatgctctctaatccggatctgatgcgtcagcttatcatggccaacccacagatgcagcagcttatacagcgcaatcccgagattagtcacatgctgaataatccagacataatgaggcagacactggaactcgccagaaatccagcaatgatgcaggaaatgatgcgcaaccaggatagagccctcagcaatctggagtccattccaggtggatataacgcacttcggaggatgtacaccgacattcaggaaccgatgctatcggcagctcaggaacagtttggaggaaatccctttgcaagtctcgtctctaacacgtcgtccggcgaggggagccagccctctcgaaccgagaatagggaccctctgccgaacccgtgggcaccccagactagtcagtctagctcagcatctagcgggacagcatccaccgttggaggcacaactggctctaccgcctccggcacttccggtcagtcaacgacagctcctaatttggtgccaggcgtcggtgcatcaatgtttaataccccgggaatgcagtccctcctccagcagatcacagaaaacccacagctcatgcagaatatgctctccgccccatatatgcgatcaatgatgcagtctctttcacagaaccccgacctcgccgctcaaatgcagaaccctgacaccttgtccgctatgagcaatccgcgtgccatgcaggcactgctacaaattcagcagggcttacagacgctggctacagaagccccagggctcatacccggattcacacccggtttaggcgcattgggcagcactgggggaagttcaggcacgaatggatctaacgctaccccatccgagaataccagccctactgccggaacaacagaaccgggtcaccagcagttcatacagcaaatgcttcaggctctggccggagtgaacccacagctgcagaaccctgaagtgcggtttcagcagcagttggagcaactgtcagccatgggctttcttaacagagaggctaatctccaagcattgatagcaactggaggagatattaatgcagccatcgaacgcctccttggcagccaaccttcatag

SEQ ID NO: 245842 - DNA, 1770 bp, synthetic construct
  misc_feature 1..1770: note = Description of Artificial Sequence: Synthetic coding sequence
  source 1..1770: mol_type = other DNA
atggctgagagtggagagtctggcggtccccctgggtcccaggacagcgccgcaggggcagaaggggctggtgcacctgcagctgctgcttccgccgagcccaagatcatgaaggtcaccgttaagacaccaaaggagaaggaggaattcgccgtgccagagaacagctccgttcagcaattcaaggaagagatctcaaagcggttcaagtcacataccgatcaactggtgcttatattcgccggtaaaatccttaaggaccaggatactctgtctcagcacgggatccatgacgggttgacagtacatctggtgataaagacccagaaccgaccacaggatcatagcgcccagcaaacgaatacggctggctctaacgtgaccacatcttctaccccaaactccaactcaactagcggcagcgctacctctaacccttttggcttgggaggacttggtggtctcgctgggctgagttctctaggactgaacaccaccaacttcagcgaactccagagccaaatgcagcgtcagctgttgtcaaatcctgagatgatggtccagattatggaaaatcccttcgtgcagtctatgctgtcaaaccccgacctcatgagacagctgatcatggcgaacccacaaatgcagcagctaattcagcgtaatccagaaatctcacacatgttaaacaatcccgacatcatgcgacaaacgctggagctggccagaaatccagcaatgatgcaagagatgatgcgcaaccaggacagagcgctttctaaccttgagtcaattcctgggggttacaacgcactccgacggatgtacaccgatattcaggagcccatgttatccgccgctcaagaacagttcggaggtaatccctttgcttcactcgtgagcaacactagctccggagagggttcccagccatcccgaaccgagaatagagatcccctccctaacccttgggccccacagacaagccagtcatccagcgcaagttctggtactgcctcaactgtcggagggacaaccggcagcacggcttccggtacatccgggcagagcacgacagcacctaatcttgtcccaggagtgggcgcaagcatgttcaatactccaggcatgcagtctctcttacaacagatcactgaaaatcctcaactgatgcaaaatatgttatcagccccatacatgcggtccatgatgcagagcctttcgcaaaacccagatctggccgctcagatgatgctcaataaccctttgtttgccggaaatccccagttgcaggagcagatgagacagcaactgcctaccttcctccagcaaatgcagaatcccgacaccctttccgcgatgtctaatcctagggccatgcaggcattgctgcagatccagcagggtctgcagacacttgccacagaggcgccaggcttgattcccggattcacccccggactcggagccctgggctcaacagggggttcgtccggaactaacggttcaaatgccactcccagcgaaaatacaagcccaaccgccggaaccacagaacctgggcatcaacaatttatacaacagatgctccaggcactggccggagtcaacccacagctgcagaacccagaggttcggtttcagcagcagttggagcagctttcagccatgggtttcttaaaccgagaagcaaatttgcaggctctgatcgcaactggcggtgacatcaacgcagcaattgaacgacttctcgggagccagccctcttag

SEQ ID NO: 245843 - DNA, 1875 bp, synthetic construct
  misc_feature 1..1875: note = Description of Artificial Sequence: Synthetic coding sequence
  source 1..1875: mol_type = other DNA
atggcggagaacggggagagtagcggccctccacggcctagtcggggtcccgcagcagcccaaggcagtgccgctgcaccggcagaacccaaaattattaaagtgaccgtcaaaactcctaaagaaaaggaagagttcgcagtgccagagaattctagcgtccagcagtttaaagaggcaatcagtaaacggttcaagtcccagactgaccaacttgtattaatttttgctgggaaaatactgaaagaccaagatacgctgatccaacatgggatacatgacggactgaccgtgcacctggtgatcaaatcacaaaaccgaccccagggtcaatccacccagccctcgaacgccgctggaaccaacacaacctctgcatctacaccaagatccaactcgaccccaatctctaccaattccaatcccttcggactcggcagtctcggaggcctggctgggctgtcttccctgggcctttcctccacgaatttctcagaactacagtcccaaatgcagcagcagctgatggcctcccctgaaatgatgattcaaatcatggaaaaccccttcgtgcagtccatgttgagtaatcctgacctgatgcgccagctgattatggctaatccgcagatgcagcagcttattcagcgcaatccagagattagccatctgctgaacaaccccgacattatgcgccaaaccctagagatcgctcggaatccagccatgatgcaggagatgatgcgaaaccaagacctggctttatcaaacctcgaaagcattcccggaggctataacgccctgcgcagaatgtacaccgatatccaagagcccatgctcaatgctgcccaggagcagtttggcggaaatcccttcgcctcagtcggaagtagctcatccagtggtgagggcacacagcctagccgtactgagaatcgcgatcctcttcccaatccctgggctcctccccctgcgactcaaagcagcgccacaacgtctaccaccaccagtactggctccggctcagggaattcgtcctccaatgcaactggcaacactgtagccgcagcaaattatgtggcgagcatctttagtactcctggtatgcaatctctcctacagcaaatcacagaaaatccccagctcatccaaaacatgctgagcgccccatatatgcgctccatgatgcagagtctgagccagaacccagatctggccgctcagatgatgttgaactctcctttgtttaccgccaacccacagcttcaggagcagatgcggccacagctacctgcatttttgcaacaaatgcagaacccagatacccttagtgcaatgtccaaccccagggcgatgcaggctctgatgcaaatccagcaaggattgcaaacattggccaccgaagcaccaggcctgataccgtcctttactcccggtgtgggagtgggagtgctgggcacagcaatcgggcctgtaggtccagttactcctataggacccattgggccaatcgttcctttcacccccattgggcctatcgggcctatcggcccaactggtcctgcagcccctcctggctctactgggtccggaggccctaccggccctacggtgagcagtgccgcaccttctgagacaaccagccccacatctgaatccggccctaatcagcagttcatccagcagatggtccaggcattggccggtgcaaatgcaccgcagttacccaatcccgaggtgcgcttccagcaacagctggagcagctgaatgccatgggcttcttgaaccgcgaggctaacctccaggcactgatcgccacaggcggagacatcaatgctgcaattgaaaggctgctcgggagtcaaccttcgtag

SEQ ID NO: 245844 - DNA, 1467 bp, synthetic construct
  misc_feature 1..1467: note = Description of Artificial Sequence: Synthetic coding sequence
  source 1..1467: mol_type = other DNA
atggccgagaacggtgagtcttccggcccacctcgcccttcacggggtcccgcagctgcccagggatcagctgcggctccagctgagccaaaaattattaaggttactgtgaaaacccccaaggagaaagaagaattcgcagtgcccgaaaatagttcggtgcagcagtttaaggaggccatcagcaaacgcttcaagtcacagactgaccagctggtgctgatttttgctggaaaaattctcaaagatcaggacacactgatccagcacggtattcacgacggcctcacagtccacctcgtgattaagagccaaaataggccccagggccagtctacgcaaccaagtaatgcagccggaaccaacaccacctccgcatctacccctaggtccaacagtacccctatctcaactaatagtaacccgttcggactgggaagtctgggtggtctggcgggtctgagctccctcggactctcttcaacgaacttcagcgaactccagtcccaaatgcagcagcagctcatggcgtcgccagagatgatgattcaaatcatggagaacccatttgttcagtcaatgctttctaacccagacctgatgaggcaactcataatggctaacccacaaatgcagcagctgattcagcggaacccagagatttctcatttattgaacaaccctgatattatgaggcagacccttgaaattgccagaaacccagcgatgatgcaagaaatgatgcgcaatcaggaccttgcactttctaatctggagtccattcccggagggtataatgctctgagacggatgtataccgacatccaagaaccaatgttgaacgcagcacaggagcagtttggcggaaatccgttcgcctccgtggggtcgtcatccagcagtggtgaaggaacacaacccagtaggaccgagaaccgtgacccattgcccaatccttgggctccaccccctgctacacagagttctgctaccacctccacaactacctcaacagggtctggaagcggtaatagttcttctaacgccactggcaataccgtggcggcagccaattatgtggcttctatcttcagtactcctggcatgcagagtcttttacagcagatcacagagaacccacaacttatacaaaacatgttatccgctccgtatatgcggagcatgatgcagagcctctcacaaaatcccgaccttgcagcacagatgatgttgaacagtcctttgtttacagccaatccacagctccaggagcagatgagaccacaactcccagcattcttgcaacagatgcagaatcctgataccctttccgccatgtccaaccctaccagttcatctttctctaaatggtgtaggccttggctggaacaaatgctccactcttgtcggatccagaaaagtgacttttcaaacaattggaacagtagcactcagtggggcagttag

SEQ ID NO: 245845 - DNA, 1968 bp, synthetic construct
  misc_feature 1..1968: note = Description of Artificial Sequence: Synthetic coding sequence
  source 1..1968: mol_type = other DNA
atggccaagggcggagaggcacttccgcaaggttcccccgcacctgtgcaggaccctcacttaattaaagtgacagtcaaaactccaaaggacaaggaagattttagcgtgaccgacacctgtacaattcagcaactgaaggaagagatcagccagagattcaaagcacaccccgatcagttagtcctaatctttgccggtaaaatcctgaaggaccccgactcattagcacagtgtggcgtgcgggacggcttgacggtgcacctggtcatcaaacgtcagcatcgagccatgggcaatgagtgccccgctgcctccgtgccaacccaaggaccctcgcctggctctttgccccagccctctagcatatatcccgctgatggacctcctgctttttcattgggcctcctcacggggttaagcaggctgggcctagcgtatcgaggctttcctgaccagccatccagcttgatgcggcagcacgtgagtgtccccgagttcgtgacccagttaattgacgatccgttcattcctgggctgctatctaacactggattagtccgtcagttggtgctagataatccccacatgcagcagcttattcagcacaatccagagattggtcacatccttaataatcctgagatcatgcgccagacactcgagtttctaaggaatccggctatgatgcaggagatgatcagaagccaggatcgggtgctgtctaaccttgaaagcatacccggaggatataatgtgctttgcaccatgtacacagacataatggaccctatgctgaacgctgttcaggagcaatttggtggaaatcccttcgccaccgcgacaaccgacaacgcgaccaccacaacgtctcaaccctctaggatggagaattgcgaccccctgcccaacccgtggacttccacccacggtggcagcggatcccgccaagggagacaagacggcgaccaagatgctccggatatacgaaatcgtttcccaaattttctgggaattattcgtttgtatgactatttacagcagctccacgagaacccgcaaagcctggggacatatcttcagggaaccgcttccgctctttcacaatctcaggagcctcccccaagtgtgaacagggtccctccatcctcacccagctctcaggaaccaggatccggccaaccccttcctgaggaaagtgtcgcaatcaagggcaggagttcttgccccgcattcctcagataccccacggaaaatagcaccggtcagggcggtgaccaggacggcgcaggcaagtcttctactgggcacagcactaatctgcctgatctcgtctccggactgggtgactctgcgaatcgtgtgccctttgcaccactgtcattttcaccaactgccgcaattccaggcatccctgagcccccttggctgccgagccccgcttatccccgtagccttagacctgacggcatgaatcctgctccgcagttgcaggacgagattcaaccacagctgccactgctgatgcacttgcaggccgctatggccaacccaagagcactacaggccctgaggcagatcgagcaggggctccaggtgctcgccacggaggcccctcgcctgcttttatggtttatgccttgtttggctgggaccgggtccgtagcgggtgggattgagtccagggaagatcctctgatgtccgaggacccactgccaaacccgcctcctgaggttttccccgctcttgactcagccgagcttggttttctgagccctccattccttcacatgctgcaggacctggtgtctactaatcctcagcaactgcaaccggaagcgcattttcaggtacaactggagcaattacggtccatgggcttccttaatagggaggccaatctgcaggccttgatcgccactgggggagacgtggatgcagcggtagagaagctccgacagtcatag

SEQ ID NO: 245846 - DNA, 666 bp, synthetic construct
  misc_feature 1..666: note = Description of Artificial Sequence: Synthetic coding sequence
  source 1..666: mol_type = other DNA
atggcaaagggaggagaagccttgcctcaagggagccccgctccggtccaagaccctcacctgatcaaagtgactgtgaaaaccccaaaggacaaagaggacttttcagtcaccgatacatgcaccatccaacagctcaaggaggaaattagtcagcgatttaaggctcatccagaccaacttgtgctgatcttcgccggtaagatcctcaaggaccccgacagcctggcacagtgtggggtccgagatgggctcaccgtccatctggtcattaagaggcagcatagggcaatgggtaatgaatgtcctgccgcaagcgtcccgacacaggggccaagccccggtagtctgccacagccatccagtatctacccagccgacggcccaccagctttttcactgggactgttgacagggctgtcacgtctggggctggcttatagaggctttcccgatcagccatcttcactcatgagacagcacgttagtgtccctgaattcgtcacccagcttatcgacgatccttttattccaggactcttgtccaacactggcctcgtgagacaacttgtgctggacaatccccatatgcaacagttaatacaacacaaccccgagattggccacatcttgaataacccagagatcatgcgtcaaaccttgtag

SEQ ID NO: 245847 - DNA, 681 bp, synthetic construct
  misc_feature 1..681: note = Description of Artificial Sequence: Synthetic coding sequence
  source 1..681: mol_type = other DNA
atggccgaacctagtggagctgagacaaggcccccaattagagttacagtgaagacgcccaaagacaaagaagaaatcgtgatctgtgatcgtgcctccgttaaagagttcaaggaggagataagccgcaggttcaaagctcagcaggatcagctcgtgctaatcttcgccggtaagattctgaaggacggcgataccttgaaccagcacggaataaaggacggactgactgtccacctggtcatcaagactccacaaaaggcccaagatccagcccctccagcagctcctagcctgccggcagccgatgccgagcctagggttacccttcacccttaccagagtccttcccatgctggaattgccgcagaccccgctgggactactgacctggcagatagaggaccctgggctggcacacaaccgtggctcctttgggacataccagacccttccactctttcgagacagcagaggagggtttatgcgagaggcccacatttcctcacttcccatgcttcccacatcttttccaacagaggtttccagaggcccgcagcaacacatgccgctgacgaccccgcattcggatggaagtggaagctcacaggggctgatgctcgctcagagatcagcgccgctgccggagctgcgcagctgcacggcctccatcagtcctag

SEQ ID NO: 245848 - DNA, 1806 bp, synthetic construct
  misc_feature 1..1806: note = Description of Artificial Sequence: Synthetic coding sequence
  source 1..1806: mol_type = other DNA
atggccgaaccatcaggagccgaaacccggccaccgattagggtgactgtgaagactcctaaagacaaagaagagatagtcatctgcgatcgagcatccgtcaaggagttcaaagaggaaatatctagacggttcaaggcccagcaggaccagctcgtattgattttcgcaggcaaaatactcaaggatggggatacattaaatcaacacggcattaaggacggattgactgtgcacctggtcatcaagacgcctcaaaaagctcaagatcctgcggcagccacggcctcatccccgtccacacctgacccagcttcagcccctagtaccacgcctgcaagtcccgcaacacctgcccagccctcaaccagcgggtccgcatcctcagacgccggatcaggcagtcggagaagttctggtggcggacctagtcccggagccggtgaggggtcgccttccgctacagccagtatcttgtccggtttcggtggaattctcggcctcggatctctgggtctcggcagtgctaatttcatggagctgcagcaacagatgcagagacagctgatgagcaatcccgaaatgctctcacagattatggagaacccactagtgcaggacatgatgagcaatccagatctcatgcgacatatgattatggcgaaccctcagatgcagcagctcatggagcgtaatcccgagatttcccacatgctcaacaaccctgaactcatgagacagacgatggagctggcgaggaacccagccatgatgcaggagatgatgaggaaccaggaccgggcacttagcaaccttgagtccattcctggcggatacaacgctctaaggagaatgtatacagacatccaagaaccgatgttctctgccgctagagaacagtttgggaacaaccccttcagctctcttgccggaaactccgatagcagctcaagtcagccactaaggactgagaaccgggaaccactgcccaacccctggagcccaagccctccaacctcccaggcccctggttctgggggagagggcacgggcggtagcggcacgtctcaagttcaccccactgttagtaaccccttcggcattaacgccgcttctctcgggtctgggatgttcaattcccccgaaatgcaggcactactgcagcaaattagcgagaatccccagctgatgcaaaacgtcatctccgccccttacatgagatctatgatgcagacccttgcccagaacccagatttcgccgctcaaatgatggtgaacgttcctttgttcgcagggaatccgcaactgcaggagcagctccggctgcagcttcctgtcttccttcagcagatgcagaatccagaaagtctctccatccttaccaaccctagagccatgcaagcccttctgcagattcaacagggcctccaaaccctgcagacagaggcaccagggctcgtgcccagcctcgggagctttggcataagccggacgcccgcacctagcgccggaagcaacgcaggctctacccccgaggccccaaccagtagtcccgcaactccagccacttcctccccgacaggggcttcatccgcgcagcagcagctcatgcaacagatgatccaactcttagccggttcagggaactcccaagttcagacacccgaggtgcgatttcaacagcagcttgagcagctgaacagcatggggtttattaaccgcgaggcaaacctgcaggccctgatcgctactgggggagatatcaacgccgctatcgaacgactcctcggaagccaattgtcctag

SEQ ID NO: 245849 - DNA, 336 bp, synthetic construct
  misc_feature 1..336: note = Description of Artificial Sequence: Synthetic coding sequence
  source 1..336: mol_type = other DNA
atggctggaaaacaggccgtatctgctagcggtaagtggctggatggcatccggaagtggtattacaatgcagctggtttcaacaaactggggctcatgagagacgacaccatatacgaggatgaagatgtgaaagaggctatccggcgattgccggagaacctctacaatgataggatgttcaggattaaaagagcactggatctgaatctgaagcaccagatcctgccgaaggagcaatggaccaagtacgaggaagagaacttttatttagagccttatctcaaggaggtcatcagagagagaaaagaaagagaggaatgggccaagaaatag

SEQ ID NO: 245850 - DNA, 1443 bp, synthetic construct
  misc_feature 1..1443: note = Description of Artificial Sequence: Synthetic coding sequence
  source 1..1443: mol_type = other DNA
atggctgccagcgtggtgtgccgggcagctacagcaggagcacaagtgctgctgagggccaggcgtagtcccgctctgcttagaactcctgctttgagatcaacagccacttttgcgcaggcactgcaattcgtgccagaaacccaggtatcactgttggacaacggattgagggtggcttccgaacagtcctcccaacctacctgcaccgttggtgtgtggattgatgtcggaagcagatttgaaacagagaagaataatggggcagggtactttctcgaacacctggccttcaaaggtactaagaaccgtcctggaagcgcccttgagaaggaagtggaatccatgggggcacacctgaacgcatattccacccgggagcacacagcttactatataaaagcgctgagcaaggaccttcccaaagccgtggagttacttggcgacatcgtgcagaactgctcgctcgaggattctcagatcgagaaagagagggacgtgattttacgtgagatgcaggagaatgatgcaagtatgcgggatgtggtctttaactacctgcatgccacagcctttcagggcacacctttggctcaggccgtggagggtccgagcgaaaacgtgcgcaagctctctcgcgcagacctgacggagtacctgagtacgcactacaaagctcctcggatggtgctggctgccgctggaggtgttgaacatcagcagctcctcgacctcgcccagaaacacctgggagggatcccttggacttatgccgaggatgccgttccgacgctgactccatgcaggtttacgggtagcgaaattcgccatcgggacgatgcccttccattcgcccacgtcgccatagctgtggagggtcctgggtgggcttcacccgataacgtagcccttcaggtcgctaatgccataatcgggcactatgattgtacatatggcggaggagtacatctctcctcccctctggcctctggggcagttgccaacaaactgtgtcagagctttcagaccttcagcatttgttatgcagaaacggggctcttaggggctcactttgtgtgtgatcggatgaaaatcgacgatatgatgtttgtgttgcagggccagtggatgaggttatgcacatccgcaacagagtcagaggtggcccgaggaaaaaatatattacgcaatgcgctggtcagccacctggatgggacaacgccagtctgcgaggacattggacgttcactgctaacatatggacgacgcattcctttagccgagtgggagtcacgaatcgccgaagtggacgctagcgtcgtcagggagatctgctccaaatatatttatgaccagtgtccagctgttgccggatatggtcccatagaacagctcccagactacaaccgaatccggtcaggcatgttctggctgcggttttag

SEQ ID NO: 245851 - DNA, 1362 bp, synthetic construct
  misc_feature 1..1362: note = Description of Artificial Sequence: Synthetic coding sequence
  source 1..1362: mol_type = other DNA
atgaaattattaactcgcgcaggttcatttagcagattctactcgctgaaagtggctcccaaggtgaaggctactgctgcccctgctggggcaccaccacagcctcaggatttggaattcacgaaactgccaaatgggttagtgatcgcctccctggaaaattatagccctgtaagccgcattggattattcatcaaggcaggcagcagatacgaagacttttcgaacttaggcactactcatttattaaggctcacatcatctttaaccactaagggagctagctcatttaagattacaagaggaattgaagccgtcgggggtaagctgagcgttaccgctactcgggaaaatatggcctacacagttgaatgtctgagaggagatgtggatatactcatggaatttctgctgaatgtgaccactgcaccagaatttcgccgttgggaggtagccgatctgcaaccccaattgaaaatcgataaagcagtggcgttccagaacccccagactcatgtgatcgaaaacctccacgcggcagcgtatcggaacgccctggccaatccactgtactgccctgactatagaattggtaaagttacctctgaggaacttcactactttgttcagaatcacttcacttcagcaaggatggcgcttattgggttgggcgtatctcaccccgtgctcaagcaagtggcagaacagtttcttaatatgcggggtggacttgggctgtcaggtgccaaggccaactatagggggggagagatccgggagcaaaatggcgatagcctggtgcacgcggcattcgtcgctgagagtgctgttgcgggaagtgcagaggctaacgctttttcagtcctgcagcatgttctgggggcaggccctcacgttaagcggggttccaacaccactagccaccttcaccaggccgtggctaaagcgacgcaacagcccttcgacgtaagcgcttttaatgccagctattccgattctggcttgtttggaatttacacgataagtcaggcgacagccgctggagatgtgatcaaagctgcctataaccaggtgaagactattgcccaaggtaatctgagcaacactgacgtgcaggccgctaaaaataaactgaaggcaggttacctgatgtccgtggaatccagtgaatgcttcctggaagaggtgggcagtcaggccctagttgctggcagctatatgccaccttcaactgtgttgcagcaaatcgactccgttgcaaacgcggacatcattaacgcggcaaaaaaatttgtgtcaggccagaagtccatggctgcgtcaggaaaccttggacataccccttttgtggacgaattatag

SEQ ID NO: 245852 - DNA, 276 bp, synthetic construct
  misc_feature 1..276: note = Description of Artificial Sequence: Synthetic coding sequence
  source 1..276: mol_type = other DNA
atggggctcgaagacgagcaaaaaatgctgaccgaatctggcgatccagaggaggaggaggaggaggaggaggagctagtggatcctcttacaaccgtgagagagcagtgcgagcagctagaaaaatgcgttaaggctcgggaacggttagaactctgcgacgagagagtgagctcccggtcacataccgaggaggattgtacagaagagctgtttgacttcttacacgcacgggatcactgtgtggctcataaactattcaataatctcaagtag

SEQ ID NO: 245853 - DNA, 249 bp, synthetic construct
  misc_feature 1..249: note = Description of Artificial Sequence: Synthetic coding sequence
  source 1..249: mol_type = other DNA
atgggacgcgagttcggcaatttgacccggatgaggcacgtaatcagctacagtttaagccccttcgaacagcgggcatatccacacgtgttcaccaaggggattcccaatgtactgcggagaattcgggaatccttcttccgggtagttccccagtttgtggtgttttatctcatttatacttggggaacggaggagttcgagcgctctaagagaaaaaaccctgctgcttatgagaacgataagtag

SEQ ID NO: 245854 - DNA, 249 bp, synthetic construct
  misc_feature 1..249: note = Description of Artificial Sequence: Synthetic coding sequence
  source 1..249: mol_type = other DNA
atggggagagaatttggaaaccttacaaggatgcggcatgtgatctcatactccctcagccccttcgagcagagggcgtatccacatgtgtttaccaagggcatacctaatgttttgcgcaggatcagggagtccttcttcagggtggttccacagttcgtcgtgttctacctgatttatacatgggggacagaggaatttgaacgttccaaaagaaaaaacccggcagcctacgaaaacgataagtag

SEQ ID NO: 245855 - DNA, 249 bp, synthetic construct
  misc_feature 1..249: note = Description of Artificial Sequence: Synthetic coding sequence
  source 1..249: mol_type = other DNA
atgggtagggagttcggaaaccttaccaggatgagacacgtcattagctactccctatctccttttgaacaacgtgcttacccacacgtgtttaccaagggcattccaaacgttctcaggcgcatcagagagtcatttttcagagtcgtaccccagttcgtcgtgttctatttgatttacacgtggggcaccgaggagttcgaacgtagcaagcggaagaatcctgcagcctatgagaacgacaagtag

SEQ ID NO: 245856 - DNA, 387 bp, synthetic construct
  misc_feature 1..387: note = Description of Artificial Sequence: Synthetic coding sequence
  source 1..387: mol_type = other DNA
atgcagatcttcgttaaaactttgacaggcaagacaatcactctcgaagtggagccatctgacaccatcgagaatgtaaaagccaaaatccaagacaaagagggaattccaccagatcagcagagattaatttttgccggtaaacaattagaagacggcagaacccttagcgactataacatacagaaggagagcaccttgcacctggtattgcgactgagagggggtatcattgagccatcactcaggcaattggctcagaaatataactgtgacaaaatgatatgtaggaaatgttacgctaggctacatccaagagcagtcaattgtagaaagaagaagtgtggccacacgaataacctccggcctaaaaagaaggtcaagtag

SEQ ID NO: 245857 - DNA, 387 bp, synthetic construct
  misc_feature 1..387: note = Description of Artificial Sequence: Synthetic coding sequence
  source 1..387: mol_type = other DNA
atgcagattttcgtgaagactctaactggtaaaaccattacactggaggtggaaccctccgacaccattgagaatgtgaaggctaagatccaggataaggaaggtatccccccagaccagcagaggcttattttcgcaggaaaacaactcgaggacgggcgaacactctcggactataacattcaaaaggagagtacactgcatctggtgctcagattgagaggcggtataattgaaccatctttgaggcagttagcccagaaatacaactgtgataagatgatctgtaggaaatgctacgccaggctacaccctagggctgtcaactgcaggaaaaagaagtgcggccataccaataatctgagacccaagaagaaagtgaagtag

SEQ ID NO: 245858 - DNA, 1872 bp, synthetic construct
  misc_feature 1..1872: note = Description of Artificial Sequence: Synthetic coding sequence
  source 1..1872: mol_type = other DNA
atggcagccggagagacacagctttacgccaaagtgagcaataaattaaagtctcgctcatcaccatccctgctggaaccccttctggctatgggcttccccgtgcacacggctctcaaggctctggcagctaccggacgtaaaactgctgaagaagccctggcatggctccatgaccactgcaatgatccaagtcttgatgacccgattccacaggaatacgccctctttctgtgtccaactggaccgctgctcgagaaactacaggaattttggagagagtcaaaacgccaatgcgcaaaaaatcgggctcacgaggtgttccctcatgttaccctttgcgattttttcacttgcgaagatcaaaaggtggagtgtttgtatgaagccctgaagagggccggtgacaggctgctggggtccttcccaaccgcagtcccactcgccctgcatagctctatttcctacctgggattttttgtgagcgggagtcctgctgacgtgattcgcgaattcgctatgacattcgccactgaggccagcctcctggccgactgctctgttaaaccttgtacaaaacaacttcatttgacactggctcacaaattttatccccatcaccagcggacgttggaacagctcgcccgtgctatcccgctcggacattcatgccagtggacagctgcattgtatagccgggacatgcggttcgtgcactaccaaacattgcgggcactgttccagtacaagccccaaaacgtcgacgagttaacgctctctccaggggattatatctttgtggacccgacccagcaggatgaagcttctgagggctgggtgatcggcattagccaacgaactgggtgtcggggatttctgcctgaaaactacactgatagggcttccgagagcgacacttgggtgaaacaccgaatgtacaccttctccctggccacagacctcaattccagaaaggacggggaagctagctctcgttgctctggcgagttcctcccgcagacagccaggagcctaagcagccttcaagctctacaggctacggtggcccgtaagtcagtgttggtagttaggcacggagagagggtggatcaaattttcggcaaagcatggctgcagcaatgtagcacgcccgatgggaagtactaccgaccggatctgaacttcccctgttcgctacctaggcggtccagaggtatcaaggacttcgaaaatgatccccctctcagttcttgtggaatctttcagagcagaattgctggcgacgccttactggattcagggattcgaattagcagcgtttttgcgagcccagctctgcgatgcgtccaaactgccaaacttatcctagaagaactcaagttagagaagaaaattaaaatcagggtggagccaggcatattcgagtggaccaagtgggaagcaggtaagacgaccccaaccctcatgtccttggaggaacttaaagaggcaaattttaatatcgacacagactaccgcccagcatttcccctgagcgccctgatgcccgctgagtcttaccaagaatacatggacagatgcaccgcttcaatggtgcagattgtaaacacttgccctcaggatacgggtgtaatactcattgtgtcacatgggtccactctggactcttgtacacgccctttgttaggcctcccaccccgagagtgcggcgattttgcccagttagttcgtaagatcccttccctcgggatgtgtttttgcgaagaaaataaagaagaagggaagtgggaactggtgaacccccctgtaaagactctcacccacggtgctaatgcagcttttaactggcgtaactggatctccggaaattag

SEQ ID NO: 245859 - DNA, 1986 bp, synthetic construct
  misc_feature 1..1986: note = Description of Artificial Sequence: Synthetic coding sequence
  source 1..1986: mol_type = other DNA
atggcagcaggcgagactcagttatatgccaaggtgtctaacaagctgaaaagccggtctagtccgtcattactggagcccctgctagccatgggcttcccggtgcatactgctctcaaagcactcgccgctacaggccgaaagaccgctgaagaggcactggcctggctgcacgatcactgtaacgatccatccttggacgatccaataccccaggaatatgcactgttcctgtgccctaccggcccactcctggagaaacttcaggagttctggcgcgagtccaagcgccagtgcgcaaagaaccgggctcacgaggtttttccacacgttaccctttgtgacttcttcacatgtgaggaccaaaaagttgaatgcctctacgaggcactgaaacgggctggcgaccggctactagggtcctttcccacggccgtgcccttggcactgcattcatcaatttcctaccttggcttctttgtctctggttcccctgcggatgtcattagagaatttgccatgacctttgccaccgaggccagccttctggcaggcacaagcgtgagcaggttctggattttctcccaggtccccggacacggtcctaacttgagactaagtaacctgactcgagcgagcttcgtttcacattatatccttcagaaatactgttctgtgaagccatgtacaaaacaactgcacttgactttggcccacaaattctatcctcatcaccagcggactttagagcagttggctcgggcaatacccctcgggcactcctgccagtggaccgccgctctctactctcgtgatatgcgctttgtgcattaccagacactccgcgcactatttcagtacaagcctcaaaacgtcgatgaactgacgttatcccccggagactacatcttcgtggacccaacccagcaggacgaggccagtgaaggatgggtgataggtattagccagcgaacgggttgtagaggttttctgcccgagaattatacagatcgtgcctccgaatctgatacatgggtaaagcacagaatgtataccttcagtctagcaaccgatctcaatagccgtaaagatggagaagcctcatctagatgtagtggcgagttcctgccacagaccgctaggtcccttagctcattacaggctctgcaagcaacggtagcccgaaaatccgtgctggtcgtaaggcacggagaacgggtggatcagatcttcggcaaggcgtggctacagcagtgttccaccccagacggaaagtactatagacctgatctgaacttcccgtgtagtcttccaagacgtagccgtggcattaaagactttgagaatgatcctccactcagttcttgtggcatcttccaaagtcgtatagccggtgatgcccttctggactctgggattcgcatctccagtgttttcgcctctcctgcccttcggtgtgtacagacggcgaaattgatactggaggagctaaaattggaaaaaaaaatcaaaattagagttgagccagggatttttgagtggaccaagtgggaggccggaaaaactacgcctactctcatgtccctggaggagttgaaagaggctaacttcaacatcgacaccgactaccggcctgcctttcctttgtcagcactgatgccagccgagtcataccaggaatatatggaccgatgtacagcctcgatggttcaaattgtgaatacctgcccacaagatactggcgttatcctcattgtaagccatgggagcacgttggacagctgcacaaggcccctgctgggcctcccaccaagggagtgtggggatttcgcacaacttgtgcgcaaaattccaagccttggaatgtgtttctgcgaggagaacaaagaggagggcaaatgggaactggtgaacccaccagtgaaaactttaacacacggagcgaacgctgccttcaattggcggaattggatctctggtaattag

SEQ ID NO: 245860 - DNA, 369 bp, synthetic construct
  misc_feature 1..369: note = Description of Artificial Sequence: Synthetic coding sequence
  source 1..369: mol_type = other DNA
atggcagccggagagacgcagctctatgcaaaggtctcaaacaagctgaagtctcggagctccccctctttgttagaacccctgttagccatggggttccccgtgcatactgcgctgaaagccctcgccgcaactggtcggaagacagccgaggaagctctggcctggcttcatgaccactgcaacgacccgagcctggatgaccctatcccacaggagtacgcactcttcctgtgccccactggcccattgctggagaagctgcaagaattttggcgggaatccaagcgccagtgcgccaagaatcgggcacatgaggtctttccccatgtaacattgtgcgactttttcaccggcccagcggtgtag

SEQ ID NO: 245861 - DNA, 1581 bp, synthetic construct
  misc_feature 1..1581: note = Description of Artificial Sequence: Synthetic coding sequence
  source 1..1581: mol_type = other DNA
atggcagccggagaaacgcagctgtacgccaaggtgagcaacaagcttaaatctcgcagtagcccatctctcctggaaccgctgctggccatgggatttccggtgcacacggctctcaaggccctggccgctaccggaagaaaaactgccgaagaagccctggcctggcttcatgatcactgcaacgatccttctctggatgacccaattccccaggaatacgccctcttcttatgtcccactggcccattgctggagaaattacaggaattttggagagaaagcaagagacagtgcgcaaaaaatagagcccacgaggttttcccgcacgtgaccttgtgtgatttcttcacttgcgaggatcaaaaggtagaatgtctctatgaagctctgaaaagggcgggagatcgcttactggggtcattcccgaccgccgtgcccctggctttgcactcttccatctcctacctggggtttttcgtgagcggctcaccggctgatgtgatccgggagttcgcaatgacatttgccacagaagcttctctcctggcagactgttccgtgaaaccctgtacaaagcagttgcatctgactcttgctcacaaattttaccctcatcaccagcgaacgctggagcaattggcccgagcaataccccttggccactcttgtcagtggaccgccgctctgtactcacgggatatgcggttcgtgcactatcagaccctgcgcgctctgttccagtacaagccacagaacgtggatgaattgaccctcagtcccggagactacatcttcgttgatccaacacagcaggatgaggccagcgaaggctgggtgattggcatctctcagcgtaccggctgtagaggctttctgcccgaaaattatacagaccgggctagcgagagtgatacctgggttaagcatcgcatgtacaccttcagcctggccaccgatctgaacagtagaaaagatggggaggcttcctctaggtgtagtggtgagtttttgccccaaactgcacgctccttgagctcgctccaagccctgcaagcgacagtggctagaaaatcagtgctggttgttaggcacggcgaacgggttgatcagatttttggcaaggcctggcttcagcaatgtagtacgcctgatgggaaatactatcgcccagaccttaacttcccctgtagcctaccacgcaggtctagaggaataaaggatttcgaaaacgatcctcctctgagcagttgcggtatattccagtcccgcatcgcaggggacgccctcctggacagcgggattcggatcagttccgtattcgcctctcccgctcttcgctgcgtgcagacggccaagctcattttggaagagctgaaactagagaagaaaatcaaaatccgcgttgagccaggcatattcgaatggacgaagtgggaggcaggaaaaaccacgcccaccctcatgtccctggaggaacttaaagaggccaattttaatattgacacagactaccggtccctcccatgggcttgtgccagtgtcaaaaaaataaagagaaaggaaaacggctcatggtag

SEQ ID NO: 245862 - DNA, 1950 bp, synthetic construct
  misc_feature 1..1950: note = Description of Artificial Sequence: Synthetic coding sequence
  source 1..1950: mol_type = other DNA
atggctcagtacggtcacccatcaccactcgggatggctgccagggaggaactgtattccaaagtgacccctaggagaaaccggcagcagagaccagggacaatcaaacacggttccgccttggacgtgctactgtcaatggggtttccgagagctcgtgctcagaaggccctcgccagtacaggcggtcgatccgtccaggccgcttgtgactggctgttttcacacgtgggagatccttttttggatgatcctctgccaagggaatacgtgctgtacctaagacctacgggcccactcgcccaaaaattatccgatttctggcagcagtctaagcagatatgtggaaagaataaggctcataatatttttccacacattacgttgtgccagttcttcatgtgcgaagactccaaggtcgacgctctgggcgaagcattgcagacgacggtttccagatggaaatgcaagttctcagctccccttcctctggaattgtacacttctagtaacttcattggccttttcgtcaaagaggattcagccgaggtcctgaaaaaattcgcagccgattttgctgctgaagccgctagcaagaccgaggtgcacgtggagcctcacaagaaacagctgcacgtgacccttgcgtatcattttcaggcttcccatctccctactcttgagaaactagcccagaacatagatgtgaaattgggttgcgattgggtggccaccatatttagccgcgatatccggtttgccaaccatgaaacccttcaagtgatctacccttatacaccccaaaacgatgacgaactcgagctcgttccgggtgacttcatctttatgtctcctatggaacagacatccacatcagagggctggatctatggcacctctttaactactggatgctcaggacttttaccagagaattatattaccaaggccgatgagtgcagcacctggatcttccatggaagctactctattttgaatacgtcttcctctaacagcttgacgtttggagacggggtgctcgagagacgcccatatgaagaccagggcttgggagaaacaacaccactgaccatcatctgtcagcctatgcagccactcagagttaattcacaacctgggccacagaagcgctgcctctttgtttgtagacacggggaaaggatggatgttgtgttcggcaagtactggttaagccaatgcttcgacgctaaaggcagatacatcaggaccaatctaaacatgcctcacagcctgccccagagatccggagggttcagggattatgagaaagacgcaccaataaccgtgttcggttgcatgcaggctcgcctggtgggagaggccctgctcgagagcaacacaatcatcgatcacgtgtactgtagtcccagcctgcgttgcgtacagacagcgcacaacatcctcaaaggcctgcagcaggagaaccacctcaaaataagggttgagccaggcttattcgagtggacgaaatgggtggccggttccacattgcccgcatggatccccccttctgaactggcagcggctaacttaagtgttgacacaacatacagaccgcacatccctatctctaaactggtagtgtccgagtcatacgatacttatatctctaggtcctttcaggtaacaaaagagatcatttccgaatgtaagtccaaaggcaacaatattctgatcgtcgcccatgcctcctcccttgaggcttgcacttgtcagctccaaggcctatcacctcagaattccaaggactttgtgcagatggtgaggaaaatcccgtacctgggcttctgctcttgcgaagagctgggcgagaccggtatttggcagctgaccgatccacctatcctccctctgacccatggccctaccggtggttttaattggagggagacccttctgcaagagtag

SEQ ID NO: 245863 - DNA, 1509 bp, synthetic construct
  misc_feature 1..1509: note = Description of Artificial Sequence: Synthetic coding sequence
  source 1..1509: mol_type = other DNA
atggctagtaaaaagcttggagccgatttccatggaaccttctcctaccttgacgatgtgcctttcaaaacaggggacaagtttaagaccccggctaaggtcggactgccgatcggcttttcacttccggattgcctgcaggttgttcgcgaggtccaatatgacttttctttggagaaaaaaacaattgaatgggccgaagaaataaagaaaattgaggaagctgagcgagaggcggagtgtaagatcgctgaggccgaggccaaagtgaacagcaagtccggcccagagggagacagcaaaatgagcttttcgaaaacacactctaccgctaccatgcccccacctatcaaccctattctggcctccttgcagcataactcgatcctcactccgacaagagtgtcttcttctgcaacaaagcaaaaagtcctcagcccccctcatattaaagccgatttcaacctggccgattttgagtgcgaagaagaccccttcgacaacctggagcttaaaaccatagacgagaaagaggagctgcggaatatactggttggcacaacaggccctattatggcccaacttttggacaacaacctgcccagaggaggcagcggaagtgtgctgcaggatgaggaagtactcgcgtcgctggagcgggctaccctcgattttaagccgctccacaagcctaatggatttattacactacctcaactagggaattgcgaaaaaatgagcttatccagcaaagtgtctctgccaccaatccccgctgtctccaacatcaagtctctatccttccccaagctggattctgacgatagtaatcagaaaacagctaagctggcgagcacctttcactcaaccagttgccttcggaatgggacgttccaaaactccctgaagcctagtacccagtcttctgcctctgagctaaacggtcatcataccctaggtctatccgccctcaatctagattccgggactgaaatgccagctctcacgtcctcccagatgcctagcctgtcagtccttagcgtatgtactgaggagagctctccacccaacacaggcccaaccgttaccccgccaaacttcagcgtttctcaagtgccaaacatgcccagctgcccacaggcctactcagaactgcagatgctcagcccgtcggaaagacaatgcgtcgaaaccgtcgtgaatatgggctactcttatgagtgtgtgctgagggccatgaagaagaagggggagaatatcgagcagattctggactacctgttcgcacacggacagttatgtgaaaagggattcgatcccctgctggtcgaagaggctctggaaatgcaccagtgctctgaagaaaagatgatggaatttctccagctgatgtctaagttcaaggaaatgggattcgagctgaaggacattaaagaggtgctactgctgcacaacaacgatcaagacaacgcgttggaagatctcatggctagggctggcgcttcctag

SEQ ID NO: 245864 - DNA, 1509 bp, synthetic construct
  misc_feature 1..1509: note = Description of Artificial Sequence: Synthetic coding sequence
  source 1..1509: mol_type = other DNA
atggccagtaagaaactgggcgcagatttccatgggacatttagctacttagacgatgtccccttcaaaaccggagacaaatttaagacaccagccaaagtgggtttacccattggcttctctttaccggattgcttgcaggttgtgagagaggtgcagtacgattttagcctggagaagaagacgatcgagtgggccgaagagataaaaaagatcgaagaggccgagcgggaagccgagtgtaagattgctgaagcggaggctaaagtcaactcaaagtctggtcccgagggagattccaagatgtctttcagcaagactcactctaccgctacaatgccccctccaatcaatccgattctggcaagccttcaacacaacagcatcctgacccctacccgagtgagtagttccgcaactaaacaaaaggtgctgagcccccctcacataaaagccgattttaatctggcagatttcgaatgcgaagaggatccgtttgacaacctcgagttaaagaccatcgatgagaaagaggaactgcggaacattctcgtaggcaccaccgggccaattatggcccaactactggacaacaatctcccccgtggcggaagtgggagcgtgctacaggatgaggaagtgttggcttccctagagcgtgcgaccttagacttcaagcccttgcacaagcccaatggtttcataaccctgcctcaactggggaactgtgagaagatgtctctgtcctccaaagtaagcctgccccctattcctgccgtatcgaacattaagagtctgtcctttccgaagctcgactcggacgattcaaatcagaagaccgccaaactggcctctacttttcatagtactagctgtctgaggaatggaacgtttcagaactcattaaagcctagtacacagagttcagcaagtgagctcaatgggcaccacacacttggattgagtgcacttaacttggattcgggcacggagatgcctgcgttgacttcatcccagatgccatcactttccgtgctttccgtgtgtaccgaagaatccagtccgcctaatacaggccctactgtcacaccaccaaacttctcagtcagccaggtgcccaatatgcccagttgtccacaggcctatagtgagctccaaatgttgtctccctccgagcggcagtgtgtggagacagtcgtgaacatggggtatagctatgaatgcgtgctgcgagccatgaagaagaagggggaaaacattgaacagatactggattatttgtttgcccatggtcagctctgcgagaagggattcgacccactcctggtggaagaagccctagagatgcaccagtgttctgaagaaaagatgatggagttccttcaactgatgtcaaagttcaaggaaatgggcttcgagcttaaggatatcaaagaggtcctgcttctccataacaacgatcaggataatgccttagaagatctgatggccagggccggtgcatcatag

SEQ ID NO: 245865 - DNA, 1326 bp, synthetic construct
  misc_feature 1..1326: note = Description of Artificial Sequence: Synthetic coding sequence
  source 1..1326: mol_type = other DNA
atggctagtaaaaaactgggtgctgatttccatggcactttcagctatctcgatgacgttccctttaagaccggtgacaaatttaaaacccccgctaaggtgggacttcctatcggcttttctttgcctgactgtctgcaggtagttcgagaagtgcagtatgattttagcttggagaagaagaccatcgagtgggccgaggagatcaagaagattgaggaggcagaaagagaggcagagtgcaaaattgcggaagcagaagccaaagtgaactctaaaagcggacctgagggtgactccaaaatgagtttcagtaaaacccactccaccgccaccatgccaccccctatcaatcctatattagcaagcctccagcataattctatccttactccaactagagtatcatccagcgccactaaacaaaaagtcttgtctccaccccacattaaggccgacttcaacctagcagacttcgagtgcgaggaagacccattcgataacttagagctgaaaacaattgacgaaaaggaggaattgcgaaacatcctggtcggaaccacaggacctatcatggcacaactgctggacaataatttgcccagagggggatccggctccgttctgcaggacgaagaggtgctggcatcactcgaaagagctaccttggacttcaaaccacttcataagcccaacggatttatcaccctgccacagttaggaaattgtgagaaaatgtcactgagctcaaaagtcagtctgcctcccataccagctgtgtctaatattaaatccttatcctttcctaagttagatagtgatgattctaatcaaaaaaccgctaagctagcaagcacctttcactcaacttcatgccttagaaacgggacctttcagaactctctaaaacctagcacacagagttctgcgtccgaattaaacgggcatcatacactgggtctgtccgccctcaatctggattccggtaccgagatgccagccctcacaagctctcagatgccctcactgagcgtgctgtcagtctgcacggaagagagttccccccctaacacgggtcctactatcctcgattatctcttcgctcatggacagctctgcgagaaggggtttgaccccctcttggtggaggaggctttagagatgcaccagtgctctgaagagaagatgatggaattcctgcaattaatgtccaagttcaaggagatgggatttgagctgaaggatatcaaagaagtgttactcttacacaataatgatcaagacaacgcactggaagacctcatggcccgtgcaggagcctcgtag

SEQ ID NO: 245866 - DNA, 1509 bp, synthetic construct
  misc_feature 1..1509: note = Description of Artificial Sequence: Synthetic coding sequence
  source 1..1509: mol_type = other DNA
atggctagcaagaaattgggggcagactttcatgggactttttcctaccttgacgatgtccctttcaagacaggggataaattcaaaaccccagcaaaagtggggttgcctatcggattcagtctgcccgactgcttacaggtggtgagggaagtgcagtatgatttttctctcgagaaaaagaccatagagtgggccgaggagattaaaaagatcgaagaggctgagcgagaggccgaatgtaagatagcagaagctgaggcaaaggtgaactcaaagtctggacctgagggggattccaaaatgagcttctcaaaaactcatagtactgcaactatgcctccgcctatcaaccccatactggcatctctgcagcacaattcaatcctgactcctactagggtttcctcttccgccacaaagcagaaggtgctctccccaccccacattaaggctgattttaacctcgcagattttgagtgtgaagaggaccccttcgacaatctggagctgaagaccatcgatgagaaggaagagctgagaaatattctagtgggcaccaccggcccaattatggctcagctgctagacaataacctgccacggggaggatccggaagcgtattgcaggacgaggaggtgttggcatccctcgaacgcgcaaccttagacttcaagcctctccacaagcccaatggattcattaccctgccacagttaggcaattgcgaaaaaatgtcattaagtagtaaggtcagcctgccaccaatccccgcagtctcgaacatcaaatcactgagctttcccaagcttgatagcgatgacagtaaccaaaaaacagcaaagctcgcctctacctttcactcaaccagctgcttgaggaatgggaccttccaaaacagtttgaaacctagtacacagagcagcgcctctgagttgaacggacaccatacgttggggctttcagctctgaatttggacagcgggaccgaaatgcccgctcttaccagctcccagatgccgtcccttagcgttctctcagtctgtaccgaggaatctagcccaccgaataccggacccaccgttactcccccaaacttcagcgtgtcacaggttccaaatatgccaagctgtccccaggcttacagcgagttgcagatgctttcgccatcagagaggcagtgcgtagaaacagtcgtgaacatgggttactcttatgagtgcgtgttacgggcaatgaagaaaaagggagagaacatcgagcagattctggactatctgtttgcacacgggcagctgtgcgaaaagggatttgatccacttctcgtggaggaggcactggagatgcaccaatgctccgaggagaaaatgatggaattcctgcagttgatgagtaagttcaaggagatgggattcgaactgaaagacatcaaggaggtgctgcttctgcataacaatgatcaggacaacgctctggaggaccttatggccagggctggtgcatcgtag

SEQ ID NO: 245867 - DNA, 1509 bp, synthetic construct
  misc_feature 1..1509: note = Description of Artificial Sequence: Synthetic coding sequence
  source 1..1509: mol_type = other DNA
atggcgagtaaaaaactaggagccgactttcatgggacgttttcatatctcgacgatgtccccttcaagactggggataagtttaagacacctgctaaggtgggcttacccatcggctttagcctgcccgactgccttcaggtcgtgagagaggtgcagtatgacttttctctcgagaagaaaaccattgagtgggccgaagaaatcaaaaagattgaagaggctgagcgcgaagcagaatgcaagatcgccgaagccgaggcaaaggttaattccaaatccgggccagagggcgattccaaaatgtctttcagtaagacacatagtaccgccacaatgccgcctcccatcaacccgattctggctagtttgcagcataactcgatcttgacacccacacgagtgagcagttccgcgaccaaacagaaggtgctctcgccaccccacattaaggccgactttaaccttgccgacttcgaatgcgaggaggaccctttcgacaatctggagttgaaaactattgatgagaaagaggagctgagaaacatcctcgtgggcaccactgggccaatcatggctcaattgctcgacaacaacctgccaaggggcggtagcggaagcgttctacaagacgaggaagtcctggcatcattggagcgcgctaccctagattttaaaccacttcacaagcccaatggcttcattaccctgcctcaacttgggaattgtgaaaaaatgagcctgtcctcgaaagtctccctgcctcctattccagcagttagcaatatcaagtccctgtcctttccaaagctagatagcgatgactcgaatcaaaagaccgcgaagctcgcaagtacctttcactcaacaagctgcctccgaaacggcacatttcagaacagtcttaagccgtccactcaatcatcagccagcgaattgaatggccaccacacactaggactcagcgcgcttaatctggatagtggcaccgagatgcctgcactgaccagttcccagatgccttcactctcggtgttgtccgtgtgcactgaggaatctagccctccaaacacgggacccaccgtaacaccccctaacttctcagtgtctcaggtcccaaatatgccttcctgtccccaggcatatagcgagttgcaaatgctcagtccttcggaaagacagtgcgtggagacagttgtgaatatgggatatagttatgaatgtgtgctgcgcgcaatgaaaaagaaaggggagaacatcgagcagatcctggactacttgtttgctcatggccaactgtgcgagaagggctttgaccctctgctcgtcgaggaggccttggagatgcaccagtgcagcgaggagaaaatgatggaatttctccagctcatgtctaaatttaaagaaatgggctttgagctgaaggacataaaagaagtactcctactgcataacaatgaccaggataacgccctggaagacctgatggccagagccggtgcttcctag

SEQ ID NO: 245868 - DNA, 1617 bp, synthetic construct
  misc_feature 1..1617: note = Description of Artificial Sequence: Synthetic coding sequence
  source 1..1617: mol_type = other DNA
atgagtggagccgtgagaggacgaagaagggaggttggtttgcagcacggaggctgtggaactggaggagggtatggagacggactggcaaggagcggccagtcctggcggtggtggaggtctctgtctcttggagccgtggggtcatctgccggtacggaaccgggacggcctgccggagcgtcaacttttcgactcctgcgcaggaggcagcagcgacatagcggctccaagtggctgctgcggtcatgggtgcagatcttcatgtatgacttcagtttggagaagaagaccatcgagtgggccgaggaaatcaagaagatcgaagaggccgagagagaggccgaatgcaaaattgcggaggccgaggcaaaggtgaactctaagtccggcccagagggcgacagtaaaatgagtttctctaaaactcattccacagctacaatgccacctcctatcaatccaatactggccagtctgcagcacaatagcatcctgacacctactagggtctccagctccgccactaaacagaaagttctttctcctcctcacataaaggcagattttaatttagctgattttgaatgtgaggaggacccttttgacaatttagaactaaaaaccatcgatgagaaggaggagttgaggaatatcctcgtcggcacgaccggacccatcatggctcagttgcttgacaacaacctgccacggggagggtcagggagcgtactgcaggatgaagaggtgttggcttcgctcgagcgcgctaccctagactttaagcccctgcacaagccaaacggctttattacgcttccacaattgggtaactgtgagaagatgtctctgtcctctaaggtgtcactgccgcctatccccgcagtgagcaacatcaagtctcttagctttcctaaactggacagcgacgattccaatcagaaaacggccaagctggcttcaacttttcactcaacctcctgcctccgcaatggcacgttccagaacagcctgaaaccatcaacccaaagttctgccagtgaattaaatggacaccataccctgggactgtcagctctcaacctggactcggggaccgaaatgcctgcgttaaccagtagccaaatgccctccctgagtgttctcagcgtgtgtactgaggagtcttctccacctaacactgggccaacagtgaccccacccaacttctcagtcagccaggtacccaacatgccaagctgccctcaagcctatagtgagctgcagatgctatccccgtcggagcggcagtgtgtggaaacagtcgttaatatgggttattcgtatgaatgtgtcctgagggccatgaagaaaaaaggcgaaaatatcgaacagattctagattatcttttcgcccacggacaactgtgcgaaaagggattcgaccccctgctcgttgaagaagcactggagatgcatcagtgctccgaagagaagatgatggaattcctccagttaatgtccaaatttaaagagatgggattcgagctcaaggacattaaggaggtgttgttgctccataacaacgatcaggataacgccctggaggacctgatggcacgtgcaggagccagctag

SEQ ID NO: 245869 - DNA, 1701 bp, synthetic construct
  misc_feature 1..1701: note = Description of Artificial Sequence: Synthetic coding sequence
  source 1..1701: mol_type = other DNA
atgtccggggcagtccggggacgcagacgcgaagttgggctgcagcacggcggttgtggaaccgggggaggatacggtgatggtttggcaagatctggacagagctggcgttggtggagaagcctgtctctgggggcagtgggctccagcgctggtacagagccaggacgcccagcgggtgccagtactttcaggcttctgcgcaggcggcagcagaggcacagtggcacctttagttaccttgacgacgtccccttcaaaactggcgataaatttaaaaccccagccaaggtcggcctacccattggtttctccctgcctgattgtttgcaggtagtgcgcgaagtccaatacgacttctccctggaaaaaaagacaatcgaatgggcggaagagatcaagaagatcgaggaggcagagcgcgaagccgaatgcaaaattgccgaggccgaagccaaggtgaacagtaagtccggccctgagggtgacagcaaaatgagtttctcgaagacacattcgactgctactatgccccctcccatcaaccccattttggcgtctttacaacacaactcaatcctgaccccaacaagagtttcttcttctgccaccaagcagaaggtccttagcccaccgcacattaaagctgactttaacctcgccgatttcgagtgtgaggaggatccttttgacaatctggaactgaagaccatcgacgagaaagaggaactgaggaacattctcgtgggtaccaccggtcctatcatggcccagctcctggacaacaacctcccaaggggaggtagtggtagtgtattgcaggacgaagaggtccttgcttcgctcgaacgcgctacacttgactttaaaccattacacaaaccgaacggatttataacactaccccagctagggaactgtgaaaaaatgagtctgtcctccaaggtgtcccttcctcccatcccagccgtgagtaacatcaagagcctctcttttccaaaactggatagtgacgactcgaaccaaaagacagccaagctggctagcactttccattcaacatcttgcctgcggaacgggactttccagaactccctgaaaccaagtacacagagtagtgccagcgagctaaacggtcaccatactctcggattgtcagcccttaacctggactccggcactgagatgcctgctctgacgagcagtcagatgccctcactgagcgtcctgtctgtctgcacagaagagagcagcccccctaacactggtcccacagtgacacctccgaatttctctgtgagtcaagtccctaacatgccttcttgcccccaagcctattcagaactgcagatgttgagtcccagtgagcgccagtgtgtggagacagtcgtcaacatgggctactcatatgaatgcgtacttagggccatgaaaaagaagggtgagaacatcgagcagattctggactacctgtttgcgcatgggcaactctgcgagaaaggctttgatcccctactcgtcgaggaagctctagaaatgcaccagtgctccgaggagaaaatgatggagtttttgcagctcatgagcaaatttaaggagatggggttcgagctgaaggacatcaaggaagtgttactgctgcacaacaatgaccaagacaatgctctagaagacctgatggccagagcaggtgcttcatag

SEQ ID NO: 245870 - DNA, 690 bp, synthetic construct
  misc_feature 1..690: note = Description of Artificial Sequence: Synthetic coding sequence
  source 1..690: mol_type = other DNA
atgcaaatctttgtgaaaacccttacaggaaagacaataaccctggaggtagaacctagtgacacaatcgaaaatgtgaaagcaaagattcaggacaaggaagggatcccacctgaccagcagcgtttaatcttcgcgggtaagcagcttgaggatggcaggactctctcagattacaatatccagaaggaaagcaccttgcatctggttcttcgcctccggggtgggatgcaaatttttgtgaaaacactcaccggcaagaccattacactggaggtggaaccttccgacactatcgaaaatgtcaaggctaagattcaggataaggaaggaattccgcctgatcagcagcggctgatttttgcgggtaaacagctggaggacggacgtactctgtcagattacaatatccaaaaggagtctacacttcacctcgtcctccgcctcagagggggaatgcaaatctttgtcaagacccttacaggtaagaccataactctggaggtggagccgagcgacactatcgaaaatgtgaaggctaagatccaggacaaggaaggcattccaccagatcaacagcgactgattttcgctggaaagcagctcgaagacggacgcactctgtcagactataatattcaaaaggaaagtacactccatctggttttgcgtctaaggggaggctgctag

SEQ ID NO: 245871 - DNA, 690 bp, synthetic construct
  misc_feature 1..690: note = Description of Artificial Sequence: Synthetic coding sequence
  source 1..690: mol_type = other DNA
atgcagatatttgtcaagactctgacaggcaagactataacgctggaggtcgagccgtcggacaccattgaaaacgtcaaagctaaaatacaagacaaggagggtattcctccagaccagcaacgcctgatttttgccggaaagcagttggaagatggcaggaccttgagcgattataatatccagaaagaaagcacgctgcatctcgtcctcaggctcaggggcggtatgcaaatctttgtgaaaacactaactgggaagacaatcactctagaggttgaaccatcagacactattgagaatgtcaaagcgaagatacaagacaaagaaggcattccccctgaccaacagaggctgatcttcgccggaaagcagctggaggacggcagaactctcagcgactacaacattcagaaagagagcacgctgcacctggtgttgcgtttgcggggagggatgcagatctttgttaaaacactgacaggcaaaactattacccttgaggttgaacccagcgataccatagaaaacgtcaaggcaaagatacaagataaagaaggtatcccacccgatcaacagcgcctcatcttcgcagggaagcagctggaggacggcaggacactgtccgattataacatccaaaaagagtccacactgcacttagttctgagattgcgcggagggtgttag

SEQ ID NO: 245872 - DNA, 690 bp, synthetic construct
  misc_feature 1..690: note = Description of Artificial Sequence: Synthetic coding sequence
  source 1..690: mol_type = other DNA
atgcaaatcttcgtgaagactctgacagggaaaactatcacactggaggtggaaccctctgacacaatagaaaacgttaaggctaagatccaggataaggaaggcatacccccagatcaacagcggctaatttttgccggaaagcagctcgaagacggtcgcaccctgtctgattacaacatacagaaagagagcacgctccacttagtattgcgtctacgtggaggaatgcaaattttcgtcaaaacactcaccggcaagacaatcacccttgaagtcgaaccttcagatacaatcgagaacgtcaaagccaaaatacaagacaaggagggaatcccaccagaccagcagaggctgatattcgccggaaagcaactcgaagacggacgaaccttgagcgattacaacatccagaaggaatccacattacacttggtcttgcgcctgcgaggtgggatgcagatttttgtcaagacactcactgggaagaccatcacccttgaagtggaaccgtcagacactatagagaatgtgaaagctaagattcaggacaaagaaggaattccacctgatcagcagcggttaatctttgctgggaaacagctggaagatggtcgaacactgagtgactacaatatacagaaggagagtactcttcatttagtgctgagattgcgaggcggttgctag

SEQ ID NO: 245873 - DNA, 462 bp, synthetic construct
  misc_feature 1..462: note = Description of Artificial Sequence: Synthetic coding sequence
  source 1..462: mol_type = other DNA
atgcagatttttgtgaagaccttgactgggaagaccatcacgctcgaagtggagccctctgataccattgagaacgtgaaggccaagattcaagataaagaaggcataccccctgatcagcagcgtctaatttttgccggtaagcagctcgaagacgggaggactttaagtgactataatatccagaaggaaagcacacttcacctcgtcctcagactccggggaggcatgcagatatttgtaaaaacccttactggtaaaaccataactttggaggtggagccatctgacacgattgagaacgtgaaagccaagatccaagacaaggagggaatccctccagaccagcagcggctgatcttcgccggtaaacagcttgaggacggccgtactctgtcagattataacatacaaaaagagtcaaccctgcacctggtgctcaggctgcgaggcggatgttag

SEQ ID NO: 245874 - DNA, 2058 bp, synthetic construct
  misc_feature 1..2058: note = Description of Artificial Sequence: Synthetic coding sequence
  source 1..2058: mol_type = other DNA
atgcagatttttgtgaaaacgctaactggcaagaccattacactcgaagttgaacctagcgataccatagaaaatgtgaaggcaaaaatccaagacaaagagggcatccccccagatcagcagcgtttgatttttgccggtaagcagctcgaagacggcagaaccctcagcgactacaacattcagaaggagagcaccttgcacctggttttgagactgaggggcggtatgcaaatttttgtgaagacactgacgggcaagaccattacactggaggttgagccaagcgataccattgagaatgtgaaagcaaagattcaggataaggaagggataccacccgaccaacagaggctgatcttcgccggaaagcaactggaagacggcagaaccttgtcagactataacatccagaaagagagcacgcttcacctggtgctcagactgcggggaggaatgcaaatatttgtgaaaactctcactggtaagactatcacactggaagtggaaccatccgatactattgagaacgtcaaagccaaaattcaggataaagagggaatcccaagcgaccagcagagactgatcttcgctggaaagcagctggaggacgggaggaccctatctgattataacatccagaaagagtccaccttgcatctggttctgagactccgaggaggtatgcaaatctttgtgaagactctgactgggaagacgatcaccctggaggtggaaccttctgacacaatcgagaatgtcaaggccaaaatccaggataaggaggggattcccccagatcaacagcgtcttatctttgctggaaaacaactggaggacggcaggaccctatccgattacaacattcaaaaggaatcaacgcttcacctcgtcctgcggctgcgcggagggatgcaaatcttcgtgaagacccttaccggaaaaaccatcaccttagaggtggagccatcagacacaattgagaacgtgaaagcaaagatacaggataaagaagggataccccctgatcaacaacgcctgatattcgccggtaagcaactggaagatggaagaaccctgtcggactataatattcagaaagagtcaaccctccatcttgttctgcgcttgaggggaggtatgcaaatctttgtgaaaacactcacgggaaagaccataaccctcgaggtagaaccctcagacaccattgaaaatgtgaaagccaagatccaggacaaagaaggtatcccacccgaccagcaacgactgatattcgcaggaaagcagctagaggatggtcggacgctcagcgactacaacatacagaaggagagcaccctgcatctagtgctgcgcttgagaggagggatgcagattttcgtaaagacactgactggtaaaaccattactttggaagtcgagccttctgacacaatcgagaacgtgaaagcaaaaattcaggataaggaggggatcccgccagaccagcagcggctcatcttcgctggaaagcaacttgaggatggcaggacgttgagcgattacaatattcaaaaagaatctactctgcacctcgtgctcagactccgcggaggtatgcagattttcgtgaaaacactgacaggcaaaacaattaccctcgaggtcgaaccaagcgacacaattgagaatgtgaaggccaagatccaggacaaggaggggattccgccagatcaacagcggttgatttttgccggaaagcagttggaggacgggcgtactctgtccgactacaacatccaaaaggaatctacactgcatttggttcttagactgcgtgggggtatgcagatattcgttaaaacccttaccggcaagacaatcaccttagaagtagagccatcagacacaatcgagaatgtgaaagctaagattcaggataaagaagggattcctccggatcagcaacgtctgattttcgctgggaaacagttggaggatggacggaccctgtcagattataatatccagaaagagagcacactgcaccttgtcttgaggttgcgcggaggcgtgtag

SEQ ID NO: 245875 - DNA, 450 bp, synthetic construct
  misc_feature 1..450: note = Description of Artificial Sequence: Synthetic coding sequence
  source 1..450: mol_type = other DNA
atgcagatattcgtgaaaaccctgacaggtaaaacgatcacgctggaagtggagccaagcgacaccatcgagaatgtgaaggccaaaatccaagacaaggagggtatacctcccgaccagcaaagactcatctttgcgggtaaacagctcgaagatggcaggactttatccgattataacattcagaaggagtcaactttgcatctagtacttcgccttcgcggtgggatgcagatttttgtgaagaccctaacaggcaagaccataacacttgaggtggagcccagcgatactattgaaaatgtcaaagcaaagatccaggacaaagaaggaatccccccagaccaacagcggctgatcttcgccggaaagcagctggaggacggtcgaaccctgtccgactataatatccagaaggagagtaccctgcatcttgtgctcaggttgtag

SEQ ID NO: 245876 - DNA, 372 bp, synthetic construct
  misc_feature 1..372: note = Description of Artificial Sequence: Synthetic coding sequence
  source 1..372: mol_type = other DNA
atgcagattttcgtgaaaactctaactgggaaaactattacactcgaggttgagccttccgatacaatcgaaaacgtcaaggccaagatacaggacaaggagggcataccccctgaccagcagcgcttgatttttgccggaaagcagcttgaggacggtagaactctatccgattataacatacagaaggagtccacactacacctagtcctccggttgcgcggagggatgcagattttcgtcaagacattgactggcaagacaatcaccctggaagtggaaccctcagacactatagaaaatgtgaaggctaaaatccaggacaaggagggaatcccaccagaccagcaaaggctgatattcgccggatag

SEQ ID NO: 245877 - DNA, 2058 bp, synthetic construct
  misc_feature 1..2058: note = Description of Artificial Sequence: Synthetic coding sequence
  source 1..2058: mol_type = other DNA
atgcagatttttgtaaagaccttgacaggtaaaacaatcacattggaagtggaacctagcgatacaatcgaaaatgtgaaggcgaagattcaggacaaagagggaatcccaccagatcagcagcgcctgatttttgcagggaaacagctggaagatgggaggaccctttccgactacaatatccaaaaggaatctaccttgcacttagtgcttcgcctgagaggaggtatgcagatcttcgtcaagacactgaccggtaaaactattacactggaggtggagccttctgacaccatagagaatgttaaagcaaaaattcaagataaagagggcattccccctgaccagcagaggctcatcttcgccggaaaacagcttgaggatggccgaactctctctgactacaatattcagaaagagtccacactccatctcgtgttacgcctgaggggtgggatgcagatattcgtgaagacccttacaggaaagactattacactagaggttgaaccctcagacaccattgagaacgtcaaggccaaaatccaggacaaagaggggatccccagtgaccagcaaaggttgattttcgctgggaaacagctggaagatggaaggaccctgtcagactacaatatccagaaggaatcaacactacacctggttctccgcctgcgcggaggcatgcagatttttgtgaagactctgactggaaagacaatcacgttagaagtcgagccttccgataccattgagaacgtcaaggcaaagattcaggacaaggaagggattccaccagaccagcagcgactgatctttgcgggaaaacaattggaggacggcaggacattatccgactacaatatccagaaggagagcacactccatctggtgctgaggctgcgcggtggaatgcagatctttgtgaagacacttaccggtaagacaatcactctcgaggttgagcccagcgatacaattgagaacgtgaaagctaaaatacaagataaagagggcattccgccagatcagcagaggcttatctttgctggcaagcagttagaggatggtcggacattgagcgactacaacattcaaaaggagtccacattacacttggtgttgagactgaggggaggaatgcaaatcttcgttaaaaccctcaccggaaagacaatcacccttgaagtagagccaagtgatactatcgaaaacgtcaaggcaaagattcaggacaaagaaggcatccctcctgatcagcagagactgattttcgctggtaaacagctcgaggacggtcggacactgagtgactacaacatccaaaaagagtcaactttacacttggtcctacgcttgcgcggtggcatgcagatttttgtcaagactttgactggcaaaactattacactggaggttgaaccatctgacacaattgaaaacgtgaaggctaagatccaagacaaagaaggaatccccccagatcaacagagactgatatttgctggtaaacagcttgaagacggaagaaccttatccgattacaatattcagaaggagtccactctacatctggtgttgagactgagagggggaatgcagattttcgtgaagactctgacaggaaagacgattacactagaggttgaaccgtcagataccattgagaacgtcaaggctaagatccaggacaaagaagggatcccccctgatcagcaacggctcatattcgccggtaaacaacttgaagatggaagaacattgtctgattacaacattcagaaagagagcaccttgcacctggtcctccggcttagagggggtatgcagattttcgtaaagactttaacagggaagacaataaccttggaagttgagccgagtgacactatcgagaatgtgaaagccaagatccaagacaaagaaggcatccctcccgatcaacaaagactcatatttgccggtaagcaacttgaggacggcaggacactttcggactataacatacaaaaggagtccaccctgcatctggtcctcagactgcggggaggagtgtag

SEQ ID NO: 245878 - DNA, 486 bp, synthetic construct
  misc_feature 1..486: note = Description of Artificial Sequence: Synthetic coding sequence
  source 1..486: mol_type = other DNA
atgcagatcttcgtaaagaccctgaccggcaaaactattacattagaagtcgaaccgtccgataccatcgaaaacgtcaaggccaagattcaagacaaagagggcattccacccgatcagcagaggctgatctttgccggtaagcagctcgaagatggcaggactctctcagattacaatatccagaaggaaagtactctccatttagtgctgaggcttcggggaggaatgcagatcttcgtcaaaacactaaccgggaaaactattacactggaggtggagccgtccgacactatcgagaatgtgaaagcgaaaatccaggacaaagaggggataccaccagaccagcagagattgatcttcgctggcaagcagctggaagacggaagaaccctgtctgactacaatatccaaaaagaatccaccttgcaccttgtcctgaggctgcggggtggcatgcagatttttgtgaaaaccctcacctag

SEQ ID NO: 245879 - DNA, 405 bp, synthetic construct
  misc_feature 1..405: note = Description of Artificial Sequence: Synthetic coding sequence
  source 1..405: mol_type = other DNA
atgcagattttcgtcaagacgctaactggcaaaaccatcactttggaggttgagcctagtgataccatcgagaatgttaaagccaagatacaggacaaagaaggcatcccaccagatcagcaacggttaatcttcgccggtaagcagcttgaggacggcaggacactgtcagactacaatattcagaaagaatctactctccacctggtcttgagactgcgagggggtatgcagatcttcgttaagactctgacaggtaagaccattactctggaggttgagccatccgataccatcgaaaacgtcaaggctaagatccaggacaaggaagggatcccacctgaccagcagcggttaatattcgctgggaagcagctcgaggatggacgaacgctgtctgactag

SEQ ID NO: 245880 - DNA, 510 bp, synthetic construct
  misc_feature 1..510: note = Description of Artificial Sequence: Synthetic coding sequence
  source 1..510: mol_type = other DNA
atgcagatcttcgtgaagactctcactggaaagaccataacccttgaagtggaaccctctgacacaattgagaatgtgaaagccaagatacaggataaagaagggatcccaccagatcagcagaggctgattttcgctggcaagcagttggaggacggtcgtaccctgtctgattacaatatccagaaggagagtactctgcatctcgtactgcgcctgagaggaggcatgcagatatttgtcaagacactgacaggcaaaacgatcaccctggaggtggaaccatctgacactatcgagaacgtgaaggccaagatccaggacaaggaaggtattccgagcgaccagcagcggttgatctttgctgggaaacaactcgaggacggtcgtaccctgtcggactataacattcagaaagaatcaacactgcacttggtcctgcggttaaggggtggaatgcagatcttcgtcaaaacattgaccggaaagacaatcaccctggaggtctag

SEQ ID NO: 245881 - DNA, 468 bp, synthetic construct
  misc_feature 1..468: note = Description of Artificial Sequence: Synthetic coding sequence
  source 1..468: mol_type = other DNA
atgcagatcttcgttaagacactgacgggtaaaaccataactctggaggttgagccttctgacacaatcgaaaatgtgaaggcaaagatccaggacaaagaggggattccccctgaccaacagcgtctgatctttgccggtaagcagctggaagacggtcggacattgtccgactataatattcagaaggagtccactctccacctcgtgctgaggctgcgagggggaatgcagatcttcgtgaagacgctgaccggcaaaactatcactttggaggtcgaaccttccgacaccatcgaaaacgttaaagcaaagatccaggataaggaagggatcccacccgaccagcaacgacttatttttgccggaaagcagttggaagatggtcgtaccctgagcgattacaacatccagaaggaaagtaccctgcatctggtgctaaggttgcggggtggtatgcagatttag

SEQ ID NO: 245882 - DNA, 186 bp, synthetic construct
  misc_feature 1..186: note = Description of Artificial Sequence: Synthetic coding sequence
  source 1..186: mol_type = other DNA
atgcagattttcgtcaagaccctgacggggaagactatcacactagaagtggaaccaagtgatacgatcgaaaatgtcaaagccaagattcaggacaaagaaggtattcctcccgatcagcagcgtctgatctttgctggaaaacagctcgaagacggtcgtaccctgtcggattacaacatctag

SEQ ID NO: 245883 - DNA, 1830 bp, synthetic construct
  misc_feature 1..1830: note = Description of Artificial Sequence: Synthetic coding sequence
  source 1..1830: mol_type = other DNA
atgcagatttttgttaaaactctgaccggcaaaactattactctggaggtcgagcccagcgatactatagagaacgttaaggcaaaaatacaagacaaagagggcattccccctgaccaacagcggttgattttcgccggaaagcagttagaggatggaaggaccctgtctgactacaatatccagaaagagagcaccctgcacctggtactgcgcctacgcggtggcatgcagatcttcgtgaaaacgctgaccggcaaaaccatcaccctggaagtggaaccttcagacacaatcgagaacgtcaaggccaaaatccaggacaaggagggtatcccctctgaccaacaacgcctgattttcgctggaaagcagctcgaggatggaagaactctgtccgactacaacattcaaaaggaaagtactctccatttagtactgcggcttaggggagggatgcagatattcgtgaagaccctcacgggaaaaaccattacactggaagtcgaaccctccgacacaatagagaacgtgaaagccaagattcaggacaaagagggcatccccccagaccagcagcggctgatcttcgcaggaaagcagttagaggacggtagaactctgagcgactacaatatacagaaagagagtactttgcatttggtcctgagactccggggtggcatgcagattttcgtgaagaccttgacagggaaaacaatcactttggaggtggaacccagtgacaccattgaaaacgtaaaggctaagatccaggacaaagaaggcattcctccagatcagcaaaggctgatcttcgccggaaagcagctggaggacgggagaactctctctgactataatattcagaaggagtcgactctacatctggtactaagactgcgcggaggaatgcaaatttttgttaaaacgctcacagggaaaaccataaccctggaggttgaaccaagcgatacaatcgaaaacgtgaaggccaagattcaggataaagagggcatcccccctgatcaacagaggttgattttcgcagggaaacaactggaagacggaaggacccttagcgactataatatccagaaagagtcgactctgcaccttgtgctcaggttgaggggcggaatgcagatatttgttaaaactttgacagggaaaacaattaccctggaggtcgaaccatcagatactatagaaaacgtgaaggctaagatccaggataaagaaggcattccgccagaccagcaacgccttatctttgctggcaaacagctcgaagacggcaggacgctgagtgattataatatccagaaagaatccacgcttcatcttgtgctgaggttgaggggaggcatgcaaatctttgtgaagaccctcactggcaaaaccataactttagaagttgagccttctgatactattgaaaatgtgaaggcaaaaatccaggacaaagagggaatccctcctgatcagcagcgcctgatatttgcagggaaacagcttgaggacggcaggacactcagcgactacaatatccagaaagagagcactctacatctggtgctaaggctgagggggggtatgcaaatatttgtcaaaaccctgacagggaagacaattactttagaggtagagccctccgataccatcgaaaatgtaaaggctaagatccaggataaagaaggcattcctccggatcagcaaaggctgatctttgcaggcaaacagctggaagacggcagaaccctgtcagactacaacatccagaaagagtctactctgcatttagtcctgagactgcgcggtggagtgtag

SEQ ID NO: 245884 - DNA, 411 bp, synthetic construct
  misc_feature 1..411: note = Description of Artificial Sequence: Synthetic coding sequence
  source 1..411: mol_type = other DNA
atgcaaatctttgtcaaaacactcacaggaaaaaccattacacttgaggtggagccctcggatacaatcgagaacgttaaggccaaaatccaggataaggagggtatcccacctgaccagcagcggctaattttcgctggaaaacaactggaggatgggaggacactctctgactacaacatccaaaaagaatccacgctgcacttggtgctgcggctgagaggcggtatgcagattttcgtgaaaacactaacggggaaaacaattactctggaggttgaaccaagtgatacaatcgagaatgtaaaggccaagatccaagataaagagggaatccctcctgaccagcagagactcattttcgccggtaagcagctggaagacggacgcaccttaagcgactataactag

SEQ ID NO: 245885 - DNA, 672 bp, synthetic construct
  misc_feature 1..672: note = Description of Artificial Sequence: Synthetic coding sequence
  source 1..672: mol_type = other DNA
atgcagctgaagcctatggaaataaacccagagatgttgaacaaggtgcttagccggttgggggttgccggacaatggaggttcgtggatgtgctaggattggaggaggagtcactggggtctgtgcccgctcccgcatgtgctcttcttctgctatttcccctgacggcccagcacgaaaacttcagaaaaaagcagattgaggagctcaaagggcaggaagtgtcgcccaaggtgtacttcatgaagcagacaattgggaactcatgtggcacgatcgggctgatccatgcagttgccaacaaccaggacaaattgggctttgaggacggaagcgtcctgaaacagtttctgagcgagactgagaaaatgtcccccgaagatcgagcgaagtgctttgagaagaatgaagccattcaggccgctcatgatgccgttgcccaggagggccagtgccgggtggatgacaaggtcaattttcactttattctcttcaacaatgtggatgggcacctgtatgaactcgacggtaggatgcctttccctgttaatcatggggcaagtagcgaagacaccctcctgaaggatgccgcaaaggtgtgtcgggagttcacggaaagggagcagggcgaggtccgattttccgctgtcgccctctgcaaggctgcatag

SEQ ID NO: 245886 - DNA, 642 bp, synthetic construct
  misc_feature 1..642: note = Description of Artificial Sequence: Synthetic coding sequence
  source 1..642: mol_type = other DNA
atgcagctgaagcccatggagatcaatcctgagatgctgaataaagtgctttcccgcctcggcgtggccggtcagtggagattcgttgacgttctcggactggaggaggaaagtttgggcagtgtgcccgctccagcctgcgcattgctattactgttccctctgactgcacagcatgagaatttccgaaaaaagcagattgaggagctaaaggggcaggaggttagcccaaaggtgtatttcatgaaacagaccattggcaacagctgcggtactataggcctgattcatgccgtggcaaataatcaggacaagttgggtttcgaagatggatctgtgctgaaacagtttttgtcggaaacggagaagatgtcacccgaagaccgggctaaatgcttcgagaaaaatgaagctatacaggctgcccacgatgccgtggcccaggaaggccaatgtagagtggacgacaaggttaatttccattttattctcttcaataatgtagatggacatctctacgagctagatgggaggatgcctttcccagttaatcacggggctagcagtgaggatactctgttgaaggacgcagcaaaggtatgcagggagtttacggagcgagaacaaggtgaagtgagatag

SEQ ID NO: 245887 - DNA, 177 bp, synthetic construct
  misc_feature 1..177: note = Description of Artificial Sequence: Synthetic coding sequence
  source 1..177: mol_type = other DNA
atgcagctgaaaccaatggagatcaatccagaaatgctgaataaggtcctcagcagactgggagttgccggacagtggagatttgtggatgtcctcggcctagaggaggagtctcttggtagcgtgcctgccccagcctgcgcactactgctcttatttcctctcacagcgcaatag

SEQ ID NO: 245888 - DNA, 756 bp, synthetic construct
  misc_feature 1..756: note = Description of Artificial Sequence: Synthetic coding sequence
  source 1..756: mol_type = other DNA
atggtcccacgccctgtctgtgcagttctgctgttattcccaatcacggaaaagtacgaggtgtttaggaccgaggaagaggagaaaataaaaagccaaggccaagatgtgaccagtagtgtgtactttatgaagcagacaatctcaaatgcttgcggcacaattggactgatccatgcaatagccaacaacaaagacaagatgcatttcgaatctggttcaacactgaagaaatttcttgaggaatctgtctctatgagcccagaggaacgagctaggtacctcgagaactacgatgccatccgggtgacccacgaaacctcagctcatgagggccagaccgagtcatcttcgccgtcgtctagccagccccactcctcacactgccgcaccaaggcatccagcctttgccatcacgcatccctgccttgggtcaagcgtaatcacgtgggtcctgccaaggccacgagtcctagtttgagactgcgccgatggcggccttttttgcgtctaccatccctaggtctgcattccgtagccccatccatcgacgagaaagttgatctacattttatcgccttagttcacgtcgacgggcacctgtacgagctggatggccgtaagcccttcccaatcaaccatggggagacaagcgatgagacacttctggaagatgctattgaggtttgtaaaaagttcatggagcgagatccagatgagctaagattcaatgccattgccttgtctgcagcctag

SEQ ID NO: 245889 - DNA, 693 bp, synthetic construct
  misc_feature 1..693: note = Description of Artificial Sequence: Synthetic coding sequence
  source 1..693: mol_type = other DNA
atggaaggacagaggtggctgcctctggaagcaaaccctgaggtgaccaatcaatttcttaaacagttggggcttcatcccaactggcagttcgtggatgtttacggcatggacccagagctcctctctatggtcccccgacctgtgtgcgctgtcttgctgctgtttcccattacggaaaaatacgaggttttccggactgaagaggaggagaaaatcaaatcacaggggcaagacgttacttcctcagtatactttatgaagcagacaatctctaacgcgtgcgggaccattggactgatccatgccatcgccaataataaggataaaatgcactttgagagtggatcaacgctcaagaagtttctcgaggaatcagtgagcatgagtccggaagaaagggcacgctatctcgaaaactacgacgctattagagttacccacgagacaagcgctcatgagggccagaccgaggcaccttctattgatgaaaaagtcgacctccacttcatcgcgctagtgcatgttgacggccacctctacgagctggatgggcgaaagccatttcctattaaccacggcgaaacgtccgatgagactttgctagaagacgccattgaagtgtgtaagaaattcatggaacgggatccagacgagctaagattcaacgcgattgctttaagcgcagcatag

SEQ ID NO: 245890 - DNA, 687 bp, synthetic construct
  misc_feature 1..687: note = Description of Artificial Sequence: Synthetic coding sequence
  source 1..687: mol_type = other DNA
acagaagaggaggagaagattaagagccaggggcaggacgtgacctcaagtgtttatttcatgaaacagactatctccaatgcttgcgggactattggcctgatacatgccatcgccaataacaaggacaagatgcacttcgaatcggggtcgacacttaaaaagttcctcgaagagtccgtgagcatgagtcccgaagaacgggctaggtatctcgaaaattacgacgcgattcgagtcacacacgagacaagcgctcacgaagggcagactgagtcttccagtccttcaagctcacagcctcactcctcccactgtaggaccaaagccagcagcctgtgtcatcatgccagcctaccttgggtgaaaagaaaccatgtaggacccgcaaaggcaaccagtccctccctacgactgcggcgatggcggccattccttcgtcttccatctttgggtctgcatagcgtcgcgccatctatcgacgagaaggttgacctccattttatcgccctggtgcacgttgatggccatctgtacgaactagacgggagaaaacctttccctataaaccatggggagacaagcgatgaaaccctgctggaggatgctattgaagtgtgtaagaagttcatggaacgtgatccagatgagctgcgctttaacgccatcgcactgagcgcggcttag

SEQ ID NO: 245891 - DNA, 981 bp, synthetic construct
  misc_feature 1..981: note = Description of Artificial Sequence: Synthetic coding sequence
  source 1..981: mol_type = other DNA
atgacaggaaacgctggtgaatggtgcctcatggagagtgatccaggcgtgtttaccgaacttattaaaggattcggatgcaggggtgcacaggtggaagagatctggagcctggagccagaaaatttcgaaaaacttaaaccagtgcacggcctcatcttcctcttcaagtggcaacctggagaggaacctgccggtagtgtcgtgcaggacagtcggttggacaccatcttcttcgcgaagcaggtaattaacaatgcctgtgcaacgcaggctattgtgtccgtgctgctgaactgcacacatcaggacgtgcatctgggggaaactctgtccgaattcaaggaattctcccaaagtttcgatgctgctatgaagggtttagcgctctctaattcagatgttatacggcaggtgcataattcctttgccagacagcagatgttcgaatttgacacaaagacttccgctaaggaagaggatgcctttcacttcgtgtcttatgtgcccgtgaatggacgactgtatgagttagatggcctcagagaagggcctatcgatcttggcgcatgtaatcaggacgactggatctctgcggtgaggccagtaatagagaaaaggattcagaagtatagcgaaggagagatcagattcaatctgatggccatcgtcagcgatcgcaagatgatctacgaacaaaagatcgctgaactacaacgtcagctggcagaggagcctatggacacagaccaaggtaactccatgttaagcgccatacagtctgaggtggcaaaaaaccagatgctcattgaggaggaagtgcagaagttaaaaaggtacaaaatagaaaacatccgccgaaaacataactatctgccattcattatggaacttctcaaaacacttgcagagcaccaacaactcattccattggttgaaaaattcgagaaacacttcgaaaagacattgctgggtaaatag

SEQ ID NO: 245892 - DNA, 951 bp, synthetic construct
  misc_feature 1..951: note = Description of Artificial Sequence: Synthetic coding sequence
  source 1..951: mol_type = other DNA
atgacggggaacgccggagagtggtgcctcatggagagtgatcccggtgtgttcaccgagctcatcaagggctttggctgccgcggagcccaggtggaagaaatttggtcccttgaaccggagaatttcgagaaactaaagcctgtgcatggcctgatattcctttttaagtggcagcctggagaggagcccgcagggtcagtggtgcaggattccaggctggataccatctttttcgccaaacaggtgattaataacgcgtgcgccactcaggctattgtcagcgtgctgttgaactgcacccatcaggatgtgcacctgggtgaaactctgagtgagttcaaggagttttcccagtcgttcgacgctgctatgaagggcctcgccctaagtaatagtgatgttattcgacaggtgcacaactccttcgcaaggcagcagatgttcgagttcgatacaaaaacaagcgctaaagaagaggacgcgttccatttcgtgtcttacgtgccggttaatggacggctttatgagctcgatggcctacgagagggcccaatagacttgggtgcctgcaaccaggacgactggatcagcgcggtacggcctgtcattgagaaacgaatacagaaatacagcgagggagagattaggttcaatttaatggcaattgtgtctgacagaaaaatgatttatgagcagaaaattgcggagcttcagcggcagttggctgaggaaccgatggacacagaccaaggcaattctatgttaagtgctatccaaagcgaagtggctaaaaatcagatgttaatcgaggaggaggtgcaaaagctgaagcggtacaaaatagagaacataagacggaagcataattacctgccctttatcatggagcttctgaaaaccttggctgagcatcagcagctcattcccttagttgaaaaaggcaagtag

SEQ ID NO: 245893 - DNA, 1107 bp, synthetic construct
  misc_feature 1..1107: note = Description of Artificial Sequence: Synthetic coding sequence
  source 1..1107: mol_type = other DNA
gcacggggagggtccgggaggtgcgtggcgagagctatgactgggaacgctggagagtggtgcctcatggagtccgaccccggtgtcttcacagaactcattaagggttttgggtgtcggggagcacaggtcgaagagatttggagcctcgaaccggagaattttgaaaaattaaagccagtccatggcctcattttccttttcaaatggcagcccggtgaggagcctgctgggtccgtcgttcaggacagccgattagatactatcttctttgccaaacaggttatcaataacgcatgtgcaacacaagcgattgtcagtgtgctgttgaactgcacacaccaagacgtgcatctaggagagacactgagtgagttcaaggagttttctcagtctttcgatgctgcaatgaaaggcctggccctgtctaattctgatgtaatcagacaggtgcataactccttcgcacgacagcagatgtttgagtttgatactaagacaagtgccaaggaggaagatgccttccactttgtgtcttatgttcctgtcaacggtagactgtatgaacttgacggcctccgtgagggcccaatcgacctcggggcatgcaatcaagatgattggatcagcgccgtcagacctgtgatcgaaaagcggatccagaaagatgggttcagcccgtgttgtcctggctggagccaaacacctgaactcaaacctagcgcctgtctggacctcccaaaatggtactcggagggtgagatacggttcaatctgatggcaatcgtgtcggacaggaagatgatttacgagcagaagatagccgagctccaaagacagctggcagaagaggaacccatggacaccgaccagggtaattcgatgctcagtgccatccagagcgaagtcgccaagaaccagatgctgatcgaggaggaagtgcaaaagctgaagaggtacaagatagagaatataaggcgtaagcataactatctccccttcatcatggagctccttaagaccctcgccgagcaccaacagcttatccctctggtcgagaaagccaaggaaaagcaaaatgccaagaaagctcaggagaccaagtag

SEQ ID NO: 245894 - DNA, 1068 bp, synthetic construct
  misc_feature 1..1068: note = Description of Artificial Sequence: Synthetic coding sequence
  source 1..1068: mol_type = other DNA
atgacaggcaatgccggagagtggtgcctgatggagtctgatcctggagttttcaccgagttgattaaagggttcggatgccggggtgctcaggtcgaagagatttggtcgcttgagccagaaaacttcgagaagcttaagcccgttcacggtctcatatttctgttcaaatggcagccaggggaggaaccggcaggatcagttgtgcaagactcacgattagataccattttcttcgcgaagcaggtgatcaataatgcatgtgccacccaagccatcgtgtccgtcttgctcaattgcacacatcaggacgtgcatctcggggagaccctgtcagaatttaaggaattctcccaatctttcgacgccgcaatgaagggcctcgctttgagcaatagtgatgtgataaggcaagtacacaattcttttgctcgacaacagatgtttgaatttgacacaaagacatccgcaaaagaggaggacgcctttcacttcgtgtcgtacgtaccagtcaatggcaggctatatgagctcgatgggcttagagaagggccaatcgatctaggcgcttgtaatcaggacgactggatatcagctgtgaggcctgtgatcgagaagcgcattcagaaagatgggttttctccctgctgtccaggctggtctcaaaccccagagctgaagccctctgcttgtctggatctgccaaaatggtattccgaaggcgaaataagatttaacctcatggccattgtgagcgacaggaagatgatatatgagcagaaaattgcagaactacagaggcagcttgccgaagagccaatggataccgaccagggtaacagcatgctgtcagcaattcagtccgaagtggctaagaaccaaatgctgatcgaggaggaagtacaaaagttgaagagatacaagattgaaaacatccgccgtaaacacaactatctccccttcatcatggagctgctcaagaccctagcagaacaccagcagctcatcccacttgtcgaaaaggccaaagagaaacagaatgccaagaaggcacaggaaaccaaatag

SEQ ID NO: 245895 - DNA, 579 bp, synthetic construct
  misc_feature 1..579: note = Description of Artificial Sequence: Synthetic coding sequence
  source 1..579: mol_type = other DNA
atgaagggactggccctgtcaaatagtgatgtaatccggcaagtgcataatagcttcgctagacagcagatgttcgagttcgatactaagacttctgccaaggaggaggacgccttccacttcgtcagctatgtgcctgtcaatggtcgcctgtatgaactggacggcctgcgggaagggccaatcgacctgggggcatgtaaccaagatgactggataagtgcagtgcggcctgtgatcgaaaaaagaatccagaagtatagtgaaggtgagatccggtttaatctcatggctatagtttcggataggaaaatgatctacgaacaaaaaattgcggagctccagagacagctcgccgaggagcccatggatacggaccaaggcaatagcatgctgagcgccattcaatccgaggttgccaaaaatcagatgcttatcgaagaggaagtgcagaaacttaagcggtacaagattgagaatataaggcgaaagcacaattatctaccctttattatggagctcctcaaaactctagccgagcaccaacagcttattccactggtggaaaaaattttctag

SEQ ID NO: 245896 - DNA, 987 bp, synthetic construct
  misc_feature 1..987: note = Description of Artificial Sequence: Synthetic coding sequence
  source 1..987: mol_type = other DNA
atgaccgggaatgctggcgaatggtgtctaatggagtctgatccaggagtgttcacggagctgataaaaggtttcggctgcaggggcgcacaagtcgaggagatatggtcactggagcccgagaatttcgaaaaattgaaacctgtgcatggattgatcttcctctttaaatggcaaccaggcgaggagcctgccggatctgtcgtgcaggattcccggctggacaccatctttttcgccaagcaagtgatcaataacgcatgcgccactcaggctatcgtgtcagtgctgctgaattgcacccaccaggacgtgcacctgggcgaaactttaagcgagttcaaagaattttcacaatccttcgacgcggcaatgaaaggattagccctcagtaactccgatgtgatcagacaggtgcataacagcttcgctaggcagcagatgttcgaattcgacacaaagacttcggcaaaagaggaagacgcattccatttcgttagctacgtgcccgtgaatggtcgattgtatgaactggacggtctgcgcgaggggcctatcgaccttggtgcttgtaatcaagacgactggattagtgccgtgcgaccggtcattgagaaacgaattcagaagtacagtgaaggggagattcggttcaatctgatggctatcgtctcagaccggaagatgatttatgagcaaaagatagctgaactacagaggcagttggcagaggaaccgatggatactgaccagggtaattctatgctgtcagccattcagtctgaggtggctaaaaaccagatgctgatcgaagaagaggtgcaaaagctgaagcggtacaaaatcgagaacatcaggcgaaagcacaattaccttccctttatcatggagctgctgaagacgctagccgaacatcaacagctgataccactggtggagaaggcaaaggagaagcagaatgcaaagaaagctcaggaaacaaaatag

SEQ ID NO: 245897 - DNA, 990 bp, synthetic construct
  misc_feature 1..990: note = Description of Artificial Sequence: Synthetic coding sequence
  source 1..990: mol_type = other DNA
atgactgggaatgcgggagaatggtgcctgatggaatctgaccccggtgtgtttaccgagctcataaagggctttggatgtcgaggtgcacaagtggaagagatctggtccctcgaaccggagaattttgaaaagctcaaaccagttcatgggctgattttcttgttcaaatggcagccaggggaagagccagccggtagcgtggtacaagactctcggctagatactatctttttcgcaaaacaggtgatcaacaacgcctgcgccactcaggcgatagtgtctgttctcttaaattgcactcaccaggacgttcacctgggggaaaccttgagtgaatttaaggaattcagtcagtcatttgacgccgcaatgaagggtctggccctgagcaactccgacgtcatcaggcaggtccacaatagctttgccagacagcagatgttcgagttcgataccaaaactagcgctaaggaagaggacgcatttcacttcgtgagttacgtaccagtcaatggaaggctttatgagttagacggcctgagggagggtcccattgatctgggcgcatgtaaccaggacgactggatctccgctgtcaggcccgtgatcgagaagcgaatacaaaagtattctgaaggcgaaattcgattcaatctgatggcgattgtgtccgacaggaaaatgatttatgaacagaaaattgccgagcttcagaggcaactcgcggaagaggagcctatggacacggaccaaggcaacagcatgctgagcgctattcaaagcgaggttgcgaagaatcagatgctgatcgaggaagaagtgcagaaacttaaacgctataagatcgagaatatacgtcgaaaacacaactatctccctttcattatggagctcttgaaaaccctcgccgagcatcagcagctcattcctcttgtggagaaagcgaaagagaagcaaaacgcgaagaaggcgcaagaaaccaagtag

SEQ ID NO: 245898 - DNA, 954 bp, synthetic construct
  misc_feature 1..954: note = Description of Artificial Sequence: Synthetic coding sequence
  source 1..954: mol_type = other DNA
atggaatcagacccaggagtgtttaccgagctgattaagggttttggctgtcgaggcgcacaagttgaagagatctggagtctggagccggagaatttcgagaagcttaaaccagtgcacggattaatttttctttttaagtggcagcctggcgaagagcccgcaggatcggttgtgcaggactcacgccttgatacaattttttttgctaagcaggtgatcaacaacgcctgtgcgacccaggccattgtgtccgtactactgaattgcacgcaccaggatgtgcacctaggagagacactctcggagttcaaagaattcagccagtcgttcgatgccgctatgaagggcttggccctctcaaatagcgatgtcatcagacaagtccacaacagtttcgcacggcagcagatgtttgagttcgacacaaaaaccagcgctaaggaagaagacgccttccactttgtttcctacgtgcctgtgaacggtcgtctatatgagcttgacggcttaagggaaggacccattgatctaggggcatgcaaccaggatgattggattagcgccgtgcgacctgtgatcgagaaaagaattcaaaagtatagcgagggtgagatccgctttaacctgatggcaatcgtcagcgatcgaaagatgatttatgaacagaaaatcgcggaattgcaacgacagctcgctgaagaggagccgatggataccgaccagggcaactctatgctgtccgccattcagagcgaggtcgcaaaaaaccagatgctgatcgaggaggaggtacagaaactgaagagatacaaaattgaaaacatacgacgcaagcataattacctcccctttattatggagctgcttaagactttggccgagcaccagcaactaattcccttggtggagaaatttgaaaaacactttgaaaaaactctgctcggcaagtag

SEQ ID NO: 245899 - DNA, 300 bp, synthetic construct
  misc_feature 1..300: note = Description of Artificial Sequence: Synthetic coding sequence
  source 1..300: mol_type = other DNA
tagaacctgatggccattgtatctgaccggaagatgatttatgaacaaaaaatcgctgagctgcaaaggcagctggctgaggagcccatggacactgatcaagggaattcaatgctctccgccattcagtccgaagtcgctaagaatcagatgttgatcgaggaagaagtgcagaagctgaaacggtacaagatcgagaatataagacgcaagcataactatttaccattcattatggagttgttaaagaccctagcggagcaccaacaattaatcccactggtagaaaaaatattttag

SEQ ID NO: 245900 - DNA, 498 bp, synthetic construct
  misc_feature 1..498: note = Description of Artificial Sequence: Synthetic coding sequence
  source 1..498: mol_type = other DNA
atggttaggcccggactggcaaggatgtccctgccaaggtgctggttccggtaccccggatggacaggcgctgaggctgggaggggccgtgcaattgtaagtagaagactcccttcccttaacccttgggatgccggagagaggcatggcggactcgtgagaatctgcgcgagcctaggccctcacaagcggctgccagctggtttgccacaatgtccacacctgtatttggcggctgatcccttggatccccagcgcagacaggaaaagagctgcgccgcactaggaaatgataagcggaggcagccggatggccagcggcagccccagcagcagcagcaaccacactgccgcaggggattccaggccccagcgttgcctaatcccctccgggtgctacagggacttggacgcgtgagtatgagcctcggctggctggagcgccctcccgctttgagccgggctgccggttgtcgaggcgcacaggttgaggaatag

SEQ ID NO: 245901 - DNA, 657 bp, synthetic construct
  misc_feature 1..657: note = Description of Artificial Sequence: Synthetic coding sequence
  source 1..657: mol_type = other DNA
taactctctgagtttaaggagttcagtcagtcgtttgacgccgcaatgaagggcctcgcgctgagtaattctgacgtgattagacaggtccacaattcgtttgcccgtcagcagatgtttgaattcgatacaaagacttcagccaaagaggaagacgcattccattttgttagctatgttcctgtgaatggcagattatacgagcttgatggcttgagggaaggccctatcgacctgggagcctgtaatcaggacgactggatttccgctgtgaggcctgtcatcgagaagcggatccagaagtactccgagggggagatccgcttcaacctgatggctattgtgagcgataggaagatgatttacgagcaaaagatagcagaactgcaacgccagctcgccgaggaagagcctatggataccgatcagggcaatagcatgctgtccgccatccagagcgaagtagcaaaaaaccagatgttgatcgaagaggaggttcagaagctcaaaagatacaagatcgagaatatccgccgtaagcataactatctgccgtttataatggagttgctgaaaaccctggctgagcatcagcagctcatcccactggtggagaagtttgagaaacatttcgagaagactctcctcggcaaatag

SEQ ID NO: 245902 - DNA, 777 bp, synthetic construct
  misc_feature 1..777: note = Description of Artificial Sequence: Synthetic coding sequence
  source 1..777: mol_type = other DNA
atgtcgctcggatggctagaaaggccccctgctctatcaagggccgcaggctgtcgcggtgctcaggttgaggaaatctggagcctggagcctgagaattttgaaaagctgaagcctgtacacggcctgatctttttgttcaagtggcagccaggagaagaacctgctgggagcgtggttcaggattctagacttgataccatattctttgctaaacaggtcataaataacgcttgtgccactcaggccattgtcagtgtgttgctgaattgtacccatcaggatgtccacctgggagagacgttatctgagtttaaagagttttcccagagttttgatgcagccatgaaggggctggcactgtccaactccgacgtaatcaggcaggtgcacaactccttcgctaggcaacaaatgtttgagtttgacaccaaaacaagcgccaaggaagaagacgcttttcattttgtctcctatgttccagtcaatggtcggctttatgaattggacggtttgcgtgaaggcccaatagatctgggagcttgcaaccaagacgactggattagcgccgtccggccagtcatcgagaagcggattcagaaatattcggaaggagaaatccgctttaacctcatggctatcgtgagcgaccggaagatgatctacgagcagaagatcgccgaactgcagcggcagcttgcggaagagcccatggacacggatcaaggcaacagcatgctgtctgcaatccagtctgaagtcgccaaaaaccagtag

SEQ ID NO: 245903 - DNA, 552 bp, synthetic construct
  misc_feature 1..552: note = Description of Artificial Sequence: Synthetic coding sequence
  source 1..552: mol_type = other DNA
tagcagcagatgtttgagtttgacaccaagacttcagccaaggaggaggacgccttccacttcgtgtcttatgtgccagtgaacggcagactttacgagctggacggtttgcgcgagggccctatagatttgggcgcttgtaatcaggatgattggatctcagccgtcagacctgtcattgagaaacgcatccagaagtactctgagggcgagatccggttcaaccttatggccatcgtgtctgaccgcaagatgatttacgagcagaagatcgctgaacttcagaggcagttggcagaggaggagccaatggacaccgatcagggtaacagtatgttgtccgctatccagtccgaggtcgcaaagaatcagatgctgatagaggaggaggttcagaaattgaaaagatacaagatagagaatatccggcgaaaacacaattatctcccttttatcatggagttgcttaagacccttgccgagcatcagcaactgattccactggtcgagaaatttgagaaacattttgaaaaaaccctcctcgggaagtag

SEQ ID NO: 245904 - DNA, 348 bp, synthetic construct
  misc_feature 1..348: note = Description of Artificial Sequence: Synthetic coding sequence
  source 1..348: mol_type = other DNA
tgagaaggcgagattaggttcaacctaatggcgatagtgagcgataggaagatgatctacgagcaaaagatcgccgaattacagaggcagctggccgaggagccaatggacacagaccaggggaacagcatgctctctgccatccagtcagaggtggccaagaatcagatgttaatcgaagaagaggttcagaaactgaagcgctataaaattgagaatatccgtcggaaacataattacttgccttttattatggaactgttgaaaaccttggcggagcatcagcagttaatccctcttgttgagaagttcgaaaagcactttgagaagacactgctgggtaagtag

SEQ ID NO: 245905 - DNA, 582 bp, synthetic construct
  misc_feature 1..582: note = Description of Artificial Sequence: Synthetic coding sequence
  source 1..582: mol_type = other DNA
atgaaggggctggcattatctaattcggacgtcatccggcaggtgcacaattcattcgcccgtcagcagatgttcgaatttgacacgaaaacgagtgccaaagaggaggatgcctttcatttcgtaagctatgtcccagtgaatggtcgcctgtatgagctggatggacttagggaaggccctatcgatctcggggcatgcaaccaggacgactggatatcagcggtacggcctgtcatcgagaaacggatccaaaagtattcagaaggcgaaatccgctttaacctcatggccattgtcagcgaccgcaaaatgatctacgagcaaaagatcgctgaacttcagaggcagctagcagaagaggagccaatggacaccgatcaggggaacagcatgcttagcgctatccagagtgaagttgctaagaatcagatgctgattgaagaggaagtgcagaagctcaagaggtataaaattgaaaatatacgtcgtaagcacaactatctgcccttcattatggagttgctgaaaactttagctgagcatcagcagctgataccactcgtcgaaaaaatcttttag

SEQ ID NO: 245906 - DNA, 498 bp, synthetic construct
  misc_feature 1..498: note = Description of Artificial Sequence: Synthetic coding sequence
  source 1..498: mol_type = other DNA
atggccccaaacgcaagctgcctttgtgtgcatgtgagaagtgaggaatgggacctgatgacattcgacgcaaatccgtacgattccgtgaagaaaattaaggaacacgtgaggtcaaaaacgaaggtgccagtacaggaccaggtcctgctactgggaagcaaaatcctcaagcctcggcgttcactgtcttcatacggcatcgacaaggaaaagactatccacctgactttaaaggtggtgaagccaagcgacgaagagttgcccctgtttctggttgaatcaggcgacgaggccaagcggcatcttctgcaggtcaggcgttcaagttctgtggctcaggtcaaggcaatgatcgagaccaagactgggatcattcctgaaacccagatcgtgacttgcaacgggaaacggctcgaagacggcaagatgatggccgattatggtatccgcaaagggaatctcctctttttggcgtgctactgtattggcggatag

SEQ ID NO: 245907 - DNA, 498 bp, synthetic construct
  misc_feature 1..498: note = Description of Artificial Sequence: Synthetic coding sequence
  source 1..498: mol_type = other DNA
atggcacccaatgccagttgtctttgtgtgcacgtgaggtctgaagaatgggacctaatgacgttcgatgctaatccctatgactccgtcaagaaaatcaaagaacatgtgagaagtaagaccaaagtcccggtgcaggaccaggtcctgcttctgggatccaaaatccttaagcctcggaggtcactgtcatcatatggaatcgacaaggagaaaaccatccatctaactctgaaagtcgttaaaccgagcgatgaggaactgccattgttcctcgtggaatcaggggacgaggccaagcggcacctgctccaggttaggcgatcttcttctgtggcgcaagtcaaggcaatgattgagacaaaaactgggatcatccctgaaacacagatcgttacctgtaacggcaagcggttagaagatggaaaaatgatggccgactatggaatcagaaaggggaacttactatttctcgctagctactgtattgggggatag

SEQ ID NO: 245908 - DNA, 498 bp, synthetic construct
  misc_feature 1..498: note = Description of Artificial Sequence: Synthetic coding sequence
  source 1..498: mol_type = other DNA
atggctccaaatgcctcgtgcctgtgcgtccatgtacggtcagaagagtgggatctgatgacctttgatgctaacccctacgattctgtgaaaaagatcaaggaacatgtgcggtcaaagaccaaagtccccgtgcaagaccaggtccttctcctgggctccaagatcctaaaacccagacgctcactgagctcatatggcacagacaaagaaaagactattcacctgactctcaaggtggtgaagccttctgacgaggaattgcccctctttcttgtggagagcggagatgaagcgaagcggcatctgctgcaagtgcggaggtcttcttctgtcgcccaagtgaaagctatgatcgaaacaaagacagggattatccctgagacccagatcgtcacttgcaacggtaaaagacttgaagatgggaagatgatggccgattatggtatccggaaaggaaacctgctcttcctggcatcctactgcatcgggggatag

SEQ ID NO: 245909 - DNA, 498 bp, synthetic construct
  misc_feature 1..498: note = Description of Artificial Sequence: Synthetic coding sequence
  source 1..498: mol_type = other DNA
atggcgcctaatgcgagctgcctgtgtgtccacgttcggtctgaggaatgggatctgatgacctttgatgcaaacccctacgactcagtcaaaaagatcaaggagcacgtaaggagtaagaccaaagtaccagtgcaggaccaggtccttctactcgggtccaagattctgaagccccgaagatctctctcgtcctacggaactgataaagagaagacgatccacctgaccctgaaggtagtaaagcccagcgacgaggaattgcccttgtttctcgtagagagcggggatgaagccaagcgccacctcttacaggtgcggagatcttctagtgtagcgcaggtaaaagccatgatagagactaaaaccggtattatcccagaaacccagatagttacttgtaacggaaagcggctggaggatggcaagatgatggccgattacggcatcagaaagggtaatctactttttctcgcctcctactgcatcggcggatag

SEQ ID NO: 245910 - DNA, 498 bp, synthetic construct
  misc_feature 1..498: note = Description of Artificial Sequence: Synthetic coding sequence
  source 1..498: mol_type = other DNA
atggcaccaaacgcaagctgtctctgtgtacacgtacgaagtgaggaatgggatctaatgacattcgacgctaacccatacgactccgttaaaaagatcaaggagcacgtccggtccaagacaaaggtgcccgttcaggaccaagtgttgctcctaggcagtaagattttgaaacccaggcgtagtctgagttcctacggcattgacaaggaaaagacaattcatcttacactgaaagtggttaagccttctgatgaagaactgcccttgttcctcgtcgaatcaggagatgaagctaaaaggcatctgctgcaggtgcggagatcttcctccgtggcgcaggttaaggcaatgatcgaaactaagacaggcattatacccgagactcaaattgtgacttgcaacggcaaaaggctcgaagatgggaagatgatggccgactatggaattaggaagggcaacctgctgttcttagcgtgttactgcattgggggatag

SEQ ID NO: 245911 - DNA, 498 bp, synthetic construct
  misc_feature 1..498: note = Description of Artificial Sequence: Synthetic coding sequence
  source 1..498: mol_type = other DNA
atggcacccaatgcatcctgcctgtgtgtacatgtgcgcagcgaagaatgggatctgatgacatttgatgctaacccttatgattctgtcaagaaaattaaagaacatgtcaggagtaagaccaaggtgccggtccaggaccaggtgctcctccttgggtccaagatactaaaacccagacgaagcctgtcctcatacggtactgacaaggaaaagaccatccacctcacgctcaaagttgtgaagcccagcgacgaggagctgccactcttcctcgtggagtctggagacgaggccaagcgccatttactccaggttagacgctcatcttcagttgctcaggtgaaggcgatgatcgagaccaagacaggcattatccccgaaacccagatagtcacatgtaatgggaagcgcctggaagatggaaaaatgatggctgactacggtatccgcaaaggtaacctacttttcctcgcatcctactgcataggcggatag

SEQ ID NO: 245912 - DNA, 498 bp, synthetic construct
  misc_feature 1..498: note = Description of Artificial Sequence: Synthetic coding sequence
  source 1..498: mol_type = other DNA
atggctcctaacgcaagctgcctttgcgtccatgtacgcagtgaggaatgggacctcatgactttcgatgctaacccctacgatagtgttaagaagattaaagaacatgtgagaagcaagacaaaagtgcccgtgcaggatcaggtgctactgttgggctccaagatcttaaagccacggagatcactgtctagttacggaattgacaaagagaaaacaatccacctgaccctgaaggtggtcaaacccagtgacgaggagctccccctcttccttgtggagagtggagatgaggccaaaagacatctgctccaggttaggagatcaagctcagtggctcaggttaaggccatgattgaaaccaagacgggcattattcccgaaacacagattgtgacttgtaacggcaagcgcctcgaggatgggaaaatgatggcggactatggaatcagaaaaggcaacctgttatttctggcttcttactgcattggtggctag

SEQ ID NO: 245913 - DNA, 705 bp, synthetic construct
  misc_feature 1..705: note = Description of Artificial Sequence: Synthetic coding sequence
  source 1..705: mol_type = other DNA
atgggaggatgcgtgggcgcacaacacgactctagtggttccctgaacgaaaacagtgaggggactggggtagccttaggacggaatcagcccttgaaaaaagaaaagccaaaatggaaaagtgactaccccatgaccgatggccagcttcgatctaagagggatgagttttgggatacagccccagccttcgagggtagaaaggaaatatgggatgctttgaaagccgcagcccacgcctttgagagtaatgatcacgagctcgcccaggccattatagacggggcaaatatcactctccctcacggcgctttgactgagtgctatgacgagctggggaacaggtatcagctacctgtgtactgcttagctccccctattaatatgatcgaagaaaagagcgacatcgaaacgctggacatccccgaacccccacccaacagcggatacgagtgtcagctcagattgcgcctcagtacaggcaaggacctaaaactggtggtgcggtccaccgacacagtgtttcacatgaagcgaaggctgcatgcagctgaaggtgtggagccaggctcccagagatggtttttctccgggaggcctctgaccgacaagatgaaattcgaagagctgaaaattcctaaagactatgtggtgcaagttattgtgtcgcagccggtgcagaacccgacacccgtcgaaaattag

SEQ ID NO: 245914 - DNA, 924 bp, synthetic construct
  misc_feature 1..924: note = Description of Artificial Sequence: Synthetic coding sequence
  source 1..924: mol_type = other DNA
atgttcagctttaatatgttcgaccatccgatccctcgggtgttccagaacaggttcagtacacagtacaggtgcttctcagtgtcaatgctggccggacctaacgatagaagcgatgttgaaaaaggcggaaagattatcatgccgcctagtgcgttggatcagttatcaaggcttaacattacttatcccatgttgttcaagctaacaaataaaaattctgaccgcatgacccattgcggggtattggaattcgttgcagacgagggaatctgttacttgcctcattggatgatgcaaaacctgttgcttgaggagggtggcctggtccaagttgaaagtgtaaatctgcaggtcgctacatactctaaatttcagcctcaatccccagattttctggacattaccaaccccaaagcagtcctggagaatgcccttcggaattttgcttgcctgacaaccggcgacgttatcgctatcaactataatgagaagatttatgaacttcgggtcatggagacaaagcccgataaagcagtgtcaatcatagaatgcgacatgaacgtagacttcgacgcgcctctgggttacaaggagccagaacgtcaggtgcagcacgaggagtccacagagggcgaagccgaccattcaggctatgctggggaactcggctttcgcgcattcagcggtagcggaaacagactggacggcaagaaaaaaggcgtcgagccgagccctagtccaattaaacccggagatattaaaaggggcatacctaattacgaatttaagctaggaaagatcacattcatacgcaactcccgtccgctagttaagaaggtcgaggaggatgaggctggtgggagattcgtcgctttttctggggagggccaatctctcaggaaaaaaggacggaagccgtag

SEQ ID NO: 245915 - DNA, 891 bp, synthetic construct
  misc_feature 1..891: note = Description of Artificial Sequence: Synthetic coding sequence
  source 1..891: mol_type = other DNA
atgtttagcttcaacatgttcgaccatcctattccaagggtttttcagaacagattttccacccagtatcgatgcttttcagtgagcatgctggccggaccaaacgacagatctgacgtggaaaaaggcggaaagtcccgccttaatatcacatacccaatgctgttcaagctgaccaataagaattcggatcgcatgactcactgcggagtcctggaattcgtggccgacgaaggaatctgttacctgccgcattggatgatgcaaaatctactcctggaagagggagggctcgtccaggtagagagcgtgaacctgcaggtagccacttattccaagttccaaccgcagtctcccgactttctggatattactaatccaaaggctgtgttggagaatgcgctccgaaatttcgcctgtcttaccacaggtgacgttatcgccattaattacaatgagaaaatctacgaactgcgcgtgatggagacaaaacccgacaaggcagtgagtattatcgaatgtgatatgaacgtcgattttgatgcacctctcggatacaaggagccagaacggcaggtgcagcatgaagaatctactgagggtgaggccgaccacagcgggtacgccggagaacttgggtttcgagccttctccggtagtgggaatcgactcgatggtaaaaaaaagggcgtcgagccgtcccctagtcccataaagcctggggatatcaagcgcggaatccctaactacgagttcaagcttggaaaaattaccttcataagaaatagccggccactcgttaagaaggtggaggaagatgaagcaggcggacgcttcgtcgcattctctggcgagggccaatcacttcgaaagaaagggaggaaaccctag

SEQ ID NO: 245916 - DNA, 1032 bp, synthetic construct
  misc_feature 1..1032: note = Description of Artificial Sequence: Synthetic coding sequence
  source 1..1032: mol_type = other DNA
atgttttcgttcaatatgttcgatcatcctattcctagggtattccaaaaccgattttctacacaatatcgatgcttcagtgttagcatgctcgctggtcccaatgatcgctcagacgtggagaagggcggtaagattattatgccaccatccgctctggaccagttgagcagacttaacatcacctatcccatgctctttaaattaactaataaaaatagcgaccgtatgacccattgcggggttctggagttcgtcgctgacgagggtatttgttatcttccacattgggtcgtgtaccgcctgtctctcgagagggatggccttaaatctctcgaagtggcagaggtgtcaggtagtgactactttccaagtccattctgcggcttagaagtatggatgatgcaaaacctgttgcttgaggagggcggtctggtgcaggtggagtctgtgaacctccaggtggcaacttattctaaattccagccccagagtcccgacttcctggatatcacgaatccaaaggcagtgctcgagaacgccttgcgtaattttgcgtgtctgactactggggatgtaatcgccatcaattacaatgagaagatttacgaacttcgggttatggagactaaaccggacaaagcagtctcaatcatcgaatgtgatatgaacgtcgacttcgatgcaccacttggatataaggaacctgaacggcaagttcagcacgaagagtcgaccgaaggcgaggccgaccatagcggctacgcaggagagcttgggttcagagcatttagcggctccgggaacagactggatgggaagaagaagggcgtcgagccgtccccctcaccgataaagcctggagatatcaagaggggcatacctaactacgaattcaaactcgggaaaatcaccttcatcaggaactcacggccactggtcaagaaggtggaagaggatgaagccggagggagattcgtagcattcagtggcgagggacagtcactgcggaagaagggacggaagccatag

SEQ ID NO: 245917 - DNA, 801 bp, synthetic construct
  misc_feature 1..801: note = Description of Artificial Sequence: Synthetic coding sequence
  source 1..801: mol_type = other DNA
atgtttagtttcaacatgtttgaccaccccatacctagggtgttccagaatcgattttccacacagtaccgctgctttagcgtgagtatgctggccggacctaacgatcgaagtgatgtggagaagggtggcaagataatcatgccgccttcagccctggatcaactcagtagactgaatatcacctatcccatgctgtttaaactcactaacaaaaattctgaccggatgacacactgcggggtcttggagtttgtggcagatgaggggatttgctacctgccgcattggatgatgcaaaacctgcttctcgaagagggaggtctggtgcaggtggaaagtgtcaatctgcaggtcgcaacttactccaaatttcagccacagagcccagacttccttgacatcactaatccgaaggctgtgttagaaaacgcattgcgcaatttcgcttgtcttacaactggtgatgttatcgcaatcaactataatgaaaaaatctatgagcttagagtcatggagactaagcccgataaggccgtgtccattatcgaatgcgacatgaatgtggactttgacgctcccctcggctataaggaacctgaacggcaagtgcagcatgaagagtccacagagggtgaagccgatcactcgggctacgccggagaactgggcttcagagcgttctctgggagtggtaaccgattagacggcaaaaagaagggggttgaacctagcccttctccgatcaaacccggagatattaagcgaggaatacccaattacgagtttaaacttgggtag

SEQ ID NO: 245918 - DNA, 1053 bp, synthetic construct
  misc_feature 1..1053: note = Description of Artificial Sequence: Synthetic coding sequence
  source 1..1053: mol_type = other DNA
atgctcccactccctgatctggacttatggcctctggaccgcctgccctctccgattaagcgcaaacctcaaacactagggtccctcaaatcatcccagggcatcgtggaggaaaccagcgaagaaggaaatagcgtgcccgcttcgcagtcagtagccgcactgacctccaagagaagcttagtgctgatgccagagtcaagcgccgaagagatcactgtgtgcccagaaacacaactcagctcgagcgaaacgttcgatctcgagagagaggtgtcccctgggtccagagatatattagacggagtgcgcatcattatggccgataaagaagtgggcaataaagaagatgccgagaaggaagtggccattagtaccttttcgtcgagcaaccaggtaagttgcccactctgcgaccagtgcttcccgcctacgaagatagagagacatgctatgtattgtaacggacttatggaagaggacaccgaagttttgacgcgaaggcaaaaggaagccaagacaaagagcgacagcggaaccgcagcacagaccagcttggatatcgacaaaaatgaaaaatgttacttgtgtaaatctctcgtccctttccgggagtaccagtgtcacgttgatagctgcctgcagcttgcaaaagcggatcagggggacgggcctgagggcagtggccgtgcatgtagcactgtggaggggaaatggcaacaaagactcaagaaccccaaagagaaggggcactctgaagggagattactctctttcctggagcagtctgagcataaaacgagcgatgcagatatcaagagctcagagaccggcgcatttagagtgccctcgccaggcatggaagaggcaggatgcagccgcgagatgcaaagttccttcactagaagagacctcaatgagagtcccgtgaaatcctttgtgtccatatccgaggctacagattgcctggtcgacttcaaaaagcaggtgactgttcagcccggatccaggacccgaacaaaggcaggcagggggagacggaggaagttttag

SEQ ID NO: 245919 - DNA, 2163 bp, synthetic construct
  misc_feature 1..2163: note = Description of Artificial Sequence: Synthetic coding sequence
  source 1..2163: mol_type = other DNA
atgcccagacggaagaagaaagtgaaggaggtgagtgagagtcgtaatttggagaaaaaggacgtcgagacaacatcttcagtgtctgtgaagaggaaaaggaggctagaggacgcgttcatcgtgatatcagatagcgacggggaggagcctaaagaagaaaacggccttcagaaaaccaagactaagcagtctaacagagcaaaatgcctggcgaagcgaaaaatcgcccagatgacagaggaagagcaattcgctctggctctcaagatgtctgagcaggaggcgagagaggtaaatagccaggaagaagaggaggaggaactgctgaggaaggctatcgccgaatctctgaactcgtgccgtccttccgacgcttcagccaccagaagcaggccacttgccactggaccaagttcacaatcacaccaggaaaaaaccacggattctggcctgactgaaggcatctggcaactcgttcctcctagcctcttcaaagggtcacatatatctcaggggaatgaagctgaagagcgggaggagccctgggaccacacagagaagactgaagaggagcccgtcagcgggagcagtggatcttgggatcagtcctctcagccggtcttcgaaaacgttaacgtgaagtcttttgacagatgtaccggccactccgcggaacatacacagtgcggtaagcctcaggaatcgaccggacgcggatctgcttttctaaaagcagtacagggctccggcgatacgtctaggcactgcttgccgaccctcgccgatgccaaggggttgcaggatacaggcggtacagttaattatttttggggaatccctttctgtcccgatggggtggacccaaatcagtatactaaggtcatcctgtgtcagctggaggtttatcagaagtcactcaaaatggcacagaggcagctcctgaacaagaaaggctttggagagcccgtgctgcctcggccaccaagcctgatccagaatgaatgcggacagggcgagcaggcgagcgaaaaaaatgaatgtatctccgaggacatgggggatgaggacaaagaagaacgacaggaaagtcgggcaagcgattggcatagtaaaacaaaagattttcaagaaagtagtatcaagagcctgaaggagaaactgttgttagaggaggagcctaccacctcccatggccagtctagtcaggggatagtagaggaaacaagcgaggagggcaacagcgtgccagcaagtcagtctgtggcagccctaacctccaagaggtcactggtactcatgcccgagagtagcgctgaggagatcacggtctgcccggagacccagctcagctccagcgagaccttcgacttggaacgcgaggtgagtcctggaagccgcgatattcttgacggagtgcgaattatcatggccgataaggaagtgggtaataaagaggacgccgagaaagaggttgctatatctacgttctccagtagcaatcaagtgtcatgtcctctctgcgaccaatgctttccccctaccaagattgaacggcacgcaatgtactgcaatggactaatggaagaagatacagaggttctgactcgcaggcagaaagaagcgaaaactaagagcgattctggaactgcggctcaaacaagcttagatatcgataagaatgagaagtgttatttatgtaagtcgcttgtgcccttcagggagtaccagtgccatgttgattcatgcctccagcttgccaaggctgaccaaggtgatggtccagagggatccggaagggcatgtagcaccgtggaaggcaagtggcagcaacgtcttaagaatcctaaggaaaagggacactccgaagggaggctgctgtcctttttagagcagtccgagcacaagacgtcagatgcggatattaagtcttctgagactggggctttccgtgtgccaagccctggcatggaggaggcgggttgttccagagaaatgcaatcctctttcactcgcagagaccttaacgaatctcccgtcaaatcttttgtgagtatttctgaggcgacggactgcctggtcgatttcaagaaacaggtgaccgtacagcccggtagcagaacgcgcaccaaagcagggagaggcagaaggcggaagttctag

SEQ ID NO: 245920 - DNA, 1929 bp, synthetic construct
  misc_feature 1..1929: note = Description of Artificial Sequence: Synthetic coding sequence
  source 1..1929: mol_type = other DNA
atgactgaggaggagcaatttgctttagctttgaaaatgagtgaacaagaggctagggaagtcaactctcaggaagaggaagaggaggagctccttcggaaagctatcgccgaatccctgaactcttgccgtccaagcgatgccagcgccacccgttctcgaccactcgctacagggccaagcagccaaagccaccaggagaaaactacggactccgggctgacagaggggatctggcagctagtgcctccgtcattatttaagggtagtcatataagccagggcaacgaggccgaagagagggaagagccatgggaccatacggagaagaccgaggaggaaccagtgtccgggagttccgggtcctgggatcagtccagccagccagtgtttgagaatgtcaacgttaaatcattcgacaggtgcaccggccattctgccgagcatacccagtgtggcaaacctcaggaaagtacagggcgtgggagcgccttcctgaaggccgtccaaggatccggtgataccagcaggcattgtctaccgacacttgcagacgcaaagggcctgcaagatactggcggaacagtgaactatttctggggcattccattctgccccgacggagtagacccgaaccagtataccaaggtgatcctgtgtcagttggaggtttatcagaaaagtctcaaaatggcccaacgtcagctgctgaacaagaagggcttcggagagcctgtgctgcccaggcccccttcactgatccagaacgagtgcgggcaaggcgagcaagctagcgaaaaaaatgagtgcatctctgaggatatgggggatgaagacaaagaggaacggcaggaaagccgagcttccgattggcattccaaaacaaaggattttcaggaatcatcaattaaaagcctcaaagagaagcttcttcttgaagaggaacccaccacgagccacggccagtcttctcaggggattgtggaagagacttcagaggagggaaactctgttcctgcctcccaatccgtggccgcattgacctccaaaagaagcctcgtcttgatgcccgagagcagtgccgaagagattactgtgtgcccggaaacgcagctttcatcaagtgaaacattcgatctagagagagaggtgagccctggaagtagagatattctggatggcgtacggataatcatggccgacaaggaggtcgggaataaagaggacgccgagaaggaagtagccatcagcaccttctcttcctccaatcaggtcagctgtcctctatgcgatcagtgcttccccccaacgaaaattgagcgccatgcaatgtattgcaacggattgatggaagaagatacagaggtgctcaccagacgccaaaaggaggcgaaaacgaagagcgactcagggaccgcggctcagacaagcctggacatcgacaagaatgaaaaatgctatctgtgcaaatcactggtgccctttagagaataccaatgccatgtcgactcgtgcttgcagcttgctaaagcagatcagggcgatggaccagaaggatccggacgggcttgttcaactgtggagggcaagtggcagcagaggctaaaaaaccccaaagagaaaggacactcggagggacggctactgtctttcctggaacagtctgaacacaaaacttcagatgctgatatcaaatctagcgaaacaggcgctttccgagtaccatctccaggaatggaggaggcgggttgcagccgggagatgcaaagtagcttcacaaggagagacctgaacgaatcccctgtcaagagcttcgtgagcatctccgaagcaaccgactgcttagtcgatttcaagaagcaggtgaccgtccagcccggatcacgcaccagaaccaaggcgggacggggtaggaggaggaagttctag

SEQ ID NO: 245921 - DNA, 2160 bp, synthetic construct
  misc_feature 1..2160: note = Description of Artificial Sequence: Synthetic coding sequence
  source 1..2160: mol_type = other DNA
atgcctcgcagaaagaagaaagtgaaggaagtcagcgagtcgagaaacctggaaaagaaagacgtcgaaacgacctcgtcagtatcagtgaaacgtaaaaggcgactagaggatgcctttattgtgatttctgatagtgacggtgaagaacccaaggaggagaacgggctacagaaaaccaaaactaaacaatccaacagagccaagtgcttagctaagcgcaagatcgctcaaatgaccgaggaagagcagtttgcgctcgcgctcaagatgagtgagcaagaggctcgtgaggtaaatagtcaggaggaagaagaggaagaactcctcaggaaggccatagcagaatcccttaattcatgccgtccatctgacgcatccgcaactaggtctagaccactggcaaccggccctagcagccaaagccatcaggagaagactaccgattcgggactgaccgagggcatctggcagctggtgcccccaagcctgttcaaggggtcacatatcagccagggtaatgaggcagaagagagggaggagccatgggaccacacagagaagactgaggaggagcctgtgtctggaagcagcgggtcttgggaccagtcctcacaacctgtgttcgaaaacgtcaacgttaaaagcttcgatagatgtacaggacatagcgccgaacacacacagtgtgggaagccgcaggaatcaactgggagagggagcgctttcctgaaagctgtgcaaggatcaggagacacaagtcggcattgcctccccacactggctgatgccaaaggtctgcaggacactggaggaacggtgaattatttttggggaatacctttctgcccggatggggtggaccccaaccagtacaccaaggtcatcctgtgtcagctagaggtgtaccaaaagtcactgaagatggctcaacgccagctactaaacaagaaagggttcggagagccagtgctgcccagacccccatcacttatccagaacgaatgtgggcagggagaacaagcctcggaaaaaaacgaatgtatatccgaagacatgggcgacgaggataaagaagaacgccaggagagtcgagcaagtgactggcattcaaagactaaagactttcaagagtcctccatcaagtccctgaaggagaaattgttactggaagaggaacctactacctcacacggacagagctcccagggtatcgtggaggaaacttctgaggagggaaacagtgtccccgcatcgcaaagcgtggcagctctgacttctaaacgcagcctggtcctaatgccagaaagtagcgcagaagaaatcactgtgtgtcccgagacacagctatcgtcaagcgaaacgttcgaccttgaacgggaggtcagtccaggtagcagggacatactcgatggcgtgcgtatcattatggcagacaaggaagtggggaataaggaagacgctgagaaggaggtcgccatcagcaccttctcgagcagcaaccaggtctcatgtcctctgtgcgaccaatgttttcccccaactaaaattgagcggcacgccatgtactgtaatggtctaatggaggaggatactgtcctcaccagacgccagaaagaggccaagaccaaaagcgattctggcacggcagcacaaacttctctcgacatcgataaaaacgagaaatgctacctctgcaagtcccttgtgccattccgagagtaccaatgccatgtggactcctgtttgcagctggctaaggctgaccagggtgacggccctgagggtagcggcagagcatgttcaacagtagagggcaaatggcagcagcggctcaagaacccgaaagaaaagggtcacagcgaaggtcgcctactgtcctttctggagcagtccgagcataaaacttccgatgccgacataaagtcgtcagagactggcgctttcagagtcccgagtccgggtatggaggaggccggatgttctagggaaatgcagtctagcttcactaggcgggatttaaacgagtctcctgttaagagctttgtcagcattagtgaagccaccgactgtcttgtcgacttcaagaagcaggtgacagtgcaaccagggtcccgcaccagaaccaaggccggtcgaggccgacggaggaaattttag

SEQ ID NO: 245922 - DNA, 96 bp, synthetic construct
  misc_feature 1..96: note = Description of Artificial Sequence: Synthetic coding sequence
  source 1..96: mol_type = other DNA
atgccgagacgaaaaaaaaaagttaaggaggtttcagaatctcgaaacctcgagaagaaagatgtggagactacgagctctgtgtccgttaagtag

SEQ ID NO: 245923 - DNA, 270 bp, synthetic construct
  misc_feature 1..270: note = Description of Artificial Sequence: Synthetic coding sequence
  source 1..270: mol_type = other DNA
atgccacggagaaagaagaaggtcaaggaagtctctgagtccagaaatcttgaaaagaaagatgtcgaaaccacctcctcagtctccgttaagcgaaagaggcggctggaggatgcatttatagtgatttcagactcagacggcgaggaacccaaggaagagaatggtctacagaaaactaaaacaaagcaaagcaatagggctaagtgcctggctaaaaggaaaattgcccagatgacagaagaagaacagttcgccctggcgctgtag

SEQ ID NO: 245924 - DNA, 474 bp, synthetic construct
  misc_feature 1..474: note = Description of Artificial Sequence: Synthetic coding sequence
  source 1..474: mol_type = other DNA
atgcccagacgcaagaagaaggttaaggaggtgagtgaatcgcggaacctcgaaaaaaaggacgttgaaactacatcatcagtctccgtgaagcgcaagaggcgactggaagacgcattcattgtgattagcgatagtgacggcgaggaaccaaaagaagaaaacggcctgcagaagacgaaaactaaacagagcaatcgggctaaatgtctggccaaaaggaaaattgcccagatgacggaagaagaacaatttgccctagccttgaaaatgtccgagcaagaagctcgcgaagtcaactcacaggaagaagaggaggaagagctgcttcgaaaggctatcgctgaatctctgaactcttgccggccatcagatgctagtgcgaccaggagccgacccctggccacaggcccttcaagccaaagccaccaggaaaaaactacagatagcggactaaccgaggggatttggtag

SEQ ID NO: 245925 - DNA, 2160 bp, synthetic construct
  misc_feature 1..2160: note = Description of Artificial Sequence: Synthetic coding sequence
  source 1..2160: mol_type = other DNA
atgcccaggaggaaaaagaaagtgaaggaggtttctgagagccgcaatctcgaaaaaaaagacgtagagacaacgtccagtgtcagcgtcaaacgtaagcgacgcctggaggacgcctttatcgtcatttctgactctgatggagaggaacctaaagaagagaacggcctacagaaaacgaagaccaagcagtccaatcgcgcaaaatgcctcgccaaacgaaagattgcccagatgactgaggaggaacagttcgcacttgccctcaaaatgagcgaacaagaagcacgggaggtgaattcccaggaggaggaagaggaagagttgcttcgcaaagcaatcgcagagtcgctgaacagctgccggccaagcgacgcctccgctacgcgaagccgcccactggctaccgggccatcctcccagtcccaccaggaaaagaccactgactccgggctcactgaaggcatttggcaattggtgcctcccagcctgtttaaggggtcacacatttcacaaggtaacgaggctgaggaaagggaggaaccctgggatcatacagagaagacagaggaggagcctgttagcggatcatccggctcatgggaccagtcctctcaacctgtgttcgagaacgttaacgttaaaagtttcgatcggtgcacagggcactcagctgaacatacacagtgcggtaagcctcaggagtccacaggtaggggtagtgcttttctgaaagctgtgcaggggagtggagatacttcgaggcactgtctacccactcttgctgatgcaaaagggctgcaggacaccggagggactgtcaactatttctgggggatcccattctgccccgatggcgtcgatccaaaccagtataccaaggtgatcctatgtcaactggaagtctaccaaaagtctcttaaaatggcgcagcgccagctgctgaacaaaaaaggtttcggagagcccgtgctccccagacccccttctttgattcagaacgagtgcggacagggcgagcaggcatctgagaaaaatgagtgcattagcgaggatatgggcgatgaggacaaagaagagaggcaggaatcccgtgcatccgactggcactccaaaaccaaggatttccaggagtcctcgatcaagagtctaaaagaaaaactgctgctggaagaagaacccaccacatcacacggacagtccagccagggaatcgttgaggaaacttctgaggagggcaactcggtgcccgcaagccagagcgtcgccgcacttacctccaaaaggtctctggtgctcatgcctgagagttctgcagaagagatcacggtatgtccagaaacacagctgtcctcgtctgagaccttcgatctggagagagaggtgagccccggatctcgggacattctggacggcgtgaggattatcatggctgacaaggaggttggtaacaaagaagatgctgagaaggaggtggccataagcaccttttctagctcgaaccaggtttcctgccctctgtgtgatcagtgctttcctcccaccaaaatcgaacgtcatgctatgtactgcaacggcctcatggaagaggacacggtactcaccagaagacagaaggaagcgaagactaagagcgatagtggtacggctgcccagacctccctcgacatcgacaagaacgaaaaatgttatttgtgcaagagcctggtgcccttcagagaataccagtgtcatgtcgacagctgcctgcagctggcaaaggctgatcaaggggacggccctgagggaagtggtcgagcctgctctacagtggaaggcaagtggcagcagcgcctgaagaatccaaaagagaaggggcactcggaaggccgactgctgtcgtttttggaacagtcagaacataaaacgtctgatgctgatataaagtcctcagagacgggcgcattccgagtcccttcacccggtatggaggaagccggttgttccagagagatgcagtccagctttacccgtcgggatctgaatgagtcacccgtgaaaagttttgtgtcgatctccgaagctactgactgcctcgtggatttcaaaaagcaggttacggtgcagcctggatcacggactaggactaaggccggtcggggacggaggcgaaagttctag

SEQ ID NO: 245926 - DNA, 5250 bp, synthetic construct
  misc_feature 1..5250: note = Description of Artificial Sequence: Synthetic coding sequence
  source 1..5250: mol_type = other DNA
atggccgatgaggaggctggcggaacagagagaatggaaatctctgcggaactgccacagacaccccaacgtctagcctcctggtgggaccagcaggtggacttctacacagcatttttgcatcaccttgcacagctggtccccgaaatctacttcgcagagatggatcctgatctggagaagcaggaggaatctgtacagatgagcatctttacgccgttggaatggtacttgttcggtgaggatcccgatatttgcctggaaaagctcaagcattccggagctttccagctctgtgggcgagtgttcaagtctggtgagactacctatagctgcagagactgtgcaatcgaccctacatgcgtgttgtgcatggattgtttccaagacagcgtgcataaaaaccacagatataagatgcacactagcactgggggaggcttttgcgattgcggagataccgaagcgtggaaaacaggacccttttgcgtgaatcatgagccaggtagagctggcacaattaaggaaaactcaaggtgccctctaaacgaggaggtaatcgtgcaggccaggaagatcttcccaagcgttataaagtatgtggtggagatgacaatctgggaagaagagaaggaactgccacctgagcttcaaataagagaaaaaaatgagagatactactgcgtgctttttaatgatgaacaccattcatacgatcacgtcatttactctttgcagcgggctctggactgtgagttggcagaggcgcaactgcacacaaccgctatagataaagagggacgccgagctgtcaaagcaggtgcatatgcagcctgccaagaagcaaaagaggatatcaaatctcacagcgaaaatgttagccagcaccctctacatgttgaagtgttgcatagcgagattatggcccaccaaaagtttgctcttaggttaggttcttggatgaacaagatcatgtcttattcttccgatttccgacagatcttctgccaggcatgcctgagggaagaaccggattctgagaatccctgtctcatcagccgcctaatgctgtgggatgctaagttgtataaaggagcacgcaaaatcctgcacgaactgatattttccagtttcttcatggagatggagtacaaaaagctcttcgcgatggaattcgtcaagtactataagcagttacagaaggagtacatatctgatgaccatgatcgcagcatcagcatcaccgcgttgtcagtgcagatgtttactgttcccacgctggcaaggcacctaattgaggaacagaatgtcatctctgtgattacagagacactcctagaggtgctacccgagtatctggatcgcaacaataaattcaatttccagggatatagtcaggataagctgggcagagtttacgccgtgatctgtgacttaaagtacatcctgatctcgaagcccaccatctggaccgagagactgcggatgcagttcttggagggtttcagatccttccttaagatcctgacatgtatgcagggaatggaggaaattaggcgtcaggttgggcagcatattgaggtcgatcccgactgggaggcagccatcgctatccaaatgcaactaaaaaatatcttactcatgttccaggaatggtgtgcttgtgatgaagagctgctcctggtcgcatacaaagaatgtcataaagccgtgatgcggtgctcaactagctttatctcgtcatccaagactgttgtgcagtcctgcggacatagcttagagacaaaatcttacagagtttccgaggatctcgtttccatccacctcccccttagcaggacactggcgggactgcacgtgagattatcaaggctcggggctgtgtctcgactgcacgaatttgttagtttcgaagatttccaggtggaggtgctggtcgaatacccactgcgttgtttggtgctggtggctcaagtcgtagccgagatgtggaggcgcaacggactgtctctgatttctcaggtgttctactatcaggatgttaagtgtagagaggaaatgtacgacaaggacattataatgctgcagattggcgcttccctgatggatcctaataaattcctgctgctcgttctacagcggtatgagctggctgaggcatttaataagacaatcagcaccaaagaccaggatctaattaagcagtataatactcttatagaagagatgctccaagttttaatctacatagtcggcgaacgttacgtaccaggggttggaaatgtgacgaaagaggaagttaccatgcgcgaaattatacatctcttatgtatcgaacctatgccacacagcgctatcgctaaaaatctccccgagaatgagaataacgagaccgggctcgaaaacgtgatcaataaggtggcaaccttcaaaaaaccaggcgtgagcggacatggtgtttatgagttaaaagacgaatccttgaaggactttaacatgtatttctatcactactcaaagacccagcactcaaaagccgaacacatgcagaagaagagacggaagcaagagaacaaggacgaggcgcttcccccaccgcctcccccagaattctgcccagctttctcaaaggttataaacctcctcaattgcgacattatgatgtatattctgcggaccgtattcgaaagagcaattgatacagactccaatctgtggaccgaaggcatgctccagatggctttccatattcttgccttggggctgctggaggaaaaacagcaactgcagaaagcacctgaggaggaggtcaccttcgacttttaccacaaagcctcacgtctgggatcgtccgccatgaacatccagatgctcctggagaagctgaagggcataccccagctcgaaggccaaaaagacatgatcacatggatacttcagatgtttgacactgtgaaaagactgcgcgaaaagtcttgccttatcgtcgctacaacaagcgggtcagagtccattaagaatgatgagatcacccacgataaggagaaggccgaaaggaagcggaaggccgaggctgctcggttgcatcgacaaaagatcatggcccaaatgtccgccctgcaaaaaaacttcattgagactcacaaactgatgtacgacaacacatccgaaatgcccggtaaagaagacagcatcatggaggaggaaagcacacccgctgtgtccgattacagtagaatagcgctgggaccaaaaagaggcccttccgtaacagagaaggaagtcttgacatgtatcctgtgccaggaagagcaggaagtgaagattgagaataatgcaatggttttgtccgcttgcgtgcagaagtctacggctttgacccagcatcgcggaaaacccatcgagctgtccggggaagcattagaccctctgttcatggatcctgacctggcctatggcacgtatactggctcctgcgggcacgtgatgcatgccgtctgctggcagaaatattttgaggctgttcaactcagttcacaacagcggatccacgtggatttgtttgacctggagtctggggagtatctttgtccattatgtaaatccctgtgtaataccgtcatccctattattcccctccagccccagaagattaattcggagaacgctgacgccctggcccagctgctcactctcgcgcgatggatccagactgtactcgccagaatatcaggatacaacatcagacacgcgaaaggagagaaccctattccgatattcttcaatcagggaatgggcgattcaaccctggagttccactctatcctctccttcggcgtggagtcaagtataaagtatagcaattccatcaaggaaatggtgatattgttcgctaccaccatatacaggatcgggcttaaagtgccgccagacgaaagagaccccagagttccaatgctcacatggagtacctgcgctttcaccattcaggccatcgagaacctgctaggggatgaaggcaagcccctgttcggggctctccagaatagacagcacaacggactgaaggcactgatgcagtttgcagtggcacagcgaataacatgtccacaagtgttgatacagaagcaccttgtccgattgctgagcgttgttctccctaatatcaaatctgaagacacaccttgcctcctgagcattgacctgttccacgttctcgtcggagccgttctggctttccctagcttgtactgggacgatccagttgacctacagccttcttcagtgagcagttcatataaccatctatatctgttccatctgattaccatggctcatatgctgcaaattttgctgaccgtagataccgggctccccttagcacaggttcaggaggactcggaagaggcccatagcgccagttctttctttgcagaaatttcccaatacacatctggaagtataggttgcgacatcccaggatggtacctctgggtgagtctgaagaacggcatcacaccctatcttcgctgcgcggctctgttttttcactacttgctgggagtgaccccccctgaggagttacacacaaattcagctgagggggaatattccgctctttgctcctacctgtccttgcctacaaacctcttcctgctcttccaggagtattgggatacagtccggccacttctacagcggtggtgcgctgatccggctttgctgaattgtctaaaacaaaaaaatacggtggtccggtatccacggaaaaggaactcgttgattgaactgcccgacgactacagctgcctgctgaatcaggcctcccactttcgatgcccccgatcagccgatgatgagagaaagcatcctgtgctttgtctgttctgcggcgctatcctgtgctctcagaacatttgttgccaagagattgtcaacggcgaagaggttggtgcatgtattttccacgcactgcactgtggtgcgggagtgtgtatctttctgaagatacgtgagtgtcgcgttgtactggtggaagggaaggcacggggttgcgcctaccctgctccttacctggatgaatacggcgagactgacccgggactcaagagaggtaaccctttgcacctgagtagggaaaggtacaggaaactgcatctcgtgtggcagcagcattgtatcattgaagagatcgcaagaagccaggaaacaaaccagatgctgttcgggttcaactggcaactcctttar

SEQ ID NO: 245927 - DNA, 2412 bp, synthetic construct
  misc_feature 1..2412: note = Description of Artificial Sequence: Synthetic coding sequence
  source 1..2412: mol_type = other DNA
atggctgacgaggaggccggtggcacggagcgcatggaaatcagtgcggagctgccacaaacacctcagcgcttagctagttggtgggaccagcaagttgacttctatacagccttcttacaccatctcgcacagctagtacctgaaatctatttcgcggaaatggatcctgacctggaaaaacaggaagagagcgtccagatgtccatctttactcctctggaatggtacttattcggagaggatccagatatctgtctggagaaactcaaacattctggcgctttccagctttgcgggcgagttttcaaatctggggaaaccacatacagctgtagagattgcgccatcgacccgacctgcgtcttgtgtatggactgcttccaagacagcgtacacaagaatcacaggtacaaaatgcacacttcaaccggtgggggtttctgtgactgcggtgacactgaggcttggaaaacgggtcctttctgcgtgaaccacgagccaggacgtgccggaaccataaaggaaaacagtaggtgccccttgaatgaagaggtgatcgttcaggctcggaaaatctttcctagtgtgattaaatacgtcgttgagatgaccatttgggaggaagaaaaggagctcccccctgagctgcagatcagagaaaagaatgagaggtattactgcgtgctgtttaatgatgaacaccactcttatgaccatgtgatctacagcctgcaaagggccttggattgtgaactcgcagaggcacagctacacactacagcaatcgacaaggaggggaggagagccgtgaaagcgggagcttacgccgcttgccaagaggctaaagaggatataaaatcacactcggagaatgtatcacaacacccacttcatgtggaggtcctgcactcagagatcatggcccaccagaagtttgctctgaggctcgggtcttggatgaataaaatcatgagctattcttccgacttcaggcaaatcttttgccaggcatgtctgcgcgaagagccagactccgagaacccatgtctcatttcacgccttatgctgtgggacgccaaattatataagggagctcggaagatacttcacgagctgattttttccagttttttcatggagatggagtataagaagctgtttgcaatggagtttgtaaagtattacaagcagttgcagaaagagtacatctctgacgatcatgaccgcagcatttctattaccgctctgagcgtgcagatgttcacggtcccgactctcgcacggcatctcatcgaggaacagaatgtgataagcgtaatcactgaaaccctactcgaagttttgcctgagtatttggacagaaacaacaagtttaactttcaggggtattcccaagacaaattagggagggtgtacgccgtgatctgtgacctcaagtacatcctgatctcgaagcccactatctggaccgagaggctgcgcatgcaatttctcgagggattcaggagcttcttgaaaattttaacgtgtatgcagggtatggaggagatcagaagacaggttggccagcacatcgaagtcgatcccgactgggaagctgccatagccatacagatgcagcttaagaatattcttctcatgttccaggagtggtgcgcatgcgatgaggagcttctgctcgtagcgtacaaagagtgccataaagctgtgatgcgttgcagtaccagcttcatttcctctagcaaaactgtggtccagagctgcggccatagcctcgagacaaagagttatcgtgtctccgaggacctggtttccatccacttacccctgtcacgtactctagctgggttgcacgtgcgcttatccaggctcggcgcagtcagtcgtttacatgaattcgttagctttgaggactttcaggtcgaggtactggttgaatatcccctgcgatgtctggtccttgttgctcaggttgttgcagagatgtggcgccgaaatggattgagtctcatcagtcaagtgttttattatcaggacgtcaagtgccgagaagagatgtatgacaaggatatcataatgctccagatcggagcctctctgatggacccaaacaaattcctgctactggtcctccagagatacgaattggctgaagcctttaacaagaccatttccaccaaggaccaagacttgatcaaacagtataatactctcatcgaggaaatgctgcaagtactcatttacatcgtgggtgaaaggtatgtgccgggtgtgggaaacgtgaccaaagaagaggtaactatgagggagattatccatcttctgtgcattgagcccatgcctcatagcgcgatcgcaaaaaacctgcctgagaacgaaactagatgcatacggccatggtcgctgtag

SEQ ID NO: 245928 - DNA, 3042 bp, synthetic construct
  misc_feature 1..3042: note = Description of Artificial Sequence: Synthetic coding sequence
  source 1..3042: mol_type = other DNA
atggccgacgaagaggctggcggtaccgagagaatggagatatctgcagagctgcctcagacacctcagagactggcctcctggtgggaccagcaggtggacttttatactgcattcttgcaccacctagcacagctggtgccggaaatctatttcgccgaaatggaccccgaccttgaaaagcaggaggagagcgttcagatgagtatttttacccccctggagtggtatcttttcggggaggatcccgacatttgcctggagaagctgaagcattctggagctttccagctgtgcggacgagtcttcaaaagtggggagactacttattcctgcagggactgtgctatcgaccccacctgtgtgctgtgcatggattgcttccaagattcagtacacaagaatcacaggtacaagatgcacacttccactggaggagggttctgcgattgcggggacactgaagcttggaaaaccggacctttttgcgtcaatcatgagcctgggagggctggcacaatcaaagagaactctaggtgccctctcaatgaagaggtcatcgtgcaggctcggaagatctttcccagcgtgattaaatacgtcgtggagatgaccatctgggaggaggagaaagaactaccccctgagttacagatccgggagaaaaacgaaaggtattactgcgtgctcttcaacgacgaacatcatagctatgaccacgtgatttactccctgcagcgagcactcgactgtgaactggcagaggcacagctgcatacaactgcaatcgacaaagagggccgtcgcgctgtcaaagcaggagcatacgcagcatgccaggaggccaaggaggacattaagtcacattccgagaacgtgtctcaacatcctctgcatgttgaagtcttacacagcgaaataatggcccaccagaagttcgcactccggctaggatcgtggatgaacaaaatcatgagttattcctccgacttccggcaaattttttgccaggcatgtctgagggaagagccagattccgagaacccttgtctgatctcaagactgatgctgtgggacgcaaaattatacaagggagcccgaaaaatcctccatgaactgatctttagcagcttctttatggagatggagtataaaaagttattcgctatggaattcgtgaagtactacaagcagttacagaaggagtatatttccgatgaccatgatcgatcaatcagtataacagccctcagcgtacagatgtttacagtcccgacactagctcggcacctgatcgaggaacagaacgtgatctcagtgatcactgaaacccttctggaagtactgcccgagtaccttgatcgaaacaacaaattcaatttccaaggctactcacaggacaagctcggaagagtatatgccgtcatctgtgatttgaaatacattttgatcagcaagcccacaatctggaccgagcggctcaggatgcagtttctcgagggctttaggtctttcctgaaaatattgacttgtatgcaaggaatggaggagatccggcgacaagtcggtcagcacatcgaggttgaccccgactgggaggctgcaatcgccatacagatgcaacttaaaaatatacttctgatgttccaggagtggtgtgcgtgcgatgaggagcttctgctggtggcttataaggagtgtcataaggctgtgatgcgctgctccacaagcttcattagctcttcaaagaccgtcgtacagtcatgcgggcacagccttgagacgaagagctaccgcgtgtctgaggacctggtatcgatccatttaccactcagccggaccctggccggtctgcacgtgcggctgagtcggctcggcgctgtctctcgcctgcatgagtttgtatcctttgaagatttccaggtagaagtactagtggaatatccactgagatgtctggtgctcgtggcacaggtcgtggccgagatgtggaggcggaatgggttgtcgctgatcagccaggtattctactatcaggacgtgaagtgccgagaagagatgtatgataaagatatcatcatgctccagattggggctagtttaatggaccctaataagttcctgctcttggtcctgcagcgatacgagctggctgaagcttttaacaaaactatctctactaaagatcaggatctgatcaagcagtacaacaccctgatcgaggaaatgttgcaggtcctcatttatatagtgggtgaacggtatgttcctggcgtggggaacgttaccaaggaggaagtcactatgagagagattattcacctgctgtgcatcgagccgatgcctcactccgccattgccaaaaatctgcctgaaaatgagaacaatgaaacaggcctggagaacgtgataaataaagtcgctaccttcaagaaacctggcgtatccgggcacggtgtttacgaattgaaggacgaatctttgaaggactttaatatgtatttttatcattatagcaagacccagcactctaaggccgaacatatgcagaagaaaagacggaagcaggaaaataaagatgaagctctgcccccacccccaccacccgagttctgccctgccttcagcaaggtgatcaacctgctaaattgcgatatcatgatgtatattttaagaacagtgtttgagagggcaatcgacaccgattcaaacttatggaccgaaggcatgctgcagatggcgtttcatattctggcactagggcttctggaggaaaaacagcagctacaaaaggccccagaagaggaggtgacctttgatttctatcataaggcctccaggttgggatcatctgcaatgaacatccaaatgctgctggagaaattaaaaggaatccctcagttagaagggcaaaaagacatgattacctggatcctccagatgttcgacacagtgaagaggttacgtgaaaagtcatgtctcattgtggcaacaacaagcggatctgagagcattaagaatgacgagatcctgcatcactag

SEQ ID NO: 245929 - DNA, 1728 bp, synthetic construct
  misc_feature 1..1728: note = Description of Artificial Sequence: Synthetic coding sequence
  source 1..1728: mol_type = other DNA
atgtacgcgggtaatattcctatctataaaaccgaatcacgctcgcgtaacgaacagggcatggaccccattacacgacaggtgggacagcacattgagatggaaccagaatgggaggctgctttcacccttcagatgaaactcactcacgtaatatcgatgatgcaggattggtgcgcctctgacgagaaggttctgatagaagcctacaaaaaatgcttagccgtgctaatgcagtgccatgggggatacactgacggggagcagcctataacattatcaatctgtggacattcagtagaaaccattaggtactgcgtaagccaggaaaaggtctccatccatttacccgtgagtcgcctgctcgccggactacatgtgctgctctcgaagtccgaagttgcatacaagttcccggaactgctgccccttagcgagctttctcctccgatgttgatagaacacccccttaggtgcctggtgctgtgcgcccaggttcatgccggtatgtggcgaaggaatggcttcagcctggtcaaccaaatctactactatcacaatgtgaagtgtcggcgtgaaatgttcgacaaagacgtggtaatgctacagactggtgtctcaatgatggatcctaaccattttctgatgataatgctgagccggtttgagctatatcaaattttcagcacaccagattacggcaaacgattctcgtccgagattacacacaaagatgtggttcagcagaataacacattgatcgaagaaatgctgtatctcatcatcatgttagtgggggagcgcttctctcccggagtcggtcaggtcaacgccactgacgagattaagagggaaatcattcaccagctgtctatcaagccaatggcccatagcgagcttgtaaagtccctgccagaagacgagaacaaggagacaggcatggagtcagtcatcgaggcagtagctcacttcaaaaaacctggcctcacaggcagagggatgtacgaactcaagcctgagtgtgcaaaagagtttaacctgtacttctatcacttcagccgcgctgagcagagcaaagctgaggaggcacaacgtaaactcaagcgccaaaacagggaggatacggcgcttccgccaccagtgctgcccccattctgcccactgtttgcgtccttggttaacattctgcagagtgacgtgatgttatgtatcatggggaccatcctgcaatgggccgtagagcacaatggatatgcctggtcagagagtatgctccagcgcgtgcttcacttgatcgggatggccctgcaagaagagaaacagcacctagagaacgtgactgaagagcatgtcgtaacattcaccttcacccagaaaatatccaagcctggagaagcacctaagaactctccgtccattcttgccatgctcgagaccctgcagaatgccccatacctggaggtgcacaaagatatgattcgatggatacttaagaccttcaacgctgtcaaaaagatgcgcgaatcttcccccacatcgcctgtcgctgagaccgagggcacaattatggaagaacacaatttccgcgttcaaggcacaaagaccaagctgagaggcagagaaaagcagagactccccgactgtgctgagaaacgatcttggctgagatgccttaagtgctccgggattctgctcatgaagaccaaaaactcttttagcagacattag

SEQ ID NO: 245930 - DNA, 5267 bp, synthetic construct
  misc_feature 1..5267: note = Description of Artificial Sequence: Synthetic coding sequence
  source 1..5267: mol_type = other DNA
atggcctccgagctggagccagaagtccaggccattgacaggagtttgcttgaatgttccgcagaagagatagctggcaaatggctgcaagctacggacctcactcgtgaagtgtaccagcacctcgcccactacgtgcctaagatctattgccggggtcctaatccctttccgcagaaagaagacatgttagcgcaacatgtgctgctggggccaatggagtggtacctctgcggagaagaccccgcattcggctttcctaaactcgagcaggcgaacaagccaagccatttgtgcggaagggtcttcaaggttggggagcctacttatagctgccgcgattgcgccgtggacccaacctgcgttttgtgcatggagtgctttcttggctccatccatagggaccaccgctaccgaatgacaactagcggcggaggaggattttgtgattgtggcgacactgaggcatggaaggagggcccatattgccagaaacatgaactcaatacttctgaaatcgaggaggaggaggaccctctggtgcatcttagcgaagatgtgattgcgcgaacttataatatcttcgcaatcacatttcgctacgctgttgaaatattgacttgggaaaaggaatccgagctgcccgctgatctggaaatggttgagaagtcagatacctattattgtatgctgttcaacgatgaggtccatacttatgagcaagtgatatacactctccagaaggccgttaactgtacgcagaaggaagctatcggatttgctaccacagtggacagagacgggcgtcggtccgtcaggtacggcgattttcagtactgcgagcaagccaagtcagttatcgttaggaacacctccaggcaaaccaaacccctgaaggtgcaggttatgcatagcagcattgtcgcgcatcagaactttggcctgaagcttctgtcttggctcggatccatcattggatatagtgacggcttgaggcgaattttgtgccaggtcgggctgcaagaaggaccagacggagagaatagcagcctggtagatagattaatgctaagcgacagcaagctctggaagggggcacgcagtgtttaccatcaactttttatgtctagcctcttaatggatctgaaatataagaagctgtttgcagtcagatttgccaaaaattatcagcaactgcagcgcgattttatggaggatgaccatgaaagagcagttagcgtgacagctctgtcagtgcagttcttcactgccccaacccttgcccgaatgttaataactgaggagaaccttatgtctattattatcaaaacatttatggatcacctccggcaccgcgatgcccagggacggtttcaatttgaacggtacactgccctgcaagctttcaaattcagacgggtccagtccctcattttggatctgaaatatgtcttgatttcgaagcccaccgaatggtcagacgagttgcgccaaaagtttctcgaaggcttcgacgcctttttagaactcttgaagtgcatgcagggcatggaccctattaccagacaggttgggcagcacattgagatggaaccagagtgggaggccgcttttactctgcaaatgaagcttacacatgtgatctcaatgatgcaggactggtgcgcatctgacgagaaggtgcttatcgaggcttataaaaagtgcttggccgtcctcatgcagtgccatggcggttacacagacggagagcaacccattactctctccatttgcggacatagcgtggaaaccatcaggtattgcgtctcgcaagaaaaagtcagcatccacctacccgtgagtcgcctgcttgcgggactgcatgtgctgctaagcaaatcagaggttgcttataaattccctgagctgctgcccttgagcgagctgagccccccaatgctgatcgaacatcccctgcgctgtctggttctgtgtgcccaggtacatgctgggatgtggagacgaaatggctttagtctggtgaaccagatctattattaccataatgtgaagtgtcgtcgagaaatgttcgacaaagatgtcgtgatgttacagaccggtgtgagcatgatggatcccaatcacttcctgatgattatgctgtcgcggtttgaactctaccagatcttttctacccctgactatgggaagaggttttcctctgaaattacacacaaagacgtggtgcagcagaataacacgctgatcgaagagatgctgtatctgatcataatgctggtcggagaacggttctctcctggtgtgggtcaggtgaacgccaccgacgagatcaagagagaaatcattcatcagctttccattaaacccatggctcattccgaacttgttaaatctctaccagaagatgagaataaagagactggcatggagtccgtcattgaggcggtggcccacttcaaaaaacctgggctgaccgggaggggcatgtatgagttgaaaccagaatgtgctaaggagtttaatctgtacttctaccatttctcacgagccgaacagagcaaggcggaggaagcccagcgtaaactgaagagacagaacagggaggacacagccttaccgccacccgtgttacccccattctgccctctgttcgctagcctggtgaatatattacagagcgacgtcatgctgtgcattatgggtaccatactgcagtgggctgtcgagcacaatggctacgcgtggagtgaatctatgctccagcgcgtgttgcatttgataggtatggccttgcaggaggaaaagcaacatctcgagaacgtgactgaagagcatgtagtcaccttcacattcacccagaagatcagcaagcccggagaggccccaaagaattctccatctatccttgctatgctggaaaccttgcaaaatgctccctacctcgaggtgcacaaagatatgattcgatggatacttaagacctttaacgctgtcaagaagatgagagaatcctccccaacctctcctgtcgcagagaccgaaggaaccattatggaagaaagctcacgagataaagacaaggccgaaagaaaaagaaaggccgagatcgctaggctccgcagggaaaaaatcatggcccagatgtccgagatgcaacgccattttatagatgagaataaggagctgttccagcagactttagagttagatgcttcgacatccgccgtactagatcattctcccgtggcctcagacatgactctcacagctttgggcccagcacaaacgcaggttcccgagcagaggcagttcgtcacatgtattctttgccaggaggagcaggaggtcaaggtggaaagcagggcgatggtgctcgctgcatttgtgcagcgatcaaccgttctgagcaagaaccgctccaagtttatacaagatcctgagaaatatgacccattattcatgcaccccgacctgagctgcggcacgcatacaagttcgtgcggccacattatgcacgcacactgctggcagaggtacttcgactccgtgcaggcgaaggaacagcggagacagcagcggttgcgcctgcacacatcttatgatgttgagaatggggagttcctctgcccattgtgcgaatgtcttagtaatacagtgattcccttgctgctgcctcccagaaacatatttaacaatcgactcaatttctctgatcagcctaaccttacgcagtggatcaggacgatatcacagcaaatcaaggctctgcagttcttaagaaaggaagagtcgactcccaataacgccagcacaaaaaatagcgaaaacgtagacgagctgcagcttccagagggatttcggcctgacttccggccaaaaatcccgtacagtgagagcatcaaggagatgttgacgacttttggaaccgccacttacaaggtaggcctgaaggtgcatcccaatgaggaagatcctcgagttccaattatgtgctgggggtcttgtgcatacaccatccagagcatcgagcgtattttgtccgacgaagacaagcctctcttcggtcccctgccttgtagactcgatgactgtttgcgttctctgactcgtttcgccgctgcccattggacggtggcttctgtgtccgtcgttcagggacacttttgtaaactctttgccagcctagttccgaacgattcgcacgaggagctgccttgtatactggacatagacatgttccaccttctggtggggttagtcttagcgtttcctgcactgcagtgccaggatttcagcggtataagcctcggtacaggcgacttacacatatttcacttagtgactatggctcacatcatccaaattctgttaacaagctgcacagaggaaaacgggatggaccaggagaaccctccctgcgaggaagagtctgcggtgcttgctttgtataaaactctgcaccagtacacagggtctgcactgaaagagatcccttccggctggcatctgtggagaagtgttagagctggtattatgccattccttaagtgtagtgcgctgttctttcattacttaaacggggtgcccagccccccagatatccaggtgccagggactagccactttgagcacctttgcagttatctgagcctgccgaacaaccttatatgtttgtttcaggaaaattccgagataatgaattcgctcatcgagtcctggtgtcggaattcagaagtgaaacgttacctggagggagagcgtgacgccatccgctaccccagggaaagcaataaactcatcaatctgccagaagactacagctctctcatcaaccaagcctcaaatttctcatgtccaaaaagtgggggagacaaatcaagagctcctaccctttgcctagtgtgcggttcgctgttgtgctcccagagctactgctgccaaactgagcttgagggagaggacgtcggcgcatgcaccgcacacacctactcctgtggcagcggggtcggcattttcctcagggtgagagaatgccaggtgttgttcctagccggaaagacaaaaggttgtttctacagcccaccctacctcgacgattatggcgagactgaccaaggactgaggcgcggtaatccccttcatttatgtaaagagaggttcaaaaaaatccagaaactgtggcaccagcattctgtgaccgaggaaataggacacgcccaggaggccaaccagacgttagtgggtattgactggcaacacctcta

SEQ ID NO: 245931 - DNA, 5267 bp, synthetic construct
  misc_feature 1..5267: note = Description of Artificial Sequence: Synthetic coding sequence
  source 1..5267: mol_type = other DNA
atggcaagtgagctcgaacctgaagtacaagccatagaccgcagtctcctggagtgttcggctgaagaaatagcaggaaaatggctccaggctaccgatcttactagggaggtataccaacatctggcgcactacgtccccaaaatctattgtagaggacccaatccatttccccaaaaagaggacatgttggctcaacatgtgcttctcgggccaatggaatggtatttgtgtggggaggatccggcatttggcttcccaaaattagagcaagcaaacaagccctcccacttgtgcggtcgggtttttaaggtgggggaacccacttactcctgtagggactgcgcggtcgaccctacctgcgtgctgtgtatggagtgcttcttaggatctattcatagagaccaccggtaccgaatgactactagcgggggtgggggtttttgcgactgtggcgataccgaggcctggaaagagggaccttactgtcagaagcacgaactcaatactagcgagatagaggaagaggaagatccactagttcatttatccgaagacgtgatcgcgaggacgtacaacatattcgccatcacatttagatacgccgtggaaatcctgacgtgggagaaagaatccgagttgcctgccgacctagaaatggttgagaaatcagacacatattactgtatgctttttaacgacgaagtccacacatacgagcaggttatttatacgctccagaaggccgtaaactgtacgcaaaaggaggctatagggttcgctactacagttgatagggatgggagacggagcgtgcggtacggtgattttcagtattgtgagcaggccaagagcgttatcgtgcgaaatacttctaggcaaacaaagcccctcaaggtgcaggtgatgcactccagcatcgtcgcacaccagaacttcggcctgaaactcctgtcctggctggggagcatcattgggtatagcgacggcctgcgtaggattctctgccaggtcgggctgcaggagggtcctgacggggagaacagttctttagtcgaccgcctcatgctgtccgacagtaaactgtggaagggcgctcgaagtgtgtatcatcagctgttcatgtcttcccttttgatggacttgaaatataagaagttgttcgccgtgcggttcgccaaaaactacgagcgtcttcagtccgattacgtgacggacgaccatgaccgggaattcagcgtggcagatttgagcgtgcaaatatttaccgtcccaagccttgccaggatgcttatcacagaggaaaatcttatgtctattattataaaaacctttatggaccatcttcggcatcgggatgcacagggcagattccaatttgagcgctatactgccctacaggcctttaaatttcgccgagttcagagcctgatactggatttgaaatacgtgttgatcagcaagcctacagaatggtcagatgagctccggcagaaatttcttgagggattcgacgcatttcttgaactgctgaagtgcatgcaggggatggacccgatcaccagacaggtcggacagcacatcgaaatggaaccagagtgggaggccgcattcaccttacagatgaaactgacgcatgttataagcatgatgcaagactggtgcgcttctgacgaaaaagtgttgattgaagcttacaagaaatgcttggccgtactgatgcagtgtcatggaggctacactgatggcgagcagcctattactcttagcatctgcggacattcagtggaaaccatccggtattgcgtttcgcaggagaaggtgagcatccatttaccagtgtctagactcctggctggcctccatgtattgctgtcaaaatctgaggttgcttacaagtttcctgagcttttgccactgagcgaactttcccccccaatgttaatcgaacacccactgagatgcttggtgctgtgcgcccaggtgcacgccggaatgtggcgaagaaacggtttcagccttgtcaaccagatctactactatcacaatgtcaagtgccggagggagatgttcgacaaggatgtcgttatgctgcagacgggtgtgagcatgatggatccaaaccattttctgatgatcatgcttagcagatttgaactgtatcaaatcttcagcacacctgactacgggaagcggttctcctccgagatcacccataaagatgtcgtgcagcagaacaacactttgatcgaggagatgctgtacttgataattatgcttgttggagaacgcttctctccgggagtgggccaggtgaacgccactgatgaaatcaagcgggaaatcatccatcagttgtcaattaagccgatggcgcactctgagctcgttaaatctctgccagaagatgagaataaggagacaggcatggagagtgtcatagaagctgtggcccattttaaaaagcctgggctgaccggccgtggaatgtatgaactgaaaccagagtgcgctaaggaattcaacctgtacttttatcatttcagtagggccgagcagtccaaggctgaggaggctcagaggaagctgaagcgacaaaatcgggaggataccgctctgcccccacctgtcttaccccctttctgccccctgtttgccagccttgttaatatcttacaatcggacgtcatgctgtgtatcatgggcactattttgcaatgggcagtcgagcataacggttacgcatggtcagagagcatgctgcagcgcgttctgcacctaatcggaatggcgttgcaggaggagaagcagcacctcgaaaacgtgaccgaggaacacgttgtgacattcaccttcacccagaagatctcaaaacccggtgaggcaccgaagaactccccctccatcctcgctatgctggagacacttcagaatgctccatacctagaagttcacaaagacatgattcgatggatcctaaagacctttaatgcagtcaagaaaatgcgcgagagcagccccacatctccagtggccgaaacagaagggactatcatggaagagtcctcaagagacaaagataaggctgaaagaaagcgaaaggcagagattgctcgtctcaggcgtgaaaaaatcatggcacagatgagcgaaatgcagagacattttatcgatgaaaataaagaactgtttcaacaaacacttgagcttgatgcatccacctcagccgtgctggatcactctccagtcgctagcgacatgacccttactgcgctcggcccagcccagacacaggtacccgagcagcgtcagttcgtgacctgcattctgtgtcaagaagaacaggaggtcaaagtggagagccgggcaatggttctcgctgctttcgtccaaaggtctactgtgctttcaaagaatagatcaaagttcatccaggaccccgagaaatacgatcccttgttcatgcatccagatctgtcctgtggtactcatacttcttcatgtggccatatcatgcacgcccattgctggcagcggtactttgactctgtgcaagccaaagaacagcgcagacaacaacgattgagactccatacttcttacgacgttgaaaatggtgagttcttgtgcccactgtgcgagtgtttatctaacacagttatacccctattactcccccctcgtaatatttttaataatcgactgaactttagcgaccagcccaatttaactcaatggatccggacaatttcgcagcaaatcaaggctctgcagttcctgcgcaaggaggaatctaccccaaataatgcaagcactaagaattcagaaaatgtggacgaattgcagctgccagaggggttccggccagatttcaggcccaagattccttactctgagagtatcaaggagatgctcacaactttcgggacggccacctacaaagtagggctcaaagtgcatcctaatgaagaggaccctcgggttccaattatgtgttgggggtcatgcgcttacacgatccaatcaattgagaggatcctttccgatgaggataaacctctcttcgggccactcccgtgcagactggatgattgcctaaggagcctgacccggttcgccgcagcacactggactgttgccagtgtgtcagtggtccagggtcatttctgcaagctgtttgcctcactggtgcctaatgactcacacgaggagctgccatgtatcctagatatcgacatgtttcatctgcttgttggtctggtgcttgcatttcccgcactgcagtgtcaagactttagcggaatttctctcggaaccggggaccttcacatcttccatctggtgacgatggcccacataatccagattttgctcacttcctgtaccgaagaaaacggtatggatcaggaaaatcccccatgcgaggaagaaagtgccgtgttagctttatataaaaccctgcatcaatataccggttcagcactcaaagaaatcccctcaggatggcacctgtggagatctgtaagagccggaattatgccatttcttaagtgctctgcccttttcttccactacctgaacggtgtaccaagccctcctgacatacaggtgccaggcacctcacactttgagcacttgtgctcctatcttagtctacccaataatctgatctgcctattccaagaaaattctgaaattatgaacagcctgattgaatcatggtgtcgcaactcggaggtgaaacgttaccttgaaggcgagagagatgctataagatatccccgagaatctaataaattaataaacttacccgaagattacagttctctgattaatcaggcctcgaacttctcctgccccaagtctggaggggacaaatctcgcgcacctaccctctgcctcgtgtgcgggagtctcctctgcagtcagtcttactgttgtcagaccgagctggaaggagaggacgtaggggcatgcaccgcacacacttacagttgtggctccggagttgggatcttcctgcgcgttcgcgaatgtcaggtcctcttccttgccggtaaaacgaaaggctgcttctattccccaccatatcttgatgactacggtgagacagaccagggcctcagaagaggtaatcccctgcatctgtgtaaagagaggttcaagaagattcagaagctgtggcaccagcactcggtgactgaagagatcggtcacgcccaggaggcaaatcagaccttagtcggaatcgattggcagcatctgta

SEQ ID NO: 245932 - DNA, 1320 bp, synthetic construct
  misc_feature 1..1320: note = Description of Artificial Sequence: Synthetic coding sequence
  source 1..1320: mol_type = other DNA
atggcctctgaactggaacccgaggtacaggccatcgatagaagtttactcgaatgttctgccgaagagattgccggaaaatggctgcaggccactgatttgaccagagaggtctaccaacatctggctcactacgtacccaagatttattgccggggacccaaccctttcccacagaaggaggacatgctggctcaacatgtattgctgggacctatggagtggtatttgtgtggggaagatcctgcatttgggttccccaagctggaacaagcaaacaagccaagccacttatgcgggagggtctttaaagttggcgagcctacctatagctgtagggactgtgcggtcgacccaacttgtgtgctttgtatggaatgtttcctggggagcatccaccgggatcacagataccgtatgacgacaagcggaggcggaggtttctgcgattgcggagatacagaagcatggaaggagggaccctactgtcagaagcatgagctcaatacctccgaaattgaagaagaggaagatccactcgtgcacctttccgaagacgtcatcgcgcgaacttataatattttcgccataactttccgctatgctgtggaaatactgacttgggaaaaggagagcgagctaccagcagacttggaaatggtggaaaaaagtgatacatactattgtatgctttttaacgatgaggttcatacttacgagcaggtcatttatacactgcagaaggcagtgaactgcacccaaaaggaagccattggctttgctaccaccgtggaccgggacggaaggcggtccgtcaggtacggcgacttccagtattgcgaacaagctaagagcgttatcgtgaggaatacctctcggcagaccaaacctcttaaggtgcaggtaatgcacagcagtatcgtggcccatcagaacttcggtctcaagcttctttcttggctcggatctatcatcgggtatagcgacggcctcaggcggattctgtgtcaagtgggattgcaggaaggccctgatggagaaaacagctcgttggtcgacagattgatgctgagcgactccaaattgtggaagggagctagaagcgtctaccaccagctgtttatgtcatctttattgatggatctaaagtacaaaaagctcttcgccgtcaggtttgccaagaattacgagcgacttcaaagtgattacgtcacagatgaccacgatcgcgagttcagcgtggcggaccttagcgttcagattttcaccgtgccaagcctttttagcatcagtgccggaagatctgggtcccccctgtag

SEQ ID NO: 245933 - DNA, 5667 bp, synthetic construct
  misc_feature 1..5667: note = Description of Artificial Sequence: Synthetic coding sequence
  source 1..5667: mol_type = other DNA
atggcagccgcagcggctgccgcagttgggggacaacaaccctctcagcctgagttacctgcccctggcctggcactagataaagccgctaccgccgcacacctcaaggctgccctctctagacccgacaacagggccggagccgaagagctgcaagcactgttggagagagtgctctccgccgagaggcctttggcagcggcagctggtggggaggacgccgctgctgccggaggcggagggggtccaggtgcagctgaggaagaggcattagagtggtgtaagtgcctgctcgccggaggaggaggctatgacgagttctgcgccgctgttcgtgcatatgatcccgctgctctttgcggccttgtttggaccgctaatttcgtcgcctatcgctgcaggacttgtgggatctctccatgtatgtctctgtgcgccgagtgctttcaccaaggcgatcacactggacatgattttaacatgtttaggtcgcaggctggcggagcttgtgactgcggagacagcaatgtgatgagagagtccggcttttgcaagcgacatcagataaagtcatccagcaacatcccttgtgttccaaaggacctgctaatgatgtcagagtttgttctgcccagatttatcttctgcctgatccagtatctgcgcgagggatataatgagccagccgcagacggtccatctgaaaaggacctgaataaggtgctgcagcttctggagccccagatttcctttctggaggacctgaccaaaatgggcggagcgatgcgcagtgtcttaacacaggtgctcaccaaccaacagaactataaagacttaacctcaggactaggggagaatgcctgcgttaaaaaaagccatgaaaaatatctgattgctctgaagagtagcgggttgacctaccctgaggacaaattggtctatggtgtgcaggagcccagcgccggtacttcttcgctggctgtccagggtttcattggcgcaacaggaacactgggacaggtcgattctagcgatgaggacgaccaggacgggagtcaggggctgggtaagcggaagcgggtcaagctttccagcggcaccaaagatcagtccatcatggacgtcctgaaacataagtccttcctggaagagctgttgttctggaccataaagtacgaattcccccaaaagatggtaacgttcctgcttaatatgttgccggaccaggagtacaaagtcgcatttaccaagacatttgttcaacattacgcgtttataatgaagacactgaaaaagagtcatgagtcagatactatgagtaatcgcattgtgcatatctcagtgcaacttttctcaaacgaagaactggccaggcaggtgactgaagaatgtcaactgcttgatattatggtcaccgtccttctgtacatgatggagtcctgccttattaagtcagaactgcaggacgaagaaaatagcctgcatgtggtggtcaactgtggcgaggctctactgaaaaacaatacatattggccactggtgagtgattttattaacatcctcagccaccaatccgtcgctaaacgtttcctagaagatcatggactgctggtaacctggatgaactttgtgtcttttttccagggtatgaatctgaacaagagggagctcaacgagcacgtggagttcgagtcccagacttactacgcagccttcgccgctgaactggaagcatgtgctcagccaatgtggggacttctttcccactgtaaggtccgcgagacccaagagtatacacgaaacgttgtgcggtactgtcttgaagcgctgcaggactggtttgacgctataaattttgtggatgagcctgccccaaaccaggtcaccttccacctgccattgcatcgctactacgccatgttccttagcaaagcggtgaaatgccaggaactcgacctagacagcgtgctccctgaccaagagatgttgatgaaactgatgattcaccccctccagatccaagcttcactagcggagattcattctaatatgtgggtgagaaacggtttgcagatcaagggccaggccatgacgtatgtacagagccatttctgtaactcaatgatcgatccagatatatatctgctgcaagtttgcgcctcacgcctcgatccggactactttatcagttcggtctttgaacgcttcaaggtggtggatctgctcaccatggcatctcagcaccagaacactgttctggacgccgagcacgaacggtcgatgctcgagggggctctaacttttcttgtaatcctgttgtcactgcggctccacttaggcatgtccgacgacgagattctcagagccgagatggtggcacagctctgtatgaatgacagaacccactcaagtctgttagacctgataccagaaaatcccaaccctaaatcaggaattattccaggctcttatagtttcgagagcgtgctgagcgctgtagccgactttaaagctcctgtctttgagcctggcggaagcatgcagcaggggatgtatacccccaaggccgaagtttgggatcaggagttcgatcccgtcatggtgattctgaggaccgtgtatagaagggatgtgcagagtgctatggacaggtataccgccttcctcaaacagtccggaaaattccccggaaatccttggcctccatacaaaaaacgaacatcactgcacccctcttacaaggggttgatgaggcttctccattgtaagacacttcacatcgtcctgtttaccttgctttacaagatactcatggaccaccagaatctttctgagcacgtcctgtgcatggtattgtaccttatcgaacttggtttggagaattccgccgaagaagagtccgacgaggaagccagtgtgggaggacccgagcgatgccacgacagctggtttcctggatccaacttagtgtcgaacatgcggcacttcataaattatgtcagggtgcgcgttccagagacagcacccgaagtgaagcgtgacagccctgcctcaacatcaagcgacaatctgggctcccttcagaactccgggaccgcacaagtattctcattggtcgccgaacgacgtaagaagttccaggaaatcatcaataggtcttcctctgaagcaaatcaggttgtgaggccaaagacctcttctaagtggagtgctcctgggtctgccccacaattgacaacagccatcctcgagatcaaagagtcaattctgtccctgctgataaagctgcaccataagttgtctggaaaacagaattcatattatccaccatggctcgacgacatcgaaattcttatccagccagagattcccaaatactcccacggcgacggtattacagcggttgagcgcattctgctgaaagcagcttctcagtcccgcatgaacaaacgcataattgaggaaatatgtagaaaagtcacccctcccgtccccccaaaaaaggttacagcggctgagaagaagacccttgacaaagaagagcgacgacagaaagcaagggagcgacagcagaaattattggctgaattcgcttcccgccagaagagttttatggagaccgcaatggatgtggattctccagaaaatgacattcctatggaaataactaccgccgagccacaggtgagcgaggccgtctacgactgcgtcatatgcggccaatctggtccttcgagtgaagaccggccaaccggtttagtggtcctcctgcaggcatcctccgtgctcggacagtgccgtgataacgtcgagcccaagaaactacctattagcgaggaggagcaaatatacccctgggacacatgcgcggcagtgcacgacgtgcgtcttagtctgctccagcgctatttcaaagactccagctgcctgctcgctgtgtctataggctgggaagggggagtatacgtacagacctgtgggcacaccctccatatcgactgccacaagagctacatggaaagcctgagaaacgatcaggtgttgcaaggcttttccgtcgataagggagagttcacctgtcctctgtgccgacaattcgcaaactctgttcttccgtgttatcccggatctaatgtcgaaaataatccatggcaacggccatccaacaagagcatccaagatctcatcaaggaggtggaggagctccagggccgtcccggagccttcccatccgaaacaaatttgtctaaagagatggaatccgtgatgaaagacatcaaaaataccactcagaagaaataccgcgattactctaaaacacccggatcacccgacaacgacttcctcttcatgtatagtgtggcaagaactaacctggagctagagctgatccaccgcggtggcaacctgtgtagcggaggagcctcaaccgcgggtaagagatcgtgcctgaatcagctgtttcatgtgctggcactgcacatgcgcctgtactccattgattcagagtacaacccttggcgaaagctgactcagctggaggagatgaacccacagttgggctacgaggagcaacagcctgaagtgcccatcctgtatcacgatgtgacgtcgcttctgctgatccaaatcctgatgatgccgcagcctctccgtaaagatcacttcacctgcatagttaaagtcctgttcacgttactctacacacaggctctggcagcactgtccgtgaaatgcagcgaagaggaccgatcggcgtggaagcacgcaggagctctcaaaaagagcacttgcgacgctgagaaatcatacgaagtgttactgtcattcgtgatctcagagctgttcaagggcaagctataccatgaagagggtacacaggagtgtgccatggtgaaccctatcgcctggagtcctgagtcgatggaaaagtgtctgcaggacttttgtctcccgtttctccggattacatctctcttacagcaccacctttttggtgaggacctgccatcttgccaggaagaagaggagtttagtgtactggcttcatgtctcggcttgctacccactttttaccagacagaacatccttttatcagtgctagctgcctggattggcctgtgccagcctttgacattatcactcagtggtgcttcgaaataaaaagctttactgaacgccacgcagaacaaggcaaggccctgctgattcaggagagcaagtggaaactgccccaccttctgcaattgcctgaaaattataacaccatctttcagtattatcatagaaagacctgctccgtatgcaccaaagttcccaaggatcctgcggtctgcctggtgtgcgggacattcgtttgtttgaaaggcctgtgctgtaaacagcagtcttactgtgaatgcgtcctacactcccaaaactgtggtgccggaactggcattttcctgctgattaacgctagcgtgattataattatcagaggacatagattctgtttgtggggctcagtctacctggatgcccacggcgaagaagacagggatcttcggaggggcaagcccctgtacatctgcaaggagcgctacaaagttcttgagcagcagtggatatctcacactttcgatcacatcaacaaaagatgggggcctcattataatggcctttac

SEQ ID NO: 245934 - DNA, 2130 bp, synthetic construct
  misc_feature 1..2130: note = Description of Artificial Sequence: Synthetic coding sequence
  source 1..2130: mol_type = other DNA
atgatcgcctctaaacaaaggcagtttactgaagtgtttaggatcatgagtagcaccttctcgcagagccgtttcctttacgcggcagtggtgacagacagtccagagaacgatattcccatggagatcaccacggccgagccccaggtttcagaagctgtgtatgactgcgtcatctgcggccaatctggacccagttctgaggacagacctactggcctggtcgttctgctacaagcctcttctgtgctgggtcaatgtcgggacaacgtggagccgaaaaaactccctatctccgaagaagagcaaatctatccatgggacacctgcgccgctgtgcatgatgtgcggctcagcttgctgcaacgctacttcaaagactcttcctgtctgctggccgtatcaatcggctgggagggtggcgtgtacgtacaaacgtgtgggcacactctgcacatcgactgtcataaatcttatatggagtcactacgaaatgatcaggtcttacaaggattctcagtggacaagggggagtttacatgcccactgtgtaggcagtttgcaaactctgtgctcccatgttatccgggaagtaacgtcgagaataatccatggcagagacccagcaataaatcaatccaggatctgatcaaagaagttgaagaactgcagggaagaccgggagccttcccctcggagacaaatctctctaaggagatggaatcagtgatgaaggatattaaaaacactacgcagaagaaataccgggattattccaagacacccggtagccctgacaacgacttcttattcatgtatagtgtcgcgaggaccaacttggaattggaactcatccacagaggtggaaacttgtgctctggaggcgcatctactgccggaaagagaagctgtctgaaccaactgtttcacgtgctggcactgcatatgaggctttacagcatcgactctgagtataatccttggcggaagctgacccagcttgaggaaatgaatccgcaactggggtacgaagagcaacagccagaagttccaatactgtaccacgacgtaacttctctactgctcatacaaattctaatgatgccgcagcctctgcgcaaagatcattttacctgcatcgtgaaagtcctgtttaccctcctatacacacaggcccttgccgctctaagtgttaaatgttccgaagaggacagaagcgcctggaaacacgccggtgctctgaagaaatccacatgtgatgcagaaaaaagctacgaggtcctgctctccttcgtgattagcgagctgttcaagggcaagctctaccacgaggaggggacacaagagtgcgctatggtgaatccaatagcttggtcccccgaatcgatggagaagtgtctgcaagatttttgcctgccttttctgcgaataacctccctgctgcagcatcatctctttggggaggaccttccgagttgccaagaggaagaggaattctcggtattagctagctgcctgggccttctgcccaccttctaccagacggagcatcccttcatcagcgcctcttgccttgactggcccgtgcctgcattcgacatcattactcagtggtgttttgagattaagtccttcaccgaacgtcacgccgagcagggcaaagctctactgattcaggaatctaaatggaaactgcctcacctgttgcagctgccagagaattataacacgatctttcagtattaccataggaaaacatgttcagtctgtacaaaggtcccgaaagatccagctgtttgtttagtctgcggcacctttgtgtgtctaaagggcctctgttgtaagcagcaatcctattgtgaatgcgttttgcatagtcagaactgcggagcagggaccgggatcttcctattgatcaacgcttccgttattattatcattcgcggacataggttctgtctgtgggggtctgtatacctggacgctcacggcgaggaggatagggacctaaggcgtgggaagccgctgtatatatgcaaagagagatacaaagttctggagcagcagtggatatcacacaccttcgaccatattaacaagaggtggggcccacactacaacgggctgtag

SEQ ID NO: 245935 - DNA, 5666 bp, synthetic construct
  misc_feature 1..5666: note = Description of Artificial Sequence: Synthetic coding sequence
  source 1..5666: mol_type = other DNA
atggcagccgctgcagccgcagccgtggggggacagcaaccatcccagccagaactgccagcccctggtctcgccctggataaggctgcaacagcagcgcatctcaaagcggcactgtcgaggcctgataaccgtgccggagccgaggagttgcaggccctgttggagcgcgtgctgagcgcggagcggccattagccgcagccgctggaggggaggatgcagccgctgcagggggaggtggaggtccgggagctgctgaggaggaagctctggagtggtgcaaatgcctacttgctggcggagggggatacgatgaattttgcgccgcagttcgtgcttacgatcctgcagccttgtgtgggttggtatggacggctaattttgtggcctacaggtgtagaacttgcggcatttcgccctgcatgagcctgtgcgctgagtgtttccaccaaggcgaccacaccggtcacgactttaacatgtttagatcacaggccggtggtgcctgtgactgtggggactctaacgtgatgcgtgagtcggggttttgtaagcggcatcaaataaagtctagctctaacatcccatgcgtccccaaagacttgctgatgatgagcgagtttgtcctcccccgatttattttctgcctaatccagtatctgagagagggatataatgagcctgccgctgatgggccttctgaaaaagacctgaacaaagtcctccagctgttggagccgcagatttcatttttagaggaccttacaaagatgggcggagcaatgagaagtgtgctgacccaggtgctcacaaatcagcaaaattacaaagatttaaccagcgggttaggcgagaacgcctgcgtcaagaaaagccacgagaaataccttatcgcattaaaatcttccggtctgacttatcccgaagataagctagtgtacggtgtgcaggaaccaagtgccggaacatcttctctagctgtccagggattcatcggcgctaccgggaccctcggccaggtcgactccagcgatgaggatgaccaggacggtagccagggactcggcaagagaaaaagagtcaaactgagctctggcacaaaggatcaatctataatggatgtgttaaaacacaaaagtttcctggaggagctcctgttctggacaattaaatatgaattccctcaaaaaatggtaactttcctgctcaatatgctcccagatcaggagtataaggttgccttcactaagacattcgtccagcattatgccttcataatgaagaccctcaagaaaagccacgaaagtgacacgatgagcaatcgtatcgtacatatcagtgtccagctcttttccaacgaggaacttgcaagacaggtaacagaagaatgccagttactcgatattatggtgacagtgcttctgtatatgatggaaagctgcttgattaagtcagagctccaagacgaggaaaattcactgcacgtggtcgtgaattgcggggaagccctattgaaaaacaatacctattggccgcttgtatcagattttattaatattctctcacaccagtccgtggcaaaacgctttctggaagaccatggtctcctcgtgacctggatgaattttgtcagtttctttcagggtatgaatttgaacaagcgcgaactgaatgaacacgttgaattcgaatcacagacctactacgcagcatttgcagccgaattggaggcatgcgcacaacctatgtggggcttattatctcattgcaaagtgagggagacacaggaatacactcggaacgtggtgaggtattgtcttgaggctctgcaggactggttcgacgcgattaactttgtagatgaaccagcaccaaatcaggtgacctttcacttaccactccacaggtactacgccatgttcctgagtaaggctgtgaaatgccaggagctggatctggacagtgtgttaccagaccaggagatgctgatgaagctgatgattcacccgctgcagatacaggcttctctcgcagagatacactccaacatgtgggtgcgcaacggactgcagatcaagggacaggctatgacctacgtgcagtcgcatttttgtaacagcatgattgatcccgatatctatctgttacaagtgtgcgcctcgaggctggaccccgactactttatttcctctgtctttgagagattcaaggttgtggacctcttgacaatggctagccagcaccagaacactgtactcgacgcagagcatgagagatccatgttggaaggcgcactaacctttctggtaatactcctcagcctcagactgcacctggggatgtccgacgatgaaattcttcgcgcagaaatggtggcccagttatgtatgaacgatcggacacactcttccctacttgacttgattcctgagaaccccaaccccaaaagtggaattattcctggaagttactccttcgaatccgttctgtctgcggtggccgacttcaaagccccagtgtttgaacccggaggatctatgcaacaaggtatgtatacgccaaaagccgaagtctgggaccaggagttcgatccggtcatggttatattaagaacagtttacagacgggacgttcagtctgccatggatagatacacagcgttccttaagcagagcgggaagtttccagggaatccttggcccccatacaagaaacgcaccagcctccacccaagttacaagggactgatgagactgcttcactgcaaaactctgcatatcgtactgttcacgcttctgtataagattctgatggaccaccagaacctctcagagcacgtgttatgcatggttttgtatctaatcgaactaggccttgaaaactctgcagaagaggaaagcgacgaagaggcttctgtgggaggacccgagagatgtcacgacagttggttccccggaagcaatctcgttagtaacatgcgacacttcatcaattacgttcgggtacgtgtacctgaaaccgcgccagaggtgaaacgagacagccccgcttcgacctcctccgacaacttgggctctctccagaatagcggcactgcgcaagtcttctcactggtagcggaacgtaggaaaaaatttcaggagatcattaataggtcatcttcggaggcaaaccaggtagtgcggccaaaaacttcctcaaagtggtccgcgcctggatctgctccacagctcaccaccgccatactggagataaaggagagcatactgagccttctgatcaaactgcaccataagctttctggcaaacagaatagctattacccaccatggttggatgacatcgaaattctcatccagcctgagatacccaaatactcacatggggacggtatcaccgcggtggagcgcattctcctaaaggctgctagccagtcaaggatgaataaaagaattattgaagagatctgcagaaaggttaccccgccagtcccccctaagaaggtcactgctgccgagaagaagactctcgacaaggaagagcggcgacagaaagcacgcgaacggcaacaaaagttactcgcggagtttgcatctcgtcagaagtctttcatggagactgccatggatgtagactccccagagaacgacatcccaatggagattacaaccgctgagccccaagtatctgaagccgtctacgattgcgtaatctgcggacagagtggtccctcctctgaggatcggccaaccggcctcgttgttctgttacaggcatcttccgtgttaggccagtgccgagataatgtcgagccaaaaaagctgccaatatccgaggaggaacagatctatccatgggatacttgtgctgctgtccatgatgtgaggctgagccttttgcagcggtacttcaaggattcttcctgcctcctcgcagtctcgattggctgggaaggcggagtatacgtgcaaacctgtggtcataccttgcacattgactgccataagagttatatggaatccctcaggaatgaccaggtcctgcagggcttcagcgttgataagggtgaatttacatgccccctgtgcaggcaatttgcgaatagtgtattgccatgttacccgggatcaaatgtcgagaataatccatggcagcgacccagcaataaaagcatacaggacctgattaaggaagttgaagagttacaggggagacctggggcattcccttccgaaactaacctttcgaaggaaatggagtccgtgatgaaagacattaaaaacactacacaaaaaaagtatcgcgactattctaagactccagggagtccagataacgactttctgttcatgtattcggtggcccgaacaaacctagaactggaattgattcaccgaggagggaatctgtgcagtggcggtgctagcacagccggtaagcggtcttgcctcaaccagctgtttcacgttcttgctcttcacatgaggttgtactccatcgacagcgaatacaacccctggcggaagctaactcagctggaagaaatgaacccccagctggggtatgaggagcagcagcctgaggttcccatcctgtaccatgacgtgacatctttactgctcattcagatattgatgatgcctcaaccgctgagaaaggaccacttcacatgcatcgtcaaggtcttgtttaccctgctctatacccaggctctggccgcactgtcggtgaagtgctctgaagaagacagatccgcttggaagcacgccggtgccctgaagaaaagtacatgcgacgcggaaaaaagctacgaagtactgttatcgttcgtaatatctgaattgtttaagggtaagttgtatcacgaagaaggcacacaggagtgcgctatggtgaatcctatcgcatggtctccagaaagtatggaaaaatgtctccaggacttttgcctgccgttcctgcgaatcaccagccttctccagcaccatctgttcggggaagatttaccctcctgtcaagaagaggaagagttctcggttctggccagctgcctgggactcctgcctaccttttaccagaccgagcatccttttatcagcgcctcttgcctggactggccggttcctgcgttcgatatcattacgcagtggtgtttcgagatcaagtcattcacggaacgccacgcggagcagggaaaggcactcctgatacaagagtctaaatggaaactgccgcacctccttcagctgccagagaattataataccattttccagtactaccatcgcaagacctgtagcgtgtgcaccaaagtaccaaaggaccccgctgtttgccttgtatgcggtacgttcgtctgcctgaagggtctttgttgcaaacagcagtcctactgtgaatgcgtgctgcactcccagaactgcggcgctgggactggaatttttcttctcatcaacgcttcagtcatcattatcattcgagggcaccgcttctgtttatggggctccgtctacttggatgcccatggcgaagaggatcgggaccttcgacgcggaaagcctctttacatttgcaaagagcggtacaaagtccttgaacagcagtggatatctcacaccttcgaccacataaataagcgctggggaccgcactataacggactgta

SEQ ID NO: 245936 - DNA, 5753 bp, synthetic construct
  misc_feature 1..5753: note = Description of Artificial Sequence: Synthetic coding sequence
  source 1..5753: mol_type = other DNA
atggccgctgcagccgcagcagcggtgggaggtcagcagccgtcgcagcccgaattgccagcacctggacttgcactggacaaagcagcaactgctgcccacttgaaagccgcactgtctcgccctgataatagagctggcgctgaggagttacaagcactgcttgagcgagtgctcagcgctgagaggccactggctgctgccgcaggcggtgaggatgccgctgctgctggcggaggagggggtcccggagccgctgaggaagaggccctggaatggtgcaaatgtctgctcgccggagggggagggtatgatgagttttgcgctgctgtgcgtgcctatgaccccgcagcactgtgtggtttggtttggaccgctaatttcgtcgcttacaggtgtcgtacatgtgggatcagcccatgtatgtcgctgtgcgctgagtgctttcatcagggagatcatactggtcatgactttaatatgttccggagtcaggccggtggggcttgtgattgcggagattctaacgtaatgcgcgaatccggattctgtaagaggcaccagattaaatcatctagcaatatcccttgcgtccccaaggatctcctgatgatgtcagagtttgtgctgccacggtttattttttgccttatacaataccttcgtgaggggtacaacgaacctgcagccgacggcccaagtgagaaagatcttaataaagtgttgcagctcttagagcctcaaatcagcttccttgaagacctgacgaagatggggggtgccatgagatcggttctcacgcaagtcctcactaaccagcagaactacaaggatttaacgtcaggactgggtgagaacgcttgtgtgaagaaatctcacgaaaaatacctgatcgccttgaagtcaagcggcctgacttatccggaggataaattagtgtatggcgtccaggaaccttcagctggcaccagtagcttggctgtccaagggttcattggcgctacgggcaccctgggtcaggtcgattcgtcggacgaggacgatcaggatgggtcacagggtcttgggaagcgcaagcgcgtgaagctgagctcaggcacaaaagaccagagcatcatggatgtccttaagcacaaatcttttctggaggaactgctcttctggactataaagtacgagttccctcaaaaaatggtgacctttctcttaaatatgctgcctgatcaggaatataaggtggccttcaccaagaccttcgtacagcactacgcctttatcatgaagactctcaaaaaatcacacgaatctgatacaatgagcaatagaatcgtgcacatatcagtacagctttttagcaatgaggagctggctagacaggtaactgaggaatgtcagctccttgacattatggtcacagtcctgctttacatgatggagagttgcctgatcaagagtgagttgcaggatgaggaaaatagcctacacgttgtagtaaattgcggggaggccctgctgaaaaataacacatactggcccttggtgtctgattttatcaatatcctgtcccaccagtctgtcgccaagcgcttcctagaagaccatggcctgcttgtcacatggatgaattttgtgtccttctttcaaggtatgaacctgaacaagcgcgagttgaacgaacatgtcgaattcgagagccagacatactacgccgctttcgctgccgaacttgaggcatgtgcccagcctatgtggggcctgctctcacattgcaaagtgagagaaacccaggaatacacccgcaacgtggtcaggtattgtctggaggccctgcaagactggttcgatgccatcaattttgtggacgaaccagcccctaaccaggtgacattccacctccctctccacagatactacgccatgttcctgtcaaaggcagtgaagtgccaggaactggatcttgactctgtactgccggatcaggagatgctgatgaagctgatgatccatcccctccagatccaggcctccttggccgagattcactcaaacatgtgggtgcgcaacggcctgcagataaagggtcaggccatgacgtatgtgcaaagtcacttctgcaatagcatgatcgacccggatatttacttgttacaggtgtgtgcctcaagactggaccccgattattttatcagcagtgtctttgagcgattcaaagtggtcgatcttttgacgatggcctcccaacaccaaaacacagtcctggacgccgaacacgaacgatccatgctggaaggggctctgaccttcttggttatactgttgtctctgcgcttacatctgggcatgagcgacgacgaaatcctccgcgcagaaatggtggctcaattatgcatgaatgaccggacgcactcctctttattggatctcatccccgagaacccaaatcctaaatctggcattatccccggtagctattccttcgagagcgtcttaagtgcggtcgcggatttcaaagcaccagtatttgagcccggtggaagtatgcagcaaggaatgtatacccccaaagccgaggtgtgggatcaagaattcgaccccgtgatggtgatactgcggaccgtatatagaagggatgtgcagtccgcgatggacaggtacacagcttttctaaagcagtccgggaaattcccaggaaatccgtggcccccatataagaaaaggacaagcctacaccctagttacaaagggctcatgcgcttgctgcattgtaagactttgcatatcgtgctcttcactcttctgtataaaatccttatggatcaccagaatctgtccgaacatgtgttatgcatggtgctctacttaatagagctggggctggaaaattccgcagaggaagaaagcgatgaggaggcaagcgtggggggaccagagaggtgtcatgacagttggttccccggttctaacctcgtctctaacatgagacattttatcaactatgttagagtgagggtgccggaaactgctcctgaagttaagcgcgatagtccagcctcgacctccagtgataatttaggctccctgcagaatagtggcaccgcgcaggtgttctccctggtcgccgagcgaagaaaaaagttccaagagatcatcaatcgttcatccagcgaggcaaaccaggtcgtgcggcctaaaacatcctctaagtggtccgccccaggctccgcgcctcaattaaccactgcgatcctcgaaattaaagaatcaatcttgtctctgcttataaaactgcaccataaactgtccggcaaacagaacagttattatcccccttggctggacgatattgagattttgatccagcccgaaatccctaaatactctcatggcgacgggatcacggccgtggagcgaatcttactgaaagcagccagtcagtccaggatgaataagcgcatcatcgaggagatatgccgaaaagtgactcccccagtgcccccaaaaaaagtaacagccgctgagaaaaaaaccctggacaaagaagagaggagacagaaggcccgagagagacagcagaaactcctggccgagtttgctagcaggcagaagtcctttatggaaactgctatggatgtcgattcaccggagaacgacatccctatggaaattactacagccgagccccaggtgtccgaggccgtgtacgattgcgtcatctgcggtcagagcggaccctcatctgaggatcgaccgactgggctggtggtgcttcttcaggcaagctccgttctcgggcaatgtagggataacgtggagcccaagaagttgcccatatccgaagaagagcagatctatccttgggacacatgcgctgccgttcacgatgttagattaagcttgttgcaacgctacttcaaggatagcagctgtctgctggcggtctcgatcggatgggagggcggtgtgtatgtccagacttgcggacataccctccacatcgactgtcacaagagttatatggaatctctacgcaacgaccaggttctccagggattcagcgttgacaaaggggagttcacctgtcctctctgtcggcagtttgcaaactcagtcctgccgtgttatcccggtagcaatgtcgagaataacccttggcaaagacccagtaataaaagcatccaggatctgattaaggaggtggaagagttgcagggtcgacccggagcgtttccttccgaaactaacctatctaaagaaatggaatctgtgatgaaagatattaaaaacacgacccagaagaagtatcgagactactctaagactcctgggtctcccgataatgactttttgttcatgtacagtgtcgcacggacaaaccttgaattagaattgatccaccggggtggaaacctgtgctcaggcggtgcttccaccgctgggaagaggtcgtgtctgaacttctgtttcatcatcttcccctttacaaagtctgaaataatattatgtcagtataggaagtcccacgacaaggtttatcccaagtaccagctgttccatgttctagcattgcacatgagactttattccatcgatagcgaatacaacccatggcgcaaacttactcagctagaggaaatgaaccctcagcttgggtatgaagaacagcagcccgaggttcctatcttgtatcatgatgtcacaagcttgctgctgatccagatccttatgatgccgcagccattaagaaaggaccatttcacctgcatcgtaaaagtacttttcacgctgctgtacacacaagcccttgctgctttgtctgtgaagtgcagtgaggaggatcgctctgcctggaagcacgcaggggctctcaagaaaagcacatgtgacgcagagaaaagttacgaggtgctgctgagctttgttatcagcgaattgttcaagggtaaattataccatgaggagggaacccaggagtgcgccatggtgaaccctatcgcctggtcacccgagagcatggaaaagtgtttacaagatttctgcttgccctttcttcgaatcactagcctgttgcagcatcacctgtttggcgaagatttgccgtcttgtcaggaggaggaagaatttagcgtgctggcaagttgtctgggcctcctccctacattttatcaaactgagcatccttttatctcggcttcatgcttagattggccagtgcctgcatttgacatcattacccaatggtgttttgagatcaaaagcttcacagagcgccatgctgagcagggcaaggccctcctgattcaggagtctaagtggaaactgccccacctgctgcagctgcccgagaactacaatactatctttcagtattatcatcgcaagacctgcagtgtgtgtactaaggtccccaaggatcccgcagtgtgcctggtttgtggtacatttgtctgcctgaaaggcctctgctgcaaacaacagtcttattgtgaatgcgtgctacacagtcagaattgcggtgctggcacaggtatttttctgcttattaatgcatcagtgataattatcataaggggacatcgtttttgcctctggggctcagtatatcttgacgctcacggggaggaggaccgcgacttgaggagaggaaaaccactgtatatctgtaaggagcgatataaagttctcgagcagcagtggatctctcacacgtttgatcatataaataaaaggtggggaccccattacaatgggttata

SEQ ID NO: 245937 - DNA, 1278 bp, synthetic construct
  misc_feature 1..1278: note = Description of Artificial Sequence: Synthetic coding sequence
  source 1..1278: mol_type = other DNA
atggccggagctgaaggagcagccggaaggcagtcagaactggagccagtcgtctcactggtcgacgtgctagaggaggatgaagagcttgaaaacgaggcgtgcgccgttctgggaggcagcgattccgaaaaatgttcgtacagccagggctccgttaaacgccaggctctctatgcttgcagcacttgtacccccgagggtgaagagccagcgggaatttgcttggcctgcagctatgagtgccacggcagtcacaagctcttcgaactgtataccaagagaaatttccgatgcgactgtgggaattctaaattcaaaaacctcgagtgcaagctactgcccgacaaggctaaggtgaactccggtaataaatacaatgataacttctttgggctgtattgtatctgtaaacgaccgtaccctgatcctgaggacgagatacccgacgagatgatacagtgcgtggtgtgcgaggattggtttcacgggaggcatctaggtgccatacccccagaaagtggcgactttcaggagatggtctgccaggcctgtatgaagaggtgttcattcctgtgggcatatgctgcccagctggctgtgaccaaaatatccacagaggatgatggccttgtccgtaatatcgacgggatcggggaccaggaggtgataaaaccagagaacggagaacatcaggacagcacgcttaaagaggatgtaccagaacaaggaaaggatgatgtgcgcgaggtgaaggtagagcagaactccgaaccatgcgccggatccagttccgaatctgatttgcagaccgtgtttaagaatgaaagtctcaacgctgaatccaaatcgggttgcaaacttcaagaacttaaagcaaagcagcttattaaaaaggacaccgcgacttattggccgcttaactggcggagtaaactctgtacttgccaggattgcatgaagatgtacggagaccttgacgtgcttttcctgactgatgaatatgatacagtcctcgcctatgagaacaagggtaagattgctcaggccacggataggtctgaccctttgatggacactctttcttctatgaacagggtccagcaagtcgaactcatttgcgagtacaacgacctgaaaacggagctaaaagactacctgaaacgctttgccgacgaagggacagttgtgaagcgcgaagacattcagcagttcttcgaggaattccaatcaaaaaaacgtaggcgcgtagacggaatgcagtactactgctcctag

SEQ ID NO: 245938 - DNA, 1050 bp, synthetic construct
  misc_feature 1..1050: note = Description of Artificial Sequence: Synthetic coding sequence
  source 1..1050: mol_type = other DNA
atgcgaagagctctcagctgggcagccgcaacacccagaagtgcgccaaccctccggaactttagatgtgactgtgggaattcgaagtttaagaatctggagtgcaagttactgcctgataaagccaaggtgaatagcgggaacaaatacaatgataatttcttcgggctgtactgcatttgtaagaggccctatcccgatcccgaagatgagatccccgatgagatgatccagtgcgtcgtgtgtgaagactggtttcatggcagacacttgggggcaatccctccagagagtggtgacttccaggagatggtctgccaggcttgtatgaaaaggtgcagctttctgtgggcctacgctgctcagctggctgtgacaaaaattagcactgaggacgatggtctggtgaggaatatagacgggataggcgatcaggaggttatcaagcccgaaaacggcgagcaccaagatagtaccttgaaggaagacgtaccagagcaaggaaaggacgacgtgcgcgaggtcaaggtcgagcagaactcagagccatgtgccggatcatcatctgagagcgatctgcagacagtattcaagaacgagtcccttaatgccgagtctaagtctggctgtaagctacaggagctgaaggcaaaacaactgatcaaaaaggacaccgcaacttattggcccctcaactggcgcagcaagctatgcacctgccaggactgcatgaaaatgtatggtgacctcgacgtgctgtttctgacggatgaatacgacactgtgttggcatacgaaaataaaggcaaaatcgctcaggctaccgaccgttcagatcctctgatggataccctctccagtatgaatagggtgcaacaagtggagctgatatgtgaatacaatgacctgaaaaccgaactgaaggactatctgaagagattcgccgacgagggcactgtcgttaagcgggaagatattcagcagtttttcgaagaatttcagtctaaaaagcggagacgagtcgacggtatgcaatactattgttcttag

SEQ ID NO: 245939 - DNA, 1083 bp, synthetic construct
  misc_feature 1..1083: note = Description of Artificial Sequence: Synthetic coding sequence
  source 1..1083: mol_type = other DNA
atgcgacgcgctttatcctgggccgctgccacacccaggagcgcaccgacactgagaaacttcagatgtgactgcggcaactcaaagttcaaaaacttggagtgtaaactgttgccagataaagctaaagtgaactccgggaataagtacaacgacaacttctttggcctgtattgtatctgcaagcggccatatccggaccccgaggatgaaatccctgacgaaatgatccagtgcgtggtctgtgaagactggtttcacggccgacacctaggcgctattccacctgaatcaggcgatttccaggaaatggtctgtcaggcctgtatgaaacgctgcagctttctctgggcatatgctgcccagcttgccgtaaccaaaataagtactgaagatgatgggttggttcggaatattgacggtataggcgatcaagaagtgatcaagcccgaaaatggcgaacaccaggacagcacactcaaagaggacgtgcccgagcaaggcaaagatgacgtgcgcgaggttaaagtggagcagaattctgagccttgcgctggctcttcctctgagagcgatctgcagacagtattcaagaacgaatcattaaacgccgaatcaaagtctggatgtaagctccaggagctgaaggctaaacagttaatcaaaaaagatactgctacttattggcctttaaattggagatccaaactgtgcacatgccaggattgtatgaagatgtatggagaccttgatgtgctctttctgaccgacgagtatgatacggtgctcgcctacgagaacaagggaaagattgcacaagccacagatagatccgaccctcttatggataccctgtccagcatgaatcgcgtgcagcaggttgagctgatatgcgagtataacgacctgaagacagagttaaaagactacctgaaacgattcgccgacgaaggtaccgttgtcaagcgcgaggatattcagcagttcttcgaagaattccagaagaaggaaaaaaaatcagggtgggatgctgttctgctgcagctggagtggtccatgaaactgtcccacagctcccagtag

SEQ ID NO: 245940 - DNA, 2121 bp, synthetic construct
  misc_feature 1..2121: note = Description of Artificial Sequence: Synthetic coding sequence
  source 1..2121: mol_type = other DNA
atggcctcacccgctgattcatgtattcagtttacacggcacgcctctgatgttcttttgaatttaaaccgcctgaggagtagggatatcctaacagacgtagtgatcgtcgtatctagggagcagtttagggcacacaagacagtactcatggcatgtagcggtctgttctactcgattttcacagatcagctgaaatgcaacctgtcagtgatcaatctggatccagagattaacccggaagggttctgcatactgttggatttcatgtacacatcccgtctgaatctccgcgaaggcaacatcatggctgtcatggcaacggccatgtatctgcagatggaacacgtagtggacacttgtcgtaaatttatcaaggctagtgaggcagaaatggtgagcgccatcaaacccccacgggaagagtttctgaactcacgcatgcttatgccccaggatatcatggcatatcgcggacgggaggttgtggagaataatctgcccttaagatctgcaccaggatgcgagagtagggcttttgcaccttccctctactccggtctttcgactccaccagcctcctatagcatgtattcccacctcccggtgtcctccctgctattcagcgatgaggaatttcgcgatgtgcggatgccggttgccaatccctttcctaaagaaagagcccttccgtgtgactctgctcggccagtgcctggcgagtattcaagaccaacgttggaagtgagccctaatgtctgtcactcaaacatttatagcccaaaggagaccataccggaagaggctcgctccgacatgcactatagcgttgctgagggcttgaaacctgccgctccttctgcaagaaacgccccatactttccctgcgacaaggcatccaaggaggaagaacgcccttcttctgaggatgagatcgccctgcattttgaacctccaaatgccccacttaacagaaaggggcttgtgtctccccagtctccccagaagagcgactgccaacctaactcccctactgagtcttgtagttctaagaacgcctgcatccttcaagcatccggcagcccccctgctaagagtcccactgaccctaaggcctgtaactggaaaaaatataagttcatcgtgctcaacagcctgaaccaaaacgccaagccagagggcccagagcaagccgagctcggcagactttccccccgagcctataccgcgccacccgcttgtcagccccctatggagcccgagaaccttgacctgcagagtcccactaaactcagtgcatctggagaagattctactattccgcaagctagcagattgaataatatcgtcaacaggagtatgacaggctcccccagaagtagcagcgagtcacattcgcccctgtacatgcacccacccaagtgtacatcatgtggtagtcagagtcctcaacacgctgaaatgtgtttacatacagccggaccgacctttcccgaagagatgggtgaaactcagagcgaatattccgactcttcctgtgagaacggcgcttttttttgcaatgaatgtgactgtagattctccgaagaggcttctcttaaaagacacacgcttcagactcatagcgataagccttacaaatgcgaccgatgtcaggccagttttcgatataaaggcaacctggcctcacataagacagtccacacgggtgaaaaaccctatcgttgtaacatctgcggggctcaatttaatagaccggcaaacctcaaaactcacacgagaatccattcaggggagaagccttacaagtgcgaaacctgtggagcgcgtttcgtgcaagttgcacacctccgggctcatgtgctgattcataccggggagaagccatatccctgcgaaatctgcgggacccgattcagacacctccagactcttaagtcacacctgcgcatccatacgggggaaaaaccctaccactgtgaaaagtgtaacttacactttagacataaatctcagctaaggcttcacctgaggcagaaacatggagcgattacaaataccaaggtgcagtatagggtttccgctacagacctaccaccggaactaccaaaggcctgttag

SEQ ID NO: 245941 - DNA, 2619 bp, synthetic construct
  misc_feature 1..2619: note = Description of Artificial Sequence: Synthetic coding sequence
  source 1..2619: mol_type = other DNA
atgagatcagtgtgccatcggagtggcgaacctcagtctgacgatatcgaggcttcaagaatgaaaagggcagcagccaaacacctgattgaaaggtactaccatcagcttacagaaggttgtggaaacgaagcatgcactaacgagttctgcgcgagttgtccgacttttctacgcatggataataacgcagcggctataaaggcactggagctgtacaaaatcaatgccaaactctgcgacccacacccctcgaagaaaggtgcctcctccgcctatcttgagaatagcaaaggggctcctaacaattcctgcagtgaaattaaaatgaacaagaaaggcgctcgcatagactttaaggacgtgacttaccttacagaggaaaaggtttacgaaatcctggagctgtgtcgtgagcgcgaggattatagcccgctaattagagtcatcggaagggtcttcagctccgccgaagccctggtgcagagctttcgcaaggtgaagcaacacacgaaagaggagctcaaatctcttcaagcaaaggacgaggacaaagacgaggacgagaaggaaaaggccgcatgttccgccgcagcgatggaagaggactctgaagcaagcagtagcaggattggcgatagtagccaaggtgataataacctccagaaactgggccctgatgacgtgtctgtggatatcgacgccattagacgcgtgtatactaggttactgagtaacgaaaagattgaaacggcttttctgaacgccctggtatatctttcacctaatgtggagtgtgacctcacgtatcataacgtctacagtcgggaccctaactacttgaatctttttattatagtcatggagaatagaaatctgcactctccggagtaccttgaaatggccctcccactgttctgcaaagctatgtctaagttgcctctcgccgcacaagggaaactcataagactttggtcgaaatacaatgcagatcagatccgcagaatgatggaaacttttcagcagctcatcacctacaaggtgatatctaatgagttcaacagtcgaaatctggtcaatgacgacgacgcaatcgtcgccgcatccaagtgtctgaagatggtgtactatgccaatgtggtcggcggagaagtggacacaaatcataacgaggaggacgatgaggagcccattccggaatcatcagaactgacgcttcaagaactgctgggggaagaacgccgaaacaagaaaggacccagggtggatccattggagaccgagctgggggtcaaaacacttgattgcaggaaacctctgataccatttgaggaatttatcaatgagccccttaatgaggtactggagatggacaaagattacaccttcttcaaggtcgagaccgagaataagttcagtttcatgacctgcccctttatcctgaacgcagtgacgaaaaatttaggactttactacgacaatcgcatccggatgtattccgaaagacggatcaccgtgctgtacagccttgtccaaggacagcaactgaatccatatttgcggctgaaggtgcggagagatcacattatcgacgacgccctggtgcggctcgagatgattgcaatggaaaaccctgccgaccttaaaaagcaactgtatgtggaattcgaaggggaacagggcgtcgacgaagggggagtatcaaaagagttctttcagttggttgtcgaggagatctttaatcccgatatcggaatgttcacatatgacgaatccaccaagctcttttggttcaaccctagcagcttcgaaaccgaggggcaattcacactgattgggatcgtcctggggctcgcgatctacaacaactgtattttggatgttcactttccgatggtcgtataccgcaaactgatgggcaaaaagggaacctttcgcgacctgggggattcacaccccgtgctgtaccagtcactgaaagacttgctagaatatgaggggaatgtcgaggatgacatgatgatcacatttcagatcagtcagaccgacctgttcggcaatcctatgatgtatgatcttaaggagaatggcgataaaatcccaattaccaacgaaaacaggaaggagttcgtcaatttgtattctgattacatactcaacaaatccgtggagaagcagtttaaggccttccggaggggattccatatggtcacaaatgaatctcctttgaaatatttgttcagacccgaggagatcgagctactgatttgtggaagcagaaacctggacttccaggccctggaggagacgactgaatacgatggcggttatactagagattcggtcttaattcgagagttttgggagattgtgcattcctttactgatgagcagaagaggctttttttgcagtttacgacgggcacggaccgcgctccggtgggcggactgggtaagttgaagatgattatcgcaaaaaatggacccgacacagaaaggctgcctactagtcacacctgttttaatgtactgttgttacctgaatacagcagcaaagagaaactgaaggagcgattactgaaggcaatcacatatgccaagggctttggaatgctttag

SEQ ID NO: 245942 - DNA, 2628 bp, synthetic construct
  misc_feature 1..2628: note = Description of Artificial Sequence: Synthetic coding sequence
  source 1..2628: mol_type = other DNA
atggaaaagctgcaccaatgctattggaagtctggagaaccacagagcgatgatattgaagcctctaggatgaagcgagcagcagcgaaacacttaatagagcgatattaccaccagctcactgaagggtgtggcaatgaagcttgtactaatgaattctgtgcaagctgccccacatttctgaggatggataataacgccgctgcgattaaggcacttgaattatacaagatcaacgctaagctttgtgaccctcaccctagcaagaaaggcgctagcagtgcctacctggagaattctaaaggcgctcctaacaacagttgcagtgagatcaaaatgaataagaagggggcaaggatcgactttaaagatgtgacctatctgactgaagagaaagtgtatgagattctggagctgtgtcgggaacgagaggattacagcccactaatacgggtgatcggccgagtattctccagcgccgaagctcttgttcaaagttttcgtaaggtgaagcagcatacgaaggaggaactgaagtccctgcaggcaaaggacgaagacaaggatgaagacgagaaggaaaaggccgcttgctctgctgcggctatggaggaggacagcgaagcaagtagctccagaatcggagatagttcccagggagacaacaacttgcagaagctggggccagatgatgtctctgtggatatcgacgccattaggagagtgtacactcggttactgtcaaatgaaaaaatcgaaacagcgtttctgaacgccctcgtgtaccttagcccaaacgtggaatgcgacctgacttatcataatgtttacagtcgggaccctaactatcttaacctctttatcatcgtaatggagaatcgcaatctccactcgcccgagtatctcgaaatggcattgccactgttttgcaaagcaatgtcgaagctccctctcgcagctcagggaaaactaatccgactttggagcaagtataatgccgatcagattcgccgaatgatggaaacgtttcagcagctgattacttacaaagttatcagtaacgaattcaatagcagaaacctggtcaatgatgacgatgcaatcgtcgccgcttcgaagtgtctcaaaatggtctactatgcaaacgtggttggcggagaagtggatactaatcataacgaggaggatgatgaggagccgattccagagtcttcagaactgacacttcaggaacttcttggggaagagagaaggaataaaaaagggccacgcgtggaccccctggaaacagagctgggcgtcaagaccctcgactgtcggaagcctctcatcccattcgaagaattcattaatgagcctctaaacgaggtcctagagatggataaggattatacattcttcaaggtagagactgagaataaatttagttttatgacctgtccgttcatcctgaacgccgtaacaaagaacctcggcctgtattacgataacaggattcgtatgtattccgagcggaggatcactgtcctctacagcctggttcagggccaacagcttaacccttatcttagattgaaagtgcgacgcgatcacatcattgacgacgctctagttaggctggaaatgatcgcaatggaaaatccggctgatctcaaaaagcagctgtacgtggagttcgagggagagcagggggttgacgaagggggagtgagcaaggagtttttccagcttgtggtggaagaaattttcaacccggatattggaatgtttacctatgacgagtccacaaaactgttctggtttaacccctcctcctttgaaacggagggtcaattcacactcatcggaatcgtattaggactggccatctacaacaactgtattctggatgtgcacttcccgatggtcgtgtacaggaagttgatgggaaagaaaggtacctttcgtgatcttggcgactcacaccctgtgctctaccagtccctgaaagatctcttagaatatgaaggaaacgtggaagatgacatgatgatcacctttcagatctcacagacagacctcttcggaaaccccatgatgtatgatttaaaggagaacggggataaaatacccattactaatgagaacagaaaagaattcgtcaacctgtacagtgattacatcctcaataaaagcgttgagaagcagttcaaggctttccgtaggggattccacatggttaccaacgaatctccactcaagtacctcttccggcctgaggaaattgaactcctgatatgtggctctaggaatctggactttcaggccctggaggagaccacagagtatgacggaggttacacaagagacagcgttctcattagggaattctgggagattgtgcattccttcaccgacgagcagaaaagactgttcttgcagttcactaccggcaccgatagggccccagtcggaggtctggggaagctgaagatgatcattgccaaaaacggcccagacactgagagattacccacgagccacacctgttttaatgtgctgcttttgcccgaatactctagtaaagaaaagctcaaagaacggctactcaaagccattacttatgccaaaggtttcggaatgctgtag

SEQ ID NO: 245943 - DNA, 2559 bp, synthetic construct
  misc_feature 1..2559: note = Description of Artificial Sequence: Synthetic coding sequence
  source 1..2559: mol_type = other DNA
atgaagcgtgccgcagcgaagcacctgatagagcgttattatcaccagttaactgaaggctgtggcaatgaagcttgcaccaacgaattctgtgcgtcctgcccaacatttctgcgcatggataacaacgccgcagctataaaggccctagaactttacaaaataaatgcaaagctgtgcgatccgcacccttcaaaaaaaggtgcctcttcagcctatctcgagaattccaagggcgcaccaaacaacagctgctcggaaatcaagatgaacaaaaaaggggcaagaattgattttaaggatgtgacatacctgactgaggagaaggtttacgagatcttagagctgtgccgcgaacgggaagattactcccctcttatcagggtcatcggacgagtcttctcatcggcagaggcactggtacagtcattccggaaggtgaaacagcacaccaaggaggagctcaaatcgctgcaagctaaagatgaggataaagatgaagacgagaaagagaaagctgcgtgttccgctgctgcaatggaggaggatagtgaggcatcctccagccgaattggggactcctcacagggcgacaataacctgcaaaaactgggtcccgacgatgtgagcgttgacatagatgccatcagaagggtgtacactcggctgctgtctaacgaaaagatcgagaccgctttccttaatgcgctagtgtacctctcgccgaacgtcgagtgtgacttgacataccataacgtttacagtagggacccgaactacttgaatctgtttataatcgtgatggagaatcggaacctgcatagtcccgagtatttggaaatggccctccctctcttctgcaaggccatgtctaagttgcccctcgcagcgcagggtaaactaatccgcctttggagcaagtacaatgcagaccaaattcggaggatgatggagacttttcaacagctcatcacgtacaaggtcataagtaatgaatttaattcccgcaatctggttaacgacgacgacgcaattgtggccgcttccaaatgtctgaagatggtgtactacgccaacgtcgtagggggagaagttgatacgaatcacaacgaggaagacgatgaagagccgatacctgagagctcagagctgactctgcaggagctgctgggcgaagagcgtagaaataagaagggccctcgcgtagatccgttggaaaccgaactaggtgtgaaaacgctcgactgtcgaaagcccttgatcccatttgaggagttcatcaatgagccattgaatgaggtcctggagatggataaagattacacgtttttcaaagtggaaacagagaataaattctccttcatgacctgtccgttcatactgaatgccgttacgaaaaacttggggctgtattatgacaatagaatcagaatgtactctgagagaagaatcaccgtactgtactcactggtccagggacaacagttaaacccctatcttcggttaaaagttcgacgcgatcacatcatcgacgacgctctggtacggctggaaatgatcgctatggaaaatcctgccgatctcaagaagcaactgtacgtggaatttgaaggagaacagggggttgacgaaggtggtgtttcaaaggagttcttccagctggtcgttgaggaaattttcaatcccgatatcggaatgtttacctatgacgagagtacaaaacttttttggttcaacccctctagttttgaaaccgaaggccaatttacactcataggcatcgtgctgggtctggccatctacaataattgcattctggatgtgcactttcccatggttgtctatagaaaattgatggggaagaaggggacttttcgagacttgggcgatagccaccctgtgctttatcagtccctgaaagacttgctcgagtacgagggaaacgtggaggacgacatgatgataacttttcagatctctcaaactgatctgttcggaaaccccatgatgtacgacctgaaagaaaacggagacaaaattccgatcactaacgagaatcgtaaggaattcgttaatctgtattcggactacatcttaaacaagagcgtggagaagcagttcaaagcatttagacgtggctttcatatggttactaatgagagccccttgaagtatctatttcgaccagaggagattgaacttcttatctgtggttcacgcaacctcgattttcaggcactggaagagaccaccgaatatgacgggggatacacccgggactctgtgcttatccgagagttctgggaaatcgtgcactccttcaccgacgagcagaaaaggctctttcttcaatttacaaccgggactgaccgggctccagtggggggactaggcaagctgaaaatgattattgcgaaaaatggacctgacactgagcgccttcccacctctcacacatgcttcaacgtccttctgctccccgagtacagctcaaaggaaaagctgaaggaacgactgttgaaggctattacgtacgctaagggatttggcatgttatag

SEQ ID NO: 245944 - DNA, 2559 bp, synthetic construct
  misc_feature 1..2559: note = Description of Artificial Sequence: Synthetic coding sequence
  source 1..2559: mol_type = other DNA
atgaaacgggctgctgccaagcatctgatcgaacgttactatcaccagttgactgaagggtgcgggaatgaagcttgtacaaacgagttttgcgccagctgcccaacattcctgagaatggataacaatgcagccgcaattaaggcccttgaattgtacaagatcaacgccaagctctgtgatccccacccctctaaaaagggggcttctagcgcttatttagagaatagtaagggcgcacctaacaactcttgctctgagatcaaaatgaacaagaagggagctaggatagatttcaaggacgtgacctaccttacagaggaaaaggtctacgagatcctggagctctgtagagagcgggaggactatagcccactaattcgcgtgatcggccgtgtgttcagcagcgctgaagctctagtgcagtcctttcgcaaagttaaacagcatactaaagaggagctcaaaagtctgcaggccaaagatgaggataaagacgaggatgagaaggagaaagcagcgtgcagtgctgcggctatggaggaagattcggaagcctcttcaagtcggattggcgattcaagccaaggggacaacaaccttcagaagcttggacctgacgatgtgtccgttgacatagacgcaatccgccgagtctacacgcggctcctttcgaacgagaagattgagacagccttcctaaacgccctggtgtacctcagtccaaacgtggaatgcgacctcacctatcacaatgtctactcgagggaccccaactatctcaacctatttatcattgtgatggagaacaggaacctgcacagtccagaataccttgagatggctttaccactgttctgtaaggctatgagtaagttgcccctggccgctcagggaaagctgattcggctgtggtcaaaatacaatgctgatcagattcgaaggatgatggaaacttttcaacagctaattacttacaaggttatcagtaacgagttcaacagcagaaaccttgttaacgatgacgacgcaatcgtggctgcatccaagtgcctgaagatggtgtattatgccaacgtagtcggcggagaagtcgatactaaccataatgaggaggacgacgaagagcccatcccagaaagctcagaattaaccctgcaggaactcttaggcgaagagcgcagaaacaagaaaggcccacgcgtggatcctctggagactgaactaggtgtcaaaacacttgactgccggaagcccctgatcccgttcgaagagttcatcaatgagcccctgaatgaagttctcgagatggacaaggattatacgttcttcaaggttgagaccgagaataagttctcatttatgacctgccccttcatcctcaatgcggtcaccaagaacttaggcctttattacgataacagaatcagaatgtattccgagcgacggatcactgtactgtactctctcgtgcagggtcagcaactcaacccatatcttaggctgaaggtcagacgggatcacattatcgatgatgcattagtgcgcctcgagatgatcgcgatggaaaatccggcagatctgaagaaacagctgtatgttgaatttgaaggtgaacagggagtagacgagggcggagtttccaaggagttctttcagcttgtagtggaggaaatcttcaatcccgacatcggaatgtttacttacgacgagtcaactaaactgttctggtttaacccttcttccttcgaaaccgaggggcagttcacgcttattggcattgtgttgggccttgctatctacaataactgcatcttagatgtacattttccaatggtggtctaccgcaaactgatgggaaagaagggcacatttagggacctgggggacagccaccctgtgctgtaccagtccctgaaggacttactcgagtacgaaggcaatgtcgaggacgatatgatgattacttttcagatcagccagactgatctgttcgggaaccccatgatgtatgacctgaaggaaaacggcgataaaatcccaatcaccaatgaaaaccgtaaggaatttgtgaatctgtatagtgattatatcctcaacaaaagtgtcgagaagcagtttaaagcgtttaggcgcggttttcacatggttactaatgaatcccccctgaagtatctgttccgacccgaagaaattgaactcctgatttgcggctctagaaacctcgattttcaagcgctcgaagagacgacagaatatgatggaggctacacccgggacagcgtgctgatccgcgaattttgggagatcgtccactcatttactgatgagcagaaaaggctgttcttacagtttaccactgggaccgaccgagctcctgtggggggactgggcaagctgaagatgatcatcgccaagaacgggcctgatacggaaaggcttcctacctcgcacacatgcttcaatgttctcctgctgcctgaatactcctcaaaggaaaaattaaaagaaagactacttaaggctatcacttatgcgaaaggcttcggtatgctgtag

SEQ ID NO: 245945 - DNA, 3252 bp, synthetic construct
  misc_feature 1..3252: note = Description of Artificial Sequence: Synthetic coding sequence
  source 1..3252: mol_type = other DNA
atgttcagtttcgagggcgactttaagactagacctaaagtatcgctcgggggagctagccgcaaggaggagaaggcctcactgctgcaccgaacccaggaagaaaggagaaaacgcgaagaggagaggagacgcctgaagaatgcaatcattatccaatctttcattagggggtaccgagacagaaagcagcaatactccatccagaggtctgcctttgacaggtgtgccacactgagccagtccggaggggcttttcctattgccaatggaccaaatctgacactattggttagacagctcctgtttttttataaacagaacgaggacagcaagagactaatttggctctaccagaatctgatcaagcactcaagtctattcgttaagcaactggatggatccgaacgtttgacatgcttgttccagatcaaaaggctgatgtctttgtgttgtagactgctgcagaactgtaacgatgatagcctcaacgtggcactccccatgcgcatgttggaggtattttccagtgagaatacttacttgcccgtactccaggacgcctcatatgttgtgtctgtgattgaacagattctgcactatatgattcacaatggctactatcggagtctttatcttcttatcaactcgaaactcccatcatcaatcgagtactcagacctgagccgagttccgatagccaagattctgctggagaacgtgttgaaacccctccacttcacatataactcgtgccctgaaggtgcaagacagcaagtgtttacggcttttacggaagagtttctggccgctccattcacggaccagattttccatttcattattcctgctctcgcagacgcccagaccgtcttcccatatgaaccatttttgaatgcgctcctgctgatcgagtctcgatgtagccgcaagtcagggggtgccccatggctcttctacttcgtactgacagtcggcgagaactacctcggcgcattgtccgaagaaggactgctcgtgtaccttcgggttctgcagacgttcctgagtcagcttcccgtgtctcccgcatccgcaagctgtcacgactctgcgtccgacagcgaggaagagtcggaggaagcagataagcctagttcccccgaagatggtagattgagtgtttcttacatcactgaggagtgccttaaaaagcttgacaccaagcagcagacaaacacgctcctgaatctggtctggagggattcggctagcgaggaagtctttaccaccatggcatcagtgtgccacacactgatggtccaacacagaatgatggttccgaaagtacgcctgctgtattcgctggccttcaacgctagatttctgagacacctgtggttcctgatctctagtatgtctacgcgtatgatcacgggctccatggttcccctactacaggttatttctagaggctcacctatgtcatttgaagacagcagtcgcataatccccctgttctacctgttctcctcacttttcagccatagcctcatctccattcatgacaacgagtttttcggcgatccaattgaggtggttggacagagacaaagtagtatgatgccttttacacttgaagagctaatcatgctctcacggtgccttagggacgcttgtttgggaatcatcaaactggcttacccagaaaccaaacctgaggttcgggaggaatatatcaccgcgtttcagtccataggtgtgaccacatcttctgaaatgcagcaatgcatccagatggagcaaaaaagatggatacagttgttcaaagtgatcacgaaccttgtaaagatgctcaagagcagggatacaagaagaaacttctgtcccccaaaccattggctgtcagagcaggaggacatcaaagccgacaaggttacacagctgtatgtacctgccagcagacacgtgtggcgctttcggagaatgggtcgtattgggccattgcagagcactctcgatgttggtcttgagagtccccctctgtctgtgtctgaagagcggcagttggccgtcctcactgagttaccttttgtcgtgcctttcgaggagcgcgtcaaaatatttcagcgccttatttatgccgataagcaggaagtccagggtgacgggccatttttggacggtataaacgttacaatcaggcggaattacatctatgaagacgcctatgacaagctgtctccagagaatgagccagatctcaagaaacgcattcgtgtccacctgttaaacgctcatggcttggacgaggccggtatcgacggcggaggtatctttagggagttcctaaacgaattacttaaatccggattcaatcctaaccaggggttttttaaaaccacgaatgaagggctcctctatccaaatccagccgctcaaatgttggttggtgatagtttcgcaaggcactattatttcctggggaggatgctgggtaaggccctctacgagaacatgcttgttgagttgccgtttgcaggcttctttttgtctaagctcctcggaacttcagccgacgttgacatccaccaccttgcctctttagatcccgaagtatacaagaacttactgttcctcaaatcttatgaagatgatgtcgaggagctgggtcttaactttactgtggtgaacaatgatcttggcgaggcacaggtggttgagctgaagttcggcggaaaggacattcccgttacaagcgcgaaccggatcgcttacattcacctagtggcagactacagacttaataggcagataagacaacattgtctggcctttagacagggattggcaaacgtggtcagcttagagtggctccgcatgttcgatcaacaggagatccaggtactgattagcggtgcgcaagtaccaatatcactggaggatctgaagtctttcacgaattatagcggcggttattctgcggatcacccagtgatcaaagttttctggcgcgtcgtggaggggtttactgatgaggagaagcgcaaattgttaaagtttgtgaccagttgcagtcgcccacccctactgggatttaaagagctttatccagccttttgtatccacaacgggggttcagacttggagagattgcccacagccagcacttgcatgaacctcctgaagctgcccgagttttacgacgaaactctgcttagatctaaactgctctatgctatcgagtgcgctgcaggctttgaattgtcttag

SEQ ID NO: 245946 - DNA, 1215 bp, synthetic construct
  misc_feature 1..1215: note = Description of Artificial Sequence: Synthetic coding sequence
  source 1..1215: mol_type = other DNA
atgttcagttttgagggggatttcaagacaagacccaaggtttccctgggcggagcaagcagaaagtattctattcagcgttccgctttcgatcggtgcgccacactgagtcagagtggcggagcctttccaatcgctaatggtccaaatcttacgctgctggtgagacagcttttgttcttttacaagcagaatgaagatagtaagcgactcatctggctgtatcagaacctgataaagcactcatccctgtttgtcaagcagttagacggatccgagcggttaacatgcttgttccagattaaacggcttatgagtctgtgctgtcgattgctccagaattgcaacgacgatagtctaaatgttgcacttcccatgagaatgttggaggtgttctctagcgaaaatacctacctacccgtcttacaggacgccagctatgtggtctcagtcatcgagcaaattctgcactacatgatccacaatgggtactaccgaagtctttaccttctaatcaattctaagctaccttcttccatcgagtatagcgaccttagtagagtgcccatcgcaaaaatcctactagaaaacgttcttaagcccctccactttacatataattcctgccctgagggtgcccgacaacaagttttcacagcgtttacagaggaatttctcgcggcaccatttacagaccagattttccacttcattattccagcccttgccgatgcccagacagtctttccatatgaaccattcctgaatgctctgctactcatcgaatcgcgctgtagtagaaagtctggtggtgctccgtggctgttctattttgttctgactgtgggcgaaaactatcttggcgcactatcagaagaagggctccttgtgtacctcagggttctccagacttttctttcccaactcccggtaagccccgcttccgctagctgccacgactcagcttccgactctgaggaggaatccgaggaggctgataaaccatcaagcccagaagatggcaggttgtcggttagttacataaccgaagagtgtttaaaaaagctcgacacaaagcagcagacgaatacattgctgaacctcgtgtggcgcgattcagcatccgaggaggttttcaccacaatggcctctgtgtgccacaccctgatggtccaacaccgcatgatggtgccgaaggttcgggtgtacaagtag

SEQ ID NO: 245947 - DNA, 192 bp, synthetic construct
  misc_feature 1..192: note = Description of Artificial Sequence: Synthetic coding sequence
  source 1..192: mol_type = other DNA
atggctgcacccttgagcgtagaggtggaatttggaagttcgcccggttgcctgtttctctggtcttccttcgcggaagtcgttagatcttcttgcttaacagtcctgaggaatattgaatcactgtgtttagaccggcgtaatcccggtacgtcaggaacatgctcatctggatcccggaggatctgttag

SEQ ID NO: 245948 - DNA, 192 bp, synthetic construct
  misc_feature 1..192: note = Description of Artificial Sequence: Synthetic coding sequence
  source 1..192: mol_type = other DNA
atggcagcccctctctctgtcgaagtggagtttgggggaggggctgagctgttattcgatggcatcaagaaacacagggtgaccctcccaggccaggaggagccttgggatatcagaaacctgctcatttggatcaaaaagaatcttctgaaggaacggcctgagctttttatacagggtgatagtgtgtag

SEQ ID NO: 245949 - DNA, 306 bp, synthetic construct
  misc_feature 1..306: note = Description of Artificial Sequence: Synthetic coding sequence
  source 1..306: mol_type = other DNA
atggcagcccctctctctgtcgaagtagagttcggtggcggtgccgagcttctcttcgatggcatcaagaagcacagggtcacgcttccaggacaggaagagccctgggacattaggaatctgctgatttggatcaagaaaaacttgctaaaagagaggcccgaattgttcatccagggcgatagcgtgcgccctggaatcttggtcctaatcaacgacgccgattgggagttgctgggagaattagattatcagttgcaggatcaggatagcgtgctgttcatctccactcttcacggcggatag

SEQ ID NO: 245950 - DNA, 441 bp, synthetic construct
  misc_feature 1..441: note = Description of Artificial Sequence: Synthetic coding sequence
  source 1..441: mol_type = other DNA
atggcggctcctctgtctgtggaagtcgaatttggaggcggagcagaacttctttttgacggcatcaagaaacatcgggtcacactgcccggtcaagaagagccctgggatatcaggaatctcctgatctggatcaaaaagaatttgctgaaggagagacccgagctctttattcaaggagatagcgtgcggcctgggatcctcgtgcttatcaacgacgcagactgggaattacttgtgagtactctgggggacatccctcctcctgcccctgctctagccgcatccgttgggaaaaggtgggcctcccctcaggcccatattgaatggctcggtaatcctccacctcacagcagccccacactacgcctgttggagagtcccacacccggtgaagagggaatggggtcatgggggcacggcagcactccacccagctag

SEQ ID NO: 245951 - DNA, 2358 bp, synthetic construct
  misc_feature 1..2358: note = Description of Artificial Sequence: Synthetic coding sequence
  source 1..2358: mol_type = other DNA
atgccaggcgttatcccctctgaatccaacggactatcccggggttctccgtccaagaaaaatagattgtcactaaagttctttcagaagaaagaaactaaacgagccctggatttcactgattctcaggagaacgaagagaaagcatctgagtaccgggcaagcgagatcgaccaagttgttccggctgcacaaagcagtccgatcaattgtgaaaaaagggagaacctcctgccattcgtggggcttaacaacctgggcaacacctgctatctaaattccatcctgcaggtgctgtacttttgccctggtttcaaatctggagtcaagcatctatttaacattatctctagaaagaaagaggccctcaaagatgaggctaaccagaaggacaagggcaattgcaaggaggattcactcgcctcctacgaacttatctgttccttgcagtctctgataatatctgtggaacagctacaagcaagcttcctgcttaaccccgagaagtatactgacgagctggcaacccagccacgccgattgctgaacactttacgagagctgaatccaatgtacgagggatatttgcagcatgatgcacaggaagtgctacagtgtatattggggaacattcaagagacctgtcagttactcaagaaagaggaggttaagaatgttgctgaactgccgaccaaggtcgaagagattccccatcccaaggaggagatgaacgggatcaattctattgagatggacagcatgaggcacagtgaagattttaaggaaaaacttcctaagggtaatggaaagaggaagagcgatacagagtttggaaatatgaaaaagaaggtgaagttgtctaaggaacaccaatccttggaagagaaccagcgtcaaacccgatcaaaacgcaaagccaccagtgacactctcgaaagccctcccaagatcattcccaagtacataagcgaaaatgaatctccgcgtccaagtcagaaaaagtcccgggtgaaaattaactggctgaaaagtgcaactaagcagccttctatcctgtcaaaattctgtagcctcggcaagattaccacgaatcagggggtgaaaggccagtctaaggaaaatgagtgtgaccctgaggaagatttgggcaaatgcgagagtgacaacacgactaatggctgcgggctggagtcacccggaaataccgtgaccccagttaacgtgaacgaggtgaaacccattaacaagggtgaggagcagatcggattcgaattggtggaaaagctgtttcagggccagctggttctgcggacaagatgcctggagtgcgaatcactcactgagagacgagaggactttcaagatattagtgtccccgtccaggaagatgagctgtctaaggtagaggagagcagtgagatctctcccgaacccaagacggagatgaaaaccctccgttgggctattagccaattcgccagcgttgagcggattgtcggtgaggataagtatttctgcgagaactgtcaccactacaccgaggccgagcggtccctgctctttgacaagatgcccgaagtcataacgatccacctcaagtgctttgccgctagcggcctggaattcgactgctacggaggcggactgtccaagatcaatactcctttgctgacccctctgaaattaagtctggaagaatggagcactaagccgacgaacgattcctacggtttgtttgctgttgtgatgcactccggcatcaccatctcctcaggtcactacactgcttcggtgaaggtcacagacttgaatagcttagaacttgataaagggaattttgtggtggaccagatgtgcgagattggtaaacccgaacctcttaacgaagaagaagctcggggagtggttgaaaattataacgacgaggaggtgtcgatccgagtgggaggcaatacacagccatctaaagtgctgaataagaagaatgtggaagcaataggcctgctgggaggtcagaaatcaaaggctgactacgaactttataacaaggcgtctaacccagacaaagttgcatccaccgcatttgctgaaaatcgaaatagcgaaactagcgacactaccggcacccacgagtccgaccggaacaaagagagctcggaccaaaccggcatcaacatcagcggcttcgaaaacaagatttcttacgttgtgcaaagcctcaaagagtacgaaggcaaatggctattgtttgatgactcggaggtgaaggtgacagaggagaaagattttctgaactccctaagcccaagtacaagccccacttccacaccgtatctgctcttctacaaaaaactttag

SEQ ID NO: 245952 - DNA, 2358 bp, synthetic construct
  misc_feature 1..2358: note = Description of Artificial Sequence: Synthetic coding sequence
  source 1..2358: mol_type = other DNA
atgcctggagtgatcccctccgagagcaatggactcagcagaggctccccttctaaaaaaaatcggctcagcctcaagttcttccagaaaaaagagactaaacgcgcactggattttacagacagccaagagaacgaggagaaggcttccgagtaccgggcttccgaaattgaccaggtggtgccagcggcacagagttcaccaatcaactgtgagaagagagaaaatctgcttcctttcgtgggcctcaacaatttgggtaatacatgttatctgaattctatcctccaggtcttatacttctgtcctggattcaagtccggagttaagcatctctttaacatcatcagtaggaagaaggaagcgctgaaggatgaagccaatcaaaaagataaggggaactgcaaggaggacagtctggcttcctacgagctcatctgtagcctgcaatctttaatcatctctgtggaacagttgcaagctagtttcttactgaacccagaaaagtatacagatgaactggcgacccagccgcgacggctgttgaatactctcagagagcttaacccaatgtatgaaggctacttgcaacacgatgcccaggaggtgttacagtgcattcttggtaatatccaggaaacttgtcaactccttaaaaaggaagaagtcaagaatgtcgctgagttgcccaccaaggtggaagagattcctcaccccaaagaagagatgaacggcatcaattctatcgaaatggattctatgcgccattcagaagatttcaaggagaagctgcctaaagggaacggtaaaagaaaatccgacactgaattcggtaatatgaaaaagaaggttaagctctccaaggaacaccaaagcctggaggaaaatcagagacagactcggtcaaaacgaaaggccacaagtgacacattggagtcgccacccaaaataatcccaaaatacatcagcgaaaacgagtcacctcgcccaagccagaagaaatcccgcgtcaagatcaactggctgaaaagtgccacaaagcagccctcgattctcagcaagttttgttccctgggcaaaatcacgacaaatcagggggtaaagggacaatccaaggagaatgagtgtgatccggaagaagatctgggtaagtgtgaatccgacaataccaccaacggctgcggactcgaatccccaggcaacaccgtgacgccagtcaatgtcaatgaggtgaaaccaatcaacaagggagaggagcaaattggatttgagcttgtcgagaagctttttcagggacagctggtactgcgcacgaggtgtttggaatgcgaaagtctgacagagcgtcgggaggatttccaggacatttctgtgcccgttcaggaagatgaattgagtaaggtcgaggaaagcagtgagatttcccccgagcccaagacagagatgaagacactcagatgggccatttcacaatttgctagcgtggagaggatcgtgggtgaagacaaatatttctgtgaaaattgccaccactacactgaggctgagcgatctctgttattcgataagatgcccgaagtgataacgatccacttaaagtgttttgccgcatccggcctcgagttcgattgttacggagggggactttctaaaatcaatactccgttgttgacgcccctgaaactgagcttggaggagtggtcaaccaaaccaacgaacgatagttacggactttttgctgtggtgatgcactcaggaatcactatatcatccggccattacacagccagcgtaaaagttacagaccttaactccctggagctggataagggtaattttgtcgtcgatcagatgtgcgaaataggaaaaccggaacctctgaacgaggaggaggccagaggagtcgtggagaactataatgacgaagaggtgagtatcagggtcggaggaaacacccagccttccaaggtgcttaacaagaagaacgtcgaagccatcggtctgctcgggggacagaagtctaaagccgattacgagttgtataataaggcctctaatccagataaggtggccagtactgcgttcgctgaaaacaggaacagcgaaacctcagataccacaggaacacatgagtctgaccgcaacaaagaaagcagcgaccaaacgggaataaatatctctgggttcgagaacaagatctcttacgtggtgcagtcactgaaagagtatgaagggaagtggctcttgtttgatgattccgaggtaaaagtcacggaagaaaaagacttcctaaactccctgtctcccagcacatcacccacaagcactccctatctgcttttctacaagaaactgtag

SEQ ID NO: 245953 - DNA, 264 bp, synthetic construct
  misc_feature 1..264: note = Description of Artificial Sequence: Synthetic coding sequence
  source 1..264: mol_type = other DNA
atgcctggagttatcccttccgaatcaaacggtctctctaggggatcaccgagcaagaaaaatagactcagcctgaagttttttcaaaagaaagagactaaacgcgcactggactttacggactcgcaggagaatgaggaaaaggcctctgagtaccgcgcttctgaaattgaccaagttgtccccgcagctcagtcaagcccgataaactgcgaaaagcgagaaaacttgctaccatttgtgggcctgaacaacctggggtag

SEQ ID NO: 245954 - DNA, 561 bp, synthetic construct
  misc_feature 1..561: note = Description of Artificial Sequence: Synthetic coding sequence
  source 1..561: mol_type = other DNA
atgccaggtgtcatcccttctgaatctaatggactctcaagaggcagtccaagcaaaaaaaataggctcagtttaaagttttttcagaagaaggagacaaaaagggccctggactttacagatagccaggagaatgaagagaaagcaagtgaatatcgcgcaagcgagattgaccaggttgttccagctgcccaatcctccccaatcaactgtgaaaagcgggagaatcttctgccctttgtgggactcaacaatttggggaacacttgttacctcaacagtatcttgcaagtcctgtatttctgccccggattcaaatcgggagttaaacacttattcaatataattagcagaaagaaggaggcactgaaggatgaggcaaatcagaaggataagggcaattgcaaagaagacagtctggcaagttatgagttgatttgcagcctgcagtcacttattatttctgtcgagcagctgcaggcaagcttcctgctcaatcccgaaaaatataccgacgagttagcaacccagcctcgcaggctgctgaacaccctgcggtag

SEQ ID NO: 245955 - DNA, 663 bp, synthetic construct
  misc_feature 1..663: note = Description of Artificial Sequence: Synthetic coding sequence
  source 1..663: mol_type = other DNA
atgcccctgactggcgtcggccctggcagctgcagaagacagatcattcgagccctgtgcctattactgcttcttttacatgcgggatcagcaaaaaacatctggaagcgcgcacttcccgctcgcttagctgagaaaagccgggctgaagaagccggagcgccagggggaccccgacaacccagagccgatcgctgtcctccaccccctaggacgctccctcccggtgcgtgtcaggctgcccgatgtcaggcagacagcgaatgccccaggcacaggagatgttgctacaacggttgtgcatatgcttgtctggaggctgttcccccaccaccagttctggactggttggtacagccgaagccaaggtggcttggcggaaatggatggttgcttgacggcccagaggaggtgttgcaggcggaggcctgttccacaactgaggatggcgctgagcccctcctctgcccttcgggctacgagtgtcacattctctcccctggcgatgtggccgaaggcattcccaataggggccagtgtgtcaaacagcggagacaagcagatgggaggatattacgacacaaactgtacaaggaataccctgagggcgatagcaaaaatgttgccgaacctggcagaggacagcagaagcactttcagtag

SEQ ID NO: 245956 - DNA, 687 bp, synthetic construct
  misc_feature 1..687: note = Description of Artificial Sequence: Synthetic coding sequence
  source 1..687: mol_type = other DNA
atgtaccatctaatgaagttcataccattatactccaaagtacagaggccttgtacctccacgcccatgatcgattcattcgtgcgactgatgaacgaatttaccaacatgccagtaccccctaaacctcgccaagccctaggcgataaaatcgttagggatatccgccctggtgccgctttcgagcccacctacatctacaggctgctcaccgtgaacaagtctagcctttcagagaagggcagacaggaggatgctgaagagtatctgggtttcattctcaacggccttcatgaagagatgctcaatctgaagaaattgctctcacctagcaacgagaagctcaccatctccaatggaccaaaaaaccactcagtcaatgaagaggaacaggaagagcagggcgagggctctgaggacgagtgggaacaggtgggccctcggaacaagacatccgtcaccaggcaggcagacttcgtacagacaccgatcaccggattttggtggacccatcaggtgtgcggcctgcctgccgaatttaaacgaatttgtcacttcgcagctatctttcacgtggccgtgggctatcctgtgaggcaggacacacattcacccggttgtaccggagagctggggggaaagcgcatctgccctcgcctgtaccataagaatcagactcgtggctag

SEQ ID NO: 245957 - DNA, 189 bp, synthetic construct
  misc_feature 1..189: note = Description of Artificial Sequence: Synthetic coding sequence
  source 1..189: mol_type = other DNA
atggctctgcactcaccccagtacattttcggcgatttcagcccagatgaatttaaccagttcttcgtgacaccaaggagcagcgtagaggataagaacatcagagaactttctctggtaagcatgaaatcccttaatcctgttaccctctgtagagaaccccctgccactgttttccaggctcactag

SEQ ID NO: 245958 - DNA, 2472 bp, synthetic construct
  misc_feature 1..2472: note = Description of Artificial Sequence: Synthetic coding sequence
  source 1..2472: mol_type = other DNA
atgaagagacaccgccctgttagctcatctgattcctcagacgagagcccctcaactagttttacttccggttcaatgtaccgcatcaagagtaagatccccaacgagcacaagaaaccggcagaggtcttcagaaaggacctgatctccgccatgaagctgcccgactcacatcatattaacccagactcctactatcttttcgccgatacgtggaaagaagagtgggaaaaaggggtgcaagtgccggctagcccagacactgtgccacaacccagcctccgcattatcgcagagaaggttaaagacgtgttatttatccgaccacgcaagtatatccattgtagttcccccgacaccaccgagcccggatatattaacatcatggaactggctgcctccgtatgtcgctatgacttggatgatatggatatattttggctccaggagctgaacgaggacctcgctgagatgggctgtggccctgtcgacgagaatctgatggaaaaaaccgtggaagtcctggaacgacattgccatgagaacatgaatcatgcaatcgaaacagaggagggcctgggtattgaatacgatgaggacgttatatgcgatgtgtgtcgctcgcctgacagcgaagaggggaacgacatggtattctgtgataaatgtaacgtttgtgtgcaccaggcttgctatgggattctcaaggtccccgaggggagctggctatgcaggagttgtgttttggggatctacccacagtgtgtgctctgccctaagaagggaggagcattaaagacaaccaaaacaggaaccaaatgggcccacgtgagctgcgccctttggatacccgaggtctcaatcgcctgcccagagagaatggaacctatcacaaagatttctcacatccccccaagtaggtgggccctggtgtgtaacctgtgcaagctgaagaccggagcctgtatccagtgcagcatcaagagctgcattaccgcattccatgtgacttgtgcattcgaacatggtctcgaaatgaagacaatcctggatgaaggggacgaagtgaagttcaagtcttattgtcttaaacattcacaaaacaggcagaaactgggtgaagcagagtacccccatcaccgggcaaaggaacaatcacaagccaagagcgagaagacgagcctgcgcgcacaaaagctgcgagagttggaggaggagttttactcactcgtgagggtagaggacgtggctgctgagctaggcatgcccacgcttgccgtggactttatctacaactactggaagctgaaacgcaagagtaactttaataaacccctctttcctcccaaggaagacgaagagaacgggctcgtgcagccgaaggaagagtcgatccacactaggatgcgcatgttcatgcacctccgccaggatctggaacgtgtgcgaaacttgtgctatatgataagcagacgcgaaaagctcaagctgagtcacaataagatccaggagcagatctttggcttacaggtacagttactcaaccaagagatcgatgccggtctgccactcaccaacgccctggagaactcactcttttaccctccccctcgaataactctgaaactgaaaatgcccaaatctacaccagaggatcaccgcaactcttctacggagacagaccaacaaccacattccccagattcgagttcaagcgtgcatagcataaggaacatgcaagtccctcaggaaagcctggagatgagaactaagtcgtacccacgatacccccttgaaagcaaaaacaaccgcctcctggcctccctctcccacagccgctctgaggccaaggaatcctcacctgcatggcgtaccccgtcatctgaatgttaccatggacaatcccttggcaaacccttggtgctgcaggccgcattacacggtcagagttcaataggaaacggcaaaagccagccgaattccaagttcgctaagtcaaatgggttggagggatcatggagcggtaacgtaacacagaaagatagctcgtctgaaatgttctgcgatcaggagcctgtcttttccccacaccttgtatctcaaggcagttttcgtaaatcgacagtggagcatttttccaggtccttcaaagagactactaataggtgggtcaagaacaccgaagatctccagtgttatgtgaaaccaactaagaacatgagtccgaaagaacagttttggggaaggcaggtacttcggcgatccgccggacgcgctccatatcaggaaaacgacggttactgccccgacttggagctgtctgactccgaggcggagtccgacggcaataaggaaaaggtacgagtgcgcaaggattcaagcgaccgcgagaatccaccccacgactccaggagggactgtcacggcaagtcaaagacacatcctttgagccatagctcaatgcagcgctag

SEQ ID NO: 245959 - DNA, 2763 bp, synthetic construct
  misc_feature 1..2763: note = Description of Artificial Sequence: Synthetic coding sequence
  source 1..2763: mol_type = other DNA
atggcgactgtggccgcaaaccccgcagccgctgccgctgccgtggctgccgcagccgcagtcacagaggatagagaaccgcagcatgaagagttgcctggcctggattctcagtggagacaaattgagaatggggagtctggaagggagcgcccattgcgggctggcgagagttggttccttgtcgaaaaacactggtataaacaatgggaggcctacgtccaggggggagatcaagactcctctacctttcccggttgtatcaacaacgctacacttttccaggatgaaatcaactggcgactcaaggagggcctggtggagggagaagattatgtgctactgccagctgctgcttggcattacctggtcagctggtatggtcttgaacatggtcagcctcctattgaacgcaaggtaatcgagttgcctaacatccagaaggtggaagtctaccccgtggagctcctgctcgttcggcacaatgatctggggaagtctcatacagtccaatttagccataccgacagcattggtctcgtgcttagaactgcgagggagcgtttcctggtagagccacaagaggacactcgtctgtgggctaaaaattctgagggctccttggaccgtctgtacgacactcacattaccgtgctggatgccgctctggaaacaggacagttaatcatcatggagaccagaaagaaagacggcacctggccatctgcccaactccatgtcatgaacaataatatgagtgaagaagacgaggactttaaagggcagccaggcatatgtggactgacgaacctcgggaacacctgcttcatgaacagtgcccttcagtgcctcagcaacgtcccccagctgactgagtatttcctaaacaattgctatctcgaagagctaaattttcggaaccctctgggaatgaagggcgaaattgccgaggcctacgccgacctggtgaagcaggcttggtcggggcatcatcgtagtatagtcccccacgtgtttaagaacaaggttggccattttgccagtcagttcttaggataccaacagcacgactcgcaggaactactcagctttctgttggacggtctgcatgaggatctgaaccgagtgaaaaaaaaagagtacgtggagctctgcgacgccgcaggcagaccagaccaagaggtggcccaggaagcatggcaaaatcataaacggaggaatgatagcgtgattgtggataccttccacggactctttaagagtacactggtgtgtccagactgcggcaacgtgtcagtgacgtttgaccctttctgctacctgagtgttccactgcccatttcccataagagagtgcttgaggtgttcttcatccctatggatcccaggcgtaaacccgagcagcaccgcttggttgtccctaagaagggcaagatctctgacctttgcgtggccttgagcaagcacacagggatctctcccgaacgtatgatggtggccgacgtgttctctcatcggttctacaaactttaccagttagaagaaccacttagtagcatcctcgatagggacgacatatttgtgtatgaggtgagtggccgaatcgaagccatcgaagggtcccgggaggacatcgtagtgcctgtttacctgagggagcggacgcccgctagagattataacaatagctattacggcttgatgttgtttggccaccctttgctggtaagcgttcccagagacaggtttacctgggagggactgtacaacgtcttaatgtaccgtctgtcgcgctacgttaccaaacctaactcagacgacgaggatgacggcgacgagaaagaagatgacgaagaagacaaagacgacgtgcccggtccctctacggggggatcactccgcgatcctgaacctgaacaggctggacccagttccggggtgactaatcgctgtccgttcttgttggacaattgtctaggcacaagccagtggccgcctaggcgcaggcggaagcagctgttcacattacaaacggtgaatagcaatggaacctctgatcggaccaccagccctgaggaagtgcatgcccagccttatattgccatcgattgggaacccgaaatgaagaagcgctactacgatgaggtagaggcagaagggtacgtcaagcacgactgcgtcggttatgtgatgaagaaggccccagtgaggctgcaggaatgcatcgagctcttcaccaccgtagaaaccctggaaaaggaaaatccatggtattgccccagttgtaagcagcatcagctggccaccaagaagttagacttgtggatgctgccggagattctgatcatccatctaaagcggtttagctacacaaagttttctagagaaaagctcgataccctggtggagttccccatccgagatcttgatttcagcgagtttgtgattcagccccagaatgagtctaatccagagctgtacaagtatgatcttattgccgttagcaaccactatggagggatgcgcgatggtcattacaccactttcgcctgcaacaaggattccgggcagtggcactattttgacgacaactctgtcagccctgtaaatgagaaccagatcgaatctaaggctgcctacgttctcttctaccagaggcaggacgtggctcgaagattgctctctccggctggtagctccggtgcgccagcctcccctgcttgtagttcacccccatctagtgaatttatggacgtgaactag

SEQ ID NO: 245960 - DNA, 1113 bp, synthetic construct
  misc_feature 1..1113: note = Description of Artificial Sequence: Synthetic coding sequence
  source 1..1113: mol_type = other DNA
atggaaattctcatgaccgtgagcaaattcgcatcaatttgtacaatgggtgctaatgcatccgccctggaaaaagagataggtcctgagcagtttcccgttaacgagcattattttggccttgtgaattttggaaatacttgctactgtaactctgtcctgcaggccttgtacttctgccgtccctttagggagaaagtgttggcctataagagccaacccaggaagaaggagtccctgcttacttgcctcgccgaccttttccacagtatagctacgcagaaaaaaaaagtcggcgtgatacccccaaagaaatttatcactcggctgcggaaagagaacgagctgtttgacaattacatgcagcaagacgcccatgaatttctcaactacttgttaaacaccattgctgatatcctgcaggaggaacgcaagcaggagaaacagaacggccgactgcctaatggtaacatcgacaacgaaaataacaactctactccagatcctacctgggtgcatgagatcttccaaggcacattaaccaacgaaacacggtgtttgacatgtgagaccatctccagcaaagacgaggactttctggatctgtccgtcgacgtggagcagaacacttctatcacccactgcctaagaggattttctaacacagaaacgctctgttcggaatataaatattactgcgaggagtgccgtagtaagcaggaagcacataagcgtatgaaagtgaaaaaactccccatgatcttagcccttcacctcaagcggttcaaatatatggaccagctgcacagatataccaagctgagctatagagtcgttttcccacttgaactacgactcttcaatacttccggagatgccacgaaccccgataggatgtatgatcttgttgccgttgtggtgcactgtgggagcgggcctaatcggggacactatatcgctattgttaaatcccacgacttctggttacttttcgacgacgatattgtggagaagattgatgcgcaagcgattgaagagttctatggcctgacctcagacatctctaaaaattccgagtccggctacattttattctaccagagccgcgactag

SEQ ID NO: 245961 - DNA, 2592 bp, synthetic construct
  misc_feature 1..2592: note = Description of Artificial Sequence: Synthetic coding sequence
  source 1..2592: mol_type = other DNA
atgcaaaggagaggcgcacttttcgggatgcccggaggctccggcggtcgaaagatggcagctggagatattggcgaacttctggtgcctcacatgcccactatccgggtcccaagaagcggggatcgcgtctataagaacgagtgtgctttctcatatgactcccccaattccgaggggggactgtatgtgtgtatgaatactttcttagcttttggaagagagcacgtggagcgtcacttcagaaagactggacagtccgtgtacatgcatttgaagcgccatgtgcgggaaaaagtgcgtggcgcatcaggcggtgcactgcccaagagaaggaactcaaaaatctttctggacctcgatacagacgatgacctgaacagtgacgactacgaatatgaagatgaggccaagctcgtgatattcccagaccattacgagatagctctgccaaatatcgaagaactgccagctctcgtgaccattgcttgcgatgcagtgctcagttcaaaatctccatatcgaaaacaagacccagacacctgggaaaacgaacttccagtatcaaagtatgctaacaacctgacccagctggacaacggggttagaattcctcctagtgggtggaaatgcgcgaggtgtgacctgagagaaaatctttggttaaacctgaccgatggttccgtgctgtgtggcaagtggtttttcgattccagtggtggcaatggccatgctctggaacactacagggatatgggataccctcttgcagtgaagctgggtacgatcacacccgatggggctgacgtgtattctttccaagaggaagagcctgtactggatcctcacttggccaaacatctggctcatttcggcatagatatgctgcacatgcatggtactgaaaacggtttgcaagacaacgatataaagctcagagtgtccgagtgggaagtcatacaagagagcgggaccaagctcaagccgatgtacggccctggctacacaggccttaagaaccttgggaacagctgctacctgtcctcggtgatgcaagcaattttttccatacccgagtttcagcgagcttacgtcgggaatctgcctcgcatcttcgactacagtcccctggatcccacccaagatttcaacacccaaatgacaaagctgggacatggattactgtcaggccagtactccaaaccacccgtgaaatcagagctgattgaacaggtgatgaaggaagagcataagcctcagcagaacggcataagccctagaatgtttaaagctttcgtcagtaaaagccatcccgaattcagcagcaatcgacaacaagatgctcaggagttcttcctccacctggtcaacctggtggaacgtaatagaataggctctgaaaatcccagcgacgttttcagatttctggtggaggagagaatccagtgttgtcagaccaggaaagtgaggtacacagaacgcgttgattatttaatgcaactgcccgtagcaatggaagcagccacaaacaaggacgagctgatcgcctatgaactgacccgaagagaagcagaagccaataggcggcctttaccggagctcgtgcgcgcaaaaatcccttttagtgcttgcctgcaggccttttctgaaccagagaacgtggacgatttttggagcagcgctcttcaagcaaagagtgcgggagtgaagacatcccgcttcgctagcttccctgaatatcttgtggtgcaaattaagaagttcacatttggtctggattgggtgcccaagaagtttgatgtcagtatcgatatgcctgacctcctcgacatcaatcatctccgagctagggggctccaaccgggagaagaagagctgcctgatataagtccacccatcgtaatacctgacgattcaaaggatcgcttaatgaaccagcttatcgaccctagcgatatcgatgagtcaagcgttatgcagcttgccgagatgggattccccttggaagcctgccgtaaggctgtgtacttcaccggcaacatgggggctgaagtggctttcaattggatcattgtgcacatggaagaacctgatttcgctgagccattaactatgcccggttatggtggcgcagccagtgcaggggcttcagtgttcggagcaagcggactcgacaaccagccacccgaagaaattgtggccatcatcacttcaatgggattccagcgaaatcaggccattcaagctctaagagctacaaacaacaacttagaacgagccctggactggatcttctcccaccccgaattcgaagaggactccgattttgtgatcgagatggagaataacgcaaatgcaaacattatctcagaagctaagcctgaagggccacgggttaaggacggttcgggaacttatgaattgtttgcctttatcagtcatatgggtacatctaccatgagcggccattacatctgccacattaagaaagagggcagatgggtaatttataacgatcacaaggtctgcgcctcggagagacccccaaaagatctgggctatatgtatttctacaggcgtatccctagttag

SEQ ID NO: 245962 - DNA, 1485 bp, synthetic construct
  misc_feature 1..1485: note = Description of Artificial Sequence: Synthetic coding sequence
  source 1..1485: mol_type = other DNA
atgcctttatactccgttaccgtgaagtggggcaaagagaagttcgaaggagtggagctgaatacagatgagccacctatggtgttcaaggcccagttgttcgcactaaccggtgtgcagcccgctcgccaaaaggttatggtcaagggcggaacactgaaagatgacgactggggtaacataaagattaaaaatggcatgaccctccttatgatgggaagtgccgacgctctgcccgaagaacccagcgccaagaccgtcttcgtggaagatatgacagaggagcagctggctagcgcaatggagctcccctgcgggctgaccaaccttggcaacacttgctacatgaacgccaccgttcagtgcatccgatcggtgccagagctgaaggatgccctcaaacggtacgcgggagccctaagggcatccggagagatggcaagtgcccagtatattaccgcagcccttagggacctgtttgactccatggataagacaagcagcagcatcccaccaattatactcctgcagtttctccacatggcttttcctcagtttgctgaaaagggcgagcaaggacaatacctccaacaggacgctaacgagtgctggatacagatgatgagggtgttacaacagaagctggaggccatcgaggacgactctgtgaaagagacggacagctctagcgcctccgctgccaccccctctaagaagaagagcctgattgaccaattctttggggtggagtttgagacaacaatgaagtgcaccgagagcgaggaggaagaggtgacaaaagggaaggaaaaccagctccagctgtcctgcttcatcaatcaggaggttaaataccttttcaccggcctgaaactcaggctccaagaggaaattaccaagcagagtcctacactgcaaaggaacgccctttatataaagtcctcaaagatttctcggcttcccgcttacttgaccatccaaatggtcagattcttctataaggaaaaggagagtgtgaacgcaaaagtcctgaaggatgtcaaattccctctaatgctggatatgtatgaattgtgtactcctgaacttcaagagaaaatggtgagcttcagatccaaattcaaagaccttgaggacaagaaggtgaatcaacagcctaatacctctgacaaaaaatcaagcccccaaaaagaggtgaagtacgagcccttcagtttcgcagatgacatcggaagcaacaattgcgggtactacgatctccaggcagtgctgactcaccaaggccgatcttcctccagcggccattatgtgtcatgggttaaacggaaacaggatgagtggattaagttcgacgacgacaaggtgtccattgtcactcctgaggacatattaagactgtcaggagggggagattggcacatcgcctatgtgcttctatacgggccacgaagagtcgagatcatggaggaagaatcagagcaatag

SEQ ID NO: 245963 - DNA, 1380 bp, synthetic construct
  misc_feature 1..1380: note = Description of Artificial Sequence: Synthetic coding sequence
  source 1..1380: mol_type = other DNA
atgcccctctattcggtgactgtgaagtgggggaaagagaagtttgagggagtggaactaaacacagatgagcccccaatggtcttcaaggctcagttgtttgcactaaccggagtccagcctgccaggcagaaagtaatggtcaagggaggcactttgaaggatgatgactgggggaatattaagattaagaacatggagctgccttgcggattgactaatctcggtaacacctgttacatgaacgcaactgtacaatgtattcggtcagtgcccgaactgaaggatgcgctgaagcggtatgcgggagcgctgcgggcttctggcgaaatggcctctgcccagtacattaccgcggctctcagagatttgttcgactccatggacaagacaagtagtagtatccctccgatcatccttcttcagtttctccatatggctttcccacagttcgccgaaaagggtgagcagggacagtacctgcaacaggatgccaatgagtgttggattcagatgatgcgcgtgctgcaacagaagttggaagccatagaagatgattccgtaaaggagacagattcctccagcgcttctgccgctaccccctccaaaaaaaaatcgcttatagatcagttttttggtgttgaatttgagaccacaatgaagtgtactgaatctgaggaggaagaggttacaaaaggcaaggagaaccagctgcagctgagctgtttcataaatcaggaagtcaagtacctgttcactggactgaagctgcgcctccaggaagagataacaaagcagagtcccacactgcagcggaatgccctatacatcaagtcttccaaaattagtagactcccggcttatctcaccatccagatggtgcgattcttttataaggaaaaggagtcagtgaacgctaaggtactgaaggatgtgaagtttcccctaatgctggatatgtatgagctgtgcacgcccgaacttcaagagaaaatggtttcttttcgcagtaaattcaaggacctggaagataaaaaggtgaatcagcagccgaacacttccgataagaagagttcgccacaaaaagaggtcaaatatgaacccttctccttcgccgatgacattggatcaaataattgtggctattatgatctccaagctgttcttacgcaccagggccgatcttctagtagcgggcactatgtgtcatgggtgaaaaggaagcaagacgagtggattaagttcgatgatgataaggtgtccattgttacaccagaggacattttaagactcagcggcggtggtgactggcacatcgcttatgtgttgttgtatggccctcgccgagttgagataatggaagaggagagcgaacagtag

SEQ ID NO: 245964 - DNA, 1452 bp, synthetic construct
  misc_feature 1..1452: note = Description of Artificial Sequence: Synthetic coding sequence
  source 1..1452: mol_type = other DNA
atgcctctgtactctgtgaccgtcaaatgggggaaagagaaatttgaaggagtcgaactcaacactgatgagcctccgatggtgtttaaggcccagttgttcgccctgactggcgtgcagcctgccagacagaaagtgatggtgaaagggggaaccctcaagggaatgaccctccttatgatgggcagtgccgatgctctgccagaggagccatccgctaagacagtcttcgtggaggacatgaccgaggaacaactagccagtgcaatggaactgccctgtggcctgaccaatttgggtaacacatgctatatgaatgccactgtgcagtgcattagatcagtgcctgagctgaaggacgccttgaaaagatacgctggcgcactgcgggcttccggagaaatggcctcagcacagtatattacagccgctttaagagacttgttcgattcgatggataagacatcatctagcatccctcccatcatccttcttcagttcctccacatggcatttcctcaattcgctgagaagggcgagcagggacagtacctgcagcaagacgctaacgagtgttggattcagatgatgcgtgtgttgcagcagaagttagaggccatcgaagacgatagtgttaaagagaccgattcctcatcggctagcgccgcaaccccatcgaagaaaaagtctctgatcgaccaattctttggagtggaatttgagaccactatgaaatgcacagagagcgaagaggaggaagtaaccaaaggcaaggagaaccagctgcagctgagttgttttattaaccaggaagtaaaatatctgttcacggggctgaagcttcgtttgcaagaggagatcacaaaacagagccctactctgcaacgtaatgcgctctacatcaagtcttctaaaatctcacgactgcccgcatatctgacaatccagatggttagattcttctataaagagaaggaatccgtgaatgcgaaagtcctgaaagatgtgaagtttcccctgatgttggatatgtatgaactatgcactcccgagctgcaggaaaagatggtcagctttcgttctaaattcaaggatctggaagacaagaaggtgaatcagcaacccaacacttcggataagaagagcagccctcagaaagaggtgaaatatgaaccattttcgtttgccgacgatataggctctaacaactgcggatactacgatttgcaggccgtgctgacccatcaggggagatccagctccagcggtcactatgtgtcgtgggtaaagcggaagcaagacgaatggatcaaattcgatgatgataaagtgtcaatagtgaccccagaagacattctgcggctgtcaggtggcggagattggcacatcgcttatgttctcctctacggccctagacgggtggaaattatggaggaggaatcagaacagtag

SEQ ID NO: 245965 - DNA, 1380 bp, synthetic construct
  misc_feature 1..1380: note = Description of Artificial Sequence: Synthetic coding sequence
  source 1..1380: mol_type = other DNA
atgcctctttatagcgtgacggttaagtgggggaaggagaagttcgagggggtggagcttaatactgacgagccccctatggtgtttaaggcccagctgtttgccctgactggcgtccagcctgcccgtcaaaaagtaatggtgaaaggagggactctcaaggacgatgactgggggaacataaagattaaaaatatggagctaccctgtggcttaacaaacttgggaaatacctgttatatgaacgcaacagtccagtgtattcgctcagtgcctgagcttaaggacgccttgaaaagatacgccggtgcgctcagagcctccggcgagatggcatccgcacagtatatcacggctgccctgcgggacttatttgactcgatggataagacttctagttctatccctcctattatactactgcaattcctgcacatggccttcccccagtttgccgagaaaggagaacaaggacagtacctgcagcaggacgccaacgagtgctggatccaaatgatgcgcgtgctgcagcagaaactagaggctatagaggatgacagcgtgaaggaaaccgattcctctagcgcttcagctgctacccccagcaagaaaaaatcgctgatcgaccagtttttcggtgttgagttcgagacaacaatgaagtgtactgaatctgaggaagaggaagtgacaaagggcaaagaaaaccagcttcagctctcctgcttcattaatcaggaggtcaagtacctgttcaccggcctgaagctgcgcctgcaggaagagattaccaaacagagccccacactgcaacgcaacgccctgtatatcaaaagttctaagattagtaggctccctgcttatctaacgattcagatggtgagattcttctacaaagagaaggagtccgtaaacgctaaggtgctgaaggatgttaagttccctttgatgctcgatatgtatgagctttgcacgccagagctccaggagaagatggtcagttttcgctcaaagttcaaggacctggaggataagaaagtcaaccagcagcccaacaccagcgacaagaaaagctcccctcagaaggaggtcaaatatgagcccttttcgtttgccgatgatatcggctcaaacaactgcgggtactacgatctgcaggccgtgctcactcaccaggggaggagctcatctagcggacattacgtctcttgggtgaaaaggaagcaagacgagtggataaaattcgacgatgacaaggtgagcattgtgacccccgaggatatcctgagactctcaggcggaggggattggcatatagcgtatgtcttattgtatgggcctcggagggtggagattatggaggaagaatctgaacaatag

SEQ ID NO: 245966 - DNA, 2382 bp, synthetic construct
  misc_feature 1..2382: note = Description of Artificial Sequence: Synthetic coding sequence
  source 1..2382: mol_type = other DNA
atgcctgccggacctgttcaggccgttccccctccccctccagtcccaacggagcccaaacagcctactgaagaggaggcttcatctaaggaggactccgccccaagcaaacccgtcgtggggatcatttacccccctccagaagtgcgcaacatcgtggataagaccgcatcgtttgttgcccgtaatgggcctgagttcgaagccagaattagacaaaatgaaatcaacaacccaaagttcaactttttgaacccaaacgatccgtaccatgcctactaccggcacaaagtgtcagagttcaaggaggggaaagctcaggagccgtcagccgctattcctaaagtgatgcaacagcagcagcagaccactcaacagcagctgccgcagaaagttcaagcccaagtcattcaggagaccatcgttcccaaagaaccacctcccgagtttgagtttattgctgatccaccatctatctctgcgttcgatctcgacgtggtcaaactgaccgcccagttcgttgctaggaacgggcgtcaatttctcacccaactgatgcagaaagagcagcgtaactaccagtttgattttctgcggcctcagcactcactgttcaactactttaccaagttggtcgaacagtatactaaaattcttattccaccaaagggtctgttctcaaagctcaaaaaggaggcagagaacccccgagaagtcctggaccaggtgtgttatagggtggagtgggcaaagttccaagagcgagaacggaaaaaggaggaagaagagaaggagaaggagcgcgttgcttacgctcagatcgattggcacgatttcgtagttgtcgaaaccgtggattttcagccaaatgagcagggcaactttccccctccaacaacacccgaagagcttggggctcgtatccttatccaggaacgatatgaaaaatttggggagagtgaggaggtggagatggaggtggaatccgatgaagaagatgacaagcaggagaaggccgaggaacctccttctcagcttgaccaagacacccaagtgcaggacatggatgaagggtccgacgacgaggaggaaggccagaaggtgcccccaccaccagaaaccccaatgcccccacctcttcctccaacgcctgaccaagttattgtcaggaaggattatgatccgaaggcctccaaacccctgcctcctgcgcctgctcccgacgaatatttggttagtcctatcactggcgaaaagatccctgcaagcaagatgcaggaacacatgagaatcggacttttggacccgaggtggctggaacagagggaccggtcaatccgcgaaaagcaatccgatgacgaagtatacgcacccggactggacattgagtcctcattaaagcaactggccgaacggcgtactgatatctttggcgtcgaggagacagcaatcggtaaaaaaattggcgaagaggagatccagaagccagaggagaaagtgacctgggacggccacagcgggtctatggcaagaacgcagcaggccgctcaggccaatattacgctgcaggagcaaatcgaggccattcacaaggccaagggccttgtacctgaagacgacacaaaggagaaaattgggccaagtaaaccgaatgaaattccgcagcagccaccccctccatccagcgcgactaacatcccctcatcagccccaccaatcaccagtgtgccaagacccccaaccatgccacctcccgtgcggactaccgttgtatctgcagtgcccgttatgccaaggccgcctatggcaagcgtggtcagactgccacctggttcggtaatagccccaatgcctcctatcattcatgctcctcgtattaacgtcgtgccaatgcccccaagtgcacctcctattatggcccctagaccgcctcccatgattgttcctaccgcctttgttccggctcctcctgtcgccccagtgcctgctcccgctcccatgccacctgtgcacccgccacctcccatggaggatgagccaacctcaaagaaattgaagactgaagactccttgatgcccgaggaagagttcttacgcagaaacaaagggcctgtgagtatcaaagtacaggtgcccaacatgcaagataagacagaatggaagctcaatgggcaggtgcttgtgttcaccctgcccctgaccgaccaagtctccgtgatcaaagtgaaaatacacgaggcaacaggcatgcctgccggaaagcagaagctccagtacgaaggcatcttcatcaaggacagcaacagccttgcctactacaacatggccaacggagcagtcatccatctggccctgaaggagagaggtgggagaaagaaatag

SEQ ID NO: 245967 - DNA, 732 bp, synthetic construct
  misc_feature 1..732: note = Description of Artificial Sequence: Synthetic coding sequence
  source 1..732: mol_type = other DNA
accattcgcgttaaggacagcctgatttgcgtggattgcgctatggagagttctcggaattcatcgatgctgacgctaccgttaagcttgttcgacgtcgattccaagcctctcaaaacgctcgaggacgccctccactgcttcttccagcctcgagaactcagctctaaaagcaagtgtttctgcgagaattgtgggaaaaaaacccggggaaagcaagtactgaagctgacgcacctgccacagacccttactattcatttgatgcgcttctctattcgcaattcacagactcggaaaatttgccactccctctatttcccacagagtctagatttctcccagatcctgcccatgaaacgcgagagctgtgatgcggaggagcagtccgggggacagtatgagctctttgccgtcatcgcacacgtcggcatggctgattcaggccactattgtgtgtatatcaggaatgcggtggacggcaagtggttctgtttcaacgattcgaatatctgtctggtatcctgggaggacatccaatgcacttacggtaatcccaactaccattggcccccattcttgtgccacgcatgcattttaatcgaggacggtgaatacttgagactcttccggccagcaaacattcggcagttcacctcccgcgaggagacctgggtcgagtgttggtgtgtgctaaccctgcagtgcaagcagctgcaacaagtgtggtag

SEQ ID NO: 245968 - DNA, 1698 bp, synthetic construct
  misc_feature 1..1698: note = Description of Artificial Sequence: Synthetic coding sequence
  source 1..1698: mol_type = other DNA
atgcctcaagcctccgagcatcgccttggtcggacacgagagcctcctgtgaatatccagcctagggtgggaagtaaacttccatttgccccacgagctcggagtaaagagcgacggaatcctgcctctggccctaatcccatgctgcggccactcccacccaggcccggtctgccagacgaacgcctgaagaaactagagctgggcagggggcgtacctccgggcctaggcctcgcggtccgctgcgggcagatcacggagtaccgcttcctggcagccccccaccaaccgtggcactgcccctgccttcacgtaccaatttggcccgatctaaatccgtcagctcaggagacctgcgccctatggggatcgcgctgggaggtcatcgcggaacgggagaacttggggcagcactttcccgtctggccttgagacccgagccccctactttacgccgttccacctcactacggagactgggtggcttccctggacctcccaccttgttttcgattaggaccgagccccctgccagccatgggagctttcacatgataagtgcgagatcatctgagccattctattcagacgacaaaatggcacatcatacattgctgctcgggtcaggccacgtggggttgagaaatctgggcaatacttgtttcctcaacgctgtgctgcagtgtctgtcttctactcggcctcttcgcgacttctgtctgcgacgcgattttagacaggaagtgcctgggggaggcagagcccaggaactgaccgaagcttttgctgatgtcatcggcgcactctggcacccggactcatgtgaggcagtgaatcctacaagattcagggccgtgttccagaaatatgtgcctagctttagcggatacagtcagcaggacgcccaggaattcctgaagctgctgatggagaggctgcatctggaaatcaacagacggggacgtcgcgcacccccaatactcgccaacggccctgtgcctagccccccaaggagaggcggtgctctgttggaggaaccggaattgtccgacgatgacagagcaaacctaatgtggaaacggtacctggagagggaagatagcaagatcgtcgatctgtttgtcggccaattgaagagctgcctcaaatgccaggcgtgcggctatcggagcaccaccttcgaggttttctgtgacctgtctctgcccattcccaaaaaaggattcgccggaggtaaggtctccttacgtgattgctttaatctgttcacaaaggaggaggaactcgagtcagaaaacgcccctgtgtgcgacagatgtaggcagaaaacccgctcaactaaaaaattaacagtgcagcggttccccaggattctagtattgcaccttaatcggttcagcgcaagtcgtggttctataaagaagtccagcgttggagtcgatttccccctgcaacgtttgtcgctgggcgattttgcttcggacaaagctggaagcccggtctaccagctgtacgccctgtgtaatcacagtggttctgtgcactacggccactatacagccctgtgtagatgccagaccggctggcacgtgtacaacgattctcgcgtaagtcctgtatccgagaatcaggtggcttccagcgagggatatgtgttattttaccagctcatgcaggaaccaccacgctgcctgtag

SEQ ID NO: 245969 - DNA, 1656 bp, synthetic construct
  misc_feature 1..1656: note = Description of Artificial Sequence: Synthetic coding sequence
  source 1..1656: mol_type = other DNA
atgccacaggcctctgagcatcgcctcggcaggacacgcgaaccgccagttaatattcagccaagggttgggtcaaagctgcccttcgcaccccgagctcggtctaaggaaaggcgcaaccctgcgagtggcccaaatcccatgcttcgccctttgccgcctaggcctggcttgccagatgagaggttgaagaagttggaacttggaaggggtaggacctccggcccaagaccccgaggccctcttcgagccgatcacggggtgcctctgcctggttctcctccacctaccgtagccctgccactgccatccaggaccaacctggctaggagtaagtcggtaagcagtggggaccttcgcccaatgggtatcgctcttggtggccacagaggcacgggcgagcttggagcggcattatccagacttgccctgcgacctgagcccccaactcttcggaggtccacttcgctgcgaaggcttggaggatttcctgggccacctaccctcttcagtataagaaccgaacctccggctagtcacggatcctttcacatgatctctgcaagatcctcagaacctttttatagcgacgataagatggcacaccacaccctgttactgggatccgggcatgtaggactacgtaatctgggaaatacctgctttctcaacgcagtgttgcaatgtttaagctctacaagacctcttagggatttttgtctcaggagggattttcggcaagaggtgccgggtgggggacgggcacaggaactcaccgaagcatttgccgacgtgatcggagcgctgtggcatcctgactcttgtgaagccgtcaatcccactagattcagagccgtctttcagaaatatgtcccttctttcagcggctatagccagcaggatgcccaggaatttctcaagcttctgatggagcgactgcatctggaaattaatcgtagaggtcggagagctcccccaatactggccaatgggcctgtcccaagcccaccccgacggggtggtgcattgctggaagagcctgaactatctgacgacgacagggccaatctgatgtggaaaaggtacctcgagcgcgaggatagcaagatcgtggacctgttcgtcggtcaactgaagagttgtctaaaatgtcaggcctgtgggtaccggagcaccacatttgaggttttttgtgatttgtcccttcccatccctaaaaagggctttgccggtggcaaggtgtctttgcgggactgcttcaacctcttcaccaaagaggaagaacttgagtctgagaacgctcctgtgtgcgacagatgccgccagaaaacaagaagcaccaagaaattgacggtgcagagatttcctcggattttggtactccatctgaataggttctctgcgtcccgcggttcaatcaaaaagagttccgttggagtcgatttccctctgcagaggctgagcctgggggattttgcgtcagataaggcgggtagtgttcactacgggcattacacagctctgtgtcgttgccagaccgggtggcacgtatataacgactcacgggtttctcccgtatctgagaatcaggtagctagcagcgagggatacgtgctgttttaccagctgatgcaggagccaccacggtgcctgtag

SEQ ID NO: 245970 - DNA, 1698 bp, synthetic construct
  misc_feature 1..1698: note = Description of Artificial Sequence: Synthetic coding sequence
  source 1..1698: mol_type = other DNA
atgccacaggcctctgaacatagactggggaggacacgcgagccaccagtgaacattcagccgagagtgggttccaagcttccctttgcccctagagctaggtcaaaagagcggagaaatcccgctagcggacctaaccccatgctgagaccgctacccccaagaccaggccttcctgatgagcgactgaaaaagctcgagctgggccgtggtagaacaagcggacccaggcctcggggacctttgcgggcagaccacggcgtgcccttacctggatctccaccccctacggtggccctgcccctgccatcacggaccaacttggcccgtagcaagtcagtgtcttcaggggacctaaggcccatggggattgcactgggagggcaccgaggcaccggtgaactgggggctgccttaagccgcctggccctcaggcccgaaccccctaccctacgtagatctaccagcctgcggcgactcggcggttttcctgggcctccgaccctgtttagcattagaaccgaacctccggcatcccatggttccttccacatgatttccgcccgtagcagtgagcctttttatagtgacgataaaatggctcatcataccttattgctgggctctggccatgtggggctgagaaatctgggaaacacctgcttccttaacgctgtgctgcagtgccttagttctacgcggcctctgagagatttttgccttcgacgcgatttcaggcaggaggtgcctggcggtgggagggcacaggaactgaccgaggcattcgccgatgtaatcggagccctgtggcatcccgatagctgcgaggccgtgaaccctacacgtttcagagctgtgtttcagaaatacgtgccgtccttttcgggctattcccaacaggacgcacaagagttcctcaagctgctgatggagcgactgcacctggaaatcaataggcgcggtcgaagagcccctcctattctggccaatgggccagttccaagccctcctcggaggggcggagcacttctcgaagaacccgagctcagcgacgatgatcgggctaatctcatgtggaaacgctatctggagagagaggactccaaaatcgtggacctgttcgtgggacagctgaagagttgcctcaagtgccaggcatgcggttacaggagtacaactttcgaagtcttctgcgatctctctctacctattccaaaaaaagggtttgctggtgggaaggtcagcctcagggactgcttcaatctttttacaaaagaagaggagctcgagagcgagaacgcccctgtgtgtgatcgatgccgacagaagaccagaagcaccaagaaactgaccgtgcagcggtttcccaggattctggtgctgcaccttaaccgattttccgcgtctagaggtagcattaaaaaatcctctgttggcgtggattttccattgcagagactgtcactcggtgattttgcctcagataaggccggatctcccgtgtaccagttatacgcactctgtaatcactccggaagcgtccactatggacactatacagctttatgtcgctgccaaactggctggcatgtgtacaatgactccagggtatccccagtgtctgagaaccaggtcgccagcagtgaggggtatgtgctattttaccagctgatgcaggagcctccaagatgcctgtag

SEQ ID NO: 245971 - DNA, 1578 bp, synthetic construct
  misc_feature 1..1578: note = Description of Artificial Sequence: Synthetic coding sequence
  source 1..1578: mol_type = other DNA
atggtcagtagacccgagcccgaaggcgaagccatggatgctgagctcgccgtggccccaccgggttgctcacatttaggatctttcaaagtggataattggaagcaaaatctgcgggcaatctaccagtgttttgtctggtctggtaccgctgaggcaagaaagagaaaggctaagtcttgcatctgccacgtctgtggggtacacttgaatcgactgcactcatgtttgtattgcgttttttttgggtgtttcactaagaaacatattcacgaacacgctaaagccaaaaggcacaatttagccatagacctcatgtacggtggaatttattgctttctgtgccaggactacatctacgacaaagatatggaaattatagccaaggaggaacagaggaaggcgtggaagatgcagggcgtgggagagaagttttcaacgtgggagcccacaaaacgcgaactggagttattgaagcataaccctaaacgcagaaagataaccagtaattgtacgatcggactgcgcggactgattaacctgggcaacacatgttttatgaactgcatagtccaagcgctgacacatacaccgctgttgagggatttcttcctgagcgatcgacacaggtgcgagatgcaatccccttccagctgtcttgtgtgcgaaatgtcgtcattgttccaggagttttattctggccaccgttcaccccatattccctataaactgcttcacttagtgtggacacatgcacgacacctggccggatacgaacaacaggacgctcacgagtttcttattgctgcgcttgatgttctccacaggcattgcaaaggagatgataatggtaagaaggccaacaatcccaatcactgtaactgtataattgatcagatatttactggtggcctccagtcagatgtcacgtgccaagtctgtcatggtgtgagcacgacaatagaccctttttgggacatttccctggacttgcctggatcatccactcctttctggcccctttccccaggatccgaaggcaacgtggtcaatggtgagagtcacgtgagcggtacaaccacactgactgactgtctcaggaggtttaccagacctgagcacctgggttcttctgccaagatcaagtgttcaggatgccatagttatcaggaatcgacaaaacaactaaccatgaagaagcttccgatcgtggcctgtttccatctgaagaggttcgaacattccgctaaacttcggaggaaaataaccacctacgtatcctttccactcgaacttgacatgacacctttcatggcttccagtaaggagagtagaatgaacggacagtatcaacagccaacagattcccttaataatgacaataagtatagtctgttcgcagtggtgaatcaccaggggacacttgaaagtgggcattacactagctttatcagacaacacaaggaccagtggtttaagtgcgacgatgccatcatcaccaaagcctccatcaaggacgtcctggattcagagggctacttgttgttctaccataagcaattcttggagtacgagtag

SEQ ID NO: 245972 - DNA, 1782 bp, synthetic construct
  misc_feature 1..1782: note = Description of Artificial Sequence: Synthetic coding sequence
  source 1..1782: mol_type = other DNA
gcagcggcagccagaggtaggtgtcttccctgctcgttgccatcagcgatcgcacagcctcacttatgcccagcctccgccttgtgtagcaggaggcccggacttggacaaccaggccaaccgcctagctcaccacacgctgccctggcttcctcttctcctcccagcccccctcctcccgcaagaggcagggctctgccaccaatggtgtcccgacccgaacctgaaggtgaggctatggatgcagagctagcagtcgctcctccaggatgttctcacctgggtagtttcaaagtggataactggaagcagaacctgagagctatctaccagtgctttgtctggtcaggaacagcggaggcacggaagagaaaagccaaaagttgcatttgccacgtgtgtggcgtgcacctgaatcgcctgcactcttgtttgtattgtgttttttttgggtgttttacaaaaaaacacattcatgagcacgcaaaagccaagaggcataatcttgccattgacctgatgtacggcggtatatactgttttctgtgtcaggattatatttatgataaggacatggaaataattgccaaggaggaacagaggaaagcctggaaaatgcagggcgtgggagagaaattctctacctgggagcccacgaaacgcgagctggagctgttgaaacacaaccccaaaaggagaaaaatcaccagcaattgcaccattggacttaggggcttgatcaacctcggtaacacctgcttcatgaattgcatcgtgcaggccctgactcacacacctttgttgcgtgacttttttttaagcgaccgccaccggtgtgagatgcagtcccctagctcctgtctggtgtgtgaaatgtctagcctgtttcaagaattctacagtggccacagaagtccccatattccatataaactgctgcacctggtgtggactcatgctcggcacttggctggctatgaacaacaggacgctcatgagtttctgatcgccgcactcgatgttctgcacaggcattgcaagggcgatgataacggaaagaaagccaacaatcctaatcattgcaactgcatcattgatcagatattcacgggaggtctacagtcggatgtcacatgccaagtgtgccatggggtcagtaccacgatcgacccattttgggacatctcactagacttacccggtagcagtacccccttttggcctctgagtccaggttccgaggggaacgtcgttaatggtgagagccatgtcagcggcacgacgaccctgaccgactgtctcaggcgctttacacggccagaacatcttggatcaagcgccaaaataaaatgcagcggctgccactcttaccaggagtccactaagcagttgaccatgaagaagttgccaattgttgcatgctttcacctgaaaaggttcgagcatagtgccaagttacggcgaaagattacaacttacgtgagcttccctcttgaactcgatatgacccctttcatggcctcttccaaggagtcccgaatgaacgggcaatatcagcagcccaccgacagtctcaacaatgacaacaaatatagcttatttgctgtggttaaccatcaggggacacttgagtccgggcactacacttccttcattagacaacacaaggaccaatggtttaagtgcgatgacgccatcattaccaaagccagtattaaggacgtactcgacagtgaagggtatctccttttctaccacaaacagttcttggaatacgagtag

SEQ ID NO: 245973 - DNA, 1542 bp, synthetic construct
  misc_feature 1..1542: note = Description of Artificial Sequence: Synthetic coding sequence
  source 1..1542: mol_type = other DNA
atggcaccaggctggccctccctgagtgcaggttccaggcaggaggctccccaactcgcagcaggaggctcagcctaccaggcggtcggcagacagtttcaacccagggccaccgctctgcagggcccatcccaggccaagtcctgtatttgtcacgtgtgtggggtccatttaaatcgcttgcatagttgtctctactgtgttttctttggttgcttcactaagaagcacatccatgaacacgccaaggctaaaaggcacaacctcgccatcgacctcatgtacgggggaatctattgtttcctgtgccaggattacatctatgacaaggatatggaaattatcgctaaagaagaacagaggaaagcgtggaagatgcaaggcgtaggagaaaagtttagcacttgggaacccactaagcgggagctcgaactgctcaaacacaatcccaagcggagaaagatcactagcaactgcacgatcggcctcagaggcctaatcaatttgggaaatacatgctttatgaattgtattgttcaagccctcacccatacaccgctccttcgtgactttttcttgtccgaccgccaccgctgtgaaatgcaatctccatcctcttgcctagtctgcgaaatgtcctctctctttcaagagttctactccggccatagatcaccgcacattccctataaactgctgcacttagtttggacccatgccagacacctcgcaggctacgaacagcaggatgcgcacgaatttctaatagctgcactggacgttcttcacaggcattgtaagggggacgacaacgggaagaaggcgaataacccaaatcactgtaattgcattatcgaccagatcttcactggcggtttacagtccgatgtgacctgccaggtgtgtcacggggttagtacaacaatcgatcccttttgggacatcagcctcgatcttccgggatctagcactcccttctggcccctgtccccagggtctgagggcaacgttgtcaacggggagtctcacgtgtctgggactaccacattgactgattgtctcagacggttcacgaggcctgagcatctcggcagtagcgctaaaatcaaatgttccggctgtcattcctaccaagagtctaccaagcagcttaccatgaagaaattgcctatcgtcgcttgcttccacctgaagagatttgaacatagtgccaagctcagacggaaaattacaacctatgtgagttttccacttgagttagacatgactcccttcatggccagctccaaggagtctcgcatgaatgggcagtatcagcaacctacagatagtctgaacaacgacaacaagtacagcctgtttgcggtcgtcaatcatcagggcactctcgagtccggtcactacacttctttcatcagacagcacaaggatcaatggttcaagtgtgacgatgcgatcatcacgaaggcctctatcaaggatgtattggattccgagggttatctcttgttttaccacaaacaattcctggaatatgagtag

SEQ ID NO: 245974 - DNA, 7863 bp, synthetic construct
  misc_feature 1..7863: note = Description of Artificial Sequence: Synthetic coding sequence
  source 1..7863: mol_type = other DNA
atggaatccgaggaagagcagcacatgacgacgctcctatgtatgggctttagcgacccggcaaccatcagaaaggcccttcggctggcaaagaacgatattaacgaggccgtagctctgttgaccaacgaaaggccaggtctggactacggtgggtatgagccgatggactccggaggcggaccgagccccggacccggtggcggacctcgcggagacggaggcggagatggaggcggtggcggaccttcccggggaggctccacagggggtggcggaggatttgatcctcctcccgcataccacgaggtggtcgacgccgagaagaacgatgagaacgggaattgttcaggtgagggcatcgagttcccaaccacaaacctctatgaactggagtctcgcgtgctgacagatcattggtctattccgtacaaaagggaggaaagtcttggtaagtgccttctggcttctacctaccttgctcggttgggcttaagtgaatccgatgagaattgccgtcgatttatggaccgctgcatgcccgaggccttcaaaaagctattgactagctctgccgtccataagtggggcaccgagatccacgaggggatttacaatatgttgatgctgctaattgaacttgttgccgaaaggattaaacaagatccaattcctacgggtcttttaggggtgctgactatggcattcaatcctgacaatgagtatcacttcaaaaatcgaatgaaggtgagccagaggaactgggcagaagtattcggcgagggcaatatgtttgcagtatctccagtcagtacctttcagaaagaaccgcacggttgggttgtggacttggtgaacaaatttggcgagctagggggattcgcagcgattcaggccaaactccattctgaagacatcgagctcggcgctgtgtcagcattgattcagccacttggagtgtgcgcagaatatctgaatagtagcgtcgtgcaaccgatgttggacccagtgattctaaccacaattcaagacgtgcggtctgtggaagaaaaagatttgaaggacaagcgcctggtctctatccccgaacttctgtcagcagtcaaattgctgtgcatgcgctttcagccggacctcgtaacgatagtggacgatctccgcttggatatcctactcagaatgcttaagagcccgcattttagtgcgaagatgaactcgctgaaggaggttaccaaactgattgaagatagcacactcagcaagagcgtcaagaatgcaatcgacacagacagactgctcgattggctggtcgagaatagcgtattatccatcgctctggaaggtaatatcgatcaagcccagtattgtgaccgcatcaaggggattattgagctgcttgggtcgaaactatccctggatgagttgaccaagatttggaagattcaatccgggcaaagctctacggtgatcgaaaacatccatactatcattgccgctgcagctgtgaaattcaatagcgaccaactgaaccatctgtttgtgcttattcagaaatcttgggagacagaatccgaccgcgtccgccaaaagctcttgtcattaatcggacgtataggccgtgaggcgaggttcgagacgacctccggcaaagtgctcgacgtgctgtgggaactggctcaccttcctactctgccttccagtctcattcagcaggctctggaagaacacctgactatcctcagtgacgcctacgccgtgaaggaggccataaaaaggagctacatcataaagtgcatagaagacatcaagaggccgggagagtggtctggcctggagaagaacaaaaaagatggattcaaaagctcacagctgaacaacccacaatttgtgtgggtggtccctgcattacgacagttacatgagatcactcggtcgtttattaagcagacgtaccagaaacaggacaagtccatcatacaggatctgaaaaagaactttgagatcgtgaaactggtgaccggatcgctgattgcttgccatcggctcgcggcagcagtcgccggtccaggcggactgtctggtagtaccctagttgatggacgatacacttatcgcgagtatctcgaggcccatctgaagttcctagcctttttcctccaggaggccacactctacctgggctggaaccgagccaaggaaatctgggagtgcctagtcacagggcaggacgtgtgcgagcttgaccgagaaatgtgcttcgagtggttcaccaagggacaacacgacctcgagagcgacgtgcagcaacagctatttaaggagaagatcctcaagctcgagtcatatgagatcactatgaatggcttcaatctgtttaagaccttctttgagaacgttaacctgtgtgatcacagactgaaaagacagggtgctcaactgtatgtggagaagctggaactgatagggatggactttatctggaaaatagcaatggaatcccccgatgaagaaatcgccaacgaggccattcagttgattatcaattattcttacatcaacctgaacccccgactgaagaaagattccgtgagcctccacaagaaattcatagccgactgttacacgcgtctagaggccgcatctagtgcactggggggacctaccctgacccatgccgtcactagagctaccaaaatgttaacagccacagctatgcccacagtagccacctctgtgcagtccccctacagatcaaccaaacttgttatcatcgaacgcttgttgttacttgcagagcgatacgttattaccattgaggatttttacagcgtccctcgcaccattcttccccacggggcttcctttcacgggcacctgctaaccttgaatgtgacctacgagtccactaaggacacgttcactgtggaggcccattctaacgagacaatcggttcggttcgctggaagatcgccaagcagctgtgcagtccagtggacaatatccaaatttttactaacgattcactactgacggtgaataaggaccagaaactcctccatcaactgggcttctcggatgaacaaatcttgacggtgaagacatccggatccggaactccgagcgggtcctctgcagactcgagcacctccagcagctcatcctcctccggcgtgtttagctcttcatacgcaatggaacaggagaagtcattgcccggagtcgtgatggccctggtgtgcaatgttttcgatatgctataccagttggccaatctcgaagagccacgtatcactctgcgggtccgcaagctcttgctgctcataccaactgaccctgccatccaggaggcgctggaccagctcgattcattagggaggaaaaagactcttctttctgagtcgtctagccagtcttccaagtctcccagtctgtccagcaagcaacagcaccagccgtctgccagcagtatcctggagtcactctttcgcagcttcgcgccaggaatgagtacattccgcgtgctctacaatctagaagtactgagcagcaagctgatgccgacagccgacgacgatatggctaggtcatgtgccaagtccttttgtgagaatttcttaaaggcaggcggactctccctggtagtgaatgtgatgcagcgggattcaatcccaagcgaggtggactacgaaactcggcaaggggtgtactccatatgcctgcagcttgccagatttctcctggttggccagacgatgcctaccctgctggacgaagaccttaccaaggatgggattgaggccctgagttccaggccttttaggaatgtgagcagacaaacaagcagacaaatgtccctgtgcggaactcccgagaagtcaagctatcgtcaactctccgtgagcgacagaagcagcattagagtggaggagatcatccctgcagctagggtggccatacagaccatggaagtttcggattttacttccactgtcgcatgttttatgagattgagttgggccgcagccgcaggtaggctggacctagtaggcagctcacaacctattaaggaaagcaactcactgtgccctgccggtatccgcaatcgcctctcctcaagcgggtccaactgttcatccggttccgaaggagagccagtcgcactccacgcaggcatttgcgtgagacaacagagtgtgtccacgaaggactctttaattgcaggcgaggctctgtctctactggttacctgtcttcagttacgaagtcagcagctggccagcttttacaatctcccatgcgtggctgactttatcattgatatcctgctcggctctcccagcgctgagatccgaagggtggcttgcgaccagctatacaccttgtctcagactgacacatcagctcacccagatgtccaaaaacccaaccaatttctgctcggcgtaatactcacggctcagttacctttgtggagcccgacgtccatcatgaggggagtcaatcagagactgctgtcccagtgcatggaatacttcgacctgcgttgccagctgctcgacgatctcactacctccgaaatggaacagctgaggataagtccggcaaccatgctggaggacgagatcacttggctggataattttgaacccaatcggaccgccgaatgcgagacttcagaggccgataacatactactcgctgggcatctgaggctgatcaaaacgttgctctccttatgtggagcagagaaagagatgttagggtcatctctgattaagcccctgttggacgacttcctgtttcgggctagccgaattatactgaattcgcacagccctgctggcagcgccgctatatctcagcaggattttcacccaaagtgcagcacagccaacagccgattggctgcctatgaagtgctcgttatgttggctgattccagcccatccaacctccaaatcattatcaaagagcttctgagcatgcaccatcaacccgatcccgcactgacaaaagagtttgattatttgccacccgtagattctaggtctagttcagggtttgtaggactgaggaatggcggagccacttgttatatgaacgcagttttccagcagctgtatatgcagcccggactacctgaatctcttctctctgtggacgacgatactgacaatccagatgacagcgtgttctatcaggtccaatctctgtttggacacctgatggaatcaaagctgcagtattatgtgccagaaaatttctggaaaatatttaagatgtggaataaagagctgtatgtcagagaacaacaagacgcgtatgaatttttcacttccctgatcgaccagatggacgaatacctgaagaagatgggccgagaccaaatattcaaaaacacttttcagggcatctatagcgatcagaagatctgcaaggattgcccccataggtacgaacgcgaggaggcatttatggccttaaatttaggagtaacgagctgccagtcgctcgaaatctctttggaccagttcgtgagaggcgaggttttggaaggcagtaatgcttactattgcgagaaatgtaaggaaaagcgaatcaccgtcaaacgaacgtgcatcaagtccctaccatccgttctggtgattcatcttatgaggtttggctttgactgggagagcgggagatccatcaaatatgacgaacagatcagattcccctggatgctcaatatggagccttatactgtctctggaatggcacgacaggatagcagttctgaggtgggcgagaacggccgaagcgtggatcagggaggcggaggttctccgagaaaaaaggtggccctcactgagaactacgaacttgtaggggtgatcgttcactccggccaggcgcatgctggtcactactatagctttattaaagataggagaggctgcggtaaaggcaaatggtacaagttcaacgacaccgttatagaggagttcgaccttaatgacgagacactcgaatatgagtgctttgggggtgaatatagacccaaggtgtacgaccagacgaacccttacacggacgtgagacgtcggtactggaacgcctatatgctgttctatcagcgcgtgtcggatcaaaactctccagtcctgcccaaaaaatccagagtgtcagtggtacgccaggaagccgaggatctatctctgtctgctccgagttcacctgaaatcagccctcaatcatcacctagaccgcatcgcccaaataatgacagactttccatcctcaccaaacttgtgaagaagggcgaaaagaaggggctgttcgtagagaaaatgcctgcgaggatttatcagatggtgcgcgacgagaaccttaagtttatgaaaaatagggacgtgtattcaagtgactacttcagctttgtcctctctctagccagtttgaacgcaaccaagttaaaacacccatattacccgtgtatggcaaaggtgtctctccagctggccattcagtttctctttcagacctacctgaggacaaagaaaaagctgcgcgtcgacacagaggagtggattgctacgatcgaggctctactcagcaaaagcttcgacgcgtgccagtggctggtggaatacttcatctcttccgagggcagggaattaataaaaattttccttcttgagtgcaatgtgagagaggtgagggtggcggtcgctaccatcctggaaaagacgcttgactcagctctcttttatcaagacaagctgaaaagcctccatcagctcctggaggtccttctggctttgctggacaaagatgtgcccgagaattgtaaaaactgtgcgcaatatttctttttgtttaacaccttcgtccagaagcaagggatccgggcaggggatctgctcctccggcatagcgcactgcgccacatgattagcttccttttgggcgcttcaaggcagaacaatcagattcgcagatggagctccgctcaggctagggaattcgggaatctacataacaccgtagcgctgttagtgctgcactctgacgtttcctcccaacgcaatgtcgctcctggcatcttcaaacagcgtccacctatctctattgccccaagctcccctctcctgcccttgcacgaggaagttgaagccttactttttatgagtgagggaaaaccgtatctgctggaggtcatgttcgctttaagagaattaaccgggtcattgcttgctctgatcgaaatggttgtgtattgctgcttctgtaacgaacatttcagctttacgatgctgcatttcattaaaaatcagctggagaccgcaccacctcacgagctgaagaacacattccagctgttgcatgaaatcctggttatagaagatccgatccaggtcgaaagggtgaagtttgtattcgagaccgaaaatggcctactagcactgatgcaccacagcaaccacgtggatagtagcagatgttaccagtgcgtgaagtttcttgtgacccttgctcagaaatgtccagctgccaaggaatatttcaaggaaaacagccaccattggtcatgggccgtgcagtggctgcaaaaaaagatgtcagaacattactggaccccgcagtctaacgtgtccaacgaaacttcgactggtaaaacctttcagcggacaatcagtgcacaagatacacttgcttacgcaaccgcgctgctcaacgaaaaagagcagtccgggtccagcaacggttcggagtcttcacctgccaacgaaaacggcgatcgacacctgcagcagggcagcgagtcccctatgatgatcggtgaactgagatctgatctggacgatgtcgacccctat

SEQ ID NO: 245975 - DNA, 7382 bp, synthetic construct
  misc_feature 1..7382: note = Description of Artificial Sequence: Synthetic coding sequence
  source 1..7382: mol_type = other DNA
atgaccactctgctgtgtatggggtttagtgaccccgctacgatccgcaaggccttgcggcttgccaagaacgatataaatgaggccgtagcattactcactaacgaaagaccgggtctggactatgggggttatgagcccatggattccgggggactttcagaatccgatgagaattgtaggagattcatggataggtgcatgcctgaagcctttaagaagctgttaactagcagcgccgtgcataaatggggcactgaaattcatgaaggcatctataacatgctcatgttgcttatcgagctggtggccgagcgcattaaacaagaccccattcccacggggctcctcggtgttctgaccatggccttcaatcctgacaacgagtatcatttcaagaacaggatgaaggttagccagaggaattgggcagaagtctttggcgaagggaatatgttcgcagtgagccccgtctccacgtttcaaaaggaaccccatgggtgggttgttgatctcgtgaacaagttcggggaactgggcggttttgcagcaattcaggccaagctgcactctgaggacatagagctgggggctgtcagcgccctgatacaaccactgggtgtgtgcgcagagtatctcaacagcagtgtggtccagcctatgttagacccagtgatcctgacaacaatccaagacgtaagaagcgttgaggaaaaagacctcaaggataaacggcttgtgtccattcctgaactgctgagcgcggtgaagcttctgtgtatgcggtttcagccggacctagtcaccatagtggacgacctgcggttggacatcttgttgcgaatgctgaagagcccacattttagtgccaagatgaattctcttaaggaggtaacgaagctgatcgaggatagtaccctgtcaaagtcggtaaaaaacgccattgatacagatcgattgctagactggctggtcgagaatagcgtcctatctatcgcattagagggcaatatagaccaagcccagtactgcgaccggataaaaggaataatagagctgttaggatctaagcttagccttgacgagttgacaaagatctggaaaatccaatccggccagagttccacagtgatagaaaatatccataccatcattgcggcagccgctgtgaagtttaattccgaccagctcaatcacctgttcgtgcttatccaaaaggtgttagatgtgctgtgggagctcgcccatcttcctacccttccttccagtctgattcagcaggccctggaggagcatctgaccattctgtccgacgcatatgcggtgaaagaagcaattaaacgcagttatattatcaaatgcattgaggacatcaaaagaagttcccagctcaacaatccacaattcgtttgggtagtgcctgctttaaggcagctccacgaaatcacacgctcattcattaagcaaacctaccagaaacaggataaaagcatcatccaggatcttaagaaaaactttgaaattgtgaaattggtcacgggatccctcatcgcatgtcataggcttgccgcagctgtcgccggacccggtggcttgtctggtagtaccctcgtcgatggcaggtatacctaccgggagtacttggaagcacacttgaagtttcttgcctttttcctgcaagaggctaccctgtacttaggctggaaccgggctaaggagatatgggaatgtttagtgactggtcaagatgtgtgtgagctggatagggagatgtgctttgagtggtttacaaagggacagcatgatctcgaatcggacgtgcagcagcagctgttcaaggagaagattctgaagctggagagttatgaaattactatgaatggctttaacctgttcaagactttctttgagaatgtcaacctatgtgaccatcgcttaaagaggcaaggagcccagctgtatgtggagaagctggaactcatcggcatggacttcatctggaaaattgctatggaatcacccgacgaagaaattgccaatgaggccatccaactgataatcaactatagttacatcaatttaaacccaagacttaaaaaagatagtgtttcgctccacaaaaagtttatcgcagactgctacacaagattggaggcggcttccagtgccctcgggggtccaacactgactcacgccgttacgagagctacaaaaatgctcaccgcaaccgcgatgcctacagtagctacgtcggtgcagtctccatataggagcacaaaactcgtgatcatcgaacggttactcctgctggccgagaggtacgttatcacaatagaggacttttactctgtgccacgcactatactgcctcatggggctagctttcacggccatcttttgactcttaatgtgacgtatgaaagcaccaaagataccttcactgtagaagcccattctaacgagacgatcggaagcgttaggtggaaaatcgcgaagcaactgtgctcaccagtcgataatatccagatctttactaacgactcactgctgaccgtaaataaggatcagaagcttttgcatcagctcggattcagtgacgaacagatcctcaccgtgaagaccagcggctcggggactccaagtggttcatcagccgacagtagcactagctcgtcttcgtcctcctctggcgtgtttagctcaagttacgcaatggagcaggagaagtctctgcccggtgtcgtgatggctctggtctgcaacgtattcgacatgctgtatcagctggcgaatctggaggaacctaggattactctacgggtgagaaagctgttgctgctgatccccacagatccagccatacaggaggctcttgatcagttggattctctgggccgaaagaaaaccctcctgtctgaatcttcaagtcaatcatctaagtcgccaagtctcagttctaaacagcaacaccagccaagcgcctccagcatacttgagtcactttttagatcctttgcacccggtatgagtacttttcgagtactgtacaatttggaggtcttgagttctaagctgatgccgaccgcagatgacgacatggccagatcatgcgccaagtccttttgcgaaaacttcttgaaagccggaggcctcagcctggtcgtgaacgtgatgcagcgagatagcattccaagcgaagtagactatgagactcgccaaggcgtctactctatctgtctgcaacttgccagatttcttttagtagggcagacgatgccaacactccttgacgaggatcttaccaaggacgggattgaggctcttagttccaggccatttcgtaatgtaagcaggcaaacttcccgccagatgtccctctgcggcacccccgagaaatccagctatagacagctgtccgtgtctgacaggtccagtatccgagtggaagagataattcctgccgctagagttgccatccaaactatggaggtctccgatttcacttcaaccgtcgcttgttttatgcgcttgagctgggccgcagcagctggcagactggatctggtgggatcttctcagcctattaaggaatctaacagtttgtgtcccgctggtatccggaatcgactatcatcctccggctctaattgtagttctggatctgagggagaaccagtggccctccacgcaggaatctgcgttaggcagcagtcggtctcgacaaaagactccctcattgccggagaagccttgagtctgttggtgacttgcctgcagctccggagccagcagctagcaagtttttataatcttccctgcgtggcggacttcattatcgatattctgctgggaagccccagcgctgagattcggagggtggcctgtgaccaactatataccttgagccagacggataccagcgcccatccagatgtgcaaaaaccaaaccagttcttattgggagtgatactgaccgcgcaactgcccctctggtcccccacttctattatgcggggtgtgaatcaacggcttctgtcacagtgtatggagtactttgacctccgctgccagctacttgatgacctcaccacaagcgagatggaacagctgagaatctcccccgctaccatgttagaagacgaaatcacttggttggacaactttgagccaaaccgcactgccgaatgtgaaaccagcgaggccgacaatatcctgctagccggacatctgcgcctcattaagaccttactgtctctgtgtggggctgagaaagagatgttaggctctagtctcattaagccattgctggacgacttcctgttccgagcctccaggattatcctcaattcccattcaccagccggttccgcagccatcagccagcaggactttcatcctaagtgttcaacagccaactctcggcttgcagcatatgaagtgctggtcatgctggctgactcctctccatctaacctccaaataattattaaggagcttctgagtatgcaccaccagccagatcccgctctaacaaaagagttcgactatttgcctccggtagattccagatcctcgtctggcttcgtgggccttaggaacggaggcgctacctgttatatgaacgcagtgtttcaacagctgtatatgcaaccaggcctgccagagagtcttctgagtgtggatgacgacacagataatccggatgatagcgttttctatcaggtccagtccctgtttggacacctcatggagtcaaagctgcagtactacgtccctgagaatttttggaagatctttaaaatgtggaataaggagttgtatgttcgcgaacagcaggacgcctacgagttttttacttcgcttatagatcagatggacgagtacctgaagaaaatggggagggaccaaatttttaagaacactttccaggggatatactccgaccaaaaaatctgcaaagattgtcctcacaggtacgagcgggaagaagcattcatggctctgaatttaggggtgacctcttgtcagagccttgaaatcagtctggaccaatttgtgaggggcgaagtgcttgaaggttctaacgcatactactgtgaaaagtgcaaggagaagcgtattaccgttaaaaggacttgcatcaaatcactcccttcagtgcttgtgatccatctgatgcggtttggattcgactgggaaagcggtaggtctatcaaatacgacgagcagatacgcttcccctggatgctgaacatggaaccctataccgtctcagggatggccaggcaggactctagcagcgaggttggggaaaacggaaggtctgttgaccagggaggaggcggtagcccaaggaaaaaggtggccttgacagagaactacgaactggtgggggttatcgtgcattccgggcaggcacacgcaggtcattactactctttcatcaaagataggagaggatgtggaaaaggaaagtggtacaagttcaacgacaccgtaatcgaggaattcgatctgaatgacgagacattggaatacgagtgttttggcggtgagtatcgcccaaaggtctacgatcagacaaatccctacaccgacgtgagacgcagatattggaatgcctatatgctattctaccagagggtatcagatcaaaactcccctgtgctcccaaaaaagagtcgggttagcgtcgtgaggcaggaagccgaggatctctctctcagcgcgccaagctctcctgaaatctctcctcagtcatctcctaggcctcatcggccaaataatgatcggctgtcaatcctcactaagttggtgaaaaagggcgagaagaaggggctgttcgtggagaagatgcccgcacgtatctatcaaatggtaagggatgagaacctgaagtttatgaagaatagggacgtctatagctctgactatttctcgtttgtgcttagcctggcttcactgaatgcaacaaaactaaagcacccttactacccatgcatggccaaggtgtctctgcagctggcaatccagtttctcttccagacatatctgcgtacaaagaagaagctgcgagtagatacagaggaatggattgcgaccatcgaggccctcctgagcaagtcgttcgatgcttgccagtggctggtggaatacttcatcagcagcgagggacgggagttgatcaaaatttttctcctagaatgtaacgtgcgggaagtccgcgtcgcagtggcgactattcttgagaagactctggacagtgccctgttctaccaggacaagttaaagagccttcatcagctcctggaggtcctgctggctctcctggataaggatgtccccgagaactgcaaaaactgtgcccagtactttttcttatttaacacatttgtgcaaaaacagggtatccgcgcaggagatctcctcctgcgtcactccgcgttacgtcacatgatcagcttccttctgggggcttcgcgccagaacaatcagatccgtcggtggagtagtgctcaagccagggagtttgggaacctgcacaacacagtcgcactgctggtgttacattcagatgtgagtagccagcggaacgtggcccctggaatcttcaagcagcgtccgcctatctccatcgccccaagcagccctcttttgcccctgcacgaggaggtggaagctttactgtttatgtcagagggcaagccttacctacttgaggttatgttcgcactcagagagcttaccggaagtctcctggcccttatagaaatggttgtgtattgttgcttctgtaatgagcactttagcttcacaatgcttcatttcatcaaaaaccagcttgagactgcccctccacatgaactgaagaataccttccagttattacacgaaatcctcgtgattgaggatccaattcaggtcgaaagagttaagtttgtattcgagacagaaaacggactgctggcccttatgcatcatagtaatcacgtagactcctccaggtgctatcagtgcgtcaagttcctggtcaccctcgctcaaaagtgccctgccgctaaggaatactttaaggagaatagtcatcattggagctgggcagtccagtggcttcagaaaaagatgtccgagcactactggactccacaaagtaacgtatcaaacgagacaagcactggtaaaacgttccaaagaacgatttccgcacaggacaccttggcatacgctaccgctctcttgaacgagaaagaacagtcagggtccagtaatggctctgagtcgtcacccgcaaacgaaaatggggacaggcatctgcagcagggttctgaatctcccatgatgataggcgagctgcgctcagacctggacgatgtagatcccta

SEQ ID NO: 245976 - DNA, 2742 bp, synthetic construct
  misc_feature 1..2742: note = Description of Artificial Sequence: Synthetic coding sequence
  source 1..2742: mol_type = other DNA
atggctgcgctctttttgcgcggattcgtccagattgggaactgcaaaacaggaatcagtaaatcaaaggaagcattcatcgaagccgtggaacggaagaagaaggacagattagtgctgtacttcaagtctgggaagtactctacctttcgcttgtccgataacatccaaaatgttgtgctgaagagctaccggggtaaccagaatcacctacatctaaccttgcagaacaacaacgggctctttatcgagggactgtctagcacagacgccgaacagctgaagatcttcctcgaccgcgtgcaccagaacgaggttcagcctccagtgagaccagggaagggcggtagcgtgttttccagcacgacccagaaagaaattaacaagacttcattccacaaggtggatgagaagtccagttccaaatcatttgagatagctaagggctctggaaccggcgtgctgcagcgcatgccgctcttaacatcaaaactgactttgacatgtggagaacttagcgaaaaccagcataagaaaaggaagagaatgttatcctcctcatccgagatgaatgaagagttcctgaaagaaaacaattccgtggaatacaagaagagcaaagctgactgttcacggtgcgtaagctataaccgagagaaacagctgaagttaaaagagctggaagagaacaaaaaactggagtgcgagtcctcctgtatcatgaatgcaactggtaacccctacctggatgacattggtttgctccaggccctgactgaaaagatggtactggtctttcttctgcagcagggatacagcgatgggtacaccaagtgggataaacttaaactcttctttgagctgtttcctgaaaagatttgccatggattgcccaaccttggcaacacatgctacatgaatgccgtcctgcaatctttgcttagcataccaagcttcgctgacgatcttctcaatcagtcttttccttgggggaaaatccccttgaacgctctgaccatgtgcctggccaggttactgttctttaaggacacatacaacatcgagattaaggaaatgttacttctcaatctaaagaaggcaattagcgccgctgcggaaatatttcatggcaacgctcaaaacgacgctcatgaattcctggcccactgcctggatcaactgaaagataacatggaaaagctgaatactatctggaagcctaagtctgagttcggggaggataattttccgaagcaagtttttgcagacgaccccgatacttccgggttttcctgccccgtgatcacgaattttgagctggagcttctccactcaatcgcatgcaaagcctgtggacaggttattttgaagaccgagctgaataattaccttagcataaacttgccccagaggataaaagcccatccctcgagcatccaatccacttttgatttgttttttggggctgaggagctagagtataagtgtgcaaaatgcgaacacaagacaagcgtgggtgtccacagcttttcaagactgccacgaatactgatcgtacatctcaaaagatacagtctcaatgagttttgcgccttaaagaaaaatgatcaggaggttatcatcagtaagtatctgaaggtgtcctcacactgcaatgagggcacacgcccacccctccctctaagtgaagatggggagattacagatttccagctgctgaaggtcatccgcaagatgacaagcggtaatattagcgtgtcatggcccgcaactaaagagtcaaaggatatcctagcaccgcatatcggctccgacaaggagagtgaacaaaaaaaggggcaaaccgtgttcaaaggggcaagtagaagacagcagcagaaatatctcggaaagaacagcaagcccaacgaactggaatctgtgtacagcggcgacagggcgtttattgagaaagagcctttggctcacctcatgacatatttagaagatacatccctgtgccaattccataaagccggtggtaagcccgctagttcaccagggactccccttagcaaggtggatttccagaccgtgcctgagaaccctaaacgcaagaaatacgtgaagacaagtaagtttgtggcatttgatcgcattattaaccccacaaaggatctctacgaggacaagaatattcgaattccggaaagatttcagaaagtttctgagcagacacaacaatgtgacggcatgcgtatctgcgaacaggcaccacagcaggctctgcctcagtcattccctaaaccaggaactcagggtcataccaaaaacctgctgagacccactaagctgaacctgcagaagtcaaaccggaactccctgctcgcactgggttccaacaaaaacccacggaataaggatatcctggacaagatcaagtcaaaggccaaagagaccaaaaggaatgacgacaagggcgatcacacgtacaggctcatctctgtcgtgagtcacttgggcaagactctgaagtctgggcattatatctgtgacgcctacgactttgagaagcaaatttggtttacatatgacgatatgagagtgctcggtatccaagaggcgcagatgcaagaagacagaagatgcacaggatatatatttttttacatgcacaacgagatattcgaagaaatgctcaagcgcgaggaaaacgctcagctgaattccaaggaggtcgaggagaccctacaaaaagagtag

SEQ ID NO: 245977 - DNA, 2742 bp, synthetic construct
  misc_feature 1..2742: note = Description of Artificial Sequence: Synthetic coding sequence
  source 1..2742: mol_type = other DNA
atggcggcattgtttttgaggggatttgtacaaatcggaaactgtaaaaccgggatatctaagagcaaagaagctttcattgaagccgttgaaaggaagaaaaaggatcggctagtgctgtacttcaaaagcggcaaatatagcacgtttcggctaagcgacaatatccaaaacgtggtcctgaagagttatcgaggaaatcagaaccacttgcatctgaccctgcagaataacaatggcctcttcatcgagggtctgagctctacagatgcagagcaactgaaaatcttcctggaccgggtgcaccagaatgaagtgcagccaccggtcaggccaggtaagggtggtagcgtgttctctagcactacccaaaaagaaattaacaaaacatcctttcataaggtggacgagaagtcatcgagcaagtcattcgagatcgccaaaggctctggaacgggggtcttacagaggatgcctctgctaacatctaagcttaccctcacgtgtggcgagctgagcgagaaccagcataagaaacgcaagcgcatgcttagctcttcaagcgaaatgaatgaggagtttctcaaagagaataacagtgtcgaatacaaaaaatccaaggcagattgttcccgatgtgtatcctataatagggagaagcagcttaaactcaaggaacttgaagagaataaaaaactggagtgcgagagcagttgtattatgaacgccacaggaaatccgtatcttgatgatattgggctgctgcaagcactgaccgaaaaaatggtgctggtgtttctcctccagcaaggctactctgatggatacactaaatgggacaagctaaaactcttttttgagctgttccctgagaagatctgccatgggcttcccaatctgggcaatacttgctatatgaatgccgtgctgcaatccttactgagtatcccttcattcgctgatgatctgctcaaccagagtttcccttggggaaaaatccccttaaatgcccttacgatgtgcctggcgagactcttattctttaaagatacctacaatatagaaattaaggagatgcttctgttgaatttgaagaaggctataagtgctgcagccgaaatcttccatggaaacgcgcagaatgatgcacatgaattcctggcccactgcttagaccagttgaaggataacatggagaaacttaacaccatctggaaaccaaagagcgaattcggcgaagacaactttcccaagcaagtttttgccgacgaccccgacacaagtgggtttagttgtcctgtcatcaccaactttgagctggaactgttgcacagcattgcatgcaaggcttgcgggcaagtcatactaaagaccgagctgaataattacctgtccattaatttgccacagagaattaaggctcacccctcaagcattcagtctacattcgacctctttttcggggctgaagagttggaatacaaatgcgcgaaatgcgaacataaaacaagtgtgggggttcattcatttagtaggctgccccgtattctgatcgtgcatctgaaacgctattcactcaatgagttctgcgccctgaaaaaaaacgatcaagaggtcattatcagcaagtacctcaaggtgtcaagtcattgcaacgagggcacaagacccccactacccctaagcgaggatggagaaatcaccgatttccagctccttaaggtgatccgcaaaatgacctctggtaacatctccgtgagctggcccgctaccaaggaatcgaaagatatcctggctcctcacattggttccgacaaggagagtgaacagaaaaagggccaaactgtgtttaaaggcgcttccaggagacagcagcaaaagtacctggggaagaactctaagcccaacgaattggagtctgtatacagcggggacagagccttcattgagaaagagcctcttgcacacctaatgacttatttagaggatactagcctgtgccagtttcacaaagccggaggcaaaccagcttcaagtcccggaacccccctgagtaaagtggatttccagacggtgccagaaaaccctaaacgaaaaaagtacgtcaaaacatctaagttcgtagctttcgataggatcattaatccaacgaaggatctctacgaggataagaatataaggatccctgagaggtttcagaaggtaagcgagcagactcagcagtgcgacggcatgaggatttgcgagcaagccccacagcaggctctcccacaatcttttcctaagcctggtacccaaggccacactaaaaacctcctcagaccaaccaaattaaacctgcaaaagagtaacagaaactccctgctcgctctcggaagcaacaaaaaccccaggaacaaagacatcctggataaaattaagtctaaagccaaggaaaccaaaagaaacgatgataaaggggatcatacttacagactaattagcgtggtgtcacatctgggtaagacccttaaatcagggcattacatttgcgacgcatatgatttcgagaagcagatctggttcacctatgatgatatgagagttctgggcatccaggaggcccagatgcaggaggacaggcggtgtacagggtacatattcttctatatgcacaatgaaatcttcgaagaaatgctcaagagagaagaaaatgcacaactgaacagtaaagaagtggaggagacactgcagaaagagtag

SEQ ID NO: 245978 - DNA, 3234 bp, synthetic construct
  misc_feature 1..3234: note = Description of Artificial Sequence: Synthetic coding sequence
  source 1..3234: mol_type = other DNA
atgacagccgagctccagcaggacgatgccgctggggctgccgacggtcacggaagtagctgccaaatgctgctgaatcaactccgcgaaatcactggcatacaggacccatctttcttgcatgaagctctgaaagcttctaatggagacatcacacaggccgtgtcactgctgacggacgagagagtgaaggaaccatctcaagataccgtggctactgaaccctccgaggttgagggaagtgctgcgaacaaagaggtgcttgcaaaagtgatcgatttaacccacgacaataaagatgatctacaagcagctatcgcactttccctcctggagtccccaaagatccaggccgatgggcgagatctgaatcgcatgcacgaggccacttccgctgaaacaaagcggtcgaagaggaaacggtgcgaggtatggggggaaaacccaaaccctaacgactggagacgagttgatggatggcccgttggactgaagaacgttggcaacacctgttggttctccgcagtcatccagtcattgttccagctgcctgaatttcggagactggtgctctcatactctctcccccagaatgtgctggagaattgtaggtcacataccgaaaagaggaacatcatgtttatgcaggaattgcagtacctatttgccctgatgatgggtagtaacagaaaattcgtcgatccctccgccgctctggacctgctcaagggcgcattccgcagttccgaggagcaacagcaggatgtctcagagttcacacacaaacttttggattggctggaggatgcattccagctggccgtgaatgttaattctcctcgcaacaagtccgaaaatccaatggtccagttgttctatggaacgttcttgaccgaaggcgtgcgggaaggcaaaccgttttgcaataacgagacatttggtcaataccctctgcaagtgaatgggtacagaaatctggatgagtgcctggaaggcgctatggtcgaaggtgatgtagagctgttacctagtgaccatagcgtgaagtacggacaggaacgttggtttacgaagctgcctccagtgctgaccttcgagttgtcaagattcgagtttaatcagtccctggggcagcccgaaaaaatacacaacaagttggaattccctcaaattatctacatggacaggtatatgtacagatcgaaagagctgattaggaacaaacgcgaatgtatcagaaagctgaaagaagaaatcaaaatcttgcagcagaagctcgaaagatatgtgaagtacggtagcggccctgcacggttccccttgccagatatgctcaaatacgtgatagaatttgctagcactaagcctgcttccgagtcttgtccacctgaatccgatacccacatgacacttcctctttcctccgtacattgctcggtgagtgaccagaccagcaaggaatccacctcgactgaatcgagcagccaggatgtggagtcgacctttagctcacccgaggactccctgcctaagtcaaagccccttacgtccagtcgcagcagcatggagatgcctagccaaccagcgccaagaaccgtcacggacgaggaaattaatttcgtaaagacatgcctgcagagatggaggagcgagattgaacaggatatccaggatctcaaaacatgcatcgctagtacgacgcaaacaattgagcagatgtattgcgatcccttgctgaggcaagtcccataccgcctgcacgccgtactggttcacgaagggcaggccaatgctgggcactactgggcctatatctacaaccagccacggcaatcgtggctgaaatacaatgacatatctgtaaccgaatcatcatgggaggaagtggagagagactcctacgggggactacgcaacgttagcgcatactgtttgatgtacattaacgacaagctcccctatttcaatgccgaggcagcaccaaccgagtccgaccagatgagcgaagtggaggccctctcagtggaacttaaacactacatccaggaggacaactggcggttcgagcaggaagtggaagagtgggaagaagaacagtcctgcaagatccctcaaatggagtcaagcaccaactcaagctctcaagactactcaactagccaggaaccgagcgtggctagcagtcacggggttcgatgtcttagttctgagcacgcagttatagtgaaagaacagacagctcaagcaatcgccaatactgccagagcatacgagaagagcggggtggaagccgcacttagcgaggtcatgctctcaccagcaatgcagggggtcatcctggcaattgccaaggctcggcaaacttttgaccgggatggatccgaggctgggttgatcaaagctttccatgaagaatacagccggctgtatcagttggcaaaagaaacaccgacctcccacagcgacccccgactgcagcacgtcctcgtctatttcttccagaacgaggctccaaaaagagtagtcgaacgcaccttacttgagcaatttgctgataagaacttaagttacgacgagagaagtatatccataatgaaggtggctcaagcaaagttgaaagagattggacccgatgatatgaatatggaggaatataagaagtggcatgaagattacagcctgttccggaaggtttcagtgtatctgctgacggggctggaactatatcagaagggaaagtaccaggaagctctttcttatttggtgtatgcttaccaatcaaacgcagcgctgctgatgaagggaccgaggcgcggtgtgaaagagagcgtcatcgccctctaccggagaaaatgccttctggagctgaatgcgaaggctgcgagtcttttcgagaccaacgacgatcattctgtcacagagggcatcaatgtaatgaacgaactcatcataccatgtatccacctcatcattaacaatgatatcagcaaggacgacctggatgcaatcgaggtgatgcgcaatcattggtgttcctacctgggacaggacattgcagagaacctacagttatgtcttggcgagttcttgccccgtctgttggatccttccgccgagatcattgtactgaaggagcctccgaccatacgtccaaactcaccctatgacctgtgttctcgttttgccgcagtcatggagagtattcagggcgtgagtaccgtaaccgttaagtag

SEQ ID NO: 245979 - DNA, 3138 bp, synthetic construct
  misc_feature 1..3138: note = Description of Artificial Sequence: Synthetic coding sequence
  source 1..3138: mol_type = other DNA
atgactgcggaacttcaacaggatgatgccgctggggctgctgatgggcacggcagctcttgccagatgcttctcaaccagctgcgcgagatcaccggcatccaggaccctagcttcctgcacgaagccctaaaggcatctaacggagacatcacccaggccgtatcactgcttacagacgaaagggtgaaagagccgtcccaggatactgtggccacagagccgtcagaggtggaaggatccgcggcaaataaagaggttctcgccaaggtcattgaccttacacatgacaataaggacgacttgcaagccgctatagccttatcattgttggagagtcctaaaattcaggccgatggccgagatctaaataggatgcacgaggccacgtcagcagagactaagcgctcgaaaaggaagcggtgtgaggtatggggtgaaaatcccaatccaaacgactggagacgcgtggatggatggcctgttgggttgaagaatgtcggcaacacttgctggtttagcgcagtcattcagtcgctattccaactgcccgagtttaggagactagttttgtcttattccctgcctcaaaacgtgctcgagaactgtaggtcccacactgagaagcgcaacataatgttcatgcaagagctacaatacttatttgccctcatgatgggttcaaaccggaaatttgtagacccctccgccgctttggatctgttgaaaggggcatttcgttccagtgaagagcagcaacaagacgtgagtgagtttactcacaaattactcgattggctggaggacgccttccaactagctgtcaacgtaaactctcctagaaataagtctgagaaccccatggtacagctattctacggaacctttctcaccgagggagtgagagaggggaaacctttttgtaataatgagaccttcggccaataccctctgcaggtgaatggttacagaaatttagatgagtgccttgagggtgctatggtcgagggtgatgttgagcttctgccttctgaccatagtgtcaagtacggtcaggagcggtggtttactaagctccctccggtgttaacgttcgagctttcgcgtttcgagtttaatcagagtctaggacagcccgaaaagattcacaataagctggagttcccacaaatcatttacatggatcgttatatgtatagaagtaaagaactgatcaggaataagagagagtgcattagaaaactcaaggaggaaatcaagattctgcagcagaagttggagcggtacgtaaagtacgggtctggtccagcccgatttcccttgcccgatatgctcaaatacgtgatcgaatttgcgagtaccaaacctgccagcgaatcgtgtccacccgaaagcgatacccacatgaccttacccctcagctccgtccactgctctgtgtctgaccagactagcaaggagagtacctccaccgagtcgtcctctcaggacgtggaaagtacatttagctctcctgaggattcactgcctaagtccaaacctttgacttctagtcgcagctcaatggaaatgccatcacagccggctccacgaaccgtgactgacgaggaaatcaattttgtgaaaacatgcctacaacgttggagaagtgaaattgaacaggacattcaagatctcaagacgtgcattgcttcaacaacgcagactatcgaacagatgtactgtgatcctctcctccgtcaagttccctataggcttcacgctgtactggttcatgaaggacaggccaacgccggacactattgggcctatatctataatcagcctagacagagctggttgaagtacaatgacatttcggtgacagaaagcagttgggaagaggtggaaagggattcctatggtggattgcgtaatgtctcagcttactgtttgatgtatataaacgataagctgccttactttaatgcggaagcagcccctacagaaagtgatcaaatgagcgaggttgaagccctgagtgtcgagttgaagcactacatacaggaggacaactggcggttcgagcaagaagtggaggagtgggaagaagagcagtcctgcaaaattccacagatggaatcatcaacgaattctagcagccaggactacagcaccagccaggaaccatccgtggcgtcaagtcatggggtccggtgcttgagcagtgagcacgctgtgattgtgaaggagcagacagcacaggcaattgccaataccgctcgcgcttacgagaaatctggggtggaggcagctctgagcgaggcttttcacgaggagtattccagactgtaccagttggccaaggaaacacctacctcccattcagaccctagattacagcacgtccttgtctatttcttccagaatgaagcgcctaagagagtggtagaacgcactctgctggaacagtttgcagataaaaacctgtcttacgatgagcggtcgatatctattatgaaggtcgcccaggccaagctgaaagaaattgggcctgatgatatgaacatggaggaatataagaagtggcacgaagactattctctcttcagaaaagtcagcgtgtatctgctgacaggcctggagctgtatcagaagggcaaataccaagaggcactcagctatcttgtttatgcttaccagtccaacgccgctctgcttatgaaggggccaaggcggggtgtgaaggagtcggtaatcgcattatataggcgaaagtgtctgttggagctcaatgcgaaggcagccagcctgtttgaaacaaatgacgaccatagcgttacagaaggcatcaacgttatgaatgagctgattatcccctgcattcacctgatcattaataatgacatcagcaaggatgacctggatgcaatcgaagtgatgcgcaatcattggtgctcttatctgggccaggacatcgccgaaaacttacagctgtgtctgggtgagttcctccctaggctgttggacccatcagctgagattattgtactgaaggagccacccaccatcagacccaacagtccatacgacttatgcagcagattcgcagctgtgatggaaagcattcaaggtgtctctactgtcaccgtaaaatag

SEQ ID NO: 245980 - DNA, 1497 bp, synthetic construct
  misc_feature 1..1497: note = Description of Artificial Sequence: Synthetic coding sequence
  source 1..1497: mol_type = other DNA
atgcaaagccccccacacctggccgtatgtcgctccaataaatcaccctgggtctgcttaacctgtagctccgtgcattgtggcagatacgttaatggacatgccaagaagcactacgaggacgcacaggtgcccctcacaaatcacaaaaagagcgaaaaacaggacaaagtgcaacataccgtttgcatggattgttcttcctacagcacgtattgctatcgatgtgacgatttcgtggtgaatgatactaaattgggcctggtgcagaaggttagagagcatcttcaaaacctcgaaaatagcgccttcaccgccgatcggcacaagaagcgaaaactactggagaacagtacgctcaactcaaaactgttaaaggtgaacggtagtactacagccatatgcgccacgggacttcgcaatctcgggaatacatgctttatgaatgccattctgcagtctctatctaacattgagcagttctgctgttacttcaaagagctcccggctgtagaactgaggaatggcaaaacagcgggaaggcgaacctaccataccagatctcaaggggacaataacgtctctctggtagaagagttccgcaaaacgctttgtgcactctggcagggcagtcaaacagctttcagtcccgagtctctgttttatgtggtgtggaagattatgccaaattttcgcggttaccaacaacaggatgctcacgaatttatgcgatatctgttagaccatttgcacctggaactccaggggggttttaatggagtttcaagatccgcgatccttcaggagaatagtaccttgtccgccagtaataaatgctgtattaacggtgcgtcgactgtggtcaccgctatatttggtggaattctgcagaatgaggtcaactgccttatctgcgggaccgagtcaaggaagttcgatcccttccttgatttgtcactagatatcccgtcccagtttcgcagcaagaggtccaagaatcaggaaaatggtcctgtttgctcccttagggattgcctgcggagtttcacggatttggaggagctggatgagaccgagctgtacatgtgtcacaagtgtaagaaaaaacagaagtcaaccaaaaagttctggattcagaagctgccaaaagtactgtgcctgcaccttaagaggttccactggacagcctatctgaggaacaaggtcgacacctacgtcgagttcccacttagaggactggatatgaagtgctaccttttagagccggagaactctgggccagagagctgtttatatgatttggcagctgtcgttgtccatcacggaagcggggtgggaagcggacattacacagcttatgccacccacgaggggagatggttccactttaatgacagcacagtgactctgaccgatgaggagacagtcgtgaaggcaaaggcctatattctgttctatgtggagcatcaagcaaaagcaggcagtgacaaattatag

SEQ ID NO: 245981 - DNA, 1563 bp, synthetic construct
  misc_feature 1..1563: note = Description of Artificial Sequence: Synthetic coding sequence
  source 1..1563: mol_type = other DNA
atggagtgcccccacctatcctcaagcgtgtgcatcgccccagattcggccaagtttccaaacggatcacccagttcctggtgttgttccgtgtgcagatcaaataaaagcccctgggtctgtcttacttgctcctcagtgcactgtggcagatatgtaaatggccatgctaagaagcattatgaagatgcacaggtgccactaaccaaccacaaaaagagcgaaaagcaggataaggtgcaacacaccgtgtgcatggactgcagcagttactccacctattgctatagatgcgatgacttcgtcgtgaacgacaccaagctgggattagtacagaaggtaagggagcacttacaaaacctggaaaattctgcatttacagccgaccgacacaagaagaggaaactgcttgagaactccactctcaactcaaagctgctgaaagtaaacggcagtactaccgccatttgtgctacagggctgcgaaacttggggaacacttgcttcatgaatgccatcttgcagtcactgtccaatatcgagcaattctgctgctacttcaaggaattgcctgccgtggagctgcggaacggtaaaactgcgggtcgcagaacttaccatacaaggtcccagggggataataatgtcagtctggtggaggagtttcgcaaaacactatgtgccctatggcaagggagtcagacagccttcagcccggagtctctattttacgtcgtgtggaaaatcatgcccaacttcagaggctaccagcaacaggatgctcacgaatttatgcggtacctccttgaccacttacacctggagcttcaggggggatttaacggcgtgagccgttcggctatcttgcaagagaatagtactctatcggcatccaataaatgttgtatcaacggggcttctacggtggttactgcaatatttggtggtatcctgcagaatgaagtgaactgcctgatttgcgggaccgaatcacgcaaatttgacccgtttctggatttatctctcgatatacctagtcagttccgttcaaaaagatccaaaaatcaagaaaacgggccagtttgtagcctgcgtgattgcctgcgctcatttaccgatttggaggagctggatgagaccgagctctacatgtgtcataaatgcaaaaaaaagcagaaatctaccaagaagttttggatccagaagctgcccaaagtcctgtgcttgcatctaaaacgcttccattggacagcttacctgcgcaataaggtagacacctacgtcgagttcccactgcggggtctcgatatgaaatgttatttgttagaacccgaaaattcaggccctgaaagttgcttgtacgatttggctgccgtggtggtgcaccacggaagtggagtgggtagcgggcactatacagcctacgccacccacgagggacgctggtttcattttaatgacagcaccgttacgctcacagacgaggagaccgttgtgaaagccaaagcttatatcctattctatgtggagcaccaggcaaaggccggttccgataagctttag

SEQ ID NO: 245982 - DNA, 471 bp, synthetic construct
  misc_feature 1..471: note = Description of Artificial Sequence: Synthetic coding sequence
  source 1..471: mol_type = other DNA
atggaatgcccacacctgtcttccagcgtttgcatcgcacctgatagcgcgaagttcccaaatggctccccaagttcatggtgttgctccgtctgccgtagcaataagagcccctgggtctgcttaacctgtagcagtgtgcactgtggcaggtatgtcaacggccatgcaaagaagcattatgaagacgctcaagtgccgctcaccaatcataagaaatctgagaagcaggataaagttcagcacacagtgtgtatggactgtagttcttactcaacatactgctatcgatgtgacgatttcgtggtgaatgacactaagcttgggctcgtgcagaaggttcgtgagcatcttcagaatctggagaatagcgctttcacagccgaccggcacaagaagcgaaagctcctcgagaattctacactcaacagtaagctcctgaaggtgaacgtatttgggagacgagtgtag

SEQ ID NO: 245983 - DNA, 1071 bp, synthetic construct
  misc_feature 1..1071: note = Description of Artificial Sequence: Synthetic coding sequence
  source 1..1071: mol_type = other DNA
atggactgctcttcttactctacatattgctataggtgtgatgactttgtggtcaatgatacgaaactgggtctcgtccagaaagttagagaacacctccagaatctggaaaacagcgccttcaccgccgatagacacaagaagcggaaactgcttgagaattcgaccttaaactcgaaactcctgaaagtcaatgggtcgacgaccgctatatgtgcgactggcctgcgcaatctgggcaacacttgcttcatgaacgccattctccaaagtctctctaacattgagcagttttgctgctattttaaagagctgcccgctgttgagctgcggaatggtaaaactgctgggaggagaacataccacacaagaagccaaggggataataacgtttcactggtggaggagtttagaaagactctatgtgccctatggcagggatcacaaacagctttcagtccggagagcctattttacgtggtgtggaagatcatgccgaatttcagaggatatcagcagcaagatgcacacgaatttatgaggtatttgctggatcacctgcaccttgagctgcagggtggctttaatggcgtgtcccgctcagctatcttgcaggaaaacagcaccctgagtgccagcaacaaatgttgcattaacggggctagcacagttgtgacagccatttttggtgggatactgcagaacgaagtgaattgcctgatttgtggcaccgagagtcgcaaattcgatccttttctggaccttagtctggatatcccttcacaattcagatccaagaggagtaaaaatcaggaaaatggccctgtctgctctctgagagactgcctgcgcagtttcaccgatctcgaggagctagatgaaaccgagttatacatgtgccacaagtgtaaaaagaaacaaaaatcgactaagaaattctggatccagaaactgccgaaagtcctatgcctacatttgaagagatttcattggactgcctatttgcggaataaagtggacacatatgtggaatttccacttcggggtctggatatgaaatgctattattag

SEQ ID NO: 245984 - DNA, 816 bp, synthetic construct
  misc_feature 1..816: note = Description of Artificial Sequence: Synthetic coding sequence
  source 1..816: mol_type = other DNA
atgcccaactttagaggataccaacagcaggacgcccacgagttcatgagatacctattggaccatctgcacctggaacttcagggtggatttaacggggtatccaggtccgctatcctccaggagaactcaacattatcagcttccaacaaatgctgtattaatggcgcttcgaccgtggtgactgctatcttcgggggtattctccagaacgaagttaattgtctcatctgcgggaccgaaagcaggaagttcgatcccttcttggatctaagcctggacatcccttcccagttccgctctaagaggtcaaagaaccaggaaaatggtcccgtgtgctccttgagggactgtttgagatcctttacagaccttgaggaactggatgaaaccgagctgtacatgtgtcataaatgcaagaaaaagcaaaaatctacaaagaaattctggattcaaaagctgcccaaagttttgtgcctgcacttgaagcgcttccattggacagcctatttgcgtaataaagtggatacctacgtagagttccctctaaggggcttggatatgaaatgttacctgctcgaaccagagaactcaggcccagagagttgtctatatgatctcgccgctgtggttgtgcatcatgggtccggggtcgggtctggccattatacagcctatgcaactcacgaaggacggtggttccatttcaatgattccactgtgaccctgactgatgaggagactgtggtgaaagcaaaagcctacatcttgttttacgtggagcaccaggctaaggccggatccgataaactgtag

SEQ ID NO: 245985 - DNA, 1431 bp, synthetic construct
  misc_feature 1..1431: note = Description of Artificial Sequence: Synthetic coding sequence
  source 1..1431: mol_type = other DNA
atggaatgtccccacctgtctagctccgtgtgtatagcccctgattcagctaagtttcctaatgggagtccgagctcctggtgttgttcagtgtgccgatccaataagtccccctgggtgtgcctgacttgtagctccgttcactgtggatcctacagatgtgatgacttcgtggtgaacgacaccaagcttggcctggtacagaaagtgcgagaacatctccagaacctcgagaattccgcctttaccgccgatcggcacaagaagcgaaaactcctggagaattcaactctgaatagcaaactactgaaagtgaatggctccactaccgctatctgtgctactgggctccgcaaccttgggaacacctgctttatgaacgctatcctgcagtctctgtccaacatcgaacagttctgttgttatttcaaggaactgcccgctgtggaactgcggaatggaaagactgcaggacgtaggacatatcacacccgttctcagggcgataataacgtcagcttagttgaggaattccgcaagaccttatgtgctctctggcaaggctcgcaaacagctttctctccagagtctttattttatgtggtctggaaaattatgccaaatttcagggggtaccagcagcaggatgcccacgaattcatgaggtatttgctggatcatctgcacctggagctgcaaggcggatttaacggagtgtctcgttccgccatcctgcaggagaactcgacattgagtgctagcaacaaatgttgcattaacggggcaagtaccgtggtcacagcaattttcggtgggattctgcagaacgaggtaaattgtctgatctgcggaactgagtccagaaagtttgacccctttctggatttatcactcgacattccgagtcagttcaggagtaaacgctctaaaaaccaagaaaacggccctgtgtgttctctcagagattgcctccgatcattcactgatctggaagagctggatgaaacggagctttacatgtgccacaagtgtaaaaaaaaacaaaaaagcaccaaaaaattctggattcagaagctccccaaagtcttatgcctacatttgaagcggttccactggaccgcttacttgaggaataaggtcgacacgtacgtagagtttccgctgagaggcctggacatgaagtgttacctgctagaacctgagaacagcggccctgagtcttgtctttatgatctggcagcagtagttgtgcaccacggaagtggtgtgggctccgggcattacactgcgtacgctacgcatgaaggaagatggttccacttcaacgactccaccgtcaccctaaccgatgaggaaacagttgtgaaggcaaaggcatacatcctgttctacgtagaacatcaggctaaggccggttctgataaattgtag

SEQ ID NO: 245986 - DNA, 168 bp, synthetic construct
  misc_feature 1..168: note = Description of Artificial Sequence: Synthetic coding sequence
  source 1..168: mol_type = other DNA
atggagtgtcctcatctatcatcttcggtgtgcattgcccctgattctgccaagttccctaacggaagtccctcctcctggtgctgttcagtgtgcagatcaaataaatctccttgggtctgtctcacctgtagctccgtacattgtggacggatttggggtacctag

SEQ ID NO: 245987 - DNA, 1554 bp, synthetic construct
  misc_feature 1..1554: note = Description of Artificial Sequence: Synthetic coding sequence
  source 1..1554: mol_type = other DNA
atgctatcgtccagagccgaggccgctatgaccgccgctgatagagccattcagcgctttcttcggactggtgccgctgtccggtacaaagtgatgaagaattggggagttatcggaggaatcgccgctgcactagccgcaggcatatacgtgatctggggcccaatcacggagagaaaaaagcgaagaaagggactggttccagggctcgtcaatctggggaatacctgctttatgaactccctactgcagggtttgagcgcatgcccagcatttatccggtggcttgaggaattcacaagccagtattctagggaccagaaagagccaccttcgcaccagtatttgagtctaactcttctccacctactgaaggcccttagctgccaggaagtgacagatgacgaagtgctggacgcgagttgtctattagatgttctgcgtatgtataggtggcagatttcatctttcgaagaacaggacgcccacgaactgtttcatgtgataaccagtagcctggaggatgagcgggaccgccagccacgcgtaacacatctcttcgacgtgcatagcctggaacaacagagtgaaataaccccgaagcagatcacatgcagaacccgcggatcgccccatcccacctctaaccactggaagtcacagcaccctttccacggcaggctgaccagcaatatggtctgcaagcactgcgagcaccagtcgccggtcaggttcgatacattcgatagcctgagcttgtctatacctgctgctacctggggccaccccctgacgctggaccattgcttacaccattttataagctccgaatcggtgcgggacgttgtgtgcgacaactgtacaaagatcgaggccaaaggcaccctgaatggcgagaaggtggagcatcagaggacgacgtttgtgaaacagctaaaactgggaaagctgcctcagtgtctgtgcatccacttgcagcgactaagctggtcatctcacggaacaccgttgaagagacacgagcacgtgcagtttaatgagtttctgatgatggacatttataaatatcatttgctgggtcacaagcctagtcagcataacccgaaactgaacaaaaatccagggcctactttagaactgcaagatggccctggagcccctacccctgttcttaaccagcctggggcaccaaagacacagatcttcatgaacggggcatgttcacccagcttactgcccacgttaagtgctcctatgccctttcctcttcccgtggtccctgactacagcagctctacctatctttttagactgatggccgtggtcgtgcaccacggagatatgcactcagggcacttcgtgacctacaggcgctccccacccagcgcccgaaaccccctgtccacctctaaccagtggctctgggtgtcggatgatactgtgcggaaggcgtctctccaggaagtgcttagttcctccgcctacctcctcttctatgagcgggtgcttagtcgcatgcagcaccaaagccaagaatgcaagtcagaagagtag

SEQ ID NO: 245988 - DNA, 4814 bp, synthetic construct
  misc_feature 1..4814: note = Description of Artificial Sequence: Synthetic coding sequence
  source 1..4814: mol_type = other DNA
atgggagccaaggaatcgcgtattggttttctgtcttacgaagaagcattgcgcagggtcaccgatgtggagcttaaacgtctgaaagacgctttcaagagaacatgcgggctgagttattatatgggtcagcactgcttcattagggaggtgctgggggacggagtcccaccgaaggtcgctgaagtgatctactgtagtttcgggggaacaagtaaaggccttcacttcaacaacctgatcgtaggactcgtgctcttaaccagagggaaggacgaggagaaagcgaaatacatctttagcctgttttcctccgagagcggtaactacgtgatcagggaggagatggagagaatgctgcatgtcgtagacggcaaggtccctgacaccttgaggaaatgtttctcggaaggggaaaaggtaaattatgaaaagttccggaattggttgtttctgaataaggatgcctttaccttctctcgttggctcctttctgggggtgtctatgtaactctgactgacgactccgacactcccaccttttaccaaaccctggccggagtaacccatctcgaggaatcagacatcatagacctagagaagaggtactggcttctgaaggcacagagtaggaccggtcgcttcgacttagaaaccttcggcccacttgtcagtccccctatcaggccatctctctcagaggggcttttcaacgcctttgatgaaaatcgggacaaccacatcgactttaaagagatttcctgcggtctgtccgcatgttgcagaggaccactagcagaaaggcagaagttttgctttaaggtattcgacgtcgatcgtgatggagtgctgtcccgcgttgagcttagggacatggttgtggccctgcttgaagtatggaaagacaacaggacagacgacatcccagaactgcatatggatctttctgacatcgtcgagggcatcctgaatgctcatgacactacaaaaatgggccacctgaccctcgaagattaccaaatctggtccgtcaagaacgtgctcgccaatgagtttctgaatcttctcttccaagtttgccacatcgtgctgggactccgcccagcaactccagaagaggaagggcaaataattagaggctggctggagcgagagagcaggtacggccttcaagctggccacaactggttcatcatttctatgcagtggtggcagcagtggaaagaatacgtcaagtacgatgccaaccccgtggtgattgaaccttcgtccgttcttaatggtggcaaatatagtttcggaaccgcagcccatcccatggagcaggtagaagatcggattggctcctctctcagttacgtcaacacaacagaagaaaaattttctgacaacatcagcaccgcaagtgaggcatctgaaaccgccggtagcggcttcctgtatagtgctactcccggtgccgacgtgtgcttcgcccgacagcataacacttcagataacaataaccagtgccttctgggcgcaaatggcaacattttgttacacctgaacccgcagaaacccggtgctatcgacaaccagccgcttgttacccaagagccggtgaaggcaacatctctgacactggaaggaggcaggcttaaaagaaccccccagcttatacatggcagagattacgagatggtgcccgagcccgtgtggcgagcattatatcattggtacggcgctaatcttgcccttccccgacctgtcattaaaaactcaaagacagacattcctgagctggaattgttccctcgctatctgctctttctgagacagcagcctgcaacgcgaacccaacagtcaaatatctgggtgaacatggggaacgtcccctcacctaatgctccactgaaacgcgtactcgcctacactggttgctttagtcgaatgcagactatcaaagagatccacgaatacctgtcacagagattaagaatcaaagaagaagatatgaggctttggctctacaatagtgagaattatctcacactgctggacgatgaagaccacaaactggaatatctgaaaattcaggacgagcagcatctggtaatcgaggtgcgaaacaaagacatgtcctggcccgaggaaatgtccttcattgcaaatagctctaagatcgacaggcacaaggtccctacggagaagggtgcgaccgggctttctaacctgggcaacacctgttttatgaacagctctattcagtgtgtctcaaatacccagccattaacacagtatttcatctctgggcgacatctgtatgagctcaaccgcacaaatccgatagggatgaaaggtcatatggctaaatgttacggagacctcgtgcaggaactttggagtggaacgcagaagaacgtggctcccctgaagctgagatggacaattgctaagtatgctcctcgtttcaatggcttccaacagcaggatagccaggagcttctagcatttctcctcgacggcttacacgaagaccttaatagagtgcatgaaaaaccctacgttgagctcaaagattctgacgggcgacccgattgggaagttgccgcagaggcctgggataaccatctccgacgaaaccggagtattgtggtagatctgttccacggccagctgagatcacaggtgaagtgcaagacgtgcggacatatctcagttcgcttcgatcctttcaatttcttgtcactgcctttgcctatggactcttacatgcatcttgagatcaccgttatcaagcttgatggcactacaccggtaagatacggcttgcgtttaaacatggatgaaaaatataccgggctcaaaaagcagctttccgacctttgcgggctgaatagcgaacaaatcctcttggcagaggtgcatggcagtaatataaaaaatttcccccaggacaaccagaaagtcaggctgtccgtttctggctttctatgtgccttcgagatccctgtgccagtcagccctatttccgcatcatcccctactcagactgacttctcctcttcaccctccactaatgaaatgttcaccctgactaccaacggagatctgccacggccaatctttataccaaatgggatgccaaatactgtggttccttgtggcacggagaagaacttcacaaacggcatggtaaatggccatatgccttccctgccagacagcccattcaccggttatattatcgctgtccaccgcaagatgatgaggaccgagctgtattttctgtccagccagaaaaaccgaccctctttatttggaatgcccttaatcgtaccttgcacagtccacacccgcaagaaggacttgtacgatgccgtgtggatacaggtttctagacttgcctcgccactccccccacaggaagcctccaaccatgcccaggattgtgatgattcaatgggctatcagtaccctttcaccctgcgcgtcgtgcaaaaggacggtaatagttgcgcctggtgcccttggtaccggttctgcagagggtgcaaaatcgattgcggagaagatcgggcttttatcggcaacgcctatatcgctgtggattgggatccaactgcattgcatctgcgctaccagacttcccaggagcgggtagtggacgaacacgagtccgtggagcagtccaggcgggcacaagccgaaccaatcaatctcgacagctgtctaagggcctttacatcagaggaggagcttggggaaaatgagatgtactattgctcgaagtgtaagacccactgcctcgcaacaaaaaagctggacctctggcgtcttcctccgatcctgatcatacatctcaagcgcttccagtttgttaatggtagatggattaagagtcagaagattgtaaagttccccagggaaagttttgatccaagcgcttttctcgtgccacgagacccagccctttgccaacacaaaccgctcaccccccaaggcgacgagttgtccgaaccgagaatcctggccagagaggtgaagaaggtcgacgctcagagtagcgcaggcgaagaggatgttcttttgagcaagtctccctctagtttgtccgccaacatcatcagctcaccgaaaggctcccccagttcatcacgcaagtctggaacgtcttgtccatcttcaaaaaactcatccccgaacagttcccccagaaccctcgggcgttcaaaaggaaggctcaggctgccacagatcggatccaaaaacaagctcagttcctccaaagaaaatctggacgcctctaaagaaaatggcgcagggcagatttgcgagctggccgacgcgctttcacgcggtcatgtcctgggaggcagccagcctgagcttgtgaccccacaggaccacgaagtggctttagctaatggtttcctatacgagcatgaggcttgcggcaacggttattcaaacggtcagctgggtaaccattctgaggaagactcaacagacgaccagagggaggacacccggatcaagccaatatacaacctttacgcgatttcttgccacagtggtatcctgggcggtggccattacgttacctacgctaagaatccgaattgcaagtggtactgttacaacgactcaagctgtaaggaactgcatccagacgagatcgatacagactccgcttacatactgttctatgaacaacagggaatcgattatgcgcagttccttccaaagaccgacggaaagaaaatggctgacacaagctccatggacgaggattttgagtctgactataaaaaatactgcgtacttcagta

SEQ ID NO: 245989 - DNA, 1173 bp, synthetic construct
  misc_feature 1..1173: note = Description of Artificial Sequence: Synthetic coding sequence
  source 1..1173: mol_type = other DNA
atgggagccaaagagagtcggatcgggttcttgtcatatgaggaagcactgcggagggtcactgatgtggaactgaagcggctaaaggatgcatttaagcgaacctgcggcctttcatactacatgggtcagcattgcttcatacgcgaagtgctaggagacggggtgccccctaaggtcgccgaggtcatttactgttctttcggaggcacgagtaagggcctccacttcaacaacctgatagtcgggctcgtgcttctgacaaggggcaaagatgaggagaaggccaaatacatctttagtttgttcagctctgaaagtggcaactacgtgatcagagaggagatggagcgtatgctgcacgtcgtggacggcaaagtaccggacacgctgcggaagtgtttcagtgagggcgagaaggtgaattacgaaaaattcagaaattggctgtttctcaataaggacgccttcaccttttcccggtggctactgagcggtggtgtgtacgtgaccctgaccgatgacagtgatacaccaacgttttatcagaccctggctggggtgacgcatctagaggagtctgatatcatcgaccttgagaagcggtactggttgctgaaggctcagtcacggactggccgattcgatcttgagaccttcggccctcttgtgtcaccaccaatcaggccaagcttaagtgaggggctgttcaatgcatttgacgaaaaccgagacaaccatatcgactttaaggaaatatcatgcggactgtcggcatgctgtcggggacccctggcagagcgccagaagttttgctttaaggtgtttgacgtggacagagatggcgtcctgagcagggttgagctgagagacatggttgtggctctgctggaggtatggaaggataaccgaacggatgatattccagaactccacatggatctgagcgatatcgtcgagggaatcctgaacgcacatgatacaaccaaaatgggccaccttacgcttgaagactaccagatttggtcagtcaagaatgtattggccaatgaattcctgaatctgctatttcaggtctgccacatcgttttgggcctgcgtcctgccacaccagaagaggaaggtcagattattaggaccttagaaactgaccaaatctacactaggaactag

SEQ ID NO: 245990 - DNA, 3372 bp, synthetic construct
  misc_feature 1..3372: note = Description of Artificial Sequence: Synthetic coding sequence
  source 1..3372: mol_type = other DNA
atgccaatagtggataaactcaaggaggcactaaagccgggaaggaaagacagcgcggacgacggggagctggggaagctgttggcctcctctgcgaagaaagtactactgcaaaaaattgagtttgaaccagcctccaagtcattcagttatcagcttgaggcgctgaagtccaaatatgtcctccttaaccccaaaaccgaaggggcatctcgtcacaaatctggcgacgaccctccggcaagacgtcaggggtccgaacatacttacgagagttgtggggacggagtacctgctccacagaaagttttgttccccacggagagattgagcctcaggtgggaaagggtcttcagagtgggcgcaggtttgcacaacctgggtaatacttgttttctcaacgctaccatccagtgcctgacctacactccaccccttgcaaattatctgctcagcaaagaacatgctagatcgtgccaccagggatccttttgcatgctctgcgtgatgcagaaccatatcgtacaggcttttgcaaattcgggaaacgccatcaagcccgtgagttttatacgcgatctcaaaaagatcgctagacacttccgatttggaaatcaggaggatgctcacgagttcctgcgttacacaattgatgcaatgcagaaggcttgtctgaatggctgtgctaaactggaccgccagacccaggccactaccttagtccaccagatttttggcggataccttcggtcgcgcgtgaagtgtagcgtgtgcaagtcagtctcagacacatacgatccctacctggacgtcgcactggagattagacaagcggctaacatcgtgcgggcacttgaactttttgtaaaggccgacgttcttagcggagaaaacgcatatatgtgtgccaagtgcaagaagaaagtgccagccagcaagcggtttacgatccaccggacgagcaatgtgctcactctgtccctcaagagattcgccaattttagtggcggaaagattacaaaggatgtcggttatccagagttcctgaacatccgtccttacatgtctcagaacaatggagatccagtaatgtacgggctttacgcagttcttgtgcacagcggttactcatgccatgctggtcactactactgttacgttaaagcctccaacggccagtggtatcaaatgaatgacagtctagtacattccagcaacgttaaagtggtcctgaaccagcaggcttatgtcctcttctacctgcgcatacctggatccaaaaagtccccagaagggttgatctctcggaccgggagttcttcacttccagggagaccaagtgtgattcccgaccactctaaaaagaacattgggaatggcatcatttctagccccctgacgggaaaaagacaggacagtgggacaatgaagaaaccacacactacagaagaaataggcgtgcccatctcccggaacggctcgacgctgggtttgaaaagccagaatggttgcatcccccctaagctgccctcaggttcgccatctcctaaactcagccagacaccaacacacatgccgacaatcttggacgacccaggaaaaaaggtcaagaaaccagcaccccctcagcatttttcaccgcgaaccgcccagggtctccctggcactagcaactccaattcctcccgttctggtagccaaagacagggcagttgggactccagagatgtggtcctgtcgaccagtccaaagctccttgctaccgcaacagccaacgggcacggactgaagggcaacgatgagtctgctggcctcgaccgccgagggtcgagctctagctctcctgaacattcagcgtcctccgactccactaaggcacctcagacccctcgatccggggctgctcacctatgtgactctcaggaaaccaattgctctactgcaggccacagcaaaaccccgcctagtggtgccgatagtaagaccgtgaagctgaagtctcctgtcttgtcaaatacaactaccgagcccgctagcacaatgtccccaccaccagctaagaaattggccttgtccgcgaagaaagccagcactctgtggcgcgcaaccggcaacgacctcaggcctcctccaccaagccctagtagtgatctcacccaccccatgaagacctcacacccagtcgtggccagtacctggccagttcatcgggctcgggcagtgtcccctgctccacagagtagttccaggcttcagcccccattttccccccatcctactttgctgagctcaacccctaagcccccagggacatcagagccgcgttcttgtagctcaattagtaccgccctcccgcaggtgaacgaggacttggtctctctcccccaccagctcccagaagcttctgagccaccccagagcccctctgaaaaaagaaagaagacttttgttggggaaccccagagacttgggtccgagacacgtctcccccagcacatcagagaagccacggcagcccctcatggtaaacgaaaacgtaaaaagaagaagagacccgaagacaccgcagcaagcgccctacaggaaggacaaactcagaggcagccagggtctccaatgtataggcgagaagggcaggctcaattgccagctgtcaggaggcaggaagatggtacacaaccacaggtgaacggacagcaggttggctgcgtgaccgacgggcatcatgccagtagcaggaaacggcgacgtaaaggcgcagaaggtttgggagaggaaggcggtctccatcaggacccgttgcgacatagctgttcccctatgggagacggcgacccggaggcgatggaagagagcccccgtaagaagaagaaaaaaaagcgaaaacaggagacgcaaagggcagttgaggaggacgggcaccttaaatgtcccaggtcagccaaacctcaggatgccgtggttcctgaatcgtcatcatgtgcaccgagtgctaatggctggtgccccggagatagaatggggctgtcgcaagcaccacccgtatcatggaatggtgagcgtgagagtgacgtggtccaggaacttctcaagtattccagcgataaggcctatggcagaaaggttcttacctgggacggaaagatgtctgcggttagccaagacgccattgaggactcgcggcaggccaggacggagaccgtggttgacgactgggatgaggaatttgacagaggcaaggagaaaaaaataaaaaagttcaagcgggagaagagacggaacttcaatgccttccaaaaactgcagacccgacgcaacttttggagcgtcactcacccagccaaagcagcttcactgtcatatcgccgatag

SEQ ID NO: 245991 - DNA, 1647 bp, synthetic construct
  misc_feature 1..1647: note = Description of Artificial Sequence: Synthetic coding sequence
  source 1..1647: mol_type = other DNA
atgccaatcgtggataaactcaaagaggcattgaaacccggtaggaaggactccgctgacgacggcgaacttgggaagctgctggcttcaagcgccaagaaggttctgctgcagaagatcgaattcgaacccgcatccaagtcgttctcctaccagctcgaggcgctgaaatcaaaatatgtcctcttgaacccaaagacagaaggtgcaagccgacacaagagtggcgacgaccctcccgcacgtcgccagggatcagagcatacctatgagtcatgtggagacggggttcccgctcctcaaaaagtgctgttccctactgaacgcttatcccttcgatgggaaagagtttttcgcgtgggagccggactccacaacttaggaaacacatgttttttaaacgctactatacagtgcctcacttatactcctccgctcgctaactatctcttaagtaaagagcatgctcgatcgtgtcaccaggggtcgttttgtatgctttgcgttatgcaaaaccacatagtgcaagcattcgccaatagtggaaacgcaatcaagccggtcagtttcatcagagacttgaaaaagatcgcgagacactttcgattcgggaatcaggaagacgcccacgagttcctccggtatacaatcgacgctatgcagaaggcatgtctgaacgggtgtgcgaaattagacaggcaaacccaggccacaaccctagttcaccagatctttggagggtaccttaggtctagggtgaagtgtagcgtgtgcaagtccgtgtccgacacgtacgatccatatttggatgtagccctcgaaattcgacaagcagcaaatattgtgagggcacttgaactcttcgtcaaggccgacgtgctctccggcgagaacgcctacatgtgcgccaaatgcaaaaaaaaagtcccagcaagcaaacgtttcaccatccatagaacctccaatgtgctgacactctctctgaaacggttcgcgaactttagtggcggaaagattacgaaggacgttggctatcccgaatttcttaacatcagaccctacatgtcccagaataatggcgaccctgtcatgtatgggctctatgctgtcctcgtgcacagcggctatagttgccacgccggacactattattgttatgttaaagcgagtaacggacagtggtaccagatgaatgattcattagtgcactctagtaacgtcaaggtggtccttaatcagcaggcttacgtgctattctacctgagaattccgggttcaaaaaaatcacccgaaggcctgatttctagaacaggaagctctagtctccctggacgcccatctgtaattcctgaccattccaagaagaacatcggcaatggcatcattagctctccgctgacgggaaaaagacaagactccgggactatgaagaagccccacaccaccgaagagatcggggtcccaatcagtcggaatggatccactctggggctaaaatcacagaacggttgcatacctccaaaacttccatccgggtcacccagtcccaaactcagccaaacgccaacccatatgcctactatactcgatgatccaggtaaaaaagtaaaaaaaccggctccccctctgcccacaggaatggggtag

SEQ ID NO: 245992 - DNA, 2187 bp, synthetic construct
  misc_feature 1..2187: note = Description of Artificial Sequence: Synthetic coding sequence
  source 1..2187: mol_type = other DNA
atgtgcgcaaaatgcaagaagaaggtgccggcaagcaaaaggttcacgattcacagaacatcaaacgtcctgacccttagcttaaagagatttgctaatttctctggcggaaaaataaccaaagatgtggggtatccggagttcctcaacatacgaccctatatgagtcagaataatggcgaccccgtcatgtatggtctgtatgcagttctggttcactcaggctactcctgccacgctggacactactattgctacgtgaaggccagcaatgggcagtggtatcaaatgaatgatagtctcgttcactcatctaatgttaaggtcgtgttaaatcaacaggcatatgtactgttttatctgaggattccaggtagcaaaaagagcccagaaggcctcatttctcgcaccggtagctctagcttaccaggcagaccgtccgtcattccagaccattctaaaaagaatataggaaacggaataatttcctctccactgacaggcaagcgtcaggacagcggaaccatgaagaaaccccatacaaccgaggaaattggtgtgccaatttcacgtaacggatctaccctgggactgaagtcacagaacggatgtatcccaccgaaattgccctccggatcccccagccccaaactgtcacagacacctacccatatgcccactatcctcgatgaccccggaaagaaagtgaaaaaaccagctcccccacaacacttttcacctaggacagcccagggcttgcccggtacatcaaactcgaactcatctcgaagtggctcacagcgccagggatcctgggattccagagacgtagtactgagcacatccccaaagctgttggcaacggcaacagccaacggacatggcctgaaaggaaacgatgagagcgcgggattggacagaaggggcagctcgtcttcaagcccagaacatagtgcctcttccgattcgaccaaggcccctcagaccccaagatctggggcagcccacctgtgtgattcccaggagaccaactgtagcacagctggtcactcaaagaccccgccatcaggcgcagattctaagacagttaaattaaagtcacccgttcttagcaatacaactacagagcctgcttcgacaatgagtccaccgcctgccaagaagctggcattatctgccaaaaaagcttctaccctttggcgagccacagggaatgatttgaggccacctcctccttcaccctcgtcagatttgactcaccccatgaagacttcacatccagtggtcgcttcaacgtggcccgtccaccgcgctcgagctgtgagccccgctccccaaagttcctcccgattgcagccccctttcagcccacaccccaccgcggcttctgcactgcaagaaggtcagacccagaggcagcccggaagccccatgtatcgcagagaaggacaagcgcaactccccgcagtccggagacaggaagatggaacccagccccaggtgaatggacagcaggtgggatgcgtgaccgacggacaccatgcgagtagcaggaagcgcaggaggaagggcgctgaggggctaggggaagagggaggactgcaccaggatcctctgcgccactcttgctcccccatgggcgatggcgaccctgaagctatggaagagtcaccacggaagaaaaagaagaaaaaacgcaaacaagagactcaaagggcagtggaagaagatggccatttgaaatgcccacgctccgccaagccgcaagatgccgtggtccctgagtcctcctcctgtgcccctagtgctaacgggtggtgtcctggggatcggatgggcttatcccaggctccccctgttagctggaacggggagcgagaatccgatgtggttcaagagcttttgaagtactcctctgataaggcgtacggtaggaaggtactcacctgggacggaaaaatgagcgccgttagccaggatgctattgaggattcacgacaagcacggaccgagactgtggttgacgattgggatgaggagttcgacagaggtaaagagaagaagataaaaaagttcaaaagagaaaagcgcaggaacttcaatgcctttcagaaactgcagactaggaggaacttctggagcgtgacccaccctgccaaagccgctagcctttcctatcgaagatag

SEQ ID NO: 245993 - DNA, 3372 bp, synthetic construct
  misc_feature 1..3372: note = Description of Artificial Sequence: Synthetic coding sequence
  source 1..3372: mol_type = other DNA
atgcctatagtcgacaagttgaaggaagcactgaaaccgggaaggaaggattctgctgacgatggagagctgggcaagcttctagcttcctccgccaagaaggtgctgttacaaaagatcgaatttgagcctgcctccaaaagtttttcgtaccagctggaagctctaaagtcgaagtacgtgctgctaaatcccaaaactgagggtgcgtcacggcacaaatcaggcgacgatccacccgcacgcagacagggctccgagcatacctacgagagctgcggcgatggtgtgccagcgccacagaaggttttgtttcctacagagcggttgtcccttcgatgggaacgggtgttcagagtgggagcagggctgcacaatttaggtaatacttgctttctcaacgctaccatacaatgtctcacctatacaccccctctggctaactatctgctgagcaaagagcatgccaggtcctgccatcagggctcattttgcatgctttgcgtgatgcagaaccacattgtgcaggcatttgccaacagtggaaatgcaatcaagccagtgtcctttattcgggatctgaagaagattgctcggcactttcgatttggaaatcaggaggacgctcacgagtttctccggtatacaatcgatgcaatgcagaaagcctgccttaatggctgcgctaaactggaccgacagacgcaggccaccaccctagtacatcagatttttggaggttatttgcgctcccgcgtgaaatgtagcgtgtgcaagtcggtgtcagatacctacgatccgtatctggacgtggccctggaaatccggcaggcagccaacatcgtgcgagccctcgagctgttcgtgaaggctgatgtactctccggggagaacgcgtatatgtgtgccaagtgtaagaagaaggtccccgctagcaagagattcacgattcacaggacaagcaatgtgctgacactgtcactgaagcgattcgctaatttcagcggtggaaaaattaccaaggacgtgggataccctgagttcttaaacatcaggccgtacatgtcgcaaaacaatggtgaccccgtgatgtacggtctctatgctgtcctcgttcactctggctatagttgccatgccggtcattattactgttacgtgaaagcgagcaacgggcagtggtatcagatgaatgactctctagtgcatagttcaaacgtcaaagttgtgctcaaccaacaggcatatgtgttgttctacttgaggatcccaggtagtaagaaatcccctgagggccttattagcagaactggttcgtcaagcctccctgggcgtccgtcggttatccccgatcatagcaaaaaaaacatcggaaacggtatcatttctagcccgctaaccggcaagcggcaggactcgggcaccatgaagaagccacacacaacagaggagatcggcgtgcccatctcaaggaacgggagtactttgggactgaaaagtcagaacgggtgtatccctcccaaactgccgagcgggagcccaagccccaaactctcacagacacccacccatatgcccacaatcctagacgaccctgggaaaaaagtcaagaagccagcccctccacaacactttagccccagaacggcacagggactcccgggaacttccaacagtaattcttcaagatctggtagtcagcgacagggttcctgggactcccgtgatgtggtcttaagtaccagtccgaagctgcttgcaaccgccactgctaacggccacggtttaaagggtaacgacgagtccgccggtttggaccgtagaggctctagctcttcgtctccagaacattccgctagttcagactcaacaaaggccccacagacacccaggagtggcgcagcccatttgtgcgactctcaggaaacgaactgttctaccgcaggacacagcaaaacccctcccagcggtgccgactccaagaccgttaagttaaagtcccccgtgctgtctaatacaacaaccgaaccagcttccaccatgtcacctcctccagccaaaaaactcgcactgagtgcgaaaaaagcttccactctgtggagggccaccggcaacgaccttagacctcccccacccagtccttcatccgacctgactcaccctatgaagacatcccatccagtggtggctagcacctggcccgtacaccgggctcgggcagtatcgcccgcaccccagagttcaagcaggttgcagccgccattcagcccccaccccacactgttaagctcgacacctaagcccccaggcacctccgaacctaggagttgcagctcaatctcaaccgcgctgccccaggttaatgaagaccttgtatccctgccccaccagctgcctgaggcctcggagccaccccagagtccctccgaaaagaggaagaagacctttgtcggcgagccgcagcgattgggcagcgagactaggctcccacagcatataagagaagccaccgctgccccacacggaaaaagaaagcgaaaaaagaagaaacggccagaggacaccgcagcatccgcactgcaggagggccagacacagcgtcagcccggatctcccatgtatcggagagagggccaggctcagctccccgctgtgaggcgccaagaggacgggacacagccccaggtcaacggacagcaggtgggatgcgttaccgacgggcaccatgctagtagtcgaaaacgcagaaggaagggagcggaagggctcggggaggagggtggactgcaccaagaccccctccgacattcgtgctcccccatgggagacggggatcccgaggcgatggaggagtctccaaggaagaaaaagaagaaaaagagaaaacaggagacccagcgcgcagttgaagaggacggacacttgaagtgcccccgttctgccaagcctcaggacgcagtggttccggaatcctcctcatgtgcaccctccgcgaatgggtggtgcccaggggacagaatggggctgtcacaagctccgcctgttagttggaacggggaacgagagagcgatgtggtccaggagttgctcaagtatagctcggacaaggcttacggacgcaaagtgctgacctgggacggcaagatgtccgccgtcagtcaagatgccattgaggattccagacaagctagaacagaaacggtggtggatgattgggacgaggaattcgatagagggaaagagaaaaagatcaaaaagttcaagcgggaaaagcggagaaacttcaacgcattccaaaagcttcagacccgcagaaacttctggagtgtaacacaccccgctaaagccgcatctctgagctacagacggtag

SEQ ID NO: 245994 - DNA, 1698 bp, synthetic construct
  misc_feature 1..1698: note = Description of Artificial Sequence: Synthetic coding sequence
  source 1..1698: mol_type = other DNA
atgtctgggagaagtaagcgtgagagcaggggcagtacaagggggaaacgcgaatctgaatcccgcggtagtagcggccgagtgaagagggagcgcgacagggaaagagaacccgaagccgcttcaagcaggggtagtccagtacgggtcaagcgcgaattcgaaccggcaagcgctagggaagcacctgcatctgtggtaccctttgttcgggttaagcgtgagcgtgaggtagatgaagactccgagccagaaagagaggtccgcgcaaagaacggcagagttgatagcgaagaccggagatcgcggcactgtccatacctggatactattaaccgatctgttcttgacttcgattttgaaaagctgtgtagcatctccctctctcacattaacgcctatgcttgcttggtctgtgggaagtattttcagggtagaggacttaagtcccacgcgtacatccatagcgtgcagttcagtcaccatgtgttcctcaacctacataccctgaaattctattgtctgcctgataattacgagatcatagatagctctctggaggatattacctacgttctaaagccaacattcaccaagcagcagattgcaaatcttgacaaacaggcgaaactcagccgagcctacgacggaaccacctacctgcctggaatagtgggcctgaacaatataaaggccaatgactatgccaatgctgtcttacaggccctgtcgaacgttccaccccttcgtaattactttcttgaagaggacaactacaagaacatcaaacgcccacctggagatatcatgttcctgctggtgcagcggtttggcgagctcatgcgcaaactgtggaatcccagaaacttcaaagctcatgtgagtccgcatgaaatgttgcaggctgtggtcctttgtagcaagaagacgttccaaatcacaaagcagggggacggcgtagactttctatcatggttcttgaacgcactgcactccgccctcgggggtacgaaaaaaaagaagaagactattgtgacggacgtgttccagggaagtatgagaatcttcaccaaaaagctgccccatccagatcttcccgctgaagagaaggaacagctgctgcacaacgacgaatatcaagagactatggtagaaagcacattcatgtatctaacgctggatctccctacagctcccctctacaaggatgagaaagagcagctcatcattccccaggtgccgctgttcaacatactagccaaattcaacggcattactgagaaagagtacaagacctacaaagaaaacttcctaaagcgctttcagctgacaaaattacctccatacctgatcttttgtattaaaagatttaccaagaataactttttcgtggaaaaaaatcccaccatagtgaacttcccaatcacgaacgtcgatctgcgtgagtacctcagcgaagaggtacaggcggtccataagaataccacttatgacctcattgccaatatcgtccacgacggaaagccgagtgaggggtcttatagaatacacgttctgcaccacggcactggcaaatggtatgagctgcaggatctgcaagtaaccgatatcctaccccagatgattactttgtctgaagcatatatccagatctggaagcgacgagacaatgatgagacaaatcaacaaggagcctag

SEQ ID NO: 245995 - DNA, 1698 bp, synthetic construct
  misc_feature 1..1698: note = Description of Artificial Sequence: Synthetic coding sequence
  source 1..1698: mol_type = other DNA
atgagcggccgatccaagagagaatctagaggttccacccggggaaaacgcgagagcgaaagcagaggctcatctggcagggtgaagcgggagcgggatcgagaacgggaacccgaggccgcttctagcaggggaagccccgtgcgagttaagcgcgagtttgagcctgcatccgcacgggaagctccagcatcagtggtccctttcgtgcgcgtcaagagagaaagagaggtggacgaagattctgaaccggaacgggaagttagggccaaaaacggaagggtggacagcgaagatagacgatcaagacattgtccttatctcgacacgattaacagatccgttctcgattttgactttgaaaagctgtgttccatttcactgtcacatatcaacgcttatgcatgcttggtgtgcggaaagtactttcagggcagaggcttaaaatcacacgcttacatccacagcgtgcagtttagccatcacgtcttcttaaatcttcacacccttaagttttattgcctgccagacaattacgagataatcgattctagccttgaggacatcacctacgtcttgaaaccaactttcaccaagcagcaaatcgccaacttggataaacaggcaaaactcagtcgcgcttatgacgggaccacttaccttccagggattgtgggactcaataatattaaggcaaacgactacgcaaatgcagtgctgcaggcactctccaacgtgccaccgttacgcaactactttctagaagaggataattataagaatattaaacgaccacctggcgacattatgtttctgctggttcagcggttcggggagctgatgcgtaagctctggaatcccaggaatttcaaggcacatgtatctcctcatgagatgctgcaagcggttgttctgtgttctaaaaagacttttcaaatcacaaaacagggagatggggttgacttcctgtcctggttccttaacgctctgcacagcgctctgggcggaacaaaaaagaaaaaaaagaccattgttactgatgtatttcaggggtccatgcgcatatttactaagaagttgcctcatcccgatctccctgccgaggagaaagagcagctcctgcacaatgacgagtaccaggagaccatggtggagtctactttcatgtacttaactttggacctcccaaccgcccctctgtacaaagacgaaaaggaacagctgatcatcccacaggtgccgctattcaacatcttagctaagttcaacggcattaccgaaaaagaatacaagacttataaagagaactttctaaagagattccaactaacaaagttgccgccttacctgatcttttgtattaaacgattcaccaagaacaattttttcgtagaaaagaaccctaccatcgtgaatttcccaattactaatgttgacctgcgggagtacctgtccgaggaggttcaggccgtgcacaagaatacaacttacgatctgatcgccaatattgtccacgacggtaagcccagcgagggatcttataggatccacgtgctgcatcatgggaccgggaaatggtatgagctgcaggatttacaggtgacagatatccttccccaaatgataacacttagcgaagcgtacatacagatctggaaacgcagagacaacgatgagactaatcaacagggagcatag

SEQ ID NO: 245996 - DNA, 1389 bp, synthetic construct
  misc_feature 1..1389: note = Description of Artificial Sequence: Synthetic coding sequence
  source 1..1389: mol_type = other DNA
atgttgaccgctgtgccctctcatctttttagcgccaaaaacgggagggtcgatagtgaagacagaagatctagacactgtccatatctggacacaattaacagtttttctcccttcccaaccgggcgtggcctgaagtcccatgcctacattcactccgttcaattttcccatcacgtcttcctgaacctacacaccctgaaattctattgtctgcctgacaattacgagatcattgactctagcctagaagacattacgtatgtgttaaagccaacttttactaagcagcagattgcaaacttggataaacaggccaaattgtcgagagcatacgatggtactacctatctgcccggtattgtgggtcttaataacatcaaagcaaatgactacgctaacgcggtccttcaggcactgagcaatgtgcccccactcaggaattacttcctcgaagaagataattacaagaatatcaagcggcctccaggcgatattatgttcctgctcgtccagagattcggagaactgatgcggaaactgtggaatcccagaaattttaaagcccatgtttcccctcacgaaatgctgcaagctgtagtcctgtgcagtaagaagacgtttcagatcacaaagcaaggggacggggttgattttctgtcatggttcctgaatgccttacacagtgccctggggggtacaaagaagaaaaaaaaaaccatcgtcacagatgtgttccaggggtccatgcgcatatttacaaagaagttgccgcaccccgatttaccagcggaggaaaaagaacagctgcttcacaacgacgagtatcaggaaaccatggtcgaaagtacttttatgtatttgaccttggatttgcctaccgcccctttatataaagatgagaaggagcaactgattattccccaggtccccctgttcaacatactggcgaaatttaacggaattaccgaaaaagagtataagacttacaaggagaattttctaaaaagatttcagctcactaaactacctccctatcttatcttttgcattaagcgattcaccaagaataatttttttgtggaaaagaatccaaccattgtgaactttccgataactaatgtcgacctccgggaatacttgtccgaggaggtgcaggccgtccataagaatacaacatacgaccttattgccaacattgtgcatgacgggaagcccagtgaaggatcctataggattcacgtgctccaccatggcaccggcaagtggtacgaactgcaggacctccaagtgacagatatcctgccccagatgatcaccctgagcgaagcctatatccagatatggaaacggcgtgacaatgacgaaacgaatcagcagggtgcctag

SEQ ID NO: 245997 - DNA, 1467 bp, synthetic construct
  misc_feature 1..1467: note = Description of Artificial Sequence: Synthetic coding sequence
  source 1..1467: mol_type = other DNA
atgagcggaagatctaaacgggagtcacgaggttcaaccaggggtaaacgggagtctgagtctagaggatcctccggaagggtcaaacgggagcgtgacagggagagagaacctgaggctgctagttctagaggatctccagtgcgcgtgaaaagggagttcgagccagcgtcagcgcgagaggctccagcctctgtggtgcctttcgtgagggtgaaacgcgagcgtgaggtggacgaagacagcgagccagaacgggaagtgagagccaagaatgggagggtggacagcgaggacaggagatcacgccattgcccttacctggatacaatcaaccgcagtgtattagatttcgactttgaaaaactttgctccatatctctcagtcatattaacgcctacgcgtgtctggtgtgtggcaagtacttccagggacgcggtctgaaaagccatgcctacatacactccgttcaattcagtcaccacgtttttctgaacctccatacgctgaaattttattgcttgcccgacaactatgagattatcgacagtagtctggaggatataacctacgtcctaaaacccacttttacgaagcagcagattgcaaatctggacaagcaggccaagctgagtcgcgcttacgacggcacgacatatctcccagggatcgtaggtcttaacaacatcaaggccaacgattacgccaacgccgttctccaggcgctgtcaaacgtcccaccacttagaaattattttttggaagaagataattataagaacattaaacgacccccaggtgacataatgttccttcttgttcagaggttcggagagttgatgcggaaactgtggaacccacggaattttaaagcccatgtgagtccccacgagatgctgcaggcagtggttctctgtagtaagaaaacctttcaaatcacaaagcaaggggacggagttgattttctgtcttggtttctgaacgccctccactctgccctgggaggcacgaaaaaaaagaaaaaaactattgttacagacgtgtttcaaggatccatgagaatcttcactaagaaacttccacaccctgatctaccagcagaagagaaagagcagctgctgcacaatgacgagtatcaggagactatggtcgagtccacatttatgtaccttacattggatctgccaacggcgccactgtataaagatgagaaggagcagcttatcatcccacaggtgcctttgtttaacatcctggccaaattcaatggcattactgagaaagagtacaagacttataaagagaactttctcaagcgattccagctgacaaaactacccccttaccttattttttgtattaagagatttaccaaaaataacttctttgtcgagaaaaatcctacaatagtcaattttccaatcaccggccaagcaaacgggatgaattataagacttcacgctag

SEQ ID NO: 245998 - DNA, 2892 bp, synthetic construct
  misc_feature 1..2892: note = Description of Artificial Sequence: Synthetic coding sequence
  source 1..2892: mol_type = other DNA
atggcagaagggggtggctgccgcgagaggccagatgcagaaactcagaaaagcgagttagggccacttatgagaaccacgctgcagcggggagctcagtggtatctgatcgattctcgctggttcaaacagtggaaaaagtatgtcggatttgatagttgggatatgtacaacgtgggcgagcacaacctattccctggcccaatcgataactcgggcctgttttctgacccagagtcccagactttaaaagagcatctcatcgatgaactcgactatgttctcgttcctaccgaggcttggaacaaactcctgaactggtacggttgcgttgaggggcagcaacccatcgtgaggaaagttgttgagcatggtctgtttgtgaaacactgcaaggtggaagtgtatctactggaactcaaactctgcgagaactcagaccccaccaatgttttatcctgccatttctcaaaggccgacaccattgctactattgagaaggagatgcggaagctgtttaacatccctgcggaacgagagacccggctgtggaacaaatacatgtcaaacacatacgagcagctatctaaactggataatacagtccaagacgctggcttatatcagggtcaggtactggtcatcgagccgcagaatgaggatggcacatggcccagacagaccctccagagtaaatcctccacagctcctagccgaaacttcactactagtcccaagtcttccgctagtccttacagctctgtctccgcttcattgatcgctaacggcgattccacctcaacatgcggcatgcatagctctggggtctcgcgcggtgggtcaggcttctcagcttcctataactgccaggagcccccaagctcgcacattcagcctggactgtgcgggctgggcaatttaggcaacacctgtttcatgaacagcgctctgcaatgcctcagtaacaccgcacctctgacggattactttttaaaggacgaatatgaggcagagatcaaccgcgataatcctctgggaatgaagggtgaaatagcggaggcttatgccgagctcatcaagcaaatgtggtccgggagggatgcacacgtggccccaaggatgttcaagacacaggtggggcgttttgcgcctcagtttagcggctaccagcagcaggactcgcaagagcttctggctttcctgttggacggcctgcacgaagacctgaaccgcgtcaagaagaaaccctatctcgagttaaaggacgccaacggcaggccagacgctgtggtcgccaaagaggcatgggaaaaccaccgcctcaggaacgattcggtgattgtggatacatttcatggattattcaagtcaactctggtttgcccggagtgtgctaaagtgagcgtcacctttgaccctttctgctatttgacgctgccactcccactgaaaaaggatagggtgatggaagtgtttcttgtgcctgccgatccccactgtaggcctacccagtacagagtgacagtgcccctaatgggggctgtttctgacctgtgcgaggcgctctccaggctgtctggcattgcagctgagaatatggtcgtggctgatgtgtacaaccaccggttccataaaatcttccaaatggatgagggcctgaatcatatcatgcctagggacgatattttcgtgtatgaggtttgctcaaccagcgtagacggctctgagtgcgtaactttgccggtgtattttagggagcggaagagccgcccttctagcacgtcaagcgcttccgccctttacgggcagcccctcctcttgtccgtacccaagcataaactgactctggagagcctgtaccaagccgtctgtgatcgcatcagccgatacgtcaagcaacctctgcccgatgagttcggcagttccccgctggagcccggtgcttgcaatggaagtaggaacagctgtgaaggtgaagacgaggaagaaatggagcatcaggaggaagggaaggaacaactcagtgaaacagagggctccggggaggacgaacccggtaatgacccctcagagacaactcaaaagaaaattaagggccaaccctgccccaagcgactgtttacctttagtctagttaattcatacgggaccgccgacatcaactccctggccgcagatggtaagctgttgaagctcaacagccgcagtactctggcgatggactgggactctgagactcggagactctattacgacgagcaggagagcgaagcgtacgaaaaacatgtctcgatgcttcaacctcagaagaagaagaagacaaccgtcgccctgcgggattgcatcgaactgttcactactatggaaacgctcggtgaacacgacccatggtactgtcccaattgtaagaagcatcagcaagcgactaaaaagtttgatctctggtcactacctaagatactggtagtgcacctcaaacggttctcttacaaccgttattggcgcgacaagctggacactgtggttgagtttcccataaggggcctgaacatgagcgaattcgtctgtaatctcagcgcccgtccctatgtctacgacctaatcgctgtatctaaccattacggagctatgggggtgggccactacaccgcgtacgccaaaaataaattaaacggtaaatggtactacttcgacgacagcaacgtgagcctggcctccgaagatcagatcgttacaaaagcagcatacgtcctgttttatcagaggcgggacgatgaattctataagactccatccctgagtagcagtggctcaagcgacggaggaacgcgtcctagctcatcacagcaagggttcggggacgatgaagcctgcagtatggacactaactag

SEQ ID NO: 245999 - DNA, 2751 bp, synthetic construct
  misc_feature 1..2751: note = Description of Artificial Sequence: Synthetic coding sequence
  source 1..2751: mol_type = other DNA
atggctgagggagggggatgcagagagaggcccgacgccgagacacaaaagtctgagctgggtccactgatgcgcactaccctccagagaggggcacaatggtatctgatcgattctagatggtttaagcagtggaagaaatacgtgggctttgactcatgggacatgtataacgtgggggaacacaacctttttcctggccctatcgataactcaggtctgtttagtgaccccgaaagtcagacgctgaaggagcatcttatcgacgagctggattacgtacttgttccaaccgaggcttggaataaattgctaaactggtatggctgcgtggagggacagcagcccatcgtaagaaaggtggtcgagcacggactttttgtcaagcattgcaaggtcgaggtttatctcctggaactcaagctgtgtgaaaactctgaccctacgaacgtattaagctgccacttttcgaaggcagacaccattgcaacaattgagaaggagatgaggaaactcttcaatattcctgccgagcgcgagactagactatggaataaatatatgtcaaacacttatgaacagctatccaaactggacaacactgtccaggacgcaggcctgtaccagggacaagttctcgtcattgagccccagaacgaggatggcacctggccccgacagaccctccagtccaacggatccggcttttctgcaagctataattgccaagagcccccatctagccacatccagcctgggctctgcggcctgggtaacttgggcaacacttgtttcatgaattccgctctccagtgcctcagcaatactgccccactcacagactattttctgaaggatgaatacgaagccgagataaacagagataaccctctgggtatgaagggcgagattgctgaagcctatgcagaacttatcaagcaaatgtggagcgggagagacgcccatgttgctccacgcatgtttaagactcaggttggccgttttgctcctcagttctctggataccagcaacaggattcccaggagctgctggcattcctgcttgatggtctgcacgaggatctgaacagggttaaaaaaaaaccatatctcgagctgaaggatgcaaatgggagaccagatgcagtcgtggccaaagaagcttgggagaaccacaggctgcgcaacgactccgtgatagtggatacctttcacggtctgttcaaatctactctcgtctgtcccgagtgcgcaaaggtgagtgtgaccttcgatcctttctgttacctcactctaccactgcccctcaagaaggacagggttatggaggtctttctggtgccggctgacccacattgtagaccgacccagtatcgtgtgaccgtcccactaatgggggcagtgagtgatctgtgtgaggctctgtcccggttgtccggcattgcagcagagaacatggtggttgccgatgtgtacaaccatagatttcacaagatttttcagatggacgaggggctgaatcacatcatgcccagggacgatatttttgtctacgaagtgtgtagtacaagtgtcgatgggagcgaatgtgtgacactcccagtctattttcgggaacgcaagtctaggccttctagtacgagctccgcaagcgccctctacggacagcccctgctgctcagcgtgccaaagcataaattaacattagaatctctataccaggccgtatgcgataggatctctcggtacgtgaagcagccgcttccggatgaattcgggagtagccctctggagcccggagcttgcaacggttcaagaaattcatgtgagggggaggacgaagaggaaatggagcaccaggaggagggtaaggaacaactatctgaaactgagggcagcggtgaggatgagcccggtaatgacccatccgagaccacacagaaaaagatcaaaggtcagccctgccccaagcgcctcttcacgttctccctggtcaattcgtatggcacagcagacattaattcccttgctgccgacggcaagctgttaaaactgaattctaggagtacacttgcaatggattgggatagcgaaacgagacgcctctattacgacgaacaagagtcagaagcttatgaaaagcacgtttcaatgctacagcctcagaaaaagaaaaagacaacagtagcactgcgcgattgtattgagctctttactaccatggaaactctcggtgaacatgacccttggtattgtccaaattgtaaaaaacaccagcaggccacaaagaaattcgatctctggagcctgccgaagattctcgtggtgcatctcaagcgattttcctataacagatactggagggacaaattggatactgttgtcgagttcccgattagaggtctgaacatgtctgagtttgtgtgcaatctttcagcccgaccgtacgtctatgatttgattgccgtatcaaatcactacggagcaatgggcgtgggccattatacagcctacgcaaaaaacaaactcaacgggaaatggtattattttgatgattcaaacgtctccctggcttctgaggaccagattgtgacaaaggcagcgtacgttcttttttaccagagaagggatgatgagttttacaaaactccatccttatccagtagtgggagctcggacggaggaacacggccatccagctcacaacagggttttggtgacgatgaagcctgtagcatggacactaactag

SEQ ID NO: 246000 - DNA, 942 bp, synthetic construct
  misc_feature 1..942: note = Description of Artificial Sequence: Synthetic coding sequence
  source 1..942: mol_type = other DNA
atggcggagggcggtgggtgtcgcgaacgtccagatgcagaaacccagaagtccgagctgggacctttaatgaggacaaccttacagagaggcgcacagtggtacctgattgacagtcgttggttcaagcagtggaaaaagtacgttggctttgactcctgggatatgtacaacgtaggcgaacacaacctttttccaggcccaatcgacaattctggccttttctctgaccccgagtcccagacactgaaagagcacttaatagacgagttggactacgtactggtgccaaccgaagcttggaataaacttctgaattggtatggctgcgtggaaggccagcagccaatcgtcaggaaggtagtcgaacatggtctattcgtcaaacactgcaaagtagaagtttacttactcgaacttaagctctgtgaaaatagtgatccaactaatgtcctgtcttgccacttctcaaaagcggataccatcgccactatcgagaaagagatgaggaagcttttcaacatcccagctgaaagagaaacccgcttgtggaacaagtacatgagcaacacttacgaacagctctccaaactggataatacagtccaggacgccggactgtatcaagggcaggtactagtcatagaacctcagaacgaagatggaacatggcccagacagactcttcagtctaaggtgagctttttcttgcccagactggagtgtaatggagcgatactggcacattgtaatttctgcctacctggaagcagtaattcgcctgcatctgcttctagggtcgccccatcccatttggcaaactttttcttcttcgaaatggagtcacacagcgtcactaagctggagtgtgggggagcagtctccgcttactctcgcgtgcaagtcatgctactccctcagcccccagagtggttggggtag

SEQ ID NO: 246001 - DNA, 2139 bp, synthetic construct
  misc_feature 1..2139: note = Description of Artificial Sequence: Synthetic coding sequence
  source 1..2139: mol_type = other DNA
atgctggcaatggatacttgcaaacacgttggacagctgcaattggcccaggaccatagctccctcaatccacagaagtggcattgcgtggattgtaacacaacggaaagtatatgggcttgtctctcctgttcccacgtggcgtgtgggaggtatatcgaggagcacgcactcaagcatttccaggaatcgagccaccccgtggccctggaggttaacgagatgtatgtcttctgttacctctgtgacgactacgtccttaacgataatacaactggtgatctgaaattactccggaggactctgagtgccataaaaagtcagaactaccactgcaccactagatccggaaggttcctgcggtccatgggcacaggggatgacagttattttctccacgacggtgcacagtccttgcttcaaagcgaggatcagctctatacagcactctggcatcgcagacggattctgatgggcaaaattttcaggacgtggttcgagcagtcccctattggcagaaagaaacaagaagagcccttccaggaaaaaattgtggtcaaacgggaggttaagaaacgcagacaggaactggaatatcaggtgaaagcagagctggagtctatgccacccagaaaatcccttcggttgcagggtttagcacaaagcactatcatagagatcgtgtctgttcaggttcccgcacagacacctgcctcccctgccaaggacaaggtgctgtcaaccagtgagaatgaaatttcccaaaaggtgtcagatagctcagtcaagaggcgtccaatcgtcacacccggagtgaccggcctgcggaatctgggcaatacttgctacatgaattctgttctccaggtgttgagccacttgttgatcttcaggcagtgtttccttaaactagatttgaatcagtggctggccatgacagcctctgagaagacgaggtcttgcaagcacccccctgtcacagatactgtggtgtatcagatgaatgagtgccaagagaaggacacaggatttgtctgtagtaggcagtcttccctgagctctggtctaagtggcggagccagcaagggcagaaagatggagcttattcagcccaaggaacctacctcacaatacataagcctctgtcatgaacttcataccctgttccaggtcatgtggtcagggaaatgggcgctggtgtccccctttgccatgctgcactctgtctggcggttaatacctgccttccggggatacgcccagcaggacgcccaggagttcctgtgcgagctgctggataagatccaacgggaactggagaccactggcactagcctccctgccctcatacccacctcccaacggaaactgataaagcaggtcttaaacgtggtcaataacatttttcacggtcagctgctgtctcaggtcacctgtttggcctgtgacaacaagagcaacaccatagagccattttgggacctgtccctggagtttcctgaacgttatcagtgctccgggaaggatattgcaagccagccttgcctggtgacagagatgctggccaagtttaccgaaaccgaagcgctggaaggaaagatttacgtctgtgaccagtgcaattcgaagcggaggagattctcgtcgaaacccgtggtgctgacagaagcccagaaacagctcatgatctgtcatctgccccaagttctgcgcctacacctcaaacgctttcgttggtctggacgaaataatagagagaaaatcggggtgcacgtgggatttgaagagatccttaacatggagccatactgttgccgcgagactttgaagtccctccgcccagaatgctttatatacgatctgtctgctgtggtaatgcaccatggcaagggatttggaagcggtcattatacagcatactgctacaacagcgagggcggattctgggtgcactgcaatgactccaaacttagtatgtgcacaatggatgaggtgtgcaaggcccaggcttacatcctgttctacacccagagagtaacagaaaacggccactccaaactgctcccaccagaactgctgctaggctctcagcaccctaatgaagacgcagacactagctctaatgagatcctctcgtag

SEQ ID NO: 246002 - DNA, 2139 bp, synthetic construct
  misc_feature 1..2139: note = Description of Artificial Sequence: Synthetic coding sequence
  source 1..2139: mol_type = other DNA
atgttagctatggatacctgtaaacacgttggccagctgcaattggctcaggatcattccagtctcaatccccaaaagtggcactgtgtcgactgtaatactaccgaaagcatctgggcctgcctgagctgcagccacgtcgcctgcggaagatacatcgaggagcacgctctgaagcatttccaggagagctcacatcccgttgctctggaggtgaacgaaatgtatgttttttgctatctgtgcgatgactacgtcctcaatgataacactaccggggacctcaaattgctgcgaagaaccctgtcggccataaagtctcaaaattaccattgcacgacccgcagtggtcgatttctcaggtcaatgggcactggagacgactcctactttctgcacgacggcgcacagagtttactgcaatccgaggaccaactatataccgctttgtggcaccgacgcaggattttgatgggcaagatttttaggacatggttcgagcagtcccccataggaaggaagaagcaggaagagccattccaggaaaagatcgtcgtaaagcgagaggtgaagaaacggcgtcaggagctggagtatcaggtcaaagcggagctcgaatctatgcctcccaggaagtccctgaggttgcaaggccttgctcagtcaaccatcatcgaaattgtctccgtccaggtacctgctcagacccccgcttctccagcaaaagacaaggtcctctccacgagcgagaacgagatatctcagaaggtatctgattcgagtgtcaaaaggcgccctattgttaccccaggggtcactggtctgcgcaatttggggaatacgtgctatatgaattcggtgctacaggttctgtctcacctcctcatcttccgccagtgctttttaaagctggatctaaatcagtggctggccatgacggcaagtgaaaaaaccagaagttgcaaacacccgcctgtgaccgatactgtcgtgtaccagatgaatgaatgccaagaaaaagacaccggtttcgtgtgctccagacaatcctccctgtcttccggacttagcggtggcgcatccaaaggcagaaagatggaactgatccagcctaaggagcctaccagccaatacatctcactgtgccacgagctccacacgcttttccaggtgatgtggtctggcaaatgggcactcgtgtcacctttcgctatgctgcactcagtttggaggttgattccagcttttcgcggttacgctcagcaggatgcccaggagtttctctgtgagttgcttgataagatccagagagagctggagaccacaggtacctcactccccgcactgatccccacgagccagaggaagctcatcaaacaagtgttgaacgtggtcaataacatttttcatgggcagcttctctcgcaggtgacttgtttagcatgtgacaataagagcaacactattgagcctttctgggatctgtccctcgagtttccggagaggtatcagtgtagcggcaaggatattgctagccagccatgtcttgtcacggaaatgttggccaagttcaccgagactgaagctctggagggcaaaatctacgtgtgcgaccagtgtaatagcaagagacggcgtttctcctcgaaacccgtagtgcttactgaggcacagaaacagctgatgatctgccatctgccccaggttcttcggctgcacctgaaacgctttcgttggtctggaaggaataatcgagaaaagatcggcgtacacgtaggtttcgaagaaatcctgaacatggagccctactgctgtagggaaacactcaagagcctccgacctgagtgcttcatttacgatctgtccgccgttgtgatgcaccatggtaaggggttcggtagcggccactatactgcgtactgttataattcggagggcggattttgggtgcactgtaacgattctaagttgagtatgtgcactatggatgaagtgtgtaaagcacaggcatacattttgttctacacacaaagggttacggaaaacggacactccaagctgctccccccagagcttcttctgggatcacagcatcccaacgaggacgcagacacctccagtaatgagatactgtcctag

SEQ ID NO: 246003 - DNA, 2139 bp, synthetic construct
  misc_feature 1..2139: note = Description of Artificial Sequence: Synthetic coding sequence
  source 1..2139: mol_type = other DNA
atgttagcgatggacacctgtaagcacgtgggtcagttgcaactcgcacaggaccactccagtctgaacccacaaaaatggcattgcgtggactgtaataccactgaatccatttgggcttgcctgtcctgcagccatgtggcttgtggcagatatattgaagagcatgccctaaagcattttcaggaatcctcgcatcccgtggctctggaagtcaacgagatgtacgttttttgttacctctgtgacgactatgtgctcaacgataataccaccggagacctcaaattactgcgtcgtactctttcagccatcaagagccagaactatcactgcacaaccaggtccggaaggtttcttaggtctatgggtacaggcgatgactcatactttctgcatgacggagcacagtccctcctgcagtcagaggaccagttgtatactgccttatggcaccgtcgtcgcatcctgatgggcaagatattccgaacgtggtttgaacagagtcccattggacgtaagaaacaagaggaaccattccaggagaaaatagtggtgaaaagggaggtgaagaagagaagacaggaactggagtatcaagtcaaagcagagcttgagtccatgcctccacggaagtcactccggctgcagggtctcgctcagagtaccataatagagattgtgtccgtgcaggtacccgctcagacacccgcatcaccagcgaaggacaaggtcctctcgacgtccgagaatgagatttcccagaaagtgtccgatagctctgtgaagaggcgtcctatcgttacaccaggcgtgacgggtttgcgcaacttgggcaatacttgctatatgaatagcgttctacaggtgctttcccacctgttgatctttaggcagtgcttcctgaagctcgacttgaatcagtggttggccatgacagcgagcgaaaagacccggtcgtgcaagcaccctccggtcacggacaccgtggtgtatcagatgaacgagtgccaagagaaagacacaggctttgtgtgctctagacagtccagcctttcaagcggactgtctgggggagcttccaaagggcgaaaaatggagcttatccagcccaaggagccgaccagccagtacatctctttatgccatgaactccatacactgtttcaagttatgtggtccggtaagtgggccctggtttctcccttcgccatgttacattccgtgtggcgtcttattcccgcattcagaggttacgcccagcaggacgctcaggagttcctttgtgagctgctcgacaagatccagcgggaactggagactacgggcactagcctgcctgcgttaatcccaacctcccagcggaagctgatcaaacaggtgctaaatgttgtaaacaacatctttcatggccagctgttgagtcaagtcacttgcctggcctgcgataataagagcaatactatcgaaccgttctgggacttatccctcgaattccctgagaggtatcagtgcagcgggaaggacatcgcgtcacagccgtgccttgttactgagatgctggcaaagttcacggagactgaggctctggagggcaagatttacgtgtgcgaccagtgtaactccaagcggagaaggttcagctccaaacctgtcgtactgactgaagcgcaaaagcagctaatgatctgtcacctcccgcaggttttaaggcttcacttgaaaagatttcgctggtcaggcagaaacaacagggagaaaattggcgtgcacgttgggttcgaagagattttaaatatggaaccttactgttgtagagaaacactgaagagccttaggcccgaatgttttatttacgatctgtcagcagtggtgatgcaccacggtaagggcttcgggtcaggtcactacaccgcatactgctataacagcgagggtggtttttgggtacattgtaacgactccaaactgtctatgtgtaccatggatgaggtatgcaaggcccaggcctatatcctgttctacacccagagagttactgagaatggacactctaagctgctgccccctgagctgctgctgggaagtcagcatcccaacgaggatgccgatacctcttctaacgagattctaagttag

SEQ ID NO: 246004 - DNA, 336 bp, synthetic construct
  misc_feature 1..336: note = Description of Artificial Sequence: Synthetic coding sequence
  source 1..336: mol_type = other DNA
atgctcgcaatggacacgtgcaaacacgtcggtcaactacaacttgctcaggatcactccagcttgaaccctcagaagtggcactgtgtggattgtaacacaaccgagtccatctgggcctgtctgtcttgttcccacgttgcttgtgggcgatatatcgaggagcatgcacttaaacacttccaggagtcttctcacccagtagccttagaggtgaacgaaatgtatgttttctgctatctctgcgacgactacgttcttaacgataataccacaggtgacttaaaactcctccggagaacactgtccgctatcaagagccagaactatcattag

SEQ ID NO: 246005 - DNA, 495 bp, synthetic construct
  misc_feature 1..495: note = Description of Artificial Sequence: Synthetic coding sequence
  source 1..495: mol_type = other DNA
atgctcgccatggacacgtgcaaacacgtgggccagttgcagttggcccaggatcacagttccctgaatccccaaaaatggcactgtgtggactgcaatactactgagtcaatctgggcctgtctgagttgctcccatgtggcttgcgggagatatatcgaagagcacgccctgaagcattttcaggaatcctcccacccagtggccctcgaggttaatgaaatgtacgtcttctgttacctctgcgatgattatgttctgaatgataatacaaccggcgatttaaaactgctaaggaggactttgagtgcgattaagtcacaaaattatcactgtaccactcgaagcggaaggtttctgagatctatgggaacaggcgatgatagctactttctgcatgatggcgcacagtcattgcttcaaagcgaagaccagctatacactgcactctggcaccggagacgcattctgatgggcaagatcttccgaacttag

SEQ ID NO: 246006 - DNA, 1101 bp, synthetic construct
  misc_feature 1..1101: note = Description of Artificial Sequence: Synthetic coding sequence
  source 1..1101: mol_type = other DNA
atgactgtgagaaatatcgcatcgatttgcaacatgggaaccaacgccagcgccctcgagaaagacatcggcccagaacagtttccaataaacgagcattacttcgggcttgtgaacttcggaaacacatgttactgtaatagcgtcttgcaggctttatacttttgcagacctttcagggagaacgttctggcatacaaagctcagcagaaaaagaaggaaaatctgctaacctgtttagccgaccttttccatagcatagccactcagaaaaaaaaagtgggggtgatcccgccaaagaaattcatcagcagactgaggaaggagaacgatctgttcgacaactacatgcaacaggatgcccacgagttcctgaattatctgctgaatacaattgccgatatactacaggaggaaaagaagcaggagaaacagaacggaaagctgaagaacggaaatatgaacgagccagctgagaacaacaagcctgaattaacatgggtgcacgagatctttcagggaacgttgactaacgagacaaggtgcctgaactgcgagacagtgtctagcaaggatgaggacttccttgatctctccgttgacgttgagcagaatacatccataacgcactgccttcgcgactttagtaataccgaaaccctatgttccgagcagaagtattattgcgagacctgttgcagcaaacaggaagcgcagaaaagaatgcgcgtgaagaagctgcccatgatccttgctctccacctcaaacgcttcaaatacatggagcagctccatcgctataccaagctcagctacagggttgtattcccactggagttgaggctattcaacacctcaagtgacgcggtcaatttggaccgcatgtatgacctcgttgcagtggtagttcactgtgggtctggcccaaatagaggccactacataactatcgtaaaatcacatggattctggctgctcttcgacgacgacatcgttgaaaagattgatgcccaggccattgaagaattttacgggctgacctctgatattagtaagaattccgagagtggctacatactgttctaccagagtagggagtag

SEQ ID NO: 246007 - DNA, 1080 bp, synthetic construct
  misc_feature 1..1080: note = Description of Artificial Sequence: Synthetic coding sequence
  source 1..1080: mol_type = other DNA
atgaattgtttccagggcaccaacgcgagcgcattggagaaagatataggtcccgagcagttcccaatcaatgagcactactttggattggtgaattttgggaatacttgctactgtaactctgtgctgcaggctctatacttttgccgaccctttcgggaaaacgtgcttgcatataaggcacaacaaaagaaaaaggagaacctattaacctgcttggctgacctgtttcattctattgcaacccaaaagaaaaaagtcggggtgattccacccaagaagttcatttcaagactcagaaaagagaacgacctgtttgataactatatgcaacaggacgctcatgagttcctcaattacttgctgaacaccatcgcagatattctgcaggaagagaaaaagcaggagaagcagaacggaaagctgaagaatggcaatatgaacgaaccagccgaaaacaacaagcctgagctcacctgggtgcacgaaatttttcagggcacgttgaccaacgaaaccagatgcctcaattgtgaaacggtctcttctaaggacgaggactttctcgacctcagcgttgacgttgaacagaacaccagcataactcattgcctgcgcgatttcagtaacacagaaacactatgttctgagcagaaatactactgcgagacctgctgctcaaagcaggaggctcaaaaacgaatgagggttaaaaaactgcccatgattttggcacttcacctgaaacggttcaagtacatggagcagcttcatcgctataccaaactctcctatcgtgtcgtcttcccgctggagctgagactttttaatactagttctgacgccgtcaacctggacagaatgtacgatttagtggccgtggttgtgcactgtggatctgggccaaatcggggacattacataacaatcgtgaaatctcatggcttttggctcctgttcgatgacgacattgtcgaaaaaatcgatgctcaggctatcgaggagttttatggtctcacctcagacatctcgaagaatagcgaatcaggttatatccttttttaccagtcacgcgaatag

SEQ ID NO: 246008 - DNA, 4221 bp, synthetic construct
  misc_feature 1..4221: note = Description of Artificial Sequence: Synthetic coding sequence
  source 1..4221: mol_type = other DNA
atggacatggtggagaacgctgattccctccaggcacaagagcgcaaggatatactcatgaagtacgataagggccatagggccggattgcctgaggacaaaggaccggaacctgtgggaatcaacagttcaatcgacaggttcggcatcctgcacgagactgagcttcctccggtgacagcccgtgaagctaagaaaatacgcagggaaatgacacggacatccaagtggatggaaatgcttggggaatgggagacatacaagcatagctctaaactgatcgatcgagtgtacaaaggaatccccatgaatatccgcggacctgtctggagcgtactcctcaatatccaggagattaagttgaagaacccgggtcgctatcaaattatgaaggagcgcggaaaacgatcctcagaacatattcaccacattgacctagatgtccgaacaactctgagaaaccacgtgttctttagggaccgttatggggcaaagcagcgggagttattctatattctcctcgcgtacagcgaatataatcctgaagtaggctactgcagggacttatcccacataaccgcgctttttctcctgtatctgcccgaggaggatgctttctgggcgctggttcagctcctggccagcgagcgccactcccttcccggtttccacagccctaatggaggcactgttcaggggctgcaggatcaacaggagcacgtcgttcctaaatctcagccgaagaccatgtggcatcaggacaaggagggcctgtgcgggcagtgcgccagcctcggctgcctcctacgcaatctgatagatgggatctccttggggcttacacttagactttgggatgtgtacttagtcgagggagagcaggttttaatgccgatcacttccattgctcttaaggtccagcagaagaggctcatgaagacatcacgatgcggcttgtgggcccgactgcgaaatcagttttttgacacttgggctatgaacgacgatacagtacttaagcacctgcgagccagcacaaaaaaactcacaaggaaacagggcgatctgcccccaccggctaaacgggaacagggtagcctggcccctcgcccagtacctgccagcagaggtggcaagactctgtgtaaaggctacagacaggcccctcctgggccacctgctcagttccagcgcccaatctgtagtgcttctcccccatgggcaagccgattttccactccatgtccaggcggagcagtcagggaggacacctacccggtgggtacacagggtgtaccctcactggcgctcgcccagggcggaccccagggaagctggcgtttcctggaatggaagagcatgccaaggctccccactgatctggacatcggcggtccctggtttccgcactatgactttgaatggtcatgctgggttcgggctatctcacaggaagaccaattggccacctgttggcaggctgagcattgtggcgaagtgcataataaggatatgtcatggcccgaggaaatgtccttcacagccaactcatccaaaattgatcgccagaaggttccgacggagaaaggggcaaccggtctgagtaatttaggaaacacctgttttatgaactctagcattcagtgcgtgtcaaatacacagccactgacgcagtattttatttctgggagacatttgtatgaattgaatagaacaaatccaattggaatgaaggggcacatggccaagtgttacggggatcttgtgcaagagctgtggtccggcactcagaaaagtgtggcgcctcttaaactgaggagaacgatcgctaagtacgctcccaaattcgatggtttccagcagcaggacagccaggaactcttagctttcctcttggacggtttgcatgaagatttaaaccgcgtgcacgagaagccctatgtggaactcaaagactctgacggcaggccagactgggaggtagccgcagaagcctgggacaaccacttgagacggaatcgtagcattattgtggacctctttcacgggcagttacggtcacaggtgaaatgtaagacgtgtggccacatttctgtacggtttgacccctttaactttctgtcattgcccttgcccatggacagctacatggacctagagattacagttataaaactggatggtacgacccccgtgcgatacggtctccgcttaaacatggacgaaaagtacactggactgaaaaaacagctgcgagacctttgtggcctaaactccgagcagatcctgctggccgaagttcacgactccaacatcaaaaactttccccaggacaatcaaaaagtacaactgtccgtgagcggcttcctgtgcgcctttgagattccagtgccctcgtccccaatttctgcctcgtcaccaactcagatcgattttagctcatcgccaagcacgaacggcatgtttacactgacaaccaacggagatctacccaagcctattttcattcctaacggcatgcctaacactgtagttccgtgcggcacagaaaagaactttacaaacggcatggtgaacggtcacatgccttcactgcccgattcaccttttacgggatacatcattgccgtgcatagaaagatgatgcggacagagttgtattttctctcaccacaggaaaaccgacccagtctcttcgggatgcctttgatcgtgccctgcacggtgcacaccagaaagaaggacctctatgacgccgtatggattcaggtgtcctggctggccaggccattacccccacaggaagcttccattcatgcccaggacagagataactgcatgggctaccaatatccattcaccctgagagtggtgcagaaagatggcaactcgtgtgcctggtgccctcagtatcgtttttgccggggttgtaaaattgactgtggcgaggacagagcttttattggaaatgcttatatcgcagtggattggcatcccacggcattacatctacgttatcagacctcacaagaaagagtggtagacaagcacgaatctgttgagcagagtcgcagggcccaagcggaacccattaatcttgatagttgtctgagagctttcacttcggaggaagaattaggcgaatcggaaatgtattattgctcaaaatgcaaaacacattgtctggctaccaaaaaactggatttatggagacttcctccgtttctgatcatacacctgaagagatttcagttcgtgaatgaccagtggattaaaagtcagaagatcgttaggtttctccgagaatcatttgacccatccgcttttctggtgccaagggacccagccttgtgccagcacaaaccactgaccccgcagggggatgaactcagcaagccgaggatcctggctagagaggtcaagaaagtcgatgcccagtcaagtgccggaaaggaagacatgctgttgtccaagtcccctagcagcctctctgccaatatcagctcctcaccaaaaggctccccaagcagctcacggaaatctgggacaagctgtcccagcagcaagaatagcagccccaattcctcccctagaactctcggcagaagtaaggggcgtctgagactgccgcagatcggatcgaagaacaagccaagttcctctaaaaagaacctggatgcctcaaaagaaaatggggcagggcagatctgcgaactcgccgatgccctcagccgaggacacatgcgcggtggctctcagccagaattggtaaccccccaagaccatgaggttgcgctggcaaacggttttctatacgagcatgaagcatgcggaaacggctgtggcgatggctattcaaatggccaactcgggaaccactctgaagaagattcaacagatgaccagagagaggatacccatattaaaccaatctataatttgtacgccatttcatgccacagcggcatcctgagcgggggtcactacatcacctatgcaaagaatccgaactgcaaatggtactgctacaacgactcgtcttgcgaagagctgcaccccgatgagatagataccgacagcgcctatatcttattttacgaacagcagggcattgactatgcacaattccttcctaaaattgacggcaagaagatggccgatacctcttcaaccgacgaagacagcgagagtgattacgagaagtatagcatgctccagtag

SEQ ID NO: 246009 - DNA, 3270 bp, synthetic construct
  misc_feature 1..3270: note = Description of Artificial Sequence: Synthetic coding sequence
  source 1..3270: mol_type = other DNA
atgccccagcgactcccccacgcgcgacagcatactcctttacccttgggctcggccgactacagaagagtggtgtctgttaggccccaagggcctcaccgggatccgaaagacagccgtgatgctgctaagagagagcagggctctcttgcccctcgtccggttcccgcaagcagaggaggaaagacgctgtgtaagggttacaggcaggcgccacctggtcccccagcccaattccagagacccatatgcagcgccagccccccttgggcctctagattttcaacaccctgtccgggtggcgctgtgagggaggacacgtatccagtggggacccagggcgtgccatcactcgcattggctcaaggaggtcctcaaggttcttggaggtttctggagtggaagagtatgcccaggctgccgaccgatctggatattggcggaccatggttccctcattacgattttgaatggtcatgttgggtgagggcaatcagtcaggaagatcagctggcaacgtgctggcaggctgaacactgcggagaggtccataataaagatatgtcgtggcctgaagagatgtcattcacggcaaacagctccaagatcgacagacaaaaggtccccacagagaagggcgcaaccggcctgtctaatttgggcaatacgtgttttatgaattcatccatacagtgcgtgagtaacacccagcctctgacccagtattttatatcgggaaggcacttatatgagcttaacagaacaaatcctattgggatgaaagggcatatggccaaatgctatggggatctggtgcaagagctgtggtccggaacgcaaaagagcgtagcccctctgaaactgcgacgcaccattgccaaatacgctccgaagtttgatggatttcagcagcaggattcccaggaattattggcctttctgttggatggattgcacgaggatctaaacagggtgcacgagaaaccgtatgttgagctgaaggactccgatgggcgtcccgattgggaagtcgcagccgaagcttgggacaaccacctccgcaggaacagatcgattattgtggacctgtttcacggccagctgaggtcccaagtgaagtgtaaaacgtgcggacacatcagcgttagattcgatccattcaacttcctcagtctgcctttgcctatggactcctatatggacctcgaaataactgttatcaagttggacggtactactcccgttcggtatggattgaggctaaacatggatgagaagtacaccgggctgaaaaagcagctccgcgatctgtgcggactcaattccgagcagatcctcctcgcggaggtacatgactcaaacatcaaaaactttccccaggacaaccagaaggtgcagctgtcagtttcaggattcttatgtgctttcgaaattccagtgccgtccagtcccattagcgccagttcccctactcagatcgatttctctagcagcccctcgaccaacggaatgtttacactgactactaatggagacctgccaaagcccatctttatccctaatggaatgcctaacaccgtagtgccctgcggtacagagaagaatttcacaaatggtatggtgaatggtcacatgccttctttgcccgacagtccttttaccggctatattatagccgtacatcgcaagatgatgcgaaccgagctatacttcctgagtccccaggaaaaccggcctagtctgtttggcatgcctttaatcgtaccctgtacagttcatacacgcaagaaagatttgtatgatgctgtttggatccaggtgtcctggttggccagacctctgccccctcaggaagcctctatccatgcccaggatcgagacaattgtatgggatatcaatacccatttacgctccgagtggtacaaaaagatgggaacagctgcgcatggtgcccgcaataccgattctgtcgcggatgcaaaattgattgcggagaggatagggcattcatcggcaatgcctatatcgccgtcgactggcacccaaccgccctccacctcagatatcagactagtcaagagagggtggtggacaagcacgagtcagtagagcagtctaggagagcacaggccgaacccatcaacttggactcctgcctcagggcttttaccagcgaggaggagcttggcgaaagtgagatgtactactgttccaaatgtaaaactcactgtctggccactaagaagttggacctgtggagattgcctccattcttgatcattcaccttaaacggtttcagttcgtcaacgaccagtggattaagagtcagaaaatcgtccgcttcctcagggaatccttcgatccgtcagctttcctggtcccacgcgatcccgcactctgccaacataagcccctcacgccacagggtgatgagctcagtaagcctagaatcctcgctcgcgaagtgaagaaggtggacgcccaatcctctgcagggaaggaggacatgctcctttctaaatcaccatcctccttatccgctaacatttcctcaagcccgaaaggaagtccttcgtctagccgcaagtcaggaacttcttgcccgtctagtaaaaattcgagtcccaattcctctccgaggactcttggcagatcgaagggacgactgagattgccccagataggctctaaaaacaagcctagctctagcaaaaagaacctcgacgcctctaaggagaacggagccggacaaatttgcgagcttgctgatgccctgagcagaggccacatgaggggtggatcacagccagagctggtgactccacaggaccatgaagtggctctggcaaacgggtttctctacgagcatgaggcatgtggtaatggttgcggagacggatactccaacggacaactaggtaaccactccgaggaggattccacagacgatcagagagaggatactcatattaaacctatctataatctgtatgccatatcttgccattctggcatactgtccggtggccactatataacttatgcaaagaacccgaattgcaagtggtactgctacaatgattcctcatgtgaggaactgcatcccgacgagatcgatacggactcagcctatatactgttctatgagcagcaggggatcgattatgcccagtttttaccgaagatagatggtaagaaaatggccgatacaagtagtacagacgaggacagcgaatctgattacgagaagtattcgatgctgcagtag

SEQ ID NO: 246010 - DNA, 2361 bp, synthetic construct
  misc_feature 1..2361: note = Description of Artificial Sequence: Synthetic coding sequence
  source 1..2361: mol_type = other DNA
atggatatggttgaaaatgctgactctctgcaggctcaggagcggaaagatatacttatgaaatatgacaaagggcaccgcgcaggactccctgaggacaaaggacctgagccggttggtattaactcctccattgaccgattcggcatattgcacgaaacagaactaccgccagtcaccgcacgcgaagccaagaagatacgcagggaaatgaccaggacatctaagtggatggaaatgttgggcgagtgggaaacatacaagcacagcagtaagttgatcgatcgtgtgtacaaggggatcccaatgaacattcgcggaccggtctggtctgtcttacttaacatccaggagatcaaactgaaaaaccccggaagataccaaatcatgaaagagcgcggtaaacgatcttccgaacacattcaccacatcgacctggacgtccggactacccttagaaatcacgtatttttccgggacagatacggtgccaagcagcgcgaactgttttacattctgttggcatactctgagtataaccccgaagtggggtactgcagggacctttctcacattactgctctgtttctactttatttgcctgaggaggacgccttctgggccttagtgcagctcctagccagcgagcgccattcccttccagggtttcactctccgaacggtggcactgtgcaggggttgcaagatcagcaggagcatgtcgtgccaaagagtcaaccaaaaacgatgtggcatcaggataaagaggggctgtgcggccagtgtgccagcctgggctgtcttctacggaaccttattgatggtatcagcctggggctgacactccggctgtgggatgtataccttgtcgagggtgaacaggtactgatgccgatcacgtccatcgccctgaaagtgcagcagaagaggctgatgaagacgtctcgatgtggcctttgggctcgtcttagaaaccaattttttgacacttgggccatgaatgatgacaccgtgttgaagcacctgcgggcttccaccaaaaaattaacccgcaaacagggagatctaccgccacctgcaaagagagagcagggctccctggcccctcgtcccgtacccgctagccggggaggtaagaccctgtgtaaaggataccgccaggctccacccggaccacccgctcagttccagcggcctatctgtagcgcgtcccccccatgggcatccagattctccacaccatgcccagggggtgccgttagagaggatacatatcctgtagggactcagggcgtgccttccctcgcacttgctcagggcggacctcagggcagttggcggttcttagagtggaaaagtatgccaaggttgcctacagatctggatatcggaggaccatggttcccccattatgatttcgagtggagttgctgggttcgggctatcagccaggaggaccagctcgccacatgctggcaggccgaacactgcggggaggtgcacaacaaagacatgtcttggcccgaagagatgtcctttactgcgaacagctctaagatcgaccggcaaaaggtaccaacagagaagggggctacaggactgagtaatctgggtaatacatgctttatgaattcctccatccagtgtgtctctaacactcaaccactgactcaatatttcatctcagggagacatctctatgagctgaaccggactaatcctatcggaatgaaagggcatatggctaagtgctacggtgatctggtgcaggaactatggagcggtacacagaagtctgtggccccactcaagctccgacgcactattgcgaaatatgcccctaaattcgacggcttccagcaacaagactcgcaggaactgttagctttcttgcttgatggcctccatgaagatctgaatcgcgtacacgaaaagccttatgtcgagctcaaggactctgacgggagacctgactgggaagtggccgctgaggcttgggataaccaccttaggcgcaataggtctattattgttgatctcttccatgggcagttaagaagtcaagtcaaatgcaaaacatgtggacatatctctgtgcggttcgatcctttcaattttctgagcttgcctctacccatggatagttatatggatctggagattacagttatcaagctggatgggacgacccccgtgcggtatggcttgcgcctaaatatggatgaaaagtacactggtctcaagaagcagctcagagacctgtgcggcctgaactctgagcaaatcctgctggctgaagttcatgactctaacataaagatcagtcctctgcatcacctacagatggagtgtagcccatag

SEQ ID NO: 246011 - DNA, 84 bp, synthetic construct
  misc_feature 1..84: note = Description of Artificial Sequence: Synthetic coding sequence
  source 1..84: mol_type = other DNA
atggacatggtggagaacgccgactcattacaggcccaggagagaaaggatattttaatgaagtacgataaagggcaccgctag

SEQ ID NO: 246012 - DNA, 174 bp, synthetic construct
  misc_feature 1..174: note = Description of Artificial Sequence: Synthetic coding sequence
  source 1..174: mol_type = other DNA
atggatatggtggaaaacgccgactctttgcaagctcaagagaggaaggacatcctgatgaaatatgacaaaggacatcgcgcaggcctgcccgaggacaaaggatccccactggagagcacagctgcgctgatcgtgctcgctttctgcatgaggcgaagttgtctgctgtag

SEQ ID NO: 246013 - DNA, 3309 bp, synthetic construct
  misc_feature 1..3309: note = Description of Artificial Sequence: Synthetic coding sequence
  source 1..3309: mol_type = other DNA
atgaatcatcagcagcagcaacagcagcagaaggccggagaacagcagcttagcgagccagaagatatggaaatggaagccggagacacagatgacccccctaggatcacccaaaaccctgtgatcaacggcaatgtggcactgtcagacgggcataatacggccgaggaagatatggaggacgacacttcttggaggtcagaggcaacttttcagtttactgtggagaggttttctagactgtccgagtcagtgctgtctcccccatgttttgtccgcaaccttccatggaaaattatggtgatgcccagattttatcccgacaggccccaccaaaagtctgtgggcttctttttacagtgtaacgccgagagcgacagtactagctggtcttgccatgcgcaggcagtgttaaagatcataaactatagagacgatgagaagtctttttctaggagaatctctcaccttttttttcataaggagaacgattggggttttagcaactttatggcctggtccgaagttaccgatcccgagaaggggttcattgatgatgacaaggttacctttgaagtcttcgtgcaggccgatgcaccgcacggtgtggcttgggacagcaagaaacacactggctacgtgggactgaagaaccagggcgctacctgttacatgaacagtcttttgcagactctgttcttcacaaaccagttacgcaaggcagtctacatgatgcccacagaaggcgacgactcctccaaatctgtaccgctagctctgcagagagtgttctacgaacttcagcacagcgataaacctgtggggactaaaaaattgaccaaaagcttcggatgggaaaccctcgatagctttatgcagcacgacgttcaggagctgtgccgagtgttgttagacaacgttgaaaacaagatgaagggaacctgtgtggaggggacgatccctaagttattcagaggcaagatggtgtcatatatccagtgcaaggaggtggactataggagcgacaggagggaagattactatgacatccagctaagcataaaggggaagaaaaacatcttcgagtcgttcgtggattacgtcgctgtagaacagttagacggcgataacaaatatgacgcaggcgaacacggcctgcaggaggcagagaaaggtgtgaagttcctcacgcttcctcctgtcctgcaccttcagctgatgcgattcatgtacgacccgcagactgaccagaacattaaaatcaatgaccgcttcgagttccccgaacagctccctctcgatgagtttctgcagaaaacagatcctaaggaccctgccaactatatattgcacgctgttctagtccattccggagataatcatggcggacattatgtcgtgtacctgaacccaaaaggcgacggcaagtggtgcaagttcgacgatgatgtggtaagtaggtgtactaaggaggaagctatcgaacacaattacggcggtcacgacgacgacctgagcgtgcgacactgcacaaatgcatacatgctcgtctatattcgcgagtcaaagttatccgaggtgctgcaagccgtgacagatcatgacatcccacagcagctggttgaacggttgcaagaggaaaaaagaatagaggcccaaaagcgaaaggagaggcaagaagcacatctgtacatgcaggtccagatcgtggccgaggaccaattctgcggtcaccaaggcaacgacatgtatgatgaggagaaggtaaagtatactgtatttaaggtcctgaagaacagctcacttgctgaattcgttcaatcactctctcagacaatgggcttcccacaggaccagatccgtctatggccaatgcaggctaggtctaacggcacgaaacgaccagcgatgctggataacgaggctgatgggaacaagaccatgatcgaattgagcgacaacgagaacccatggactatctttctggaaacagtagatcccgagctggcggcatcgggcgcaacactccccaagtttgacaaggatcacgacgtgatgctgttcctaaaaatgtacgaccccaagacacgatccctcaattactgcggacatatctacacacctatctcctgcaagattcgggacctgctgcccgtcatgtgcgaccgcgcaggatttattcaggatacgagcctgatactctacgaggaggtaaagcccaacctcaccgaaaggatccaggactatgatgttagtctggataaggctcttgatgaactcatggacggtgatatcatcgtgttccagaaagacgatccagaaaacgataactccgaactgcctacagcgaaagaatattttagggacctgtaccatcgggtggatgtgatcttctgcgacaagaccatccctaacgacccaggctttgtcgtgactctgtccaatcgtatgaattactttcaagtcgctaaaacggtggctcagcgactgaacacggaccctatgctgctccagttcttcaaatctcaagggtatcgtgacggtccaggaaacccactgagacacaattacgaaggcaccctccgagacttgttgcagttctttaaacctaggcagccaaaaaaactgtactaccagcaactgaaaatgaaaatcactgactttgagaatcgaaggtcctttaagtgtatctggttgaactcccaattccgcgaagaggagataacgctgtacccggacaagcacggttgtgtgagggatttgcttgaagagtgtaagaaggccgttgaattgggggagaaagccagcggtaaactgagactactcgaaattgtgagctataagatcatcggagtacatcaggaggacgagcttctggagtgtctgagccctgcaaccagccggacatttcgaattgaagagatccccctggaccaggtcgatatcgacaaagagaatgagatgctggtcaccgtggcacacttccacaaggaggtgttcgggacattcggcatcccgtttctcctgaggatccatcagggcgagcactttagagaggtgatgaaaagaatacagagtttgctggatattcaagagaaagagtttgagaagtttaaatttgctatagtgatgatgggacggcatcagtacatcaacgaggatgaatatgaggttaatctgaaagactttgaaccccagcctggaaatatgagccacccgaggccctggctgggtctcgatcatttcaacaaagcgccaaagcggtctcgctacacctatttagaaaaagcaattaaaatacataattag

SEQ ID NO: 246014 - DNA, 3333 bp, synthetic construct
  misc_feature 1..3333: note = Description of Artificial Sequence: Synthetic coding sequence
  source 1..3333: mol_type = other DNA
tgcagccattcagacgtcggcgagcgcacctcccctatcccacagcagcggcctctgcaatcccacgcggagatggccggaaatcacagactcggcctcgaggcaggcgatacagatgaccccccacggattacacagaatcccgtgatcaatggaaacgtggctttgtctgatggacacaataccgccgaggaggacatggaagacgacacctcatggcgtagcgaagctaccttccagttcaccgttgagaggttttcaaggctgagtgaatcagttctctctccgccttgttttgtgaggaacctgccctggaaaataatggtgatgccacgattctatcccgacaggcctcaccaaaagtccgttgggtttttcctgcagtgtaacgctgaatccgattctacaagctggtcttgccacgcccaggcggtcctgaaaatcatcaattacagggacgacgagaaatctttttccagaagaatctcccacttgttcttccataaagagaatgactggggtttctccaattttatggcatggtcagaggtgacagatccagagaagggcttcatcgatgacgataaggtgacattcgaggtctttgtccaggccgacgctcctcacggcgtggcatgggacagcaagaaacacacaggttatgtgggcctgaagaaccagggtgccacgtgctatatgaatagcctactgcaaacactcttctttaccaaccagctgagaaaggctgtgtatatgatgccgacagagggcgacgattcatccaaaagtgtacctcttgccctccagcgagtattttacgagttgcagcattccgataagcctgttggtaccaagaagctgaccaagtccttcgggtgggaaactctggacagcttcatgcagcacgacgttcaggagttgtgccgtgtcctgttagataatgtcgaaaacaagatgaagggaacctgcgtggaagggactattcctaaattattcaggggtaaaatggtgagctacatccagtgcaaggaggtggattatagaagcgaccgccgagaggactattatgacatccagctcagtatcaaaggaaaaaaaaatattttcgaatctttcgtggactatgtcgcggtcgaacagcttgacggcgataataagtatgacgccggtgaacacggcctgcaagaggccgagaagggtgtcaaatttctaacactgccccctgtgctgcatttgcagctaatgcgcttcatgtacgacccacagacagaccaaaatataaaaattaatgaccgcttcgagtttcccgaacaactcccgctggacgaatttctccagaagaccgaccctaaggatcccgctaactatatccttcacgccgtcctggtgcatagtggtgataatcatgggggacactatgtggtctacttaaacccaaagggcgatgggaagtggtgcaaatttgacgatgatgtggtgtcccgctgtaccaaggaggaggccattgaacacaattatggaggtcatgacgacgatctgagtgtaaggcactgtactaacgcatacatgctggtttacatccgggagtctaagttgtccgaagttctgcaagccgtcacagaccatgatattccccagcagctcgtagaaaggttgcaagaggaaaagcgcatcgaagcccagaagaggaaggaacgtcaagaggctcacctgtacatgcaggtgcaaattgtcgctgaggatcagttttgtgggcaccagggaaatgatatgtacgacgaggagaaagtcaagtacaccgtgtttaaggtgctgaaaaactcgtcccttgcagagttcgtccaatcgctgagccagaccatgggctttcctcaggaccagattagactgtggccgatgcaagcacggtccaacggaacgaagcgtcccgctatgctggataatgaagccgacggaaacaagacaatgatcgagttgagtgataacgaaaacccctggacaatcttcctcgagacagttgatcccgaactggccgcttcaggtgccactttaccgaaatttgataaagaccacgacgtgatgctgttcctgaagatgtatgatccgaagaccaggtcactgaactactgcggacatatctacactcccatttcttgcaagattcgtgatctcctccctgttatgtgtgatagggctggcttcatccaggatacatcccttatactgtacgaagaagtgaagccgaatctgactgaaagaattcaggactacgacgtctccctcgacaaggctttagatgagttgatggatggggatataattgtttttcaaaaggacgaccccgagaacgacaattctgagctgccaacggcaaaggagtacttccgggacctctaccatcgggtagatgtgatcttctgtgacaagacaatcccgaatgatcctggcttcgttgttacactcagcaatcggatgaactattttcaggtggcgaagaccgttgctcagagactgaataccgacccgatgctgttgcaattcttcaaatcccaggggtaccgagacggccctggtaatccattgcgccataattatgaaggtacactacgggatctgcttcagttcttcaaacctcggcagcccaagaagctctattaccagcagctgaagatgaaaattactgactttgagaatagacgcagcttcaagtgcatttggctcaattctcagtttagagaggaagagataacgctctacccagataaacatggatgcgtccgggaccttctcgaggagtgtaaaaaggcagtcgaactgggcgagaaggccagtggcaagctacgtttactcgagatcgtttcttacaagatcataggtgttcaccaggaggatgaactgctggaatgcttgtcccccgctacaagtcggactttccggattgaagaaatacccctggatcaggttgatatcgacaaggaaaatgaaatgttggtcacagttgctcactttcacaaggaagtttttggaacatttggtattccatttctattacgaattcatcagggcgaacattttagggaagttatgaaaaggatccagagcctgttggacatccaagaaaaagaatttgaaaaattcaaattcgccattgtgatgatgggccgacaccaatacatcaatgaagacgagtatgaggtcaacctaaaggatttcgagccacaaccaggcaatatgtcccacccccgtccctggttggggctggatcactttaataaggcccctaagcggtcaagatatacctatctggagaaggcaattaagatacacaattag

SEQ ID NO: 246015 - DNA, 3012 bp, synthetic construct
  misc_feature 1..3012: note = Description of Artificial Sequence: Synthetic coding sequence
  source 1..3012: mol_type = other DNA
atggttatgcctagattttaccctgatagacctcatcagaaatctgttggcttcttccttcagtgtaatgccgagtctgactctaccagctggtcttgccatgctcaggccgtattgaaaattatcaattacagagacgatgagaaaagtttctccagacgtatctcgcacttgttctttcataaagaaaatgattggggcttctccaacttcatggcatggagcgaagtcacagatccagagaaaggtttcatagatgatgataaggtcacattcgaggtctttgtgcaggctgatgcgcctcatggcgtggcgtgggacagcaaaaagcataccgggtacgttggccttaaaaaccaaggagccacgtgctacatgaatagcctccttcagacactgttttttaccaatcagttaagaaaggcagtttatatgatgccgacagagggagacgatagtagcaaaagtgtccccttggccttgcagagggtcttttacgaactgcagcattctgataagccagtaggtacaaaaaaactaactaagagctttggctgggagacacttgattcatttatgcagcacgacgtacaagaattgtgccgcgtgcttttagataatgttgaaaataaaatgaaaggcacgtgtgtggaaggcacaatccctaagttgttcaggggaaagatggtgtcatatatccaatgcaaagaggtggactatcgaagcgacaggcgggaagattattacgacatacagttaagtattaaaggtaaaaaaaatattttcgagtctttcgtcgactacgttgcagtcgagcagctggatggggataacaaatacgatgcaggcgagcatggtttacaggaggcggaaaagggcgtgaaatttttgacgctcccccctgttcttcacctccagctgatgcgcttcatgtacgatccacagaccgaccagaatatcaagatcaacgataggttcgagttcccagaacaactgccacttgatgaatttctgcagaagacggatccaaaagacccggcaaactatattcttcatgcggtcctggttcattcaggcgacaaccatggaggtcattacgttgtgtacttgaatccaaagggagatggcaaatggtgtaagtttgacgatgatgtcgtgagcagatgcaccaaagaagaagcaatcgagcataattatggcggacacgatgatgaccttagcgtgcgtcattgtacaaatgcctacatgcttgtgtatattcgtgagagtaaactgtctgaggtcctccaggcggtcaccgatcacgatatcccgcagcagctggtggagcggttgcaggaagaaaaacggatcgaggctcagaaacggaaggagaggcaggaggcgcacctctacatgcaagtacagatcgtcgctgaagatcagttttgtggccaccaggggaatgacatgtatgacgaggaaaaagttaagtatacagttttcaaagtgttgaagaactcaagcctggcagaatttgtgcagtctttatcacagacaatgggttttccccaggaccagattcgtctctggccaatgcaagccagaagtaatggcacaaagaggcctgcaatgttagacaatgaagcagatggaaataaaacaatgatcgagttgtctgataatgagaacccttggacaatctttctggaaactgttgatcctgaactcgcagcgtctggtgcaaccctgcctaaatttgataaggaccacgatgtgatgctgttcctcaagatgtacgatcccaagacccggtctctcaactattgcgggcacatctatacccccatatcctgtaagataagggacttgctgcccgtgatgtgtgatagggcaggatttatccaggacacctccctgattctatatgaggaagttaaacccaatcttacagagcggattcaggattacgatgttagcctcgataaggctctcgacgagttgatggacggcgacatcatcgtttttcagaaagacgatcctgaaaacgacaatagcgagctgcccactgccaaggagtacttcagggacctgtaccacagagttgacgtaattttctgcgataagacgatcccgaacgaccccggttttgtggtcactctcagtaaccggatgaattacttccaggttgccaaaaccgtggcccaacggctgaataccgatcctatgctgctccagttcttcaagtcacaggggtatagagatggcccaggtaacccgctgcgtcacaactatgagggcacactgcgcgacttgctgcagttcttcaaacctcggcagccaaagaaactttattaccagcagttaaagatgaaaattactgactttgagaataggcggtctttcaagtgcatttggttgaattctcagtttcgcgaggaggagatcactctttatcccgataaacatggctgtgtgagggatctgctcgaggagtgcaagaaggctgtggaactaggcgaaaaagccagtggcaagctgaggttgctcgaaattgtcagctacaagatcattggcgttcatcaggaggatgaactcctcgaatgcctgagcccagctacttcacgcacctttcgcatcgaagagatccccctggatcaggtcgatatagacaaagagaacgaaatgcttgtaaccgtggcccactttcacaaagaggtgtttggcacatttggaatccctttcctcctgagaattcaccagggcgagcactttcgggaagtgatgaaaaggattcagagcctgctcgatatccaggagaaggaattcgaaaaattcaaatttgcgatcgtgatgatgggaagacaccagtacattaatgaggatgaatatgaagtgaacctgaaggatttcgagccgcagccaggcaacatgagccatccgagaccttggttaggccttgaccattttaataaggccccaaagcggtcccggtacacgtaccttgaaaaggcgatcaaaatccacaattag

SEQ ID NO: 246016 - DNA, 1530 bp, synthetic construct
  misc_feature 1..1530: note = Description of Artificial Sequence: Synthetic coding sequence
  source 1..1530: mol_type = other DNA
atggaggacgacacttcttggcgcagtgaagccaccttccaattcactgtggagcggtttagccggctttccgagtcagtcctttcccctccttgcttcgtcagaaacttaccttggaaaatcatggtcatgccaaggttttaccctgacagacctcaccagaaaagtgtcggcttttttctgcagtgtaacgccgagagtgactccactagctggtcctgtcatgcgcaggccgtactgaaaatcattaactaccgtgacgatgaaaagtcattctcacggaggatatcccacctgttctttcacaaagaaaatgactgggggttctctaactttatggcctggagcgaagtgacagaccctgaaaaaggctttatagatgatgataaagtcactttcgaggtgtttgttcaggccgacgcccctcacggtgttgcgtgggatagtaagaaacatacgggttatgtcggcctgaaaaaccaaggcgctacatgttatatgaatagcctcctccaaacccttttttttacaaatcagttgaggaaggctgtctatatgatgccaacagaaggtgacgattcctccaagtctgtgcccctcgccttacagcgcgtcttctacgagctgcagcattctgacaaaccagttggtactaaaaagctcacaaagagcttcgggtgggaaaccctggattctttcatgcagcacgatgttcaggagctctgtcgggtgttacttgataacgtagaaaacaagatgaaaggcacctgtgttgaaggaacgatccccaagctgtttaggggtaagatggtgagctatatccagtgcaaagaagtggactataggagcgacaggcgggaagactactacgatatccagctatccattaaggggaagaagaacatcttcgagtcctttgtcgactacgtggccgttgaacaactggatggagataacaagtacgatgcaggcgagcacgggcttcaggaagccgagaaaggagtgaaatttctcacattgcccccagtgctacacctgcagctgatgagattcatgtatgacccacagacagaccagaacatcaagattaacgacagatttgaattccctgaacagctaccactggacgagttcctgcagaagaccgaccctaaagatcctgccaattacatcttgcatgcggtgctcgtacacagcggcgataatcacggagggcactacgtcgtgtatttgaatcctaaaggggacggtaagtggtgcaagtttgatgacgacgtcgtgtctcggtgtacaaaagaggaggcgattgagcataattatggcggtcatgacgatgacttgtctgttcgacattgcacaaacgcatatatgttggtctacatccgagagtcaaaactgaccgtggggggtgccattacccggagagagaaggacagagggtctgaagcagagggggctgcagggtcgcccagtctgtacgcctctgcagattctagacgtgggccagtcctctggcctccccgagagtag

SEQ ID NO: 246017 - DNA, 7712 bp, synthetic construct
  misc_feature 1..7712: note = Description of Artificial Sequence: Synthetic coding sequence
  source 1..7712: mol_type = other DNA
atgactgccacaacaaggggcagtcccgtgggaggaaatgacaaccaaggccaggccccagacggccagtcccagcctccgttacagcagaatcaaacgtctagccccgattcctctaacgagaatagccctgctactccgccagatgagcaaggccagggcgacgcgccaccccagctcgaggatgaggagcctgcgtttccccacacagatctcgccaagttagatgacatgattaataggccacgatgggttgtgcccgtgctcccgaagggagaacttgaggtcctcctggaggctgctatcgatctgtccaaaaagggcctagatgtcaagtctgaagcatgtcagagattttttcgggacgggctgactatctcctttaccaagatcctgacagacgaggcggtatccggttggaagttcgagatccaccggtgtatcataaacaatactcaccgcctcgtggagctgtgcgtggccaagctaagccaggactggtttcccttactcgagttgttggcaatggctcttaacccgcattgtaaatttcacatttataatgggaccagaccatgtgagagcgtcagttcgtcagtgcagctccccgaagacgaacttttcgcgaggagcccagatccgaggagtccaaagggctggctggtggacctactcaacaaatttgggaccctgaatggatttcagattctgcacgatcggttcatcaacgggtccgcactcaatgttcagatcatagccgctctaatcaagccgtttggacagtgctatgaatttctgacattgcacacagttaaaaagtacttcctaccaataattgaaatggtgccccagttcctggaaaacctcacggatgaagaattgaaaaaggaggctaagaatgaagcaaaaaacgacgcattgagcatgattataaaaagcctcaaaaatctggctagcagagtgcctgggcaggaggaaacagtgaagaatctagaaatctttagacttaagatgatcctgcgcctcctgcaaatatcctccttcaatggcaagatgaatgccctgaatgaggtgaataaagtgatttcttcagtgagttactacacgcatcgccacggcaatcccgaggaggaggagtggctcacagctgagcgtatggccgaatggatccagcagaacaacattctgtccattgtgctgcgagactcactgcaccaacctcaatatgtggagaaactcgaaaaaatcttgaggttcgtgatcaaggagaaggctttaaccctccaagatctggataacatctgggccgcacaagccggtaagcatgaggccatcgtcaagaacgtgcatgacctactggccaagctggcctgggatttctcaccagagcagctggatcacctttttgattgcttcaaagccagctggactaacgcctccaagaagcagagggagaagttattggaactgatcaggaggctggccgaagacgacaaggacggagtcatggcccacaaagtgttgaatctcttgtggaatctagctcactccgacgatgtgcctgtggacataatggatcttgccctgtctgctcacataaagattctcgattacagctgttcccaggatagagatacccaaaagattcaatggatcgaccgctttattgaagaacttcggaccaatgacaaatgggtcataccagctctaaaacagatcagggaaatctgttcactgtttggcgaagcgcctcagaatctctcacagactcagcgctcacctcatgtattctacagacacgatttgatcaaccaactgcagcataaccacgcactggtcacattggtggcagagaatctcgccacctatatggagagcatgaggctctatgccagagaccacgaggattacgatccccagaccgtgagactggggtctaggtactcacatgtgcaggaggtacaggaacgtctaaatttcttgaggttcctacttaaagacggccagctgtggctgtgtgctcctcaggcgaaacagatttggaagtgccttgcagagaatgcagtgtatctctgtgaccgcgaggcgtgctttaagtggtactcaaagttgatgggcgacgagcccgacctggatccagacatcaacaaagactttttcgaatccaacgtgctccaactggatccaagcctgctcacagagaacgggatgaaatgcttcgagcgcttttttaaggccgttaactgcagggaggggaagctggtggccaaacggagagcctatatgatggatgacctcgagctcataggactcgactacctgtggagagtggtgatacaatcgaacgacgacattgccagtagagctatcgatttgctaaaggagatatacacaaatctcgggcctagactgcaggtgaatcaagtggtgatccacgaagattttattcagtcctgtttcgatcggctgaaggccagttatgacactttgtgcgtcctggacggtgacaaggattctgtcaactgcgcacgacaggaggccgttagaatggtgcgagtcctgacggtcctccgggagtacattaacgagtgtgatagcgattatcatgaggagaggactatcctgcctatgagccgcgcttttcggggtaaacatctttcttttgttgttcgctttccgaaccaggggaggcaggtagatgatctggaagtttggagtcacacaaatgatacgatcggttcggtacgacgatgtatactcaacagaattaaagctaatgtggcccatacgaagatagaattgttcgtaggtggggagctgattgatcccgcagatgaccggaagctcattggccagttaaacctcaaagataaaagcctcattaccgccaaattaacccaaatcagcagcaatatgccaagctccccagatagcagttctgacagttccaccggatcacccggaaaccacggcaatcattactccgatggcccaaaccctgaggtggagagctgcctgcccggagttataatgtcgctccacccccgatacatctcgttcttatggcaggtagctgatctcggttcgagtctgaacatgccgccactccgtgacggtgctagggttctaatgaagctaatgcctcccgactccacaactattgaaaagctccgtgccatttgcttagatcatgctaaactgggcgaatccagcttgtcaccaagcttagacagcctgttcttcgggccatccgccagtcaggtcctatacctgacagaagtggtgtatgctctcctgatgcctgcaggggctccactggcagacgacagcagtgacttccagttccactttctgaaatcaggaggcttacccttggtcctcagtatgctgacccggaataactttctaccaaacgccgatatggagaccagacggggagcctacctgaacgctctgaagattgctaagctgcttctgaccgccatagggtacggacacgtgagggcggttgcagaagcttgccagcccggtgtagagggcgtcaatcctatgacgcagattaaccaggtaactcacgatcaggccgtggtactgcaatcggctctacaatccatacctaaccctagtagtgaatgtatgctgcggaatgtgtcagtgcggctggcacagcaaatttccgacgaagccagcagatatatgccggacatctgcgtcatcagagctatccaaaagatcatctgggcatccgggtgcggaagccttcagctggtcttctcccccaatgaggagattactaaaatctatgagaaaactaacgcaggcaacgaacctgacctcgaagacgagcaggtgtgctgcgaggctctggaggtcatgaccctgtgcttcgccttaattcctacggcactggacgcactcagcaaagagaaagcctggcagactttcatcatcgatctgctgttgcactgtcacagtaagactgtcaggcaggtcgctcaagaacagttttttctgatgtgcactagatgttgtatggggcaccggccactcctcttcttcattacacttctgtttacagtgctaggctccacagctcgagaaagggcgaagcatagtggagactactttacacttctaagacacctgctcaattacgcctataactctaacataaatgtgccgaatgccgaagtactacttaataacgagattgactggctgaagagaatccgggacgacgttaagcggaccggggagaccgggattgaggaaacaatcttggaaggccatctcggcgtgaccaaggaattgctggccttccagacgagcgagaaaaaatttcatattgggtgcgaaaaggggggagccaatttgatcaaagaactgatcgacgactttatattcccagcttccaatgtctacttgcagtacatgagaaatggtgagctgcccgcagagcaggctatcccggtgtgtgggagtcctcccaccatcaatgctgggttcgagcttctggttgcgctcgcagtgggctgtgtacggaacctgaaacagattgtggattccctgacagagatgtactatattggcacagccataacaacgtgcgaagcactgaccgagtgggaatacctgccccctgtaggcccacgcccacccaagggcttcgtgggcctcaagaacgcaggcgctacctgttacatgaattcagttatacaacagctgtatatgatacccagcatcaggaacggaattctcgccattgagggaactggctctgatgtggatgacgacatgtccggcgatgagaaacaagataatgagtcgaatgtggatccacgggatgacgtcttcgggtatccacagcaatttgaggataagcccgctctgtccaaaactgaggataggaaggagtataatattggggtgttgcggcaccttcaggtgatttttggacacctggccgcaagtagactccagtattatgtcccacgcggattctggaagcagttcaggctatggggtgaacccgtaaacctgagggaacagcacgacgcgcttgagttcttcaattccctggtcgattctttagatgaggcccttaaagcccttggtcatccggcaatgctctcaaaggtgttggggggaagctttgctgaccagaagatatgtcaagggtgccctcatagatatgagtgtgaggaatctttcaccacacttaacgtggatattcgaaatcaccagaatctgttagacagtctagagcagtatgtgaagggcgaccttctggaaggggctaacgcctatcactgtgaaaagtgtaataaaaaggtggacacagtgaaaaggttgctaataaagaagttgccacctgtcttggccatacaactcaagcgttttgattatgactgggagagagagtgtgccataaaatttaatgactactttgagtttccgagagaattggacatggaaccttacacggtggctggagtcgccaagcttgagggcgacaacgtgaaccccgaaagccagttgatccaacagagcgagcagtccgagtccgagacagccggatcaactaagtaccggcttgtgggcgtactggtgcacagcgggcaggcatctggcggacactattactcttatattatccagaggaacggcggagacggagagagaaaccgctggtacaaattcgacgatggagatgtgaccgagtgtaagatggatgacgacgaggaaatgaagaaccagtgcttcggtggagagtacatgggtgaagtgttcgaccatatgatgaaacggatgtcataccgccgacagaaacgctggtggaatgcttatatcttgttttacgagagaatggatactattgatcaagatgatgagctgataaggtatattagcgagttagctattaccactcggcctcaccaaatcatcatgccttctgccattgagcgctccgtccggaagcagaacgtgcagttcatgcacaatcgcatgcaatacagtatggaatatttccaattcatgaagaaactgctgacctgcaatggtgtgtacctgaatcctcccccaggccaggatcacttacttcctgaggccgaggaaattaccatgattagtatacaactcgcagcaaggtttctcttcactacaggctttcacaccaaaaaggttgttaggggaagcgcctcagactggtacgacgcactgtgcattctgctgcgccactctaagaacgtacggttctggttcgcccataacgtactctttaacgtgtccaacagattctctgaatatcttctggagtgccctagtgcagaagtgaggggggcattcgcaaagctgatagtgttcatcgcccacttcagtcttcaggacggcccttgcccctccccatttgcaagcccaggccctagctcccaggcgtacgacaatcttagcctctctgaccatcttctccgtgccgttctgaacctcttaaggcgcgaggtcagtgagcacggaaggcacctgcagcagtacttcaatttatttgtgatgtacgccaatctgggagtggcagaaaagacacagctcctcaagctgtccgtgccagcaacctttatgctcgtaagtctggatgaggggcctgggcctcctattaagtatcaatacgcagagttgggcaagctgtacagtgtagtgagccaattgatccgctgttgtaatgtgtcatccagaatgcaatctagtatcaatggaaacccacccttgcctaatccctttggcgatcccaatctgtcccagccaattatgccaattcaacagaatgtggccgatatcctgttcgtgaggacaagttatgttaagaaaatcattgaggattgcagcaactccgaagagactgtgaaactcctgagattctgttgctgggaaaaccctcagttttcttccacagtgctatcagagctgctgtggcaggtagcctacagttacacttacgaactccgtccatatcttgatctcctgttacagatcctgttaatcgaagacagctggcagacacaccgcatccacaacgccttgaaagggattcccgacgatcgagatgggctgttcgatactatccagagatctaaaaaccactaccagaaaagggcatatcagtgcatcaagtgtatggtggccttgttttccaactgccccgttgcttaccagattctgcagggaaacggcgacctgaagagaaaatggacatgggcagtagaatggctgggcgacgagttggaaaggagaccttatactggaaatcctcagtatacctacaataactggagtcccccagtgcagagcaatgagacgtccaacggttactttttggagcgctctcacagtgctcgcatgacgttggctaaggcctgtgaactctgccccgaggaagttaagaaggctacctctgtgcagcaaatcgaaatggaagaaagtaaggagccagacgaccaggatgctcctgacgagcatgaatcccctccccctgaagacgcccctctgtacccacactctcctggatcacagtatcaacaaaataaccacgtgcatggccagccctacactggacccgctgcccaccacatgaacaatccccagcgcacaggacagcgcgctcaggagaattacgagggatcagaggaagtctcccctcctcagacaaaagatcagta

SEQ ID NO: 246018 - DNA, 7664 bp, synthetic construct
  misc_feature 1..7664: note = Description of Artificial Sequence: Synthetic coding sequence
  source 1..7664: mol_type = other DNA
atgacagctaccacaagggggtccccagtgggaggcaatgataatcaaggccaagcccctgacggacaaagccagcctccactgcaacaaaaccagacctcatcacccgacagctctaatgaaaactcccctgcaacacctcctgacgagcaggggcagggagacgcgccaccacagctggaggacgaagagcctgctttccctcatactgatctcgccaagttagatgacatgattaacagacccaggtgggttgttcccgtgcttcctaaaggcgaactggaggtactgctggaggcagccatagatttgagtaagaaggggttagacgttaaaagtgaggcatgtcagcggttctttcgcgacgggctcaccatctctttcacaaagattctcacagatgaggccgtgtcaggctggaagttcgagatccataggtgcatcattaacaatacacaccggctagtggagctgtgtgtcgccaagctgtctcaggactggttcccattgctggagttactcgccatggccctgaacccacattgcaagtttcacatctacaatgggacgagaccttgcgagagcgtctcctcctccgtccagcttccggaagacgaactatttgcaaggagccctgatccacggagccctaagggctggctggtggatctgttgaacaagtttggtacgcttaatggatttcaaatcttgcatgataggttcatcaatggcagcgcactgaacgtgcagataattgccgcattgattaagcccttcggacaatgttatgaattccttactcttcataccgtgaagaagtattttctccccataatagaaatggttccacagttcctcgagaacctcaccgacgaggaattgaagaaggaggctaagaacgaggctaaaaatgacgcactctcgatgataattaagtctctgaagaatttagccagccgagtgccgggtcaggaagaaaccgtgaaaaacctggagatctttcggcttaagatgattctgagactactgcaaataagtagctttaacggtaagatgaatgccctgaatgaagtcaataaagtcatctcttccgtctcctattatactcatcgacacggcaatccagaagaggaggaatggttgacagccgagaggatggccgagtggatccagcagaacaatatcctgtctatcgtactgcgggattctcttcatcagcctcagtatgttgaaaaattagagaagatccttcgattcgtcatcaaagagaaagcactgaccctgcaggatctcgacaatatctgggcagcacaggcgggtaagcatgaagcaattgtgaagaacgtccacgatctcttagccaagctggcttgggatttctctccggaacagttagatcacctctttgattgcttcaaggcttcttggaccaatgcctcaaaaaagcaacgagaaaaactgctggaactcatccgtcgactagccgaggatgacaaagatggcgtgatggcccacaaggttcttaatttgctgtggaatcttgcccacagcgatgatgtgcccgtggacattatggacctcgctttaagcgctcacataaaaattctagactacagctgttcccaggacagggatactcaaaaaatccaatggatcgatcgcttcatcgaggaactcaggacaaacgataagtgggttattcctgctctgaagcaaatccgagaaatatgcagtcttttcggggaggccccacagaatctcagccagacgcagcgaagccctcatgttttctaccgacacgatctgattaaccagctgcagcacaaccatgctctcgtcactttggtcgctgagaatttagcaacctacatggaaagtatgcgcctgtatgcaagggatcatgaggattatgatccccagaccgtcagattgggaagccggtactctcacgtccaggaagtccaggagcgcctgaacttcctccgttttcttctgaaggatggtcagctctggttgtgcgctcctcaagcgaagcagatctggaagtgtttagccgagaacgctgtgtatctgtgcgaccgggaagcatgcttcaagtggtactctaagcttatgggcgacgaacccgacctcgacccagatatcaataaggacttttttgagtctaacgtgctccagctggatccttccctcctcaccgagaacggcatgaaatgcttcgaacggttcttcaaagccgtgaattgtagggaaggtaagctcgtcgcaaagcgcagagcatatatgatggacgaccttgaactcatcggcttagattatttgtggagagttgtgattcagtcaaatgacgacatcgctagtcgggctatcgatcttctgaaagagatctatacgaacttagggcctagactacaggtcaatcaggtggtcatccacgaagactttatccagtcttgtttcgaccgcctcaaggccagctatgacaccctatgcgtattagacggtgataaagacagtgtgaactgcgcacggcaggaagcagttaggatggtccgtgtcttgacagttctgcgcgagtacattaacgagtgtgacagcgactatcacgaggaacgcacaattctaccaatgtctcgggcttttcggggaaaacatctcagtttcgtcgtgagattccccaaccaggggagacaggtagacgatctggaagtgtggagccacacaaacgacaccatcggaagtgtgaggagatgcatacttaatcgtataaaggccaatgtagcccacacaaagatcgagctcttcgttgggggtgaactgatcgatccagctgacgatcgaaagcttatcggacagttgaatctaaaggacaagagcctgatcacagcaaagctgacccaaatttctagcaatatgcctagctcaccagactccagttcggatagctctacagggagtcctggcaaccacggtaatcattattccgacggccctaatcctgaagttgaatcttgcctgcctggtgtgattatgtcgctccaccccaggtacatctcatttctatggcaggttgctgacctcggaagttccctgaacatgcccccattaagggatggtgccagagtcctgatgaaacttatgcccccagatagcaccactatcgaaaagcttcgcgctatttgcctggaccatgcaaagctcggcgaatcaagcttgtcaccgagcttggactctctgttttttgggcctagcgcaagtcaggttctctatctgaccgaggtcgtgtacgcactactgatgccagctggtgctcctttagcggacgatagctccgactttcaatttcattttctaaagtctgggggtttaccccttgtactgagcatgttaacccggaataacttcctgccaaatgcagacatggagactaggcggggagcatatttgaacgcattgaaaatcgcgaagctgttattaacagcaatcgggtatggacatgtccgggctgtggcagaagcctgtcagcccggtgtcgaaggagttaacccaatgacccagatcaatcaggtaactcacgatcaagccgtggtgttgcagtcagcccttcagtctatccccaatcctagctcagagtgtatgttgagaaatgtgtctgtgcggttggcccaacaaattagcgacgaggcctccagatacatgcccgatatctgcgtgatccgagccatccagaagataatttgggcatcggggtgcggatctctacagctggtcttctcaccaaacgaggagatcactaagatatatgaaaaaaccaacgcaggcaacgagccagacctagaggacgagcaagtgtgctgcgaggcgttggaggttatgaccctctgttttgctctcatccccacagccctggacgcattgtctaaggagaaggcctggcaaactttcattatcgaccttcttctccactgccactccaagacagtcagacaggtggcccaggagcagttctttctcatgtgtactcggtgctgtatgggccaccgcccactgctgttcttcattacactcttgtttaccgtactcgggtctaccgcaagagaaagagcgaagcacagtggggattattttaccctcctgagacaccttcttaattacgcttacaactctaacatcaatgttccaaatgccgaagttttgttaaataatgaaatcgattggctaaagcgtattagggacgatgtcaagagaacaggagaaacgggtattgaggaaaccatccttgaggggcatctgggcgtaaccaaagagctcctggcatttcaaacctctgaaaagaagtttcacatcggatgcgaaaaaggtggcgctaatctgatcaaggaactgatcgatgattttatcttccctgccagtaatgtgtacttgcagtacatgagaaacggcgaactgcctgccgaacaagccatcccagtctgcgggagcccacctacaatcaatgccggatttgagctgctggttgcgttagcagttggttgcgtgcggaatttgaaacagattgtcgattccctgactgagatgtactacattggaacagcaatcacaacctgtgaagctctcacagagtgggagtatctacctcccgtgggacctagaccacctaaaggtttcgtcggtctcaagaacgccggagccacttgttatatgaattccgttatccagcagctatatatgatcccctcaattagaaatggcattctcgcaatagaagggactggctccgacgtcgacgatgatatgtcaggtgacgagaaacaggataacgagagcaacgtcgatccccgtgacgacgtctttggatacccacaacaattcgaagataagcctgcactgagcaagacagaagacagaaaggaatataacattggagttttgcgccatctgcaggtgatattcgggcacctggccgcatcgaggttgcagtattacgtgcctcgaggtttctggaagcagttccgtctctggggtgagcctgtgaacctgcgcgaacagcacgatgctctagagtttttcaacagtctcgtggattccctggatgaggccctgaaagccttagggcatccagccatgctgagtaaagtcctgggcggatcctttgctgaccagaaaatttgccaaggttgcccccataggtatgaatgcgaagagtctttcactaccttgaatgtagacattagaaatcaccagaatcttctagactctctagagcagtacgttaaaggcgacctgctggagggggctaacgcctaccactgcgaaaagtgtaacaaaaaagttgacaccgtaaaacggctcctgatcaaaaagctgcccccagtcctggctatccagctgaagcgcttcgactacgactgggaacgggaatgcgccatcaaattcaatgactactttgagtttccaagggaactggacatggagccttacaccgtagccggagttgccaagctggagggagacaatgtcaaccccgagtctcagttgattcaacagagcgaacaatcagagtccgagacggccggtagtacaaagtatagactggtgggcgtccttgtacattcgggccaagcttcaggcggacactactatagctatatcatccagcgtaacggaggagatggtgagcggaatcgatggtataaatttgacgatggcgacgtgacagagtgtaagatggatgatgatgaggaaatgaaaaatcagtgcttcggtggtgagtatatgggagaggtatttgatcacatgatgaagcgcatgtcctatcggaggcagaagagatggtggaacgcatacatcctgttctacgagcgcatggacaccattgaccaggacgacgagttaatccggtacatttcagaactggcaatcaccacccgccctcatcagattatcatgccctctgcaattgaacggagcgtccgcaagcagaacgtacagttcatgcataaccgcatgcagtacagcatggagtactttcagtttatgaagaaactattgacctgtaatggcgtgtatttaaacccacccccagggcaagaccatttgcttcctgaagcggaggaaatcaccatgatctccatccaattggccgctagatttctgttcacaacgggattccatactaagaaggtcgtcaggggttcggcgagtgactggtatgacgcgctttgtatcctcttgaggcactcgaaaaacgtccgcttttggtttgcccataacgttctttttaatgtgtctaacagattctctgaatacctgttggagtgcccttcggctgaagtgcgaggcgctttcgcgaagctgatagtgttcattgcccacttctccctccaagatgggccttgtccaagcccattcgcctcccccggtccctcgtctcaagcttatgataatctcagcctatcagatcacctcttaagggccgttctaaatttgctgaggcgggaagtttctgaacatggcagacacctgcagcagtatttcaacctcttcgtgatgtatgccaacctcggcgttgccgagaagacccagcttctgaagctcagtgtgccagcaaccttcatgttggtgtccttagacgagggtcctgggcctccaatcaaatatcagtatgccgagcttgggaaattgtactccgtggtgtcacagctcatccggtgttgcaatgtgagctcacgtatgcagagctcaatcaatggcaacccacccctgccaaacccctttggcgatccaaatctaagccagccaatcatgcctattcagcaaaacgttgccgatattcttttcgtgcggaccagctacgtgaagaaaattattgaggactgcagtaattctgaggagaccgtgaaactcctccgcttttgctgctgggagaatccacaatttagttcaaccgtgttgagcgaactgctgtggcaggtggcctatagctacacctacgagctgagaccctaccttgatctgctccttcaaatcctcttaattgaagactcatggcagacgcaccgcattcataacgctctgaagggtattcctgatgacagggatggattatttgataccatacagcgcagcaagaaccactatcaaaagcgggcataccagtgcatcaagtgtatggtagctttgttctccaattgccccgtcgcatatcagattctgcagggtaacggcgatctgaaacgaaagtggacctgggcagtagaatggttgggcgatgagttggagcgacgcccttacaccgggaatccacaatatacatataataactggtcccccccagtacaaagcaacgaaactagcaatggttactttctggagagaagccactccgccaggatgaccctcgcaaaagcatgcgagttgtgccccgaagaggaacccgatgatcaagatgcgcctgatgaacatgagagtccacctccagaagacgcgcctctgtacccacactctcctggcagtcagtaccaacagaacaaccacgtgcatggtcagccctatacggggccagctgctcatcatatgaataatccccagcgcacagggcagcgagctcaggagaactatgaaggaagtgaagaggtgtcacccccacagactaaagatcaata

SEQ ID NO: 246019 - DNA, 7667 bp, synthetic construct
  misc_feature 1..7667: note = Description of Artificial Sequence: Synthetic coding sequence
  source 1..7667: mol_type = other DNA
atgaccgccataactcacggaagcccggtaggaggcaatgacagtcagggccaggttctcgatggccagtcacagcatcttttccaacaaaatcagacctcaagtcccgacagtagcaacgaaaatagcgtggccacaccgccacctgaagagcagggacaaggagacgcacctccccagcacgaggatgaggagccagcatttccacatacagaactagccaatctggacgatatgatcaatcggcctaggtgggtcgtacccgtgttgcccaaaggggaattagaggtcctgcttgaggctgccattgatctgagcgtcaagggtctcgatgtgaagtcggaagcctgtcaaaggttttttcgggatggactgacaattagtttcaccaagatattgatggacgaggccgttagcggctggaagttcgaaattcatcggtgtatcatcaacaatacccatcggctcgtggagctgtgtgtggctaagttatcacaagattggtttccgttgctcgagcttctagctatggcgctaaatcctcactgtaaatttcacatctataacgggacacgtccatgcgaactcatcagctccaacgctcagctcccggaggacgaattgttcgccagatccagcgacccgaggtctccaaagggctggcttgtcgacttgatcaacaagtttggaacgttaaatggatttcagatcctgcatgaccggttttttaatggctctgcactgaatattcagatcattgccgcactgatcaaacccttcgggcagtgctacgagtttctgtcacagcatactttgaaaaaatactttatccccgtgattgaaatagtgccccacttattggaaaatcttaccgacgaggagctgaagaaagaggcaaaaaatgaagccaagaacgacgcattgtctatgataatcaaatccctaaagaaccttgccagcaggatatccggccaggatgagactataaaaaacctcgaaattttccggttgaagatgattctgcggctgctccagatcagctcctttaacggaaagatgaacgccctcaacgagattaacaaggtcatttcaagtgtatcatattatactcaccgacacagcaacccggaggaggaggagtggctgactgcagagaggatggccgagtggatccaacagaacaatatacttagcatcgtgctccaggattcgctacatcagcctcaatacgttgaaaaactggaaaagattttgcgattcgttatcaaagagaaggccctgacactgcaggacctggataatatctgggcagcccaggccggaaagcatgaggctatcgtcaaaaatgttcatgatcttctggctaaactggcctgggattttagccccggacagctcgatcacttattcgactgcttcaaggctagttggaccaacgcatcgaagaaacaacgggagaaactgttagaactcattcgcaggctggcagaagacgataaggacggtgtgatggcacacaaagtcctgaatcttctgtggaacttagcacaatctgatgacgttcctgttgacattatggacctagctttgtctgcccatatcaaaattctcgattattcctgttctcaagacagagatgctcagaaaatacagtggattgatcatttcatagaggaactccgaaccaacgataagtgggtcatccccgcactgaagcagattagggagatctgcagtttattcggggaggcgtctcagaacctttcacagacacaacgctcccctcatattttctacaggcacgacctgattaaccagctgcagcaaaaccacgcactggtgacattagtggcagaaaacctggctacatacatgaactcaatccgactctacgctggagaccacgaagactatgaccctcaaactgtcagactggggtcccgttacagccatgtccaggaggtacaggaacggctcaacttcctgagattcctgctcaaagacggccagttgtggctctgcgcaccccaggcaaagcagatttggaaatgtctcgcagaaaacgctgtgtatttgtgcgatagagaggcatgtttcaaatggtatagcaaacttatgggggacgaacccgaccttgatccagacatcaacaaagacttctttgaatcaaacgtgctgcagcttgatccatctctgctgacagaaaacggtatgaaatgtttcgagcgcttcttcaaagccgtcaactgcagggaaagaaagctcatagcaaaacgacggtcatatatgatggacgatctggaattaataggtctggattacctctggcgagtcgttattcagtcttccgacgagattgccaacagggccatcgacctacttaaggagatttacaccaatctcggaccacgtctgaaagcgaaccaggtagtgatccacgaagacttcatacagagctgctttgaccgcttaaaagcaagttatgatacgttgtgcgttttcgacggggacaagaatagtattaactgcgcgagacaggaggctatcagaatggttagggtgctgacagtgatcaaggaatatattaacgaatgcgactccgattaccacaaagaaaggatgattctgcctatgtctcgagcttttagaggaaaacatctgagcttgatcgtgaggttcccaaatcaaggacgccaagttgacgagctggacatttggagccacacaaatgatacgattggcagcgtgcggagatgtatagtgaacaggatcaaagccaacgtcgcccacaaaaaaattgagctcttcgtgggaggcgaactgatcgactctgaagatgataggaagctaataggacagctaaatctcaaagataaatctctgatcacagccaagttgacacagattaattttaacatgccctctagcccggacagcagtagtgatagctccacggcttcccctggcaaccaccgaaaccattacaacgacggccctaacttggaggtagagtcatgtctgcccggagtcattatgtccgtgcatccgaggtacatctcattcctgtggcaggtcgctgacttggggtctaatttgaacatgccccctctgcgcgatggagcaagggtcctgatgaagctgatgccacccgaccgcaccgcggttgaaaaactccgtgctgtttgcttggatcacgcaaagttgggagagggcaagctgtcaccaccactggattcactgtttttcgggcctagtgcctctcaagtgctatatctgacagaagttgtctacgccctcctgatgcctgcaggagttcccctgactgatggcagcagtgattttcaggtgcatttcctcaaatcaggagggctcccccttgtgctgtccatgctcattcggaacaatttcctgcccaacacagacatggagactcggcgtggagcatacctgaatgcacttaaaatagccaagctgctgctcaccgctattggatacggccacgtgcgcgctgtcgccgaagcgtgccagccggtagtggatggaaccgatcccatcacgcagattaaccaggtgacccacgaccaggccgtggtgttacagagcgcactgcagagcataccaaatccatcttcggagtgtgtcctgaggaatgaatccattttactcgcccaggagatttctaatgaggcctctcgctatatgcctgacatctgtgtgattagggctatccaaaaaattatctgggctagtgcttgtggagctctcggccttgtgttcagtcccaacgaagagatcacgaagatttatcagatgaccacaaatggctcaaataagttggaggttgaggatgaacaggtatgctgtgaagccctggaggtgatgaccttgtgtttcgcccttttaccaaccgcgcttgacgcgctcagcaaggagaaggcctggcagaccttcatcatcgacctcttactgcattgtcctagcaagacggttcgccagctggcacaggagcaattctttttgatgtgcacacgatgctgcatggggcacaggcctctgcttttttttatcaccttgttgtttacaatcttgggttcaacggcaagagagaaaggaaaatacagtggcgattattttacgctgctccgccatttgctgaactacgcttataacggaaacataaacatcccaaacgccgaggtcctgctcgttagtgagatagattggctgaagcgcatccgtgataatgtaaagaatacaggcgagaccggagtggaagagcccatcctcgaggggcaccttggcgttacaaaagagctgctggcctttcagaccagcgaaaagaaataccatttcggctgcgagaagggcggagcgaatcttattaaagagctcatcgatgacttcatctttccagcgagtaaagtctacctgcagtacctgcgcagtggcgagctcccagcagagcaagcgatccccgtttgtagttctccagtaacaatcaatgcgggttttgaattgttggtcgcacttgccataggttgcgtgcgcaatctgaaacagatcgtggattgcctcacggaaatgtattacatgggaactgcgatcacgacatgcgaggccttgacggaatgggagtatctaccgccagttgggcctcggcctcctaaaggtttcgtgggtctgaagaacgccggagccacctgctatatgaatagcgtaatccagcaactttatatgatccctagcattaggaattctatcctagccattgagggtacgggcagcgacctccacgacgacatgttcggggacgaaaaacaggatagtgaaagtaacgtggatcccagagacgatgtcttcggctatccacatcagttcgaggacaaacctgcgctgagtaagactgaggatcgcaaagaatacaatattggggtcctgagacacctccaggttatttttggccatctggctgcttcacaactgcagtattatgtgcctcgcggtttctggaaacagttccggctgtggggggaacccgtgaatttgcgagagcaacacgacgctcttgagttttttaactctttagttgattccctggacgaagcactgaaagcactgggacaccctgcaatcctgtccaaggtgttagggggaagtttcgcagaccagaagatctgccagggctgtcctcatagatatgagtgtgaggaaagtttcaccacactgaacgtggacatccgaaaccaccagaacttattggattccttggagcagtatattaagggcgatctgcttgagggagctaatgcttatcattgcgaaaaatgtgacaaaaaggtggatacagtgaaaagattactgattaaaaaattgcctagggttttagcaatacagctaaagcgcttcgactacgattgggagcgggagtgcgctattaagttcaatgactattttgagttccccagggagctcgatatgggaccttataccgttgccggtgttgcaaacttggagagggacaatgtgaattcggagaatgagctgatcgagcagaaggagcagtcggataacgagacagccggtggcaccaagtaccggctggtcggggtgctggtacatagcggccaggcctctggtggccactactacagctatattattcagaggaacgggaaggacgaccaaactgatcattggtacaagttcgacgacggcgatgtaaccgaatgtaaaatggacgacgacgaggaaatgaaaaatcagtgtttcggcggagagtatatgggggaggtgtttgaccatatgatgaaaagaatgtcttacaggcgccaaaagcggtggtggaatgcctatatcctgttttacgagcagatggacatgatcgatgaagacgatgaaatgatacgatatatcagcgagttgaccatcgccagacctcaccagattatcatgtcgcctgctatagagcgttcagtgaggaaacagaacgtcaagtttatgcacaacagactgcaatatagcctcgagtacttccagtttgttaagaagctgcttacctgtaatggcgtgtacctgaaccccgcaccagggcaggactacttgctcccagaagctgaggaaatcactatgatttcaattcaactcgccgctcgcttcctttttacaactggtttccatacaaagaagattgtgagagggccagcatccgattggtatgatgcactgtgcgttctgctgagacatagcaaaaacgttaggttctggtttacgcacaacgtactgttcaacgtgtctaatagattctcagagtacctgcttgagtgcccctccgccgaggtgcggggagccttcgcaaagctgattgtgttcatagcccatttctcgttacaggatgggagttgcccaagtccctttgcttcccctgggccttcttcacaggcctgcgacaaccttagtctttcagaccacctactgagggccacactcaacctcctgcgcagagaagtgagtgaacatggacatcatctgcagcaatatttcaacctgttcgtgatgtatgctaacctgggcgtggccgagaaaactcagctgctgaagttaaacgtgccagctacttttatgcttgtaagcctcgacgaggggccagggcctccaattaaataccagtacgccgagctagggaaactctacagcgtggtctctcagcttatcagatgttgcaacgtgagctccacgatgcaatccagtattaatggcaatcctcccctgcctaacccatttggtgacctgaatctgagccagcctattatgccaatccagcagaacgtacttgatatcctgttcgtgcgtacatcatatgtaaagaagattatcgaggattgtagcaacagtgaggacactatcaagttgctgcgcttctgttcctgggaaaaccctcagttttcatcaacagtactcagcgagcttctctggcaggtagcatactcttatacctatgaattgcgaccatacctcgaccttctgttccaaatcctcctgatcgaagacagttggcagacccatcggatccataacgcactgaagggtattcccgacgatcgagatggcctgtttgacactatccagagaagcaagaatcattaccaaaagcgcgcataccagtgtattaaatgtatggttgctcttttcagcagctgccccgtcgcctatcagatactgcagggcaacggcgatttgaagcgcaaatggacctgggccgtggaatggttaggcgatgagttggagaggcgcccatataccggaaacccccagtactcttataataactggtcaccgcctgttcagagcaacgagaccgccaacgggtatttcctggagcgctctcattccgctaggatgacgctggccaaggcatgcgagctctgtccagaggaggaacccgacgaccaagacgccccagatgaacacgagccctctccttctgaagatgctccgttgtatccgcattctccagcctctcaatatcagcaaaataaccatgtacacggacagccttataccgggccagcggctcatcatctgaacaatcctcagaagacgggtcaacggacccaagaaaactacgagggcaacgaggaagtcagttctcctcagatgaaagatcagta

SEQ ID NO: 246020 - DNA, 714 bp, synthetic construct
  misc_feature 1..714: note = Description of Artificial Sequence: Synthetic coding sequence
  source 1..714: mol_type = other DNA
tgactgctgaagactgcagtgacccagaggatcccctctaactattttgccttcgcactggggcgtatcctgtcatcccacctactctctagtgccaacttctcagggcgaattcataacgccctgaaaggtatccccgacgatcgagatggtctattcgatactatccagcggtccaagaaccattatcagaagcgcgcttatcagtgcatcaagtgcatggtagctctctttagcagttgcccagtcgcctaccagatattacagggtaacggtgacctgaagaggaagtggacatgggccgtggagtggctcggggacgagcttgagaggaggccgtatactggaaatcctcagtactcttacaacaattggtcacccccagtgcaaagcaatgaaacggccaacggatatttcctggagcggtcccattctgctcgcatgacattggcaaaggcttgcgagctgtgcccagaggaggagcccgatgaccaggacgccccagatgagcacgaaccttcaccttccgaggatgctccactttatccgcactcaccagcaagccaataccagcagaacaaccatgtacatgggcaaccctacactggccctgccgcacatcatctgaacaaccctcagaagaccgggcagaggacccaagagaactacgaaggcaatgaagaagtgtcctcccctcagatgaaggatcagtag

SEQ ID NO: 246021 - DNA, 3201 bp, synthetic construct
  misc_feature 1..3201: note = Description of Artificial Sequence: Synthetic coding sequence
  source 1..3201: mol_type = other DNA
atgacggaccaagagaacaataacaatatatccagcaacccttttgcagctctgtttgggagtcttgctgatgctaaacagtttgccgctattcagaaggaacagctgaaacagcaatccgacgagctgcctgcaagcccagacgattcggataactccgtttccgagagccttgacgagtttgactactccgttgcagaaatatccaggagctttaggagccaacaggagatttgcgaacagctgaatataaaccacatgattcagcgtatatttcttataacgctggataatagcgacccttctctgaagagtggaaacggcattcccagccgatgcgtctacctcgaggaaatggccgtggaactggaagaccaagattggttggacatgagcaacgtggagcaggccctcttcgccagactcctcctgcaagacccgggaaatcatctgattaacatgacctctagcacaacactgaacctgtcagccgacagagacgctggcgagcgccacatattctgttacctgtactcatgtttccaacgggctaaagaggagattaccaaggttcctgagaatttactgccttttgctgtccagtgcaggaacctcacggtctccaatacacggactgttttgctaacacctgagatttacgtggatcagaacatccacgaacagcttgtcgatctgatgctcgaagcaatacaaggagcccacttcgaagatgtaactgagttcctggaggaagtgattgaagccctgatcctggacgaggaggtgcgcactttcccagaggtgatgattcccgtatttgatattctgcttggtaggattaaggacctggagttgtgtcagatattgctttatgcctacctagatatccttctgtattttacacggcaaaaagatatggcaaaggtgtttgtggaatacatccagccaaaagatcctacaaacggccagatgtaccagaaaactctgcttggagtgattttaagcatctcgtgcctcctgaaaacccctggtgtcgttgagaaccacggctacttcctgaaccccagtaggagtagtccacaggagatcaaagttcaagaggcaaatatacatcagtttatggctcagttccatgagaagatctatcagatgctaaagaatctgctccagctatcaccagagaccaaacattgtatcttgtcctggcttggcaattgtctccacgcgaatgctggaagaactaagatatgggctaaccagatgcctgaaatcttcttccagatgtacgcatcagacgcatttttcctgaatcttggagccgctttgctgaagctgtgtcagcccttctgtaaacctaggtccagccggctcctcacatttaaccccacctactgtgccctcaaggagcttaacgacgaagaaaggaagattaagaacgtgcacatgcggggacttgacaaagagacctgcctgatcccggcagtccaggaacccaagtttccccagaactataacctcgtgacagagaacctggccctgacggagtacaccctgtatctgggctttcatcgcctacacgatcaaatggtgaagattaatcagaatctgcaccgcctgcaggtggcctggagagacgctcaacagagtagctctcccgcagctgataacctgagggaacagttcgagagacttatgacaatttatctgtccaccaaaacagccatgactgagcctcaaatgttgcaaaactgtttgaatttgcaagtctccatggctgtgcttctggttcaactagcaattggtaacgagggttcccaacctatcgagctcactttcccactccctgatggatactctagccttgcttatgtgccggagttctttgccgataacctgggcgatttcttaatcttcctcagaagatttgcagacgacatcctggagactagcgccgattcacttgagcatgtattgcactttatcaccatcttcaccggctctatcgagcgcatgaagaacccccatctgcgcgctaaactggcagaggtgctagaagccgtgatgccccatcttgaccagacccctaacccgttagtgtcatccgtgtttcatcggaaacgggtcttttgcaatttccagtacgctcctcaactggcagaagcgttaattaaagtctttgttgacatcgagttcaccggggacccacatcagtttgagcagaagtttaactatagaagacccatgtaccctattctgcgctatatgtggggaacagacacttatcgggagtccataaaagacctcgccgactacgcgagcaaaaatctcgaggctatgaaccccccactgttcctgagattcctgaacctcctgatgaatgatgccatttttttgctggacgaagctattcaatacctgtccaaaataaagattcaacaaattgaaaaggatcgaggggagtgggattcactgacaccggaagcgaggagagagaaggaggctgggctgcagatgtttggacagcttgctcggttccacaacatcatgtcaaacgagacgatcggaactctcgcatttctgaccagcgaaataaagtccctctttgtccacccattcctggctgagagaattattagtatgctcaattatttcctgcagcacctagtcggtcctaaaatgggggctcttaaggtgaaggatttctctgagttcgattttaagcctcagcagctggtgagcgacatctgtaccatctatctcaacctgggggacgaagagaacttttgtgcaaccgttccaaaagatgggcgatcctactcacccactctcttcgcacagacagtgcgtgtcctgaaaaagatcaataaacccggaaatatgatcatggctttttcaaatctcgcagagaggataaagagcctcgctgatctccagcagcaggaggaagaaacctacgccgatgcctgtgacgagttcctggatcccattatgtcaaccttaatgtgtgaccccgtcgtactccctagctctcgtgtaaccgttgaccgcagcaccattgcgagacatctgttaagcgaccagaccgacccgttcaataggtcccccttgacaatggaccagattcggccaaacacagaacttaaagagaaaatccagcggtggctggcagagcggaaacaacagaaagagcagcttgagtag

SEQ ID NO: 246022 - DNA, 3222 bp, synthetic construct
  misc_feature 1..3222: note = Description of Artificial Sequence: Synthetic coding sequence
  source 1..3222: mol_type = other DNA
atgaccgaccaggagaacaacaacaacatctccagcaacccgttcgccgcactgttcggatccctcgccgacgcaaagcaattcgccgctatccagaaagaacagttgaagcagcagagcgacgaactgcccgcaagccctgatgacagtgataactctgtttccgagtctctggacgagttcgactatagcgtcgctgaaatttcacgcagctttcgatcccagcaggagatctgtgagcagctgaacatcaatcacatgattcaacggatattcttgatcacgctggacaactccgatccttctctgaaatccggaaacggtattcccagtcggtgcgtgtatttggaggaaatggccgttgagttagaggaccaggactggttggacatgagtaacgttgaacaggcgttgttcgccaggcttctgttgcaggatcccggaaaccatctaatcaatatgacaagttctactactctgaatctttctgcagacagggacgccggagagaggcatatcttttgttatttgtactcatgctttcagagggctaaggaagagataactaaagtgcctgaaaacctgctgcctttcgccgtgcagtgtagaaacctgacagtgtccaatacgcgtactgttctgcttacccctgaaatttatgtagaccaaaatatccatgagcagctggttgatctgatgctggaggccatacaaggggctagggagtacatgaacaagatatattttgaggatgtaaccgagttccttgaggaggtgatcgaggccctgattttagacgaagaggttaggactttccccgaggtgatgattcctgtgtttgatattctacttgggaggataaaagatttggagttgtgccagatcctgctctatgcgtacctggacatcctgctctactttacccgccagaaggacatggcaaaggttttcgttgagtatatccagccaaaggatcccacaaacggacagatgtaccagaagacgttgctcggggtcatcctgtcaatctcttgcctactcaaaaccccaggagtcgtggaaaatcacgggtatttcctgaacccttcgcggtcatccccgcaggagattaaagtgcaggaggcaaatatacaccaattcatggcacagtttcatgaaaagatttatcagatgctaaagaatctgctgcagctgagccccgaaaccaagcactgcatactctcatggctgggaaactgtctccatgccaacgctggacggacaaaaatttgggccaaccagatgccagagattttctttcagatgtacgctagcgacgcattttttctgaatctgggcgctgcactgcttaagctctgccagcccttctgtaaacctagatcatcacgactactgacttttaatcccacttattgcgcgctcaaagagttaaatgatgaggagaggaagattaaaaacgtccatatgagaggcctggataaggagacctgcttgatccctgccgttcaggagcccaagtttccacagaactacaacctcgtgacggaaaacttagcattgacagaatatacgttatacctcgggtttcaccgccttcacgaccagatggtgaaaatcaaccagaacctccacagacttcaggtggcttggagagatgcccaacagtcttcgagtcctgctgctgacaatctgagagaacagtttgaaaggctgatgacgatttacctgagtaccaaaactgcaatgactgagccacagatgctgcagaattgcctgaacctgcaggtttctatggcagtgcttctggtgcagctcgccatcgggaacgagggcagccagcctatcgagctaaccttccccctgcccgacggctactccagcctggcatatgtgcctgagttctttgcggataatctcggtgatttcctcatctttttgcggagattcgccgatgacatcctagagacctcggccgattcacttgagcacgtgctacattttataacaatctttaccggatccatagaacggatgaagaaccctcacctgcgggcaaaactggctgaagtgctggaggcggtgatgccccacctggaccagacccctaacccccttgtttcctccgtgttccaccgcaagcgggttttctgcaatttccaatacgcccctcagcttgccgaggctctgatcaaggtgttcgtggacatcgagttcactggcgaccctcaccagtttgaacagaagttcaattacagaaggccaatgtatcccatcctgcggtatatgtggggaaccgacacttacagggagtccatcaaggacctggcagattacgcatcaaagaacctagaggccatgaaccctccgttgtttctacggttcctgaacctgttgatgaacgacgctatctttctgcttgacgaggctattcagtatctcagtaagattaagatacagcagatagagaaagataggggagagtgggattccctgacccctgaggcacgcagagaaaaagaggccggtctccagatgttcggccagctcgcccgtttccacaacataatgtccaacgagaccatcggcacactggcctttctgaccagtgagataaagtcgttatttgtgcaccccttcctggctgagcgcataatcagcatgctcaactactttttacagcaccttgttggacctaagatgggcgctcttaaggtgaaggatttttcagagttcgattttaagccccagcagctcgtttctgatatttgcacgatctatcttaatctcggcgacgaggaaaacttctgcgccaccgttcctaaagatggaaggtcctactctcccaccttattcgcccagactgtgagagtcttaaagaaaattaataaaccaggaaacatgatcatggcattcagcaacctggcggagcgcattaagagcctcgctgacctgcagcagcaggaggaggagacctacgccgacgcctgtgatgagtttctggaccctattatgagtactctcatgtgtgatccagtggtgctgccaagcagtcgtgtgaccgtggatcgctcaactattgccagacacctactcagtgatcagaccgaccccttcaatcggtccccactcaccatggatcagatccgcccaaacactgaactgaaagagaaaatccagcggtggctcgctgagcgtaagcaacagaaggagcagctcgaatag

SEQ ID NO: 246023 - DNA, 1617 bp, synthetic construct
  misc_feature 1..1617: note = Description of Artificial Sequence: Synthetic coding sequence
  source 1..1617: mol_type = other DNA
atggttaagattaatcagaacctgcaccggctccaggttgcatggagagacgctcagcagagttcctccccggctgccgacaacctgagagagcagttcgaacggttgatgaccatctacttgagcactaagacggccatgaccgagccccagatgctgcagaattgcctcaacctccaagtttctatggcggttctgctggtccaattggctatcggaaatgagggtagtcagcctattgagctgacatttccactgccggacggctacagtagtctggcctatgttccagagttctttgctgataatctgggcgacttccttattttcctccgccgattcgcagacgatattctcgaaacttccgctgattcactggaacacgtgctgcatttcatcacaattttcacgggaagcattgagagaatgaagaaccctcacctgcgcgctaagctggctgaggtgctggaggcagttatgcctcacctcgatcagacccccaatccgctggtgtcaagcgtgtttcacaggaagcgcgttttttgcaacttccaatacgctcctcagcttgcagaagctctgatcaaagtgttcgttgatatcgagttcactggagatccacaccagttcgagcagaaatttaattaccgtagacctatgtacccaattctccgatatatgtggggcactgacacatacagggagtccattaaagatctggcagattacgcatcgaagaacctagaagcaatgaaccccccactgtttctgcggttcttgaatcttctgatgaacgatgcgatattcctcctggacgaagcaattcaatacctgtcaaagatcaagatacaacaaatcgaaaaggacagaggtgagtgggatagtctcactcccgaagcaaggcgagaaaaggaggctggacttcagatgttcgggcagttagcgcgattccacaacatcatgagcaatgagaccatcgggaccctggcattccttacaagtgagattaagagcttatttgtgcatccatttttggcagaacgcatcatctccatgctgaattactttttacagcatctggtgggccctaagatgggggcactgaaggtgaaggacttttccgagttcgacttcaagccccaacagttggtaagcgatatctgtactatttaccttaacctaggagacgaggagaatttctgcgcgaccgtgcccaaggacggcagaagttacagccccacactctttgcccaaacggtgagagttctcaagaagattaacaaaccgggaaacatgatcatggcattctccaatctagccgaacggatcaaatccctcgcggacctgcagcaacaggaggaggagacttacgccgacgcctgtgatgaattcctggatcctattatgagcacactaatgtgcgatccagtcgtacttccaagttctcgagtcacagtcgacagatccacaatcgcacgccatctcctgagcgaccagactgatcctttcaaccgaagccctttgaccatggaccagatccgtccaaacactgagctcaaggaaaagatccagcgttggcttgctgagaggaagcagcagaaggagcagctcgaatag

SEQ ID NO: 246024 - DNA, 3522 bp, synthetic construct
  misc_feature 1..3522: note = Description of Artificial Sequence: Synthetic coding sequence
  source 1..3522: mol_type = other DNA
atggaggagctctcagccgatgagatcaggagaagaagactcgccagattggccggaggccagacgtcccagcccactacacccctgacatctccgcaacgtgagaatccgcctgggcctcctatcgctgcctccgcacccggtccatctcaaagcttgggcctgaatgtgcacaacatgacacccgcaaccagcccgattggggcttcaggcgttgcccataggtctcagagctctgaaggtgtctcctccttgagttcaagcccaagcaactccttggagacacaaagtcaaagcctgtcgcggtcccaatccatggacatagacggggtatcgtgcgaaaaatctatgagccaggttgacgtggatagcggaatcgagaacatggaggtggacgagaacgaccgccgagaaaagcggagtcttagtgacaaagagccatcgagtggccctgaagtgtcggaggagcaagccctgcagctggtgtgtaagattttcagagtcagctggaaggacagagaccgggacgtcattttcctgagttctctgagcgcccagttcaagcaaaatccaaaagaggtattctccgatttcaaagatctcatcggccagatcctgatggaggtactgatgatgtcgacacaaacccgagatgagaacccattcgccagcctaactgcaacaagccagcccattgcagccgcagcgcgttctccagatcgtaacttgctactgaacacaggaagtaaccccggtacttcgcctatgttctgtagtgtggcctccttcggcgctagtagcttaagctccctgggggcttctggtggagcatctaactgggattcctatagcgatcactttaccattgagacatgtaaggaaacagacatgctcaattatctcattgaatgtttcgacagagtggggatagaagaaaagaaagctcccaaaatgtgcagccagccagccgtcagccagctgttgtcgaatattaggagtcaatgtatcagtcacacagccctcgtcctccagggcagcttaacccaaccccgatcactacagcagccatcatttctggtgccttatatgctgtgtcgcaatctgccgtacggtttcattcaagaacttgtacggaccactcatcaagacgaggaagtctttaaacaaatcttcattcctattcttcaggggcttgccctggcggctaaagaatgctcattggactctgactatttcaaatatcctctcatggctcttggggaattatgtgagacaaagttcggcaagacacaccccgtgtgcaatctcgttgcctccctccgcctgtggctgccaaagagcctgagcccaggttgcggacgggaactgcagcggttgtcctacctgggcgcttttttctccttttcagtttttgccgaagacgacgtgaaagtcgtcgagaagtactttagcggtccagccattacactggaaaacactagggtggtctctcagagccttcaacattatctggaattgggaaggcaagagttatttaagattttgcattctattttgctcaatggcgaaacaagagaagcagctctaagctacatggccgctgtggttaatgcaaatatgaagaaggcacagatgcaaacggatgatcgtctcgtgtccaccgatggtttcatgctgaactttctctgggtgcttcaacaactttcaaccaaaataaagctggaaaccgttgacccgacctacatttttcacccaaggtgtcgaattactctgcctaacgatgagacacgagttaacgccaccatggaagacgtcaatgactggctgaccgagttgtacggcgaccagccccctttctccgaacccaagttccctacagagtgcttttttctcacgctgcatgctcaccacttgtctatattacccagttgcagaagatatatacgacgactgcgagccatccgggaactgaacagaaccgtggaggatctaaaaaacaatgagtctcaatggaaagattcaccgctcgcgacccgccatagggagatgctcaagcgctgtaagacccagctgaagaaactggtgcggtgcaaagcttgtgccgacgcaggcctactggacgagtcgttcctgagaagatgtcttaacttctacgggctgctgattcagctattgctgaggatcctcgacccagcttatccagacataacactgcctttgaactctgacgtaccgaaggtattcgccgctctgcctgaattttatgtcgaggacgtggcagagttccttttttttattgttcaatattcaccccaggctttatacgagccatgcactcaggacatcgtgatgttcctggtggtaatgctctgcaaccagaattacatccgcaacccttatctggtggctaaactcgtagaggtgatgttcatgactaatccggctgtccagccaaggacgcagaaattctttgagatgatcgaaaatcatcccttaagtacaaaactgcttgtaccatctctcatgaaattctacaccgatgtggagcacacgggcgcaacatctgagttttacgacaagtttaccatcaggtaccatatctcgaccatctttaagtcactgtggcagaatatcgcccatcacggaaccttcatggaggaatttaactccggtaagcaattcgtcagatacatcaacatgctgattaatgataccaccttcctgctggacgaatccctggagtcactcaagagaatccacgaggttcaggaagaaatgaagaacaaagagcagtgggatcagttaccaagagaccagcagcaggccaggcagtctcagctggctcaggacgaacgtgtgagtaggtcatacctggctttagcaacagaaaccgttgacatgttccatattttgaccaagcaggtccaaaagccatttctgagacctgagctgggaccacgcctggccgctatgctcaacttcaacttgcagcagctgtgtggaccaaagtgccgggatcttaaggttgaaaaccccgagaaatacgggttcgagccaaagaaactgctcgaccaactcaccgacatatacctgcagctggactgcgccagatttgccaaagcaatagccgacgaccagcgcagctacagtaaggaactcttcgaagaagtcatttcgaaaatgcgcaaggccggaatcaagagcaccattgctatcgaaaaattcaaactgctggccgagaaagtggaggaaatcgtagcaaagaacgctagagctgagatcgattactccgacgcacctgacgagtttcgggaccctctcatggacaccttgatgaccgacccagtgagacttccctccggtactatcatggatcgctccattatcttgcgccacctgttgaacagcccaacggaccctttcaatcgtcaaacccttacagaatccatgttagaacccgtgcccgagctcaaagaacaaatccaagcatggatgagggaaaagcagaactctgatcattag

SEQ ID NO: 246025 - DNA, 3909 bp, synthetic construct
  misc_feature 1..3909: note = Description of Artificial Sequence: Synthetic coding sequence
  source 1..3909: mol_type = other DNA
atggaagagctcagtgcagacgagatcagaagacgacgtctggctcggctagctggaggacagacttcacaacctaccacccccctgacttcccctcagcgggagaatccccctggacctccaatcgctgcttctgcgccagggccttctcaaagccttgggttgaacgtgcataatatgacccctgccacatcacctatcggagccagcggtgtcgcacatcggagccagagtagcgaaggggtgtcctctctctcatctagtccatcaaattcccttgaaactcagtctcagtcacttagcagatcgcagagcatggatatcgacggcgtgtcgtgcgaaaaaagtatgtctcaggttgatgtggactctggcattgagaacatggaggttgatgagaacgatcggagggaaaagcggagcttatccgataaggagccctcctcaggacctgaggttagtgaagaacaggccctccagctggtctgtaaaatatttagggtcagctggaaggatagagacagggatgtgatctttttgagtagcctgagtgctcagttcaagcagaaccccaaggaagttttcagcgacttcaaggatcttatagggcagatcctgatggaagttctgatgatgtccacacaaactcgggatgaaaaccccttcgctagcctgactgccacgtcccaacctatcgccgcagcagccaggtcccccgacagaaatcttctgttaaacaccggctccaacccagggactagccctatgttctgctctgtggcttcatttggagccagttcattgtcgtctttgtatgaaagtagccccgctccaaccccatccttctggtcctcagttcctgttatgggcccatcactggcgtcaccttcgcgcgctgcctcgcagctcgctgtgccaagcacacccttaagtccccactcagcggcatccgggactgcagccggaagtcagccaagttcccccagatatcgaccttatacagttacacatccatgggctagttctggcgtgtccattctcagttcctccccctctccacctgccttggcaagctcccctcaggcagtgccagcgtcctccagtcgtcagaggccatcaagcactgggcctccactgccgccagctagcccttctgctactagccggagaccaagctccctccgtatctctcccagtttgggggcaagcggaggtgcctctaattgggattcctactctgatcactttaccatagagacttgcaaagaaactgatatgctgaactacctgatcgaatgctttgaccgggtgggcatcgaagaaaagaaggccccaaagatgtgtagccaacccgcagtgagtcaactgctgtccaatattcgctcccagtgtatctcgcataccgccttggtcctgcagggcagcctgacgcagcccagaagccttcagcagccttcctttctggtcccttatatgctgtgcaggaacctgccatacggtttcatccaggagctggtgaggaccacccatcaggacgaagaggtgttcaagcaaatatttatccctattctacaggggctagccttagcagccaaagagtgttccctggattctgactactttaaataccctctgatggcactcggcgagctctgtgagaccaagttcgggaaaacccacccggtctgcaacttggtggcaagtttacgcttatggctgccaaaatccttgagtcccggatgcggacgcgagctgcagcggctcagctatctcggcgctttcttttcattcagtgtcttcgctgaagatgatgttaaagtggttgagaagtatttctccgggcctgcaattaccttggaaaacacaagggtggtgtcacaaagcctacagcattatcttgaacttggcaggcaggaactgtttaagatccttcactccattctccttaacggggagaccagggaggccgcactgtcttatatggccgcagtggtcaacgctaacatgaaaaaagcccagatgcagacagacgacagactggtaagtactgatggattcatgctgaacttcttatgggtactgcaacagctttccacgaaaataaagctggaaactgtggatcccacttacattttccatcccaggtgccgaataactttgcccaacgatgaaacccgagtgaatgctaccatggaggacgtcaacgattggctgaccgagctctatggtgaccagcctccgtttagcgaacccaaatttcctactgagtgttttttcctgactctgcacgcccaccatctgtccatcctaccgagctgccggcgttatatacgtagactgcgtgccataagggaacttaatcgaaccgtggaggatctgaagaacaatgaaagccaatggaaagattcgcctctggctactcgacatagggaaatgctgaagcgctgcaaaacacagctgaagaagttagtgaggtgtaaagcatgcgcggatgctggactgctggatgaatcgtttctgaggagatgtctcaatttttacggcctgctgattcaactgctgctaagaatccttgaccctgcttatccagatatcacattaccactcaattccgatgtaccaaaagtgttcgccgcactgccagagttttatgtggaggacgtggcagaattcctgttttttatagttcagtatagtccacaagctctgtatgagccatgtacacaagatattgtcatgtttctggtcgtaatgctatgtaatcagaactacataaggaacccttatctcgtggcaaagctcgtggaggtgatgttcatgaccaaccctgcggttcaaccgaggacccagaagttttttgagatgatcgagaaccatcccctgtcgactaaactactggtgccaagcctaatgaagttctatacagatgtcgagcatacaggtgctacttcggaattttatgataaattcaccattagataccacatcagcacgattttcaaaagcctgtggcaaaacatcgcccatcatggtacatttatggaagaattcaacagcggcaaacagtttgtgcgctatattaacatgttgataaatgacacaacctttctgcttgatgagtcattggaatccctcaagcgaattcacgaagtgcaggaagagatgaaaaacaaggagcagtgggaccagctgccacgggatcaacagcaggcccgacaaagccagcttgcacaagatgagagggtctctcgcagttacctggcactggcaactgaaacagtggacatgtttcacattttgacaaaacaggtgcagaaaccattccttcgcccagaactcggacccagactcgcggcaatgttaaattttaatctgcagcagctgtgcggtcctaaatgtagggacttaaaggtcgagaacccagagaagtatggttttgagccaaaaaagctattggaccaacttaccgacatttacctgcagttagactgcgccaggttcgccaaggcgatcgctgacgatcagcgcagctactccaaggagttgttcgaagaagtcatttctaaaatgcgtaaggctggcattaaatctactattgcgattgagaaatttaaactcttggccgaaaaagtggaagagattgtggcaaagaatgctcgtgcagagatagattactcagacgcccctgacgagttccgggacccactcatggatactctcatgaccgatccagttaggttaccatctggcactataatggatcggtcgattattttgcgccaccttctcaattccccaaccgacccttttaatcggcagaccctgacagaaagtatgttggagcccgtccctgaactaaaagagcagatacaagcctggatgagagagaaacaaaacagcgatcattag

SEQ ID NO: 246026 - DNA, 303 bp, synthetic construct
  misc_feature 1..303: note = Description of Artificial Sequence: Synthetic coding sequence
  source 1..303: mol_type = other DNA
atggaagaactgagtgctgacgagataaggcgaaggcgactagcacgtctggcgggaggacagacctcccagcctactacaccccttaccagtcctcaacgggagaatccaccaggcccacccattgccgctagtgcccctgggcctagccagagtctgggcctcaacgtgcataatatgactcctgctactagtcctatcggggcttccggcctcggcatcatttcagatgataagatgatcaaaactgaatttggaagcgccgactttatgaaccttgttgacggctttaagatcaaatag

SEQ ID NO: 246027 - DNA, 3186 bp, synthetic construct
  misc_feature 1..3186: note = Description of Artificial Sequence: Synthetic coding sequence
  source 1..3186: mol_type = other DNA
atgtcgcaggtcgatgtggactctggaattgagaacatggaagtggatgaaaatgaccgcagggagaagagatctctgtccgacaaggagcctagttccggccctgaggtgagtgaggaacaggcactgcagctcgtttgtaagattttccgagtcagctggaaggacagggatcgagacgttatttttctgagctctctgagtgcccagtttaaacaaaaccccaaagaggtgttttccgatttcaaggacctcatcggccagattctgatggaagtcctgatgatgagcacacagactcgggatgaaaaccctttcgcttccttaacagccacatcccagcctattgcagccgctgcacgcagccccgaccgtaacctgttgttaaatacgggatcaaatccaggaacaagcccaatgttctgctccgtggcctcatttggcgcatctagtctcagctccctgggagcatctggaggggctagcaactgggatagttattctgatcactttacgattgaaacctgcaaagaaacagatatgctgaactacttaattgaatgctttgacagagttggcatagaagaaaagaaagcacccaagatgtgtagccagcctgccgtgagtcagctactctccaatattcggtctcagtgcatctctcacactgctctagtactgcaaggaagtctgacgcagcctcgttccctgcagcagcctagcttcctggtgccgtatatgctgtgcagaaatctgccgtatggtttcattcaggagctggtccgaactacgcatcaggatgaggaggtgtttaaacagattttcattcctattcttcagggacttgccctggcagcaaaggaatgcagcctcgactctgactacttcaagtacccgttgatggcgctgggagagttgtgcgaaacaaagtttggcaaaacccacccagtctgcaacttggtcgcaagtctaaggctgtggctgcccaagagcctctctccgggttgtggcagggagctccagagactgtcctacctgggagctttttttagcttctccgtcttcgcggaagacgacgtaaaggtagtggagaaatactttagcggccctgccataactctcgagaacacaagagtggtcagccagagcctccaacattacctggagctgggcagacaggaattgtttaagattcttcactctatactcttgaatggagaaacaagagaagcagccctgagctacatggccgctgtagtgaacgcaaacatgaagaaagctcaaatgcagactgacgacaggctggtatctaccgatgggttcatgttgaactttttgtgggttctacaacagctgtctactaaaattaagctcgaaaccgtcgaccccacatacatttttcaccccaggtgccgcattaccctacctaatgacgagactcgggtaaacgccactatggaagacgtcaatgattggctaacagagttgtacggcgatcagcctccgttctctgagccaaagttcccaacagagtgtttcttcttaaccctccatgcacatcacctgagcatcctcccctcctgccgacgttatattcgtagactccgggctatcagggagcttaatcgaaccgtcgaagacttgaagaacaacgagtcccagtggaaagattctcctctggccacacgacatcgggagatgctgaaaagatgcaaaacgcagctgaaaaagctggtccgctgtaaggcatgcgccgatgcaggcctactagatgagtctttcctgcgcagatgtctgaatttttacgggctcctgattcagcttctgctccgcatcctcgacccggcataccctgatatcacactcccactaaattccgacgtgccaaaggtcttcgccgcactgcccgagttctacgttgaggacgtcgccgagttcctgtttttcatcgtccagtactctccccaggcgttatacgagccctgtacccaggatatagtcatgttcttagtggtcatgctgtgtaatcagaattacatccgtaatccgtacctggttgcaaagctcgtagaagttatgttcatgaccaatcccgcagtacagcctaggacccagaagttcttcgaaatgatcgaaaaccacccactgtctacgaagttgctggtgccatccctgatgaagttttataccgacgttgagcacaccggcgctacttccgaattttatgacaaatttaccatccgctatcatatctccaccatttttaagtccctatggcagaacatcgcccaccatggcacattcatggaagagttcaattctgggaagcagttcgttcgttacatcaatatgctgatcaacgacacgaccttcctgctcgacgaatcactcgaatctttgaaaagaatccatgaggtgcaagaggagatgaaaaacaaggagcagtgggaccagttgccaagggaccaacagcaggcgagacaatcccagttagcccaggacgaaagagtgtcaaggagttatctggcactagctacagaaaccgtggatatgttccatatcttgacaaagcaggtacagaagccctttttgaggcctgagctgggcccaaggcttgcagccatgctgaatttcaacctgcagcaactgtgcggccctaaatgccgcgatctcaaggttgaaaatcccgagaagtacgggtttgagcccaaaaagctgttggatcagcttactgacatctatttacaactggactgcgccagatttgctaaggccatagcggatgatcagcgcagctacagcaaggagctgttcgaagaggtgatcagcaagatgaggaaagcgggaatcaagtctaccatcgccatcgaaaagttcaagcttctggcagaaaaggtcgaagagattgtggcaaaaaatgctagggcagagattgactactccgatgcaccagacgagttcaggggaaagtggacacacccactgatggataccctgatgacagatcctgttcggctgccaagcggcaccattatggaccgcagcatcattctccgccacctgctcaactcccccacggatccattcaaccggcagaccttgaccgaaagcatgcttgagcctgtccctgagctgaaggagcagatacaggcctggatgcgtgaaaaacagaatagcgatcattag

SEQ ID NO: 246028 - DNA, 513 bp, synthetic construct
  misc_feature 1..513: note = Description of Artificial Sequence: Synthetic coding sequence
  source 1..513: mol_type = other DNA
atgcccggtgaggtccaggcgagctacctcaagagccagagcaaactttcagacgaaggccgacttgagccacgcaaatttcattgcaagggcgtcaaggtccctagaaattttcgcctgcttgaagaactggaggaggggcaaaagggcgttggcgatgggacagtgagttgggggcttgaagatgatgaggatatgaccctgacgaggtggactgggatgatcatcgggccaccacgcacaatttacgagaacaggatatactctttgaaaattgagtgcgggcctaaatatccggaagctcctccgtttgttcgcttcgtaactaagatcaatatgaatggggttaactcttccaacggagtggtcgatcctagagcgatttcagtcctggcaaagtggcagaactcatactctatcaaagtcgtgttacaggagctccgaaggctgatgatgtccaaggaaaacatgaaactcccacagccgccagagggacaatgttacagtaactag

SEQ ID NO: 246029 - DNA, 312 bp, synthetic construct
  misc_feature 1..312: note = Description of Artificial Sequence: Synthetic coding sequence
  source 1..312: mol_type = other DNA
atggagaaagggctcaataccaagaactttaccgagcaaaccatttacgagaaccgcatctatagcctcaaaattgagtgtggacccaagtaccccgaggcccctccctttgtcagatttgtgaccaagattaatatgaacggcgtaaattcctccaatggcgtggtggatccgagagccatttcggtgctggccaaatggcaaaactcctatagcatcaaggtagtgttgcaagagctaagacggttgatgatgagcaaggagaacatgaagctcccacagcccccagaggggcaatgttattctaactag

SEQ ID NO: 246030 - DNA, 444 bp, synthetic construct
  misc_feature 1..444: note = Description of Artificial Sequence: Synthetic coding sequence
  source 1..444: mol_type = other DNA
atggctgcaacaaccggctccggagtgaaggtgcccagaaattttcggcttctggaagagttggaagaaggccagaagggcgtcggtgatggaactgttagttggggcttagaggatgacgaagatatgaccctaaccagatggacgggaatgattatcgggccaccacgaactatctacgaaaataggatttattctctcaagatcgaatgcgggcctaaatatccggaagctcctccttttgtgaggtttgtgaccaaaattaatatgaacggcgtgaacagctcaaacggggtcgtggacccaagagctatctctgtccttgccaagtggcaaaactcatacagcatcaaggtcgtgcttcaggagctacggaggctaatgatgagtaaagagaacatgaagctgcctcagccaccagagggtcagtgctactcgaattag

SEQ ID NO: 246031 - DNA, 513 bp, synthetic construct
  misc_feature 1..513: note = Description of Artificial Sequence: Synthetic coding sequence
  source 1..513: mol_type = other DNA
atgccaggggaggtgcaagcctcctaccttaaatcccagtccaaattaagcgacgagggacgactcgagccccgtaagtttcactgcaagggtgtgaaggttccaagaaatttccggcttcttgaggaactggaggaagggcagaaaggcgttggagacggaactgtaagctggggattagaagatgatgaagacatgacactgaccagatggacaggaatgattattggaccaccccgaaccatttacgaaaatcgcatctactctctgaagatcgagtgtgggccaaaataccccgaggcaccgccatttgtgcgcttcgttactaaaattaacatgaatggtgttaatagcagcaacggggttgtcgatcctcgggcaatatcagtcctcgccaagtggcagaacagctattcaattaaggttgtgctgcaggagttacgaaggctgatgatgtcaaaagagaacatgaaactgcctcagcccccagaagggcaatgttattcaaattag

SEQ ID NO: 246032 - DNA, 312 bp, synthetic construct
  misc_feature 1..312: note = Description of Artificial Sequence: Synthetic coding sequence
  source 1..312: mol_type = other DNA
atgaaggaagacctcaatctggaaaatttcactgctaagactatctacgagaaccgcatctactctctgaaaattgagtgtggacctaaataccccgaggctcctcctttcgtccggtttgtgactaagatcaatatgaatggggtgaattcaagtaatggtgtagtggacccgagagccatctcggttctggctaaatggcagaattcgtattcaattaaagtggtcctgcaagaattgcggaggcttatgatgtctaaggagaatatgaagcttcctcagcccccagaggggcaatgctattccaattag

SEQ ID NO: 246033 - DNA, 312 bp, synthetic construct
  misc_feature 1..312: note = Description of Artificial Sequence: Synthetic coding sequence
  source 1..312: mol_type = other DNA
atgaaggaggatctcaatctggaaaactttaccgctaagacgatttatgaaaatcgcatatatagcctgaaaattgaatgcggaccaaaataccctgaggcccctcctttcgtgagatttgttaccaaaattaatatgaatggggtcaacagtagcaacggcgttgttgatcccagagcgatcagtgtactggccaaatggcagaactcctattcaatcaaagtggtgctgcaggagcttagaaggctgatgatgtccaaggaaaatatgaagctccctcagccccctgagggccagtgctacagcaattag

SEQ ID NO: 246034 - DNA, 318 bp, synthetic construct
  misc_feature 1..318: note = Description of Artificial Sequence: Synthetic coding sequence
  source 1..318: mol_type = other DNA
atggccgcaaccactgggtccggagtaaaggtccccaggaacttccgcctccttgaagaactggaagagggacagaaaggggtgggtgatggcaccgtttcatggggattggaagacgacgaggacatgacacttacccgttggactggtatgattataggcccacccagggtggacccgagagctatcagtgtgttggcgaaatggcagaactcatacagtattaaagtggttttacaggagctccgacggctgatgatgagcaaagagaatatgaagctgccacagcccccagagggtcagtgttattctaattag

SEQ ID NO: 246035 - DNA, 369 bp, synthetic construct
  misc_feature 1..369: note = Description of Artificial Sequence: Synthetic coding sequence
  source 1..369: mol_type = other DNA
atgtccactccagctcgcagacggctgatgcgcgattttaagaggctccaggaggatccgcctgccggagtgtcaggggctccgagcgaaaataatataatggtgtggaatgccgtgatattcggaccggaaggaacccccttcgaagatgtctacgccgatgggtccatttgtctcgacattctgcagaatagatggtcccctacatacgatgtgtcctctatactgacgtcgatccaaagcctccttgacgaaccaaaccccaatagccctgcaaattcacaagcagcacagctgtaccaggaaaataagcgagagtatgagaagcgcgtctcagcaatagtcgaacaaagctggagggactgctag

SEQ ID NO: 246036 - DNA, 459 bp, synthetic construct
  misc_feature 1..459: note = Description of Artificial Sequence: Synthetic coding sequence
  source 1..459: mol_type = other DNA
atgtccacccccgctagacgccgactgatgcgagactttaagcgactccaggaggatccacctgctggtgtcagcggagcgcctagtgagaataacattatggtttggaatgcagtgatcttcggtcccgagggcacgccttttgaggacggcaccttcaaactgacgatcgaattcactgaggaatatcccaataagcccccaactgttcgctttgttagtaagatgtttcaccctaacgtctacgccgatggttcaatctgccttgacattctgcagaacaggtggagcccaacgtatgatgtgagcagcatcttgacaagtattcagtccctgcttgacgaacctaacccaaactcccccgcaaattcacaggccgctcaactataccaggaaaataaacgtgagtatgaaaagcgggtgagcgccatcgtagagcagagctggcgggattgttag

SEQ ID NO: 246037 - DNA, 234 bp, synthetic construct
  misc_feature 1..234: note = Description of Artificial Sequence: Synthetic coding sequence
  source 1..234: mol_type = other DNA
atgtttcatccaaacgtttatgctgacggatcaatctgtctggatattctgcagaatagatggtcccctacgtatgacgtcagttcaatccttactagtatacaatctttgcttgatgaaccaaatcccaactcgccagctaattctcaggccgctcagttatatcaggaaaacaaacgagagtacgagaaacgcgttagcgccattgtggaacagagttggcgagactgctag

SEQ ID NO: 246038 - DNA, 459 bp, synthetic construct
  misc_feature 1..459: note = Description of Artificial Sequence: Synthetic coding sequence
  source 1..459: mol_type = other DNA
atgtcgacacccgcacggagaagacttatgcgtgacttcaagcgacttcaggaggaccctcccgtcggggtgtccggggcaccgtcagagaacaatatcatgcagtggaatgcagtcattttcgggcctgagggtaccccttttgaggacgggacatttaagctcgtgattgaattctcagaggagtacccaaataagcctcccacagtaagattcctgagcaaaatgttccacccaaacgtctacgccgacggatcgatttgcctggatattctgcagaataggtggtcaccaacttacgacgtgtcttctatcctgaccagtatccaatctctgcttgacgagcccaacccaaatagtcctgctaattcacaggcagctcagctctatcaggagaacaaacgggaatacgagaaaagggtgtctgctatcgttgagcagagctggaacgacagttag

SEQ ID NO: 246039 - DNA, 153 bp, synthetic construct
  misc_feature 1..153: note = Description of Artificial Sequence: Synthetic coding sequence
  source 1..153: mol_type = other DNA
atggcgagtcagaacagggaccccgctgcaacttcagtggccgcagctagaaagggcgctgaaccctccggtggggctgcccgaggcccagtggggaaaagactacagcaagaactgatgactctgatgaaccctacccttattgtgccatag

SEQ ID NO: 246040 - DNA, 486 bp, synthetic construct
  misc_feature 1..486: note = Description of Artificial Sequence: Synthetic coding sequence
  source 1..486: mol_type = other DNA
atggcttctcagaatcgcgacccagcggcaacctctgtggcggctgcccgtaagggtgctgagcctagcggaggcgctgcgaggggcccagtcggaaagagactgcagcaggagcttatgaccctgatgatgagcggtgacaaggggatttccgccttccccgagtcagacaatctttttaagtgggtagggaccatccacggagctgccggtactgccgtcgggagtatcagaacgagcagcaccgtgtgcttgctgtccggccctcgcgaaactcaagatagctccaaacctctggtctggggcctaggctgggatatgagactgctcttagaacttactcttcagctttttctccagatgccagaaccgaatatcgattcacccctcaatacacatgccgcagaactctggaagaaccccactgccttcaaaaagtatctccaggagacctactccaaacaagtgactagccaggagccctag

SEQ ID NO: 246041 - DNA, 453 bp, synthetic construct
  misc_feature 1..453: note = Description of Artificial Sequence: Synthetic coding sequence
  source 1..453: mol_type = other DNA
atggcctcacagaaccgtgaccccgcagctacgtcagtagcggctgctcggaaaggggctgaaccaagcggcggtgccgctagaggtccagtgggcaagcggctccagcaggagttaatgacactgatggtttacgaggatctgcggtacaagctgagcttggagttcccttcagggtatccgtacaacgctccaaccgtgaaattcctgacaccctgctatcatcccaacgttgacactcaaggaaacatctgcctggatattctgaaggagaagtggtcagcgctctatgacgtgcgtaccatactgctctccattcagtctctgctgggcgaaccaaatattgatagtccgctcaatacccatgccgctgaactttggaagaacccaaccgcctttaaaaagtatctccaagaaacatattcaaaacaggtaaccagccaggaaccttag

SEQ ID NO: 246042 - DNA, 540 bp, synthetic construct
  misc_feature 1..540: note = Description of Artificial Sequence: Synthetic coding sequence
  source 1..540: mol_type = other DNA
atggccagtcaaaatcgcgaccccgctgccacgtctgttgcggctgccagaaagggggctgagcccagcggtggagccgctcggggaccagtgggaaagcgtctccagcaggaactgatgaccttaatgatgtcgggagataaggggatctccgcctttcctgagagcgataacctgtttaagtgggtgggcacgattcacggggcagcgggtacggtctatgaagatctgagatacaaactaagtctcgaattcccatccggctatccatacaacgcacctaccgtgaagttcctaacaccatgttaccaccccaacgtggacacacagggtaacatctgcctggatatcctcaaagagaagtggtccgccctgtacgacgtgagaacaatcttattgagtatacagagtctgcttggggaacctaatatcgattcgcccctgaatacccacgccgctgaactttggaagaatcccacagccttcaagaagtatctgcaagagacttactctaagcaggtgactagtcaggaaccgtag

SEQ ID NO: 246043 - DNA, 423 bp, synthetic construct
  misc_feature 1..423: note = Description of Artificial Sequence: Synthetic coding sequence
  source 1..423: mol_type = other DNA
atgacccttatgatgagtggtgacaaagggatttctgctttcccagagtctgacaatcttttcaaatgggtaggcaccattcatggcgcagccggtaccgtctacgaagatctgagatataaattatccctcgagtttccctcaggctatccgtataatgccccaacagtcaagtttctcacgccatgctatcacccaaatgtagacactcagggcaacatctgtctcgatattctgaaagaaaaatggtctgctctgtacgatgtccgtacaatccttctgagtattcagtctctgcttggggaaccaaatatcgactcacctctgaatactcatgccgctgagttatggaagaatcccacagcttttaaaaaatatttgcaagaaacctactcaaaacaagtcaccagccaggaaccatag

SEQ ID NO: 246044 - DNA, 423 bp, synthetic construct
  misc_feature 1..423: note = Description of Artificial Sequence: Synthetic coding sequence
  source 1..423: mol_type = other DNA
atgacgcttatgatgagtggagataaggggatctcggcttttccggagagtgataatctttttaagtgggtgggaactatccacggtgccgcaggcactgtgtacgaagaccttcggtacaaactgagcttggagtttccaagcggatacccgtacaatgcgcctacagttaaatttctcactccttgttaccacccaaacgttgacacccagggcaatatatgtctcgatattctaaaagagaaatggtcggctctttatgacgtgcgaaccattctgcttagcattcagagcttattaggcgagcccaacatcgactccccactcaacacgcacgctgccgagctgtggaagaatccgaccgcgttcaagaagtaccttcaagagacctatagtaagcaagtcacatcccaggaaccttag

SEQ ID NO: 246045 - DNA, 114 bp, synthetic construct
  misc_feature 1..114: note = Description of Artificial Sequence: Synthetic coding sequence
  source 1..114: mol_type = other DNA
atggccgctagcgctgccgagaccagggtgtttctggaagtgcggggacagctccaatctgctctgctaatactcggcgacagagtgtcaccctattgcccatgttggtcttag

SEQ ID NO: 246046 - DNA, 1170 bp, synthetic construct
  misc_feature 1..1170: note = Description of Artificial Sequence: Synthetic coding sequence
  source 1..1170: mol_type = other DNA
atggccgctagtgccgctgagacacgagtgttcctggaggtacggggtcagctacagtccgcattgctgatcctgggagagccaaaggagggcggaatgcccatgaatataagcataatgccgtctagcctacaaatgaagaccccggaagggtgcacagaaattcagctaccagctgaggtccggcttgttcctagttcctgtcgcggtctgcagttcgtcgtcggggacggcttgcacctgagattacagacacaggccaagctcggcacaaaactgatcagcatgttcaaccaatcctcccaaacccaggagtgttgcacgttctactgtcagagctgtggcgaagtgatcattaaagaccgaaaattactgcgcgtgcttccgctgccctctgaaaactggggcgcactagtgggagaatggtgttgccaccccgaccccttcgccaataagtctttgcaccctcaggaaaacgattgtttcattggagattcgttcttcttggtgaatttgagaacatccctctggcagcagcggccagaactgtcccctgtggaaatgtgctgtgtgtccagcgacaatcattgtaaactggaaccaaaggctaacaccaaggtaatttgcaaaagatgtaaggtgatgctgggtgaaaccgtttcatctgagacaactaaattttacatgacagaaatcatcatccagtcatccgagaggtcatttcccattattcccagaagctggtttgtgcagagcgtgatcgctcagtgccttgtgcagctgtcctcagccagatcaacgttccgctttactatccaggggcaagacgataaggtgtacattctgctctggctgctgaacagcgactcactggtaatcgagtcacttcgcaatagtaaatatattaaaaagttccccctcctagagaacacgtttaaagctgacagtagttcagcctggtcagcggtcaaggtactgtatcagccatgtataaagagcaggaacgagaaactggtgtccctgtgggagtctgacatttcagtccacccactgactctccccagtgcgacatgtctggaactgcttctgatactctcaaagtctaatgctaacctgccttcttccttgagaagagtgaattctttccaggtcgcttttctgaagatgtag

SEQ ID NO: 246047 - DNA, 444 bp, synthetic construct
  misc_feature 1..444: note = Description of Artificial Sequence: Synthetic coding sequence
  source 1..444: mol_type = other DNA
atggccctcaaaaggatccagaaagagctgtccgatctgcagagggacccaccggcacactgcagcgccggaccagtgggcgatgatctttttcattggcaagctactatcatgggccctccagacagcgcttatcagggcggagtgttcttcctgacagtccactttccaacggattacccattcaaacccccaaagatcgcctttacaacgaaaatttaccatccgaacatcaactctaatggttctatctgccttgacatactccgcagccagtggagcccagccctgacagtttcaaaagtgctgctatcgatttgtagcttgttgtgcgacccaaacccggacgatcccctggtacctgacatcgcccagatctacaaatcagacaaggagaagtataatcggcacgcccgtgagtggacacaaaaatacgccatgtag

SEQ ID NO: 246048 - DNA, 606 bp, synthetic construct
  misc_feature 1..606: note = Description of Artificial Sequence: Synthetic coding sequence
  source 1..606: mol_type = other DNA
atgagcactgaggcacagagagtcgatgattcaccttcgacatcagggggttccagcgacggggaccaacgagagtccgtgcaacaagagccagagcgggaacaggtccagccaaaaaaaaaagaaggcaagatttcctccaagaccgctgctaagctctctacttcggcaaagaggattcagaaggaactggctgagatcacattagatcccccaccaaattgttccgccggtccaaagggggacaatatatacgaatggagatccacaattttaggtcctcccggatccgtgtatgagggcggtgtgttttttctagatatcacatttagccccgactacccgttcaagccgcctaaggtgaccttcaggactagaatctatcactgcaacatcaatagtcagggagtgatctgcctcgatatactcaaagataactggtcacctgcactcacgatctctaaggtgctgctttccatatgctccctgctgaccgattgcaacccggctgatcctttggtcgggagcattgctactcaatatatgacgaatcgagcagagcacgatcggatggcacggcagtggaccaaacgctatgccacgtag

SEQ ID NO: 246049 - DNA, 606 bp, synthetic construct
  misc_feature 1..606: note = Description of Artificial Sequence: Synthetic coding sequence
  source 1..606: mol_type = other DNA
atgtcaacggaggcccagcgtgtagatgactctccttccacaagcggaggcagctccgatggagatcaaagagagtccgtgcaacaggagcctgagcgtgaacaggtccagccaaagaagaaggagggaaagatctcttccaaaactgccgcaaaactgtctactagcgctaagcggatccaaaaggaactggctgaaataacgctggaccctccccctaactgcagcgccggaccaaaaggcgataatatctatgaatggagaagtaccattctcgggcctcctggatctgtatacgaaggaggggtcttcttccttgacatcacctttagccccgactaccccttcaagcccccaaaggtgacgtttagaactagaatctatcattgcaacataaacagtcagggagtgatttgcctcgacatactgaaggataattggtcccccgctctgaccatcagtaaggtgctgctctcaatatgttcattgctgacagactgcaaccctgccgaccccctggttggcagcatcgcaacacagtacatgaccaacagggctgagcacgaccgaatggctcggcagtggactaaacgatatgccacctag

SEQ ID NO: 246050 - DNA, 624 bp, synthetic construct
  misc_feature 1..624: note = Description of Artificial Sequence: Synthetic coding sequence
  source 1..624: mol_type = other DNA
atgagcagcgaccgccaacgctccgacgatgagagcccatccaccagttcggggtccagcgacgcagaccaaagagaccctgccgctcctgagcccgaagaacaggaggaaagaaagccctccgcgactcagcagaagaagaacacaaagctgagctccaagaccactgcaaagctctctacttctgccaagagaatccagaaggaacttgccgagatcacgctcgacccccctccgaactgcagcgccggaccaaagggtgacaatatttacgagtggagatccactattctgggtccgcctggcagcgtctacgagggaggagttttcttcctagacatcactttttcttccgattaccccttcaaacctcccaaggtcaccttccggacacgcatttaccactgcaacattaactcgcaaggcgtgatctgtcttgatatcttgaaagacaactggtcaccagccttgacgatttccaaagtcctgctctcgatctgttctctgctgactgactgcaatcctgccgaccccttagtgggctccatagccacccagtatctgaccaatcgggctgagcatgatcggattgcaaggcaatggactaagcgctatgcaacgtag

SEQ ID NO: 246051 - DNA, 624 bp, synthetic construct
  misc_feature 1..624: note = Description of Artificial Sequence: Synthetic coding sequence
  source 1..624: mol_type = other DNA
atgagctcagatcggcagcgatctgatgatgagagcccttctacctcttcagggtcctcagacgcggatcaaagagacccagccgctcccgaacctgaagaacaggaggaaagaaagcccagcgccacacagcagaaaaaaaacactaaattatcttctaagacaacagccaagctctcaacctcggccaaaagaattcaaaaagaattggcagaaatcaccctggaccctcctcccaattgctccgctggccctaaaggcgacaatatctacgaatggagatccactatattgggcccaccgggatcagtgtacgaggggggagttttttttctggacatcacattcagctctgattaccccttcaaaccccctaaggtcacgttccggactcggatataccattgcaacatcaattcacaaggcgtgatttgcctcgacattctgaaggacaactggtccccagctcttaccatttcaaaagttcttttgtctatctgtagcctactgacagactgtaaccccgctgatccactggtcggctctatcgctactcagtatctgacgaatcgggcagaacacgatcgaatcgcaagacagtggaccaaaaggtatgctacatag

SEQ ID NO: 246052 - DNA, 624 bp, synthetic construct
  misc_feature 1..624: note = Description of Artificial Sequence: Synthetic coding sequence
  source 1..624: mol_type = other DNA
atgagcagcgataggcagcggtccgatgatgagtcccctagcacctcttctggctcctctgacgccgaccagagagaccctgctgcgcctgagccagaggaacaggaggagcgcaagccatccgccacacagcaaaaaaagaataccaaattaagtagcaaaaccaccgctaaactgtccacatcagctaagcggattcagaaagaactcgcagaaatcactctggatcctccacccaactgctctgcaggcccaaaaggcgacaacatctatgagtggaggagcaccattcttggaccacccggaagtgtctacgaggggggagttttttttcttgacattaccttcagctccgactatccattcaagccccctaaagtcacttttcgaacaaggatctaccactgcaacattaatagtcaaggcgttatttgcctcgacatactcaaggacaactggtcgcccgcattgacaatttcaaaagtccttctttccatctgctctctgctcacggactgtaatcccgcagatccgctcgtgggatccatcgctacacagtacttgaccaaccgggctgaacacgacaggattgctaggcagtggactaagagatacgctacgtag

SEQ ID NO: 246053 - DNA, 624 bp, synthetic construct
  misc_feature 1..624: note = Description of Artificial Sequence: Synthetic coding sequence
  source 1..624: mol_type = other DNA
atgtcttctgaccggcagaggtccgatgacgagtcaccaagcactagcagcgggtcatctgatgcggatcaaagagatcctgctgccccagaaccggaggaacaggaagaacgtaagccatccgccacccaacaaaaaaaaaataccaagctcagcagtaagaccacagccaagctgagtaccagcgccaagcgcatccagaaggaattggcggaaatcactttagacccaccgccaaattgtagtgcgggacctaagggagataatatctacgagtggcgttctaccattttaggcccaccagggtctgtgtatgagggtggggtctttttcttagacatcaccttttcctccgactatcccttcaagccgcctaaagtgacattcagaacacgaatctaccactgcaacattaattctcaaggggtaatatgccttgatatcctgaaagataattggagtcccgcactcacaataagtaaagtgcttttgtctatctgttctctgcttaccgattgcaatcccgcagaccctttggttggatctatcgcaactcaatacctgaccaaccgggctgagcacgacagaatagctaggcaatggacaaaacgttacgccacttag

SEQ ID NO: 246054 - DNA, 528 bp, synthetic construct
  misc_feature 1..528: note = Description of Artificial Sequence: Synthetic coding sequence
  source 1..528: mol_type = other DNA
atgagttctgatagacagaggagcgatgatgagagcccttcaacatcgtccgggagctccgatgccgatcagagggaccccgcagctcctgagcccgaggaacaggaagaacgcaaaccatccgcaacacagcagaagaagaatactaagctctcaagcaaaactactgcgaagttgtccacgtctgctaaaaggatccagaaagagttggccgaaatcactttggaccctcctccaaattgtagcgccggtcctaagggggacaatatttacgagtggcggtccaccatcctgggaccaccgggatcggtctatgagggtggtgtcttctttctcgacattacattctcttcggattatccctttaagcctcctaaggtaacttttcggactagaatttatcactgtaacatcaactcgcaaggtgttatttgtctcgatatcctgaaggacaattggtcccctgcgctaaccattagcaaggtactgctcagcatctgcagcctgctgacagattgtaatccttag

SEQ ID NO: 246055 - DNA, 528 bp, synthetic construct
  misc_feature 1..528: note = Description of Artificial Sequence: Synthetic coding sequence
  source 1..528: mol_type = other DNA
atgagcagtgaccgtcagaggtctgatgacgagagtccctctaccagctctgggtcatccgatgctgaccagcgagacccggcagcccctgagccagaagagcaggaagagagaaagccaagcgctacccagcaaaagaagaacacaaagctgtctagtaagacgactgccaagctcagcacatcagcaaaacgaatacagaaggaactcgctgagatcactctcgatccccctccaaactgctccgccggtcctaagggggataatatttatgagtggcgcagcacaatcttgggccctcccggatctgtgtatgagggaggtgtgttcttcctggacatcacattttctagtgactacccattcaaaccaccaaaggtgacattccgaaccaggatttatcactgtaacatcaacagccaaggagtgatctgtttggacatcctaaaagacaactggtctcctgctcttactatctcaaaagtcctcctgtctatttgttccctgttgaccgactgcaacccctag

SEQ ID NO: 246056 - DNA, 528 bp, synthetic construct
  misc_feature 1..528: note = Description of Artificial Sequence: Synthetic coding sequence
  source 1..528: mol_type = other DNA
atgagttctgatcgacagcggtccgatgatgagagcccaagcacaagttctgggagcagcgatgctgaccaaagagacccggcagccccagagccagaagagcaggaggaacgtaaaccatctgcaacacagcagaagaagaataccaaactgagttccaaaaccactgctaagttgagcacgtccgcaaagcggatccagaaggaactggccgagattacgctcgatccaccacctaactgttcggctgggccaaaaggagataatatatatgagtggagatcaactatcctgggacctcccggaagcgtctacgaaggcggagttttctttctcgacatcactttctcctccgactatccatttaagccgccaaaggtaacgtttagaacacgcatctatcattgtaatataaactcccagggagtgatttgtcttgatattctgaaagacaattggtccccagcccttacgattagcaaggttctgttgtccatctgtagcctgttgactgattgcaacccttag

SEQ ID NO: 246057 - DNA, 414 bp, synthetic construct
  misc_feature 1..414: note = Description of Artificial Sequence: Synthetic coding sequence
  source 1..414: mol_type = other DNA
atgaatgaagagaattttttcgagtgggaggcgctgataatgggcccagaagacacatgcttcgaattcggcgtcttcccggcaatcctaagttttccactcgattaccccttgtctccacccaaaatgcgcttcacatgtgagatgttccaccccaacatttacccagatggtagggtatgcatctctatcctgcacgcccctggagacgatcctatgggatacgagagctctgctgagaggtggtctccagtgcagtccgtggagaagatcctgcttagtgtggtgtcaatgcttgcggagccaaatgacgaatccggagcaaacgtggacgcctccaagatgtggcgcgatgacagggagcagttctacaaaatcgcgaaacaaatcgtccagaagtctctgggtctttag

SEQ ID NO: 246058 - DNA, 498 bp, synthetic construct
  misc_feature 1..498: note = Description of Artificial Sequence: Synthetic coding sequence
  source 1..498: mol_type = other DNA
atggcgggaaccgccctcaaaaggctaatggccgagtacaagcagctcacactgaatcctcccgaaggaattgttgctgggcctatgaatgaagagaacttttttgaatgggaagccctcattatgggtcctgaggatacttgcttcgagtttggggtgtttcccgctatactgtcattcccactggactatcccctgtcccccccaaaaatgcgattcacctgtgaaatgttccatcctaatatctaccctgatggacgggtctgtatctccattctgcatgcacctggggatgatccaatgggttacgagtcatctgcagagaggtggtctccagtacaatctgtggaaaaaattctactgagtgtggtctcgatgttggcagagccaaatgatgagagcggcgctaatgtggatgccagcaagatgtggcgggatgaccgagagcagttctacaaaatagccaagcagatcgtgcagaagtctctgggactgtag

SEQ ID NO: 246059 - DNA, 552 bp, synthetic construct
  misc_feature 1..552: note = Description of Artificial Sequence: Synthetic coding sequence
  source 1..552: mol_type = other DNA
atgagttctccctcacctggcaaacgtcggatggacacggacgtggtcaagctaatagaaagcaaacacgaggtgactattctgggcggactgaacgaatttgtggtgaagttttatggcccacaaggcacaccctacgaggggggagtttggaaggtccgcgtggatctcccagacaagtatccctttaaaagcccctccattgggtttatgaataaaatcttccacccgaacattgatgaggcaagcggtacagtctgcttggatgtgattaatcagacatggacagcactctacgatttgacaaacatattcgaaagctttctccctcagcttttggcttatccaaaccctatcgatccgctcaacggggatgcagctgccatgtacttgcatcgtcccgaagagtacaaacagaagatcaaggagtacatacagaagtacgcaacggaggaggcactgaaggagcaggaggagggcaccggtgattcgagctcagagagtagcatgtcagatttttctgaggatgaggcccaagacatggaactctag

SEQ ID NO: 246060 - DNA, 459 bp, synthetic construct
  misc_feature 1..459: note = Description of Artificial Sequence: Synthetic coding sequence
  source 1..459: mol_type = other DNA
atgagctcaccctcccccggtaagcgaaggatggacactgatgtcgtaaagttaatcgagtcaaaacatgaggtcactatactcgggggactgaatgagttcgtggtgaagttctatggtcctcagggcacaccgtacgaagggggagtgtggaaggtgcgcgtggatctgccagataagtatcctttcaagtctcccagtatagaccttacaaacatcttcgagtcttttctgccccaattgctcgcgtatccaaatcctattgatccattgaatggagacgctgctgccatgtacctacatagaccagaggaatataagcagaagatcaaggagtacatccagaagtacgctacagaagaggcactcaaggaacaagaggaaggaaccggcgactcctccagcgagagtagcatgtcagacttctccgaggacgaagcacaggacatggaactgtag

SEQ ID NO: 246061 - DNA, 477 bp, synthetic construct
  misc_feature 1..477: note = Description of Artificial Sequence: Synthetic coding sequence
  source 1..477: mol_type = other DNA
atgtcgggtatcgcactctctcgcctggctcaggaaagaaaggcctggcggaaggaccacccattcggattcgtcgccgttccgaccaagaatccggacggcacgatgaacttaatgaactgggaatgtgccatccctggaaagaaagggacaccgtgggaggggggattgtttaagctgcggatgttgttcaaagacgactacccaagcagccctcccaagtgtaagtttgaacctcctctgttccatcctaatgtctaccctagcgggaccgtgtgtctttccattttggaagaagataaggattggcgtccagccattacgattaagcagatcttacttggcatccaggaacttctgaatgagccaaacatccaggatcccgcacaggccgaagcttatactatttactgtcagaaccgagtcgagtacgaaaagagagtccgggctcaggcaaagaagttcgcgcctagctag

SEQ ID NO: 246062 - DNA, 477 bp, synthetic construct
  misc_feature 1..477: note = Description of Artificial Sequence: Synthetic coding sequence
  source 1..477: mol_type = other DNA
atgtctggaattgcattgtctcggttggctcaggagcgtaaagcctggcgcaaggatcatcccttcggattcgtggctgtccccactaagaatcccgacggcacaatgaacttgatgaactgggaatgtgccatccctggaaagaaaggcacgccatgggaagggggtttgtttaaactgaggatgctgttcaaggacgattatcctagcagccctcccaagtgcaagtttgagccccctttgtttcacccgaacgtatacccctccggcacggtgtgcctcagcatcttagaggaagacaaagactggcgtcctgcaattaccataaagcaaatcctgcttggtatccaggagcttttgaatgagcccaacatccaagatcccgcacaggcggaggcgtatactatttactgccagaaccgtgtggaatacgagaaacgcgtgagggcccaggcgaaaaagtttgccccaagttag

SEQ ID NO: 246063 - DNA, 477 bp, synthetic construct
  misc_feature 1..477: note = Description of Artificial Sequence: Synthetic coding sequence
  source 1..477: mol_type = other DNA
atgtccgggatcgctctgtccagactggcgcaggaacgaaaggcctggcggaaagatcatcccttcggttttgtggctgtgccaacaaagaatcccgatggcacaatgaatctaatgaattgggagtgtgctattccagggaaaaagggaaccccatgggaagggggactgtttaaactgcgtatgctgttcaaagacgattatcctagctccccgccaaagtgcaagttcgaacctccgttgtttcacccgaatgtgtatccttctggcaccgtatgtttaagcatcctcgaggaagataaggattggcggcctgctatcacgataaagcagattctgctgggaatccaggagttactgaatgagccaaatatacaggatcctgcccaggcagaggcatatacgatctattgtcagaacagagtagagtatgaaaaaagagtgagagcccaggccaaaaaatttgcgccttcctag

SEQ ID NO: 246064 - DNA, 477 bp, synthetic construct
  misc_feature 1..477: note = Description of Artificial Sequence: Synthetic coding sequence
  source 1..477: mol_type = other DNA
atgtccggcatcgcactgtcgcgactggcccaggagagaaaggcgtggcgtaaagaccacccctttggctttgtcgccgtgccgactaagaatcctgatggcactatgaatttgatgaactgggagtgtgccattcctggcaaaaagggcaccccctgggaggggggactttttaaattgagaatgctttttaaggacgattacccttcttcacctccaaaatgcaagtttgagcctcctttgtttcaccccaatgtgtatccaagcggaaccgtgtgtctgtcgattcttgaggaggacaaagactggcggccagccatcaccatcaaacagatcttactcggcatccaagaactgctcaacgagcccaacattcaggaccccgctcaggccgaagcgtacaccatctactgtcagaaccgtgtggagtacgagaagcgagtcagggcacaagctaagaagtttgctccgtcgtag

SEQ ID NO: 246065 - DNA, 477 bp, synthetic construct
  misc_feature 1..477: note = Description of Artificial Sequence: Synthetic coding sequence
  source 1..477: mol_type = other DNA
atgtctggcatagccctttctcggctagcccaggaaagaaaagcctggcgtaaagatcaccctttcgggttcgtggccgtgcctaccaagaacccagacggcacaatgaaccttatgaattgggagtgtgccattccaggcaagaaagggacaccatgggagggtgggctgtttaaactgagaatgttatttaaggacgactaccctagctcaccccctaaatgtaagttcgagcccccactcttccaccctaacgtctatccaagtggtacagtctgcctctctatccttgaggaagacaaggattggcggccagccattactatcaagcaaatcctgttagggattcaggagctgctaaacgaacctaacattcaggacccagctcaggcagaagcctacactatctactgtcagaaccgagtagagtacgaaaaacgggtgcgtgctcaggcaaaaaaattcgcacctagctag

SEQ ID NO: 246066 - DNA, 477 bp, synthetic construct
  misc_feature 1..477: note = Description of Artificial Sequence: Synthetic coding sequence
  source 1..477: mol_type = other DNA
atgtcgggcattgcactaagcagattggcccaagagagaaaggcttggcgcaaagatcaccccttcggcttcgtggcggtgccgacaaaaaacccggacggaaccatgaacctgatgaattgggagtgcgccatcccaggcaagaagggcaccccgtgggaagggggtctgttcaaactgcgcatgttgtttaaggatgactacccttcctcaccccctaagtgtaagtttgagcctcccctgttccatccaaatgtttatccttccgggactgtatgcctttctatcctggaggaagacaaggactggcggccagccattactattaaacagattctactagggattcaggagctgttgaatgagcccaatatacaagaccccgctcaagccgaagcttacaccatttactgtcagaatcgggtggagtacgagaagagggtgcgcgctcaggccaagaagttcgctccctcttag

SEQ ID NO: 246067 - DNA, 465 bp, synthetic construct
  misc_feature 1..465: note = Description of Artificial Sequence: Synthetic coding sequence
  source 1..465: mol_type = other DNA
atggcggcatcccggaggctgatgaaggagctcgaggagattcgcaagtgcggcatgaagaatttccgcaacatccaggtggatgaggctaacctgttgacttggcagggcctgattgtccctgacaacccaccttatgacaagggggcatttcgtattgaaattaactttcccgctgagtatcccttcaaaccgcctaaaattacctttaaaacgaagatctatcatcccaacattgacgaaaagggacaagtgtgcctgcccgtgatcagcgccgagaattggaagcccgctacaaaaaccgaccaggtgattcaatcccttatagccctggttaacgatcctcaaccagagcatcccttgagggccgacctggccgaagagtattcaaaggaccgaaagaagttctgcaaaaacgccgaagaattcaccaagaaatacggggaaaagagacccgtggattag

SEQ ID NO: 246068 - DNA, 639 bp, synthetic construct
  misc_feature 1..639: note = Description of Artificial Sequence: Synthetic coding sequence
  source 1..639: mol_type = other DNA
atgcaggtggctgccggaactcggggagatacgcggttgcaggaggtcgccctgctgcctcagctgttcgatctcctggttctgggccaaaggagggccagactcctccgccaggtccccagcgcgctggcgggtaaagatctggctcaattacaggctggagctaccctcgccggatatagacgcgctcacggcccagaggaattggaggagatcaggaaatgtggaatgaaaaacttccgaaacattcaggtggacgaagccaatctcctgacatggcagggtctcatagtgccagataacccgccatatgacaagggagcattcaggatcgagattaacttccctgccgagtatccatttaagcctcctaaaatcaccttcaaaactaaaatctatcaccctaacatagatgagaaaggccaggtatgtttgcccgtgatttcggctgaaaattggaagccagctactaaaactgaccaggtcattcagtctctgatcgctcttgttaatgatccccagcccgaacatccgctacgagctgaccttgccgaggagtacagcaaggacaggaaaaaattctgtaagaatgccgaggaatttaccaagaaatatggggagaagagacccgtggactag

SEQ ID NO: 246069 - DNA, 369 bp, synthetic construct
  misc_feature 1..369: note = Description of Artificial Sequence: Synthetic coding sequence
  source 1..369: mol_type = other DNA
atggcagcctcacgcagactgatgaaagataacccaccttatgataaaggggctttcagaatcgaaatcaattttccagccgaatatccatttaagcccccaaagatcacattcaagacaaagatctatcaccctaacatcgacgagaagggacaggtttgtctgccagttatatctgccgaaaactggaagccagcgacgaagacggaccaggttatccagtccctgatcgcactagttaacgacccacagcctgaacatccactgagggccgatctagcagaggaatactccaaagaccgcaagaaattctgcaaaaacgctgaggaattcacaaaaaagtacggagaaaagcgtccagtagactag

SEQ ID NO: 246070 - DNA, 462 bp, synthetic construct
  misc_feature 1..462: note = Description of Artificial Sequence: Synthetic coding sequence
  source 1..462: mol_type = other DNA
atgatggcatctatgagagtcgtcaaagaacttgaagatttacaaaagaagcctcccccatacttaaggaacttgtcttccgacgacgccaatgtgctcgtgtggcacgctttacttttgcccgatcagcccccttaccatctgaaggcctttaacctacgcatctcatttcctcccgaatacccttttaagccacctatgataaaattcaccactaagatctaccaccctaatgtcgacgaaaacgggcagatatgcctgcctatcatctcaagcgagaattggaaaccctgtaccaagacctgccaagttttggaagctttgaacgtgctcgtgaacaggcctaatatccgcgagcctctacgcatggaccttgctgaccttctcacacagaatcctgagttgtttcgtaagaatgccgaagaattcacactccggtttggggtggatagacccagctag

SEQ ID NO: 246071 - DNA, 264 bp, synthetic construct
  misc_feature 1..264: note = Description of Artificial Sequence: Synthetic coding sequence
  source 1..264: mol_type = other DNA
atgattaagttcacaacgaaaatttaccatcctaacgtggacgaaaatggacagatctgtttgcctattatttcaagtgaaaactggaaaccctgcaccaagacatgtcaggtgctggaagccttaaacgtgctcgtaaacagaccgaacatcagagaaccactgaggatggacctcgcggacttactcactcagaacccagagctgtttcggaaaaacgccgaagaattcacgctgagattcggagttgacaggccctcctag

SEQ ID NO: 246072 - DNA, 198 bp, synthetic construct
  misc_feature 1..198: note = Description of Artificial Sequence: Synthetic coding sequence
  source 1..198: mol_type = other DNA
atgatcaagtttactacgaagatctaccaccccaacgtggatgagaacgggcagatttgcttgcccatcatcagctcagaaaattggaagccatgcaccaagacatgccaggtactggaggccctcaatgtcctggttaatcgtcccaatataagggagcccctgagaatggacctcgcagatctgttgactcagtag

SEQ ID NO: 246073 - DNA, 1128 bp, synthetic construct
  misc_feature 1..1128: note = Description of Artificial Sequence: Synthetic coding sequence
  source 1..1128: mol_type = other DNA
atgtctgtttctgggttaaaggcagagttaaagtttctcgcatcaattttcgacaaaaaccacgagcggttcagaattgtgagctggaagctggacgaattacattgccaattccttgtgccacagcagggatccccacactccctacccccaccgttgacgctccattgcaatatcactgagagctacccttcaagcagccctatctggtttgtagattctgaggaccctaatctcaccagcgtcctggagaggctggaggacactaagaataataatttattgcgacagcagttaaagtggctcatttgtgagctgtgttctctgtacaatctgccgaagcatctcgacgtagagatgcttgaccagccgctacctaccggtcagaacgggaccacagaggaggtgacatccgaagaagaagaagaagaagaggagatggccgaagacatagaggacttagatcattacgaaatgaaggaggaggagcctatcagtggaaagaagagtgaagacgaggggatcgagaaggaaaacctcgcaattctcgagaaaattcgtaagacccaacgccaagaccacctgaatggcgcagtgagtggttccgtgcaggcttccgataggttaatgaaggagctgcgagacatttaccgctcacagtcatataagaccggaatctattcagtagaactcattaatgattcactctacgactggcatgtaaagctgcaaaaggtggacccagatagtcctctccattcagacctgcagatcttaaaggaaaaggaaggtatagaatatatcctccttaacttcagcttcaaggataatttcccctttgaccccccttttgtccgcgtggtgctcccagttctgtccggagggtatgtcctagggggaggagctctgtgtatggaattactgactaagcaaggctggagctcagcatacagtatcgagagcgttattatgcaaatcaacgccaccctggttaagggtaaagccagagtgcagttcggggctaacaagaatcaatacaacctcgctagggcacaacaaagttataactcgattgtccagatccacgagaaaaatgggtggtacactcctcctaaggaggatggttag

SEQ ID NO: 246074 - DNA, 945 bp, synthetic construct
  misc_feature 1..945: note = Description of Artificial Sequence: Synthetic coding sequence
  source 1..945: mol_type = other DNA
atgtcagtctccggtctgaaggccgagctgaagttcctggcctcaatctttgataagaaccacgaaaggtttcgaatagtcagctggaaacttgatgagttacattgccagtttcttgtgccacagcaggggtctccacacagcttgcctccacctctcacactccattgcaacattactgaatcttaccctagttcctcgcccatctggtttgtcgattccgaggatcccaacctcactagcgtcctggagagactggaggacacaaagaacaacaatctgctgaggcagcagctgaagtggctgatatgcgaactttgctccctgtacaatctgccaaagcaccttgacgtggagatgctggaccagcctctcccaactggccagaacggaaccaccgaggaggtcacctcggaggaggaggaggaagaagaagagatggcagaagatattgaagacctggaccactatgagatgaaagaagaagaaccaatcagtggcaaaaagagcgaggatgagggaatcgaaaaagaaaacctggccattctcgagaaaatacggaagactcagcgccaggatcatttaaatggggctgttagcggctccgtgcaggcgagcgatcgactgatgaaggagctgcgcgatatctatcgcagccaatcatacaaaactgggatatattccgtggaactgattaatgatagtctgtatgattggcatgttaagctacaaaaagtggaccccgactcccctcttcactccgatcttcagatcctgaaagagaaggagggaatcgaatacatcctgttgaatttctccttcaaggacaacttcccatttgatccccctttcgtgcgagtcgttctgcctgtgctctctggcggactagtccacccctcgaagggcagatggctcaacgtcctgaccgtcgtgtgtctggactag

SEQ ID NO: 246075 - DNA, 1080 bp, synthetic construct
  misc_feature 1..1080: note = Description of Artificial Sequence: Synthetic coding sequence
  source 1..1080: mol_type = other DNA
atgcgtatggactccctaacagaagaaaaactggaatgccggctttggtgctgtctatctgatccatcccctcccggactggccgctcgctgctgcgtcctggaacgatcaatcgtgccctcattaaggcaggagtcctacccctcttcaagcccgatctggtttgtggactctgaggacccaaatctaaccagcgtgctcgaacgtctggaggataccaagaataacaatctgctgcgacagcaactgaaatggttgatttgcgaactgtgttctctgtacaatttgcccaagcatcttgacgtcgaaatgctggatcagcccttgcccacgggacagaacggcaccaccgaggaagtgacgtcagaggaggaggaggaggaagaggaaatggctgaagacattgaggatctggaccattatgaaatgaaggaggaagagcccatctcaggaaagaagtccgaggacgaaggaattgaaaaggagaatctggctatactggaaaagattaggaagacacaacggcaggaccaccttaatggtgccgtgagtgggagcgtgcaggctagcgatcgcttgatgaaagagctcagggacatttatcgttcacagtcctataaaaccggtatctacagcgtggagcttatcaacgacagcctttacgattggcatgtaaagttacagaaagttgacccagacagtcctctccatagtgatcttcagattctgaaggaaaaggaagggattgagtatattctgcttaacttctctttcaaggacaattttccgttcgatcctccctttgtccgggtcgtgctccctgtactctcagggggatatgtattgggtgggggagccttgtgcatggagctgcttactaagcaggggtggtctagtgcctatagtatcgagtccgtgatcatgcagatcaacgcgactctggtaaaggggaaggcccgagtgcagttcggagctaacaagaaccagtataatctggctcgagcccagcagagctacaactccatcgttcagattcatgagaagaatgggtggtatacacccccaaaagaagatggatag

SEQ ID NO: 246076 - DNA, 1080 bp, synthetic construct
  misc_feature 1..1080: note = Description of Artificial Sequence: Synthetic coding sequence
  source 1..1080: mol_type = other DNA
atgaggatggattccctgaccgaagaaaagttggagtgccgtttatggtgctgtttgtctgatccgtcgccccctggcttagctgctcggtgctgtgtgctggagcgctcgattgtgccgtctctcagacaggaatcctatccgtcatccagccctatttggttcgtagactctgaggatcccaatctgacatccgtcctggaaagattagaggacacaaagaacaataatctgttaaggcagcaactgaagtggctgatatgcgaactctgtagcctgtacaaccttcccaagcatcttgacgtcgaaatgttggatcaacccctgccgacagggcagaacggaactaccgaggaggtcactagtgaggaagaagaggaagaggaggaaatggccgaggatatcgaggatttagatcattacgagatgaaagaggaagaacctataagtgggaagaagtccgaggacgaggggatcgaaaaggagaatttggccattctggaaaagatccgtaagacacagaggcaagatcacctgaatggcgcagtgtccgggtccgtgcaagcttcagataggctgatgaaggagttaagagacatctaccgctctcagtcctacaagaccggaatctactcagtagagcttatcaatgactctctgtacgattggcatgtgaaactgcagaaggtcgatcccgatagccctctgcactccgatctgcaaatattgaaagagaaggaagggatcgaatacattttacttaactttagtttcaaagacaatttcccctttgaccctcctttcgttagggttgtcctgccggtgctgtccggtggatacgtgctggggggaggggcactgtgcatggaattacttaccaaacagggctggagcagcgcctattcaatcgaatctgtgattatgcagatcaatgcaaccctggtcaagggcaaggctagagttcagtttggcgctaacaagaaccagtacaaccttgccagggcccaacagagctataatagcatagtgcagatccatgagaaaaacgggtggtatactcctcccaaggaagacggctag

SEQ ID NO: 246077 - DNA, 717 bp, synthetic construct
  misc_feature 1..717: note = Description of Artificial Sequence: Synthetic coding sequence
  source 1..717: mol_type = other DNA
atggcacagcaacagatgaccagctctcagaaggcgcttatgctagagcttaagtcactccaggaagagccagtggaaggcttcagaattaccctggtggatgagtctgacttgtataactgggaggtggccatcttcgggccacccaataccctgtatgagggcggttattttaaggcccacattaagtttcccatcgattacccttatagcccccctacctttagattcttgacaaagatgtggcaccctaatatctatgaaaatggcgacgtgtgtattagcatcttacacccccctgtcgatgacccccaaagcggggagttgccttcagagcgttggaatccaacccagaatgtgaggactatcctcttgtctgtgattagcttactgaatgaacccaacactttcagtcccgcaaatgtggatgcgtcagtcatgttccgaaagtggcgagattcaaaggggaaagataaggagtatgctgaaatcatcaggaagcaggtctctgcaacaaaagccgaagccgagaaggacggagtgaaggtgccaactacactggctgaatactgtatcaagacaaaagtgcctagcaatgacaatagcagtgacctgctgtacgacgatctgtatgacgacgatatcgacgacgaagatgaagaggaggaagacgccgactgttatgatgatgatgatagtgggaacgaagaatcctag

SEQ ID NO: 246078 - DNA, 669 bp, synthetic construct
  misc_feature 1..669: note = Description of Artificial Sequence: Synthetic coding sequence
  source 1..669: mol_type = other DNA
atgaattctaatgttgagaatttaccccctcacatcattcgtctggtgtataaggaagtgacaactcttaccgccgacccacctgacggaattaaggtgttccccaatgaagaagatttaaccgatttgcaagtgaccattgaaggccctgaagggactccatatgccggtggtctttttagaatgaaacttctgcttggcaaggatttccccgcaagcccaccaaagggttatttcttgacaaaaatttttcatcccaacgtaggagccaatggagagatatgtgtgaatgtgctcaagagggactggacggcggaactcgggattagacacgtgctgttgaccatcaaatgtctgctgattcaccccaatcctgaatccgctctgaatgaggaagccggtcggctgctcctggagaattacgaggagtatgctgctcgtgccaggctgctgaccgagatccacggcggagcaggcggtccatctggtagggccgaagcagggcgagctttggcctcaggaacggaggcaagttccacagacccaggcgctcccggtggacctggaggtgctgagggacctatggctaagaagcatgcaggagagcgcgataagaagttggcagcaaagaagaagaccgacaagaagcgcgctttaaggcgtctgtag

SEQ ID NO: 246079 - DNA, 594 bp, synthetic construct
  misc_feature 1..594: note = Description of Artificial Sequence: Synthetic coding sequence
  source 1..594: mol_type = other DNA
atgcagagggcttccaggctcaagagagagctgcacatgctagctaccgagccacctcctggcattacttgttggcaagacaaggaccagatggacgatttgagagcgcagatcttgggaggagcaaacactccttatgagaagggcgtgttcaagcttgaggtgattattccagaaagatatccctttgagcctccccaaataagattcctgacgcccatttaccatccaaacatagattccgctgggcgaatttgcctggatgtcctgaaattgcctcctaaaggggcatggaggccctccctgaatatcgccacagtcctgactagcatccagctactgatgagcgagccaaatcctgatgacccactgatggctgacatctcatccgagttcaaatacaacaaaccagcattccttaagaacgcacgccaatggacggagaagcacgcgcgtcagaagcagaaggccgacgaggaggaaatgctggataacctgcctgaggctggggactcccgcgtacacaactccacccagaagagaaaagccagccaactcgtcggaattgaaaaaaagttccaccctgacgtgtag

SEQ ID NO: 246080 - DNA, 489 bp, synthetic construct
  misc_feature 1..489: note = Description of Artificial Sequence: Synthetic coding sequence
  source 1..489: mol_type = other DNA
atggcatcaatgcagaccaccggtagaagagtggaggtttggtttcccaagcgtctgcagaaggagctccttgcactccagaatgacccaccccctggaatgactttaaacgaaaaatctgtacagaactccatcacccagtggatcgtggacatggagggcgcacccggaacactctacgagggtgagaaattccagctgctgttcaaattttcttcacgttatcctttcgatagcccccaggtgatgttcaccggagaaaatataccagtacacccacatgtgtatagcaacggtcatatttgtctctctattctgaccgaggattggagccccgctctgagtgtccagagcgtctgcctctcaatcattagtatgctctctagctgtaaggagaagagaaggcctccagataattcgttttatgtgagaacttgcaataaaaatcccaaaaaaacaaaatggtggtaccacgacgatacatgttag

SEQ ID NO: 246081 - DNA, 480 bp, synthetic construct
  misc_feature 1..480: note = Description of Artificial Sequence: Synthetic coding sequence
  source 1..480: mol_type = other DNA
atggcttccatgcaaaaaagactgcagaaagaactgctcgccctgcaaaatgatcctcctccaggcatgacgttgaacgagaaatctgttcagaatagtatcacacagtggatcgtggatatggagggagcgccaggaacactctatgaaggcgagaaattccaactgttgttcaagttctccagtaggtacccattcgatagcccgcaggttatgtttacgggggagaacatccccgtgcatccacacgtatattctaacggccacatttgtcttagcatactgactgaggactggtctccagccctgtcagtgcagtcagtttgcctgagcataatttccatgctgagtagctgcaaggaaaagagacggcctcctgacaactccttctatgtaagaacttgtaacaagaaccccaagaaaacaaaatggtggtaccacgagcttaaaagcgctttcattctctcaataacagattag

SEQ ID NO: 246082 - DNA, 456 bp, synthetic construct
  misc_feature 1..456: note = Description of Artificial Sequence: Synthetic coding sequence
  source 1..456: mol_type = other DNA
atggcctctatgcagaagcggctgcagaaggaactcctggccctgcagaacgatcctcccccaggaatgaccctaaacgaaaagtccgtacagaatagcattacacagtggattgtcgatatggagggtgccccaggcacactttatgaaggggagaagttccagctcttatttaagttcagcagccgctatccattcgacagccctcaggtgatgttcaccggagagaacattccagtccatcctcatgtatattcaaatggccacatttgtcttagcattctgacagaggattggagccctgcactcagtgtgcagtccgtgtgtctaagcatcatttctatgcttagctcttgtaaggaaaagcgtagaccacctgataattcattttatgtccgaacttgtaacaagaatcccaagaagaccaaatggtggtaccatgacgacacctgttag

SEQ ID NO: 246083 - DNA, 354 bp, synthetic construct
  misc_feature 1..354: note = Description of Artificial Sequence: Synthetic coding sequence
  source 1..354: mol_type = other DNA
atgtcctccaatgttccggctgatatgatcaatctgcgtctcatcctcgtgtccggtaaaactaaggagtttctctttagcccgaatgatagcgcatctgacatcgctaaacatgtatatgacaactggccaatggattgggaggaggagcaggtcagttctcccaatattctcaggctgatctatcaggggaggttccttcacggcaacgttacacttggcgctctcaaactaccattcggtaagaccactgttatgcacctagttgctcgggagacactgcccgaaccgaactctcagggacagagaaacagggaaaagacaggcgagtccaactgttgcgttatcctttag

SEQ ID NO: 246084 - DNA, 474 bp, synthetic construct
  misc_feature 1..474: note = Description of Artificial Sequence: Synthetic coding sequence
  source 1..474: mol_type = other DNA
atgcagctgacagtgaaggctctgcaggggcgagagtgctccttacaggtaccagaagatgaactggtgtccacactcaagcagctcgttagcgagaaattgaacgtgcccgtcagacagcagaggctgctgtttaagggcaaggccctcgccgatggcaaacgactgtcagattactcaatcggccctaatagcaaactgaacctggtggttaagcccttagaaaaggtactactggaggagggcgaggcccagcggctggccgacagcccaccccctcaggtctggcagctgataagtaaagtgcttgctcgacacttttctgctgccgacgccagtagagtgcttgaacagctccaacgtgactacgaacgatctctatcacggctcacactggacgacattgagagactagccagtcggttcctgcaccccgaagtcacggagactatggaaaaaggattcagcaagtag

SEQ ID NO: 246085 - DNA, 525 bp, synthetic construct
  misc_feature 1..525: note = Description of Artificial Sequence: Synthetic coding sequence
  source 1..525: mol_type = other DNA
atgtttctaactgtgaagctgctccttggtcagcgatgcagtctcaaggtatccggtcaagagtccgtagcaactctgaagcgcctggtatcccgaagactgaaggtccctgaggagcagcaacacctgctgttcagaggacagttactggaagatgataaacacctgtccgactattgtattggccctaatgcgagtattaacgtcattatgcaaccactggagaaaatggctctgaaagaagcccaccagccccagacccagcctctctggcatcagctcggtctggtgctggctaagcactttgaaccccaagatgccaaagctgtcctgcagctgctgagacaggagcatgaggaaagactacagaagatttctcttgagcacttggagcaactcgctcagtatttgttggcggaagaaccgcacgtggagcccgctggggagagggagctagaggcgaaagcaaggcctcagtcctcttgtgacatggaggaaaaagaagaagcagccgcagatcaatag

SEQ ID NO: 246086 - DNA, 222 bp, synthetic construct
  misc_feature 1..222: note = Description of Artificial Sequence: Synthetic coding sequence
  source 1..222: mol_type = other DNA
atgattgaagttgtctgtaacgataggctgggaaagaaggtccgagtgaagtgcaatacagatgacactataggtgaccttaagaaactgattgccgcacaaacaggcacacgatggaacaagattgtattgaaaaaatggtacactatctttaaggaccacgtgagtctcggcgattacgaaatccatgacggcatgaatttggaattgtattaccagtag

SEQ ID NO: 246087 - DNA, 222 bp, synthetic construct
  misc_feature 1..222: note = Description of Artificial Sequence: Synthetic coding sequence
  source 1..222: mol_type = other DNA
atgatcgaggtcgtatgtaacgaccgtctggggaagaaagtgagggtgaaatgcaacacagatgataccatcggcgacttaaaaaaactcatcgccgctcagacgggaactcggtggaacaaaattgtgttgaagaaatggtacaccattttcaaagaccatgtgtcactgggagactacgaaatccacgatggaatgaatctggaattgtattatcagtag

SEQ ID NO: 246088 - DNA, 1143 bp, synthetic construct
  misc_feature 1..1143: note = Description of Artificial Sequence: Synthetic coding sequence
  source 1..1143: mol_type = other DNA
atgagcctgtcagactggcaccttgcagtgaaacttgctgatcagccactgactcccaagagcatcctgaggttgcccgagactgaattaggtgagtactcacttgggggttatagtatcagcttcctgaagcagctgatcgccggtaaattgcaagaatccgtacccgatccagaattgattgatctgatttattgtggcagaaagctgaaagatgatcagaccctggatttctatggaatccaaccaggaagcaccgtccacgttctccgcaagagctggcccgaacccgaccagaagcccgaaccggtcgacaaggtggctgcaatgcgtgagtttagggtgctgcacacagccctgcacagctcatcgtcctatcgtgaagctgtcttcaagatgttatctaataaagagagtctggatcagatcatcgtggctactccgggactgtccagcgatccaatcgctctcggtgttctgcaagacaaggatctgttttccgtgtttgccgacccaaatatgttagacacgctggttcctgcacacccagctctggtaaacgccatagtgctggtgttgcattccgttgcaggctctgccccaatgccaggtaccgactcctcgagtagatcaatgccctcttctagctaccgtgacatgcccggtggatttctgttcgaaggtctctccgacgacgaagacgacttccaccccaacacaaggagtaccccaagcagctcgacgccatcttcgaggccagcctccctgggttactctggggctgctggccctcgacccataacgcaatcagagcttgccacggctcttgcgctggcctcgacccctgagagctcctcacatacaccaactccgggaacacagggccattccagcggcacctcccccatgtcttccggggtgcagagcgggacccctattaccaacgatctattttctcaggcactacaacacgcccttcaagcttctggccagcctagcctccaaagccaatggcagccccagttgcaacaactgagggacatgggcatccaggatgacgagctgtctctcagggcgctgcaggccacgggcggagacattcaggcagcccttgagctcatattcgctggcggagcaccatag

SEQ ID NO: 246089 - DNA, 1143 bp, synthetic construct
  misc_feature 1..1143: note = Description of Artificial Sequence: Synthetic coding sequence
  source 1..1143: mol_type = other DNA
atgtcgctgagcgattggcacttggctgtgaaactggctgaccagcccctgacaccaaagtcaatcctccgtctgcccgaaaccgaacttggcgaatacagtctgggcggttatagcatctcattcctcaaacagctgatagccggtaaactgcaagaatccgtgcccgacccggaactgatcgatctaatatactgcggacgaaaactgaaggacgaccaaactctggacttttacggcattcaacctggaagtaccgtgcacgtgttgcgcaaaagttggccagagcccgatcagaaacctgaaccagtagataaggtagctgccatgcgggaattccgggtgctccacactgcccttcacagcagttcctcatatagagaggctgtgtttaagatgctttccaacaaggagtcactcgatcagattatagtggcgacccccggtctgagctccgaccccattgctctcggcgtgctgcaagataaggatctgttttctgtctttgctgatccaaacatgctcgacacacttgtcccagctcatcctgccctggtgaatgcaattgtgctggtgctgcactccgtggccggtagcgcacctatgccaggcacggactcatcaagcaggtctatgccgagcagctcttatcgcgacatgccaggagggttcctgttcgaagggctgtctgatgatgaagatgacttccaccccaatacgcgttctaccccaagttccagtacaccatcctccagacccgcaagtctcggttatagtggagccgctggaccaaggccgattacccaatctgagctggccactgcactcgcactcgcctccactccggaaagtagcagccacacccccacgcccggaactcaaggccactcttcaggcactagccctatgtcatccggagtccagtcaggcacacccattactaatgacttgttcagccaagcgttgcagcacgccctccaggcctctgggcagccatcattgcagagccagtggcagccccaactgcaacaactaagagatatgggcatacaggatgacgagctaagcttacgcgctctccaggccacaggcggtgacatccaagcagctctagaactcatttttgccggaggtgccccttag

SEQ ID NO: 246090 - DNA, 957 bp, synthetic construct
  misc_feature 1..957: note = Description of Artificial Sequence: Synthetic coding sequence
  source 1..957: mol_type = other DNA
atggccctcccaataatagttaagtggggcggtcaggagtactcggtcacgacattaagcgaagacgacactgttcttgacttgaaacaattcctgaaaacattgaccggcgttctaccagaaaggcagaagctgctaggtctcaaggttaaagggaagcctgctgaaaatgacgtcaagttaggggcactgaagctgaagcccaataccaagatcatgatgatgggtacccgagaggaatcgctggaggatgtgctcggcccaccccctgacaacgacgatgtagttaatgatttcgacatcgaggatgaagtcgtggaggtggagaaccgtgaggagaaccttctcaaaataagccgccgagttaaggagtacaaggttgaaatcttaaacccccctcgcgaggggaagaagctcctcgtgctcgatgtggattacaccctgttcgatcatagaagctgtgcagaaacgggggtggagctaatgcgcccatacttacatgaattcctgacatcagcatacgaagattacgacattgtcatatggtccgcaactaacatgaaatggattgaagctaaaatgaaggagctcggcgtttctactaacgccaattacaagatcacattcatgttggactctgccgcaatgatcaccgttcatacgcctcgcaggggacttatcgatgttaaacccttaggcgtcatttggggcaagttcagtgagttttactctaagaagaacaccattatgttcgacgatatcggtagaaactttctgatgaaccctcaaaatggactaaaaatacggccatttatgaaagcccatctcaatagagataaggacaaagaacttctcaagctcacccagtacctaaaagagattgccaaacttgatgactttctggacctgaatcacaaatactgggaacgctatctgtcaaagaagcaggggcaatag

SEQ ID NO: 246091 - DNA, 1923 bp, synthetic construct
  misc_feature 1..1923: note = Description of Artificial Sequence: Synthetic coding sequence
  source 1..1923: mol_type = other DNA
atggcattgtcccgcggattgcctagggaactggctgaggccgtggccggagggcgagtgctcgtggtgggcgcaggcggtattgggtgcgaactcctaaagaatcttgtgcttacagggtttagtcatatcgatctgatcgatttggatacgatcgatgtgagcaacctaaaccgtcaatttctattccagaagaaacacgtgggaaggtcgaaggcccaggtggcaaaggaatccgtactccagttctaccccaaggccaacattgtggcctatcacgatagtattatgaatccagactataacgtggagttcttcaggcaattcattttagttatgaatgcgctggacaatcgagcagcgagaaaccacgtcaaccgcatgtgtctggctgccgatgtgccacttatcgaaagcggcaccgctggctatttagggcaggtaaccaccataaagaagggggtgacggagtgttatgagtgccatccaaaacccacccagcggacttttcccggatgcacgattcgcaacactccatccgaacccatccattgcatagtgtgggcgaaatatttgttcaatcagctctttggcgaagaggatgccgatcaagaggttagtccagacagagcagacccagaagcagcatgggagcccaccgaggccgaagcacgcgctcgggcaagtaatgaggatggtgatatcaagaggatcagtacgaaagagtgggccaaaagcactgggtacgatcccgtaaagctgttcacgaaactcttcaaggatgacatccggtatctgctgacgatggataagctttggcgcaagaggaagccaccagtgccccttgattgggctgaagttcagagccagggcgaagagacaaatgctagtgaccaacagaacgagcctcagctcggcctgaaggaccaacaggtactcgatgtgaagtcttatgccaggcttttttcgaaatcgatcgaaaccctgagggtgcacctcgctgaaaagggagacggggcagagctcatatgggacaaagatgatccttctgccatggattttgtgacaagtgcggcaaatctgcgcatgcatatcttcagtatgaacatgaagagcaggttcgatattaagtcaatggccggaaacattatcccagcaattgctactaccaatgctgttatagccggactgattgtgctcgaaggcctgaaaatcctgtcaggaaaaatagaccagtgtagaacaatctttctcaacaaacagcccaacccacgcaaaaagttgcttgtcccatgtgcgttagacccacctaatccaaactgctatgtttgcgcatccaaacctgaggtcacggtgcggttaaacgtgcataaggtgaccgtgctcaccttgcaagataagattgttaaagaaaagttcgcaatggtcgcacccgatgtacagattgaggacggcaagggtactatcctgataagcagcgaggaaggcgaaactgaggctaacaaccacaagaagctgtccgaatttggtattcggaacggctcccgcctgcaggcagacgattttttgcaggattacactctcctgattaacatcttgcattcggaagacctcgggaaggatgtggagttcgaggtcgtgggggacgcgccagaaaaggtgggccctaagcaagcagaagatgctgcaaagagtatcactaacggctctgacgacggtgcacaaccatcaacatccacagcacaagaacaggacgatgtcctcatcgtggactcagacgaagaggacagcagcaacaacgctgacgtgtccgaggaagagcgttcccggaaacggaaattagacgaaaaggaaaatctgagtgctaagcgcagtagaattgagcagaaggaagaacttgacgacgtgattgccctggattag

SEQ ID NO: 246092 - DNA, 1635 bp, synthetic construct
  misc_feature 1..1635: note = Description of Artificial Sequence: Synthetic coding sequence
  source 1..1635: mol_type = other DNA
atgaaccctgattataatgtcgaattcttcaggcaattcatcttggtaatgaacgccttagataaccgcgctgcgcgaaaccacgttaatcgcatgtgcttagccgctgacgtcccgctgattgagtcagggacagctggatatctcggtcaggtcaccacgataaaaaaaggcgtgacagagtgttacgagtgtcacccaaagcccacccagagaactttccccggatgtaccatacgtaacaccccttcagaaccaattcattgtattgtgtgggcaaaatacctgtttaatcagctttttggtgaggaagatgccgaccaggaagtttcaccagatcgcgctgatcccgaagcagcgtgggagcctactgaagcggaggcgcgtgccagggctagtaacgaggacggagacattaagcgtatctccacaaaggagtgggcaaaatccacaggttatgacccagtcaagctgtttaccaagctcttcaaagacgacattaggtacctgctgactatggacaagctgtggaggaagcgaaagcctcccgtgcctctagattgggctgaggttcagtcacaaggcgaagaaacaaacgcttcggatcagcaaaacgaacctcagctgggtctgaaggatcagcaggttctggatgtaaagtcttatgctaggctgttttctaagtccatcgaaacactgcgggtgcatcttgccgagaagggtgatggcgctgaactgatttgggataaggacgacccatccgcaatggatttcgtgaccagcgccgcaaacctgcgcatgcatatcttttctatgaatatgaagagccggttcgacatcaagtctatggctggtaacatcatacccgctatcgctactactaacgccgttattgccggattaattgtgttagagggactaaaaattttaagcggtaagattgatcaatgtagaacaatcttcctcaacaagcaaccaaacccaaggaagaaactgttagtaccttgtgccctcgatcctccaaatccaaactgctacgtgtgcgcaagcaaacccgaagttaccgttaggttgaacgtgcataaggtgaccgtgcttactctccaggacaagatcgtgaaggagaaatttgctatggttgcccctgacgtccaaatagaagatgggaaagggaccatcctcatcagcagtgaggagggcgagaccgaggccaataaccacaagaagctctccgaatttggaatacggaacggatcacgattacaagccgatgactttctgcaagattacacgctccttatcaacatcctgcactccgaagatctgggtaaggatgttgagtttgaagtggtaggcgatgcaccggagaaggtcggcccaaagcaagcagaagacgccgcaaagtccattacaaatgggagtgacgacggggctcaacctagcacttctacagcacaggaacaggatgacgtgctcattgtcgactctgatgaggaggacagttctaataacgcggacgtgagtgaagaggaaagatcacggaaacgtaaacttgacgagaaagagaaccttagtgccaaacgctcaagaatcgaacagaaggaagaactggacgacgttatagccctggattag

SEQ ID NO: 246093 - DNA, 879 bp, synthetic construct
  misc_feature 1..879: note = Description of Artificial Sequence: Synthetic coding sequence
  source 1..879: mol_type = other DNA
atgtgtctggcggcagacgtgcccctaattgagtctggcactgctggatatctaggccaagtgacgacaataaagaagggggttacggaatgctatgagtgccatccgaagcctacccaacggacgttcccaggatgtacaatccggaataccccctcggagcctattcactgcatagtttgggccaaatacctatttaaccagttgtttggtgaagaagatgcagatcaggaagtgtcccctgaccgggctgaccccgaggcagcgtgggagcccacggaagcggaggctcgcgcaagagcatctaatgaggacggagatattaaacgtattagcacaaaggagtgggctaaatccacgggttatgacccggttaagctctttaccaaactgtttaaagatgacattaggtacctcttaacgatggacaaactgtggcggaaaagaaaacccccagtcccactagattgggccgaggtacaatcgcagggggaggagacaaatgcttctgaccagcagaacgaaccccaacttggactgaaggaccagcaagttcttgacgtgaagtcctacgctcgactgttctcaaagtcgattgagactctgcgcgtccatctcgccgaaaagggcgatggcgctgagctaatttgggataaggacgatccctcagcaatggactttgtcacatcagctgcgaatctccgcatgcacatcttctcaatgaacatgaaatcccgatttgatattaagtctatggcagggaatattattcccgctattgccaccacaaatgccgtgattgccggtctgatcgtcctggagggccttaagatcttgtccggcaagatagaccagtgcagaacggacttttttgagtag

SEQ ID NO: 246094 - DNA, 1047 bp, synthetic construct
  misc_feature 1..1047: note = Description of Artificial Sequence: Synthetic coding sequence
  source 1..1047: mol_type = other DNA
atggcattgaaaagaatgggtattgtctccgattacgagaagatccgaactttcgctgtggcaatcgtgggggtcggcggtgtgggctctgtgaccgctgagatgctgacacgctgtggcataggcaagttgctgctttttgactacgacaaagttgaactcgccaacatgaacagactgtttttccagcctcaccaggctggcctgagcaaagtccaagctgctgagcacacccttagaaacatcaaccctgacgtcctgttcgaagtccataattataacatcacaacagtggaaaatttccagcactttatggatcgcatttccaatggaggactggaggagggtaagcctgtggacctcgttttgtcatgtgtggacaactttgaagcccgaatgacgataaacactgcctgtaacgagctgggccagacctggatggagagtggcgtgagcgagaacgcggtatctggacatatacagctgataattccaggtgagtcagcgtgctttgcctgcgctccaccacttgtcgtggcagccaacatcgacgagaagaccctgaaaagagagggcgtctgtgctgcgtctctccccactactatgggagtggtggctggaatattagtgcagaatgtactaaagtttctactaaacttcggtactgtgtccttctatttggggtacaacgccatgcaggatttctttcctactatgagcatgaagcctaatccccagtgtgacgataggaactgtcgcaaacagcaggaggaatataaaaaaaaggtagcggctctaccgaaacaggaagtgatccaggaagaagaggaaatcatccatgaagacaatgagtggggaatcgaactggtatccgaagttagtgaagaggaactaaagaacttctccggcccagtgccagacttacctgaaggcatcactgtggcttacacaattcccaaaaaacaggaggactccgtaacggaactgaccgtggaggactccggagagagcctggaggacctcatggctaaaatgaaaaacatgtag

SEQ ID NO: 246095 - DNA, 1215 bp, synthetic construct
  misc_feature 1..1215: note = Description of Artificial Sequence: Synthetic coding sequence
  source 1..1215: mol_type = other DNA
atggccgagagtgtggagagacttcagcagagggtccaagagctggaaagggagctggctcaggaacgcagcttgcaggtgccccgtagcggcgatggcggaggaggcagggttcggatagagaaaatgtcctctgaagttgtggactcaaatccctatagccgactgatggcccttaagagaatgggaatcgtctcagattacgaaaaaatcaggactttcgctgttgcgattgttggtgtgggcggagtcggatctgtcaccgctgagatgttaacacggtgtggaatcggaaagctgttgttgtttgactatgataaggtcgagctagccaatatgaaccgactgttctttcagccccatcaggccggactgtccaaggtacaagcagctgagcacacgctgcgcaacatcaacccggatgtgctgttcgaggttcataattacaacattacaactgtggaaaattttcaacatttcatggacaggatatcgaatggcggacttgaagaagggaaaccagttgacctggttctctcatgtgtggataatttcgaagctcgcatgacaatcaacactgcatgcaacgaattaggccaaacttggatggaatccggggtgagcgagaacgctgtcagcgggcacatccaactgattatccctggcgagtctgcctgttttgcctgtgcccctcccctcgtggtggccgcaaacattgacgagaaaaccctcaagcgcgagggtgtgtgtgctgcatctctccctacaacaatgggtgtggtcgcagggatcctggtgcaaaacgttctgaagttcctcctgaattttggaaccgttagtttttatctggggtacaacgcaatgcaagattttttccccaccatgtctatgaagccgaaccctcagtgtgacgaccgaaactgtcgcaagcagcaggaagagtataaaaagaaagtggctgccctgcctaaacaggaggtcatacaggaagaggaagaaatcattcacgaggataacgaatggggtatcgagctggtgagtgaggtaagtgaagaggagctgaaaaatttcagtggtcccgtccccgacttgcccgaaggcattacagtagcttataccatccccaagaaacaggaggacagtgtgactgagctgacagttgaagatagtggtgagtctctggaagacttaatggccaagatgaaaaacatgtag

SEQ ID NO: 246096 - DNA, 2379 bp, synthetic construct
  misc_feature 1..2379: note = Description of Artificial Sequence: Synthetic coding sequence
  source 1..2379: mol_type = other DNA
atgtggattcaggtgaggaccatggatggccgtcagacacacacagtcgactcactatcaagactgaccaaggtggaggagctgagaaggaaaatacaagaactgtttcacgtggagcccggactgcaacgcttgttctaccggggaaaacagatggaggacggccacaccttgtttgactacgaggtgcgcctaaatgacacaattcagctgctcgtgaggcagtcccttgtcctaccccactccaccaaagagagagattcggaactcagtgacacggatagcggttgctgtcttggtcagtccgagagcgacaagtcatccacacatggcgaagcggctgccgaaaccgattcccgccctgccgacgaagacatgtgggatgagacggaactaggcctgtacaaagtgaatgagtacgtggatgccagggacactaatatgggcgcatggttcgaggcacaggtggtgagggtaacccggaaggctccctcccgcgatgaaccatgctcttcaacttctagaccagccctggaggaagatgtgatttaccacgttaagtatgacgactaccctgagaacggcgtcgtgcagatgaacagcagagatgtccgcgctagagctcggaccatcattaagtggcaggatctagaggtgggccaggtggtgatgttgaattacaatcccgacaaccctaaggagagaggattctggtacgatgccgaaattagccgcaaacgtgagaccagaaccgctcgagagctttacgctaatgtcgtactcggggacgatagtctaaatgattgcagaatcatattcgtcgatgaggtatttaagatcgaaagacctggagaggggtccccgatggtcgataacccgatgagacgcaagtctgggccaagctgtaagcattgtaaggatgacgtaaatcgcttatgtcgggtgtgtgcatgccatctgtgtggtgggcgtcaggatccggacaagcagctgatgtgcgatgagtgtgacatggctttccacatttactgcctggatcctccgttaagcagcgtaccctctgaagacgaatggtactgcccagaatgccgaaatgatgcctccgaagtagtgctggcaggcgagcggctccgggagagtaagaagaaagctaagatggcttcagctacaagcagttctcagagagactgggggaagggaatggcctgcgttggacgtaccaaagagtgcactatagttcccagcaaccattacggtcccattcctggcatccccgttggtaccatgtggcgttttagggtgcaggtaagcgaatctggggtccaccgccctcacgtggctggtatccacggaagatcaaatgatggcgcatattccctggtgctggcgggaggctacgaagatgatgtggaccatggaaacttcttcacatacaccggaagcgggggaagagacctttctggaaataaacggaccgcggagcagtcctgtgaccaaaaactcactaatacgaaccgcgctctcgccctcaactgtttcgccccaattaatgaccaggaaggcgcagaggcaaaggactggaggagcggtaagccggttcgggtagtgcggaacgttaagggtggtaagaactcgaaatatgcgccagccgaaggcaatagatatgacggaatctacaaagtggtcaagtattggccagagaaggggaagagcggtttcctggtgtggagatacctgcttcggagagacgatgatgagccgggtccatggactaaagagggcaaggaccgcattaagaagctgggtctcaccatgcaataccctgaaggatatctggaggcactcgccaacagggaaagagagaaagaaaactccaaacgagaagaagaggagcaacaggaaggtgggttcgcctcaccccgaactggaaaggggaagtggaagcggaagagcgctggaggcggtccttcccgcgcaggacctcgccgtacaagcaaaaagaccaaggttgagccgtattcgctcaccgcccagcagtcctcacttattagggaagataaatccaatgctaagctttggaatgaggtcttggcctctctgaaggaccgcccagcatctgggtctcctttccagctgtttctgagcaaggttgaagagaccttccagtgcatctgttgtcaagaacttgtattccggcctatcaccacagtgtgccagcataacgtctgcaaggattgtctggaccgtagctttagggctcaggtattttcctgcccggcatgcaggtatgaccttggcagaagctatgcaatgcaggtcaaccagccccttcagacagtcctgaatcagttattccccggttatggtaacgggagatag

SEQ ID NO: 246097 - DNA, 1224 bp, synthetic construct
  misc_feature 1..1224: note = Description of Artificial Sequence: Synthetic coding sequence
  source 1..1224: mol_type = other DNA
atggctagtgcaacttccagcagtcagcgggactggggcaagggaatggcttgtgtggggaggactaaggagtgcacaattgtcccttccaatcattacggacccattccagggatccccgtgggaacgatgtggaggtttcgcgttcaggtaagtgagtcgggagtacacaggccacacgtggctggtattcacgggcgatccaatgatggagcttacagcctggttttggctggaggctatgaggacgatgtggatcacggcaactttttcacctatacgggctcaggtggacgggacttatccggcaacaaacgcacagccgaacagtcttgtgatcaaaagctaacaaacactaaccgcgcattggctttgaattgcttcgcgccaattaacgatcaggaaggtgccgaagcgaaggactggcgctcagggaaacccgttcgcgtggtgagaaacgtgaaaggcggaaagaatagtaagtatgccccagcagagggcaacagatatgatggtatttacaaagtcgtgaaatactggccggaaaaaggcaaatcaggattccttgtgtggagatatctgctccgcagggatgacgatgaacccggaccctggacaaaagaggggaaggacagaattaaaaaactgggattaactatgcagtaccctgaaggatacttggaggcactggctaatagagagcgggagaaggagaactccaagagggaggaagaagagcagcaggagggagggttcgcttctccacggaccggaaagggcaagtggaagcgaaaatcagcagggggagggccttccagagccggaccacgcagaacatcgaaaaaaaccaaggtcgaaccttattctctgactgctcagcaatcgagtctgattagagaggacaagagcaacgctaaactttggaacgaggtactagcaagcctgaaagaccgtccggcttccggcagccctttccagttgttcttgagtaaagtggaggaaacgtttcagtgcatctgttgtcaggaacttgttttcaggccaatcacaacagtatgtcagcataacgtttgcaaggattgcctcgaccggtccttcagggcgcaagtgtttagttgtccagcctgccggtatgatctgggacggtcttatgccatgcaggtgaatcagccattacagacagttctcaaccaactatttcccggttacggcaacggtcggtag

SEQ ID NO: 246098 - DNA, 2418 bp, synthetic construct
  misc_feature 1..2418: note = Description of Artificial Sequence: Synthetic coding sequence
  source 1..2418: mol_type = other DNA
atgggggtatttgcggtaccaccactctcagccgataccatgtggatacaggtgcgcactatggacggtcggcagactcatacagtggattctctctctcgcttgaccaaggtcgaggagctccggaggaaaattcaggagctgtttcacgtggagccgggattgcagagactgttctaccgaggaaaacaaatggaggatggccatactctctttgattatgaggtgcggctgaacgacaccatacagctgttagtgcgacagagcctcgtgctcccacactccacgaaggagagagacagcgaattgtctgatacggattccggctgttgcttgggtcagagcgaatccgacaaatcttcaacccacggcgaggccgcagctgaaaccgatagccgcccagcagacgaagatatgtgggacgagacagaactgggactctacaaagtcaacgaatacgtggacgcacgggacaccaatatgggcgcttggtttgaagcgcaggtggtgagggtgactcgcaaagctccctcccgcgacgagccatgcagctccacttcccgacccgcactggaggaggacgtgatttaccatgtgaagtatgatgactaccccgaaaacggggtggtccagatgaacagccgagatgtccgggctagggctagaaccatcatcaaatggcaagacctggaagtggggcaggttgtcatgctcaattataatccagacaaccccaaggaaaggggcttttggtatgacgccgagatcagccggaagcgggagaccagaacggcccgagagctgtatgccaacgtggtgttaggagatgatagcttgaacgattgtcgtatcatttttgtggatgaagtatttaaaattgaaaggccaggagaaggctcgcccatggtggataaccccatgcggcgaaaatcaggaccatcttgcaaacactgcaaagacgatgttaacagactatgccgggtgtgcgcttgtcatctttgtggagggaggcaagatccagataaacagctgatgtgcgatgaatgtgacatggccttccacatctactgcctggatccccctctgagcagcgtaccctcagaagatgagtggtactgtcccgagtgccggaatgacgcctccgaagtcgttctggccggtgaaagactgcgggagagcaagaagaaggccaagatggcctcagctacttcatccagtcagagagactggggaaaaggcatggcttgcgtcggccgaacaaaagaatgtacaattgtgcctagcaaccattatgggccaatcccaggcattcccgtaggcaccatgtggcgattccgggtccaggtcagtgaaagtggtgtgcacaggccgcacgtagccggtatccatgggaggtctaatgacggtgcatattctctggtgctggcagggggatatgaggatgacgttgaccacggcaattttttcacttataccggctccggcggaagagatttgagcgggaacaaaaggacagccgaacagtcatgtgaccaaaagctgacaaacaccaacagggctcttgccttaaactgctttgctccaatcaacgaccaggagggcgctgaggcaaaagactggcgtagcggcaaacctgttagggtggtgaggaacgtcaaaggagggaaaaactccaagtacgcaccggcagaaggtaatagatatgacggcatctataaggtggtgaaatactggcctgagaaaggaaaatcaggatttctggtctggcgatacctgctgagacgggacgacgacgagccgggtccctggaccaaagagggcaaggacaggataaagaagctcgggctgactatgcagtaccctgagggctatctcgaggcccttgcaaatagggagcgcgagaaggagaactctaaacgggaagaggaggaacagcaagaggggggttttgcctcgcctagaacgggcaaaggtaagtggaagcggaaaagtgctggcggagggccaagccgtgcaggaccaaggaggaccagtaagaaaactaaggtggaaccttattccctgaccgcccagcagtccagtctgataagagaggacaaatctaacgcaaagctgtggaatgaggtcctggcctctctgaaagaccggcctgcaagcggttcaccattccagctgtttctgtcaaaagttgaggagacattccaatgcatctgctgccaggaactcgtcttccggcctatcactacagtctgtcaacataatgtgtgcaaagactgtttggatcgatcgtttagggcgcaggttttctcatgcccagcgtgccggtatgatttagggaggagttacgctatgcaagtcaaccagccactgcagactgtgttgaaccaactgttccccggatacgggaatggcagatag

SEQ ID NO: 246099 - DNA, 2379 bp, synthetic construct
  misc_feature 1..2379: note = Description of Artificial Sequence: Synthetic coding sequence
  source 1..2379: mol_type = other DNA
atgtggatccaggtaaggactatggatgggcgtcagacccacacagtggacagtttgagccggttgactaaagtggaggagcttcggcgaaaaatacaagagctctttcacgtggagcccggactgcaacgcctcttctaccgaggaaaacaaatggaggacggacacactttgttcgattacgaggtgcgcctgaatgatacaattcagctcctcgtgcgacagtcactggtgcttccccattccaccaaggaaagggactccgagctgagcgacaccgatagtgggtgttgcctcggacagtctgagtccgataaatcaagtactcacggtgaggctgccgctgaaaccgattctcggcctgcagacgaggatatgtgggacgaaactgaactagggctgtacaaggtgaatgagtacgttgatgctcgggatacaaacatgggagcatggtttgaggcacaggtggtccgcgttactcggaaagccccttcccgcgatgagccctgttctagcaccagtagacccgcactggaagaggatgtgatctaccatgtcaagtacgatgactatcccgaaaatggcgtggtgcagatgaactccagagacgtacgggcacgagcccgaacaattataaagtggcaagatcttgaagtgggacaggtggtcatgctgaactacaatccagacaatcccaaggagaggggcttttggtatgacgcagagatctcaagaaaaagggagacaaggactgccagagaactgtacgcaaatgtggtacttggcgatgactccctgaatgattgtcgcatcatctttgtggacgaggtctttaagattgagcggccaggcgaggggagtcccatggttgacaatcctatgcgcaggaaaagcgggcctagctgcaagcactgcaaggatgacgtgaacaggctgtgcagggtgtgcgcttgtcatctctgcggcggaaggcaggatccggataagcagcttatgtgtgacgaatgcgacatggcgttccatatctattgcctggatccaccattatccagcgtaccaagcgaagacgaatggtattgtccagaatgcaggaatgacgccagtgaggtcgtattggccggtgagcggcttcgggagagcaaaaagaaagctaaaatggcctccgctacctccagctcccagagagattggggcaagggcatggcatgcgtcggacgcacaaaagagtgtacaatcgtaccctctaatcattacggcccaattcctgggatcccagtaggcacaatgtggcgctttagggtccaggttagtgaaagcggagtgcaccgccctcacgtggccggaattcatgggcgaagcaatgatggcgcttatagtctcgtcctcgctggcggatatgaagacgacgtcgaccatggcaacttctttacctacaccggctccggagggcgagatttgtctggtaacaagcggaccgcggagcagagctgtgaccagaagcttaccaacacgaatagagccctcgcgctgaattgctttgcgcctattaatgaccaagaaggcgctgaggccaaggattggcgttcaggcaagccagtgcgcgtggtacgcaatgtgaagggcggaaaaaactcaaaatacgcaccggcagagggaaatagatatgacggaatctacaaggtcgtgaaatattggcctgagaagggcaaaagcggttttctggtatggagatacctactgcgtcgagacgacgacgagcctggaccttggacaaaagagggcaaggaccgaatcaagaaattgggccttaccatgcaatacccagagggctacttggaggccctggcaaatcgcgagcgggaaaaagagaactcaaagcgtgaagaagaggagcagcaggaagggggttttgcctctcccagaaccggcaagggaaagtggaagaggaagagcgccggaggcggacctagtcgcgctggtccgcgtcgtacctccaaaaaaactaaggtcgaaccatactcgctcacggcacagcaatcttccctgatccgtgaagacaagagcaatgcaaagctctggaacgaagttcttgcaagtctcaaagataggcccgctagtgggagcccatttcaactcttcctgtccaaggtggaagagaccttccaatgtatctgctgtcaggagctagtctttcgacctataacaaccgtctgtcaacacaacgtctgtaaagattgcttggatcgatctttccgagcccaagttttttcatgtcctgcctgccggtacgatttgggacgctcatacgctatgcaggtgaaccaacccctgcagactgttttgaatcaactattccctggctacggtaacggtaggtag

SEQ ID NO: 246100 - DNA, 2379 bp, synthetic construct
  misc_feature 1..2379: note = Description of Artificial Sequence: Synthetic coding sequence
  source 1..2379: mol_type = other DNA
atgtggatccaagtccgcacaatggacgggcgtcagacccacacggtggactctctgagccggctgaccaaagtggaagaattaagacgtaagatacaggagttattccacgtggagccgggactccagaggctgttctatagaggaaaacagatggaggacggacataccttatttgactatgaggtcaggctcaatgacacaatacaactcttagtcaggcagtcgctggtgttgccccactccaccaaggagcgagacagcgaactttctgacacagattcaggatgttgcctgggccaaagtgagagtgataagtcatctacacacggggaggcggctgccgagacagacagcagacccgctgacgaggacatgtgggatgaaacagaattggggctgtataaagtcaatgagtacgtggatgcccgagacacaaacatgggtgcctggtttgaagcccaggtggttagggtgacccgcaaggccccatctcgggatgaaccatgtagtagcacaagcagaccagctcttgaagaggacgtgatttaccacgtgaagtatgacgactaccccgaaaatggcgtcgtgcagatgaactcccgagacgtgagagccagggcgagaaccatcattaaatggcaggatctagaggtgggacaggttgtgatgctcaactacaatcctgataaccctaaggagcgagggttttggtacgacgccgaaatcagtagaaaacgcgagacccggacggcacgcgaattgtacgctaacgtggttttaggcgacgattctctcaatgattgtagaattatcttcgtggacgaagtcttcaaaatcgagcgacctggtgagggcagcccaatggttgacaatcctatgcgcaggaagtctgggcctagctgtaagcactgtaaagacgacgtgaatcggctctgccgcgtgtgcgcctgccatctctgtggtggtagacaggacccggacaagcagctaatgtgcgatgagtgcgatatggccttccacatctactgcctcgatcccccactgagtagcgtgccatcagaggacgagtggtactgtccagagtgtcgtaatgacgcctccgaggtggttctggctggggaaaggctgagagaatcgaaaaaaaaagccaaaatggccagcgctacttccagctcacaacgcgattggggaaagggaatggcatgtgttgggagaacaaaggagtgtacaattgttcctagcaaccattacgggccaatcccgggaataccagtggggacgatgtggcggtttagagtgcaggtatcagaatcaggggttcacagaccccacgtcgccggaatacacggtagaagtaacgatggcgcttacagtcttgtgctagccggaggatatgaggatgacgtcgaccatggaaatttcttcacttataccggaagcggaggcagggacttatctgggaacaaaagaaccgccgaacagtcgtgtgatcagaaactaacaaacacgaacagagccctggctctaaactgttttgccccaattaacgatcaggaaggtgccgaagcgaaggactggagatccggaaagcctgttcgagtggttcgtaatgtgaaaggcggtaagaattctaagtatgcaccagccgagggcaacagatatgacggtatttacaaggttgtcaagtactggcccgagaagggcaaatccggtttcctagtctggagatacctgctacggcgagatgatgatgaaccgggtccctggacgaaggaggggaaagacagaattaagaagttgggcctgactatgcaataccctgaaggatatcttgaggcccttgctaaccgtgagagggaaaaggagaattctaaacgggaagaggaggaacagcaggagggcggttttgcctcgccaaggacgggtaagggaaagtggaagaggaagagcgccggaggaggtccttcccgtgctggacctagacgaacaagcaagaagacaaaggtggaaccatacagtctgactgctcagcaatccagcctcattcgggaggataaatcaaatgccaagctatggaacgaggtgctcgcctcgctgaaggacaggcccgcatccggctctccctttcagctctttctaagcaaagttgaggagaccttccagtgtatctgctgccaagagctggtgtttcggccaattaccactgtctgccagcacaatgtgtgcaaagactgtctggaccgctctttcagagcccaggttttctcatgtcccgcttgcaggtacgacctgggcaggagttatgccatgcaggtaaatcagcccctgcagaccgttctgaatcagttgtttccaggctacggaaatggcaggtag

SEQ ID NO: 246101 - DNA, 3240 bp, synthetic construct
  misc_feature 1..3240: note = Description of Artificial Sequence: Synthetic coding sequence
  source 1..3240: mol_type = other DNA
atgaagagctgcgcagtgagtctcactaccgcagctgtggccttcggagatgaggccaaaaagatggctgagggtaaggccagcagggagagcgaagaagaatcagtttctctgacagtggaagaaagggaagctttaggtggaatggactctagactgttcgggttcgtgcggctgcacgaggatggagcccgtaccaaaaccctgctgggtaaggccgtgcggtgctacgaatcgctgattctgaaagcggagggcaaggttgagagcgatttcttctgccagctgggacattttaatttactgctcgaggattactccaaagccctgtctgcttaccaaaggtactattcactgcaagctgactactggaaaaatgcagcatttctctacggtctggggcttgtgtacttctattacaatgccttccattgggctataaaagcctttcaggatgtcctgtatgttgatccttccttttgcagagcaaaggaaatccatctgcgcctcggcttgatgtttaaagtgaatactgactacaaatcctccctgaagcactttcagcttgccctcatcgattgcaacccttgcaccctgtctaacgctgagatccagtttcatatcgcccatctctatgagacacagcgtaagtaccactctgccaaggaagcctatgaacaattgctgcagaccgagaacctgcctgcgcaggtgaaggccactgtattgcaacaactgggctggatgcaccacaacatggatctggtcggcgataaagccacaaaagaaagttacgccattcaatacctgcagaagagcctcgaagccgatccgaattcaggccagagctggtacttcctcggccgttgttatagcagcattggaaaagttcaggacgcatttatctcttacagacagtctatcgataagtcagaggcatctgctgatacctggtgctctattggtgtgttatatcagcagcagaatcagccaatggatgctctgcaagcatatatttgcgctgtccagttggaccatggacacgcagctgcttggatggacctcggaaccttatatgagtcctgcaaccaaccccaggatgccattaaatgctatcttaacgccgcacgatcaaaacgctgttctaacacctctactctggctgcaagaatcaaattcctgcagaatggctccgataactggaatggcggtcagtccttgagtcaccatcccgttcagcaggtgtacagcttgtgcctgacaccccagaagctccagcatctcgagcagctgagggcgaacagagataaccttaatcctgcacagaaacatcaattggagcaactggagtcccaattcgttttaatgcagcagatgcgtcacaaagaagtggcccaggtccggacaacagggattcacaacggggctatcaccgactccagtctacccactaatagcgtctctaacaggcagccccacggagccttgaccagggttagcagtgtctcacagcccggagtgcggcctgcttgcgttgaaaagctgctttcctccggtgcgttctccgccggttgcatcccatgcgggacgtcaaagatactcgggagtactgacacaattctgctcggcagcaattgcatcgcgggttcagaaagtaacggcaacgtgccctacctgcagcaaaatacccatactctgcctcacaatcatacagacctgaatagctccaccgaagaaccctggaggaaacagctgagtaactcggcccaagggctccataaatcacagtcaagttgtctgagtggacccaatgaggaacagcctctgttctcaactgggagtgctcagtaccaccaggctacctcaaccggtatcaaaaaggctaacgagcacctgacactgccctctaacagcgttccgcaaggtgacgccgactctcacctgagctgccacaccgccactagtggtggtcagcagggaataatgttcacaaaagagagcaagccttccaagaacagaagtcttgtgcccgagacgagccgtcacactggagacacatcgaatgggtgtgccgatgtgaaaggtctctccaatcatgtacaccagctgatcgctgacgctgtttcatcacctaatcacggggattcgcccaacttacttatagccgataaccctcagctgtccgcactactgattgggaaggcaaatggaaatgtaggcactggtacctgtgacaaggtgaacaacatccatccggcagtgcacactaagacagaccactctgtcgccagcagcccgagttctgccatttccacagcaacgcccagtccaaagtccacagagcagcgttcaatcaactccgtgaccagccttaacagtccccattcggggttgcatacggtcaacggggaggggctgggaaaatctcagagctccaccaaggtagaccttccactagcctctcacaggtctacttctcagatacttccatccatgagtgtgtcaatttgtcccagcagcaccgaggtccttaaagcttgtcggaatccgggtaaaaatggcttgagtaattcatgtatcctactggataagtgtccgcctccacgcccacccacatccccctatccaccattgcctaaggataagctgaaccctcccactccaagcatctaccttgagaataagcgcgatgccttttttccccctctccaccagttctgcactaatccaaaaaaccctgttactgtcattcggggattggctggagccctgaagcttgatcttggactcttcagtactaagacactggttgaagctaataatgagcacatggtcgaagtcaggactcagctattacagcctgccgacgagaactgggacccgacaggcactaaaaagatctggcgttgcgaaagtaacaggagccacaccaccatcgctaaatatgcacaatatcaggcgtctagctttcaggaaagcctgcgcgcaggtatgcagtggtgtgatctgagctccttacaaccaccccctcccggttttaagcggttctcacatctgtcactgccaaactcttggaactatcgccaccttcccagctgtcccacaaacttctgcatcttcgtggaaacgggcttccaccacgtggggcaggcttgcctggagctgttgacatctgggggactgctggcgtcagcctcacaatcagcagggataaccggggtatcgcaccacgccagatag

SEQ ID NO: 246102 - DNA, 4044 bp, synthetic construct
  misc_feature 1..4044: note = Description of Artificial Sequence: Synthetic coding sequence
  source 1..4044: mol_type = other DNA
atgaaatcctgtgcggtgagcctgaccaccgcagccgtcgcttttggtgatgaagcaaaaaagatggcagaaggcaaggcctcaagggaatccgaagaggagtctgtctcactgactgtggaagaacgtgaagctctgggaggcatggactcccgcctgtttggattcgttcgtctgcacgaggacggcgctagaactaaaaccctgctcggaaaggctgtgcggtgttacgagagtctgattctcaaagccgagggcaaagtggaaagtgatttcttttgccagcttgggcactttaatctgctgctggaggactattccaaagccctttcagcctaccagcgctattactccctgcaagccgactattggaagaacgcagccttcctttatggcttaggcctagtgtatttttactataatgcttttcactgggcaataaaggcattccaggacgtgctgtatgtagacccctctttctgtcgcgcaaaagaaatccacttgcggctgggactgatgtttaaagtcaatactgactacaagtcaagtcttaagcattttcaattagcgttaatagactgtaatccatgtaccctttcaaatgcggagatacagtttcatattgcccacttatacgaaactcagcgtaagtaccactcagctaaagaggcctacgagcaactcctgcaaacagagaacctacccgcacaggttaaagcaaccgtactgcaacaactgggctggatgcaccataatatggatttagtaggcgacaaggcaaccaaggagtcgtacgcgattcagtacttgcagaaaagcctagaggccgaccctaattccggccagagctggtattttcttgggcgttgctactcttccataggaaaggtgcaagacgcattcataagctaccgtcaaagcattgacaagagcgaagccagcgctgacacgtggtgttctatcggtgtgctgtaccagcaacagaatcagcccatggatgctttacaagcgtatatttgcgcagtacagttggaccatggacacgctgcagcatggatggacctggggacattatacgaatcctgcaaccagccacaggatgcaattaaatgctacctaaatgccgctcgctcaaagaggtgctccaacaccagcacgttggccgcaaggattaaatttctgcagaacggctctgataattggaacggaggtcaatctctgtcccaccaccctgtccaacaggtgtattcactgtgcctcacaccacaaaagcttcagcacctggagcagctcagagccaatagagataatctcaaccccgctcagaagcaccaactggagcagttagagagccagttcgtcctgatgcagcagatgcgacacaaggaagtcgcacaggtcaggactaccggcatccacaatggtgcaattactgacagtagcctgccaaccaatagcgtcagcaacaggcagccgcatggcgcactcactcgtgtgtcttcggtttctcagccaggggtcaggcccgcatgcgtggagaagcttctgtcatcaggggcattttccgccggatgcattccctgcggaacatccaagattctcggcagtacagacacaatcctcctagggagcaattgcatcgctgggagtgagagcaatggaaacgtaccatatctgcagcagaatactcacacattaccacataatcatacagacttaaatagctccaccgaggaaccttggcgaaagcagctgtcgaacagcgcccaaggccttcacaaatcccagtccagctgcctctcagggcctaacgaagagcaacctctgttctccacaggctcagcccagtaccatcaggcgacaagcactggaatcaagaaggccaacgagcacctgactctgccctccaacagtgtcccacaaggagatgccgatagtcacctgagctgccatacggccacctctggaggtcagcagggaatcatgttcaccaaagaaagcaaacccagtaagaatcgtagcttagtgcctgagacttcccggcacaccggggacacaagtaatggatgcgccgacgtgaaaggtctatccaatcacgttcaccagctgatcgccgacgctgtgtcaagtccaaatcacggcgattctcccaatctcctgattgcagataacccacagctctctgccctgctgatcggcaaagccaatggcaatgttggcacggggacctgtgacaaagtcaataatatccacccagctgtccacaccaagaccgatcattccgtcgccagctctccctccagcgccatcagtactgcaacaccaagtccaaagtccaccgaacagagatcaattaattcagtgacctctctcaattctcctcactccggcttgcacacagttaatggggagggtctcgggaagtctcaatccagcacaaaagtcgacttacccctcgctagtcaccggtccacctcgcagattcttccctcaatgtcggtttcaatctgccccagtagtacagaagtgctgaaagcctgtcgaaaccccggaaaaaacggtctgtctaactcctgtatactactcgacaagtgccctcctcctagacctccaaccagtccatatcctccacttcccaaggacaaactgaatcccccaacgccatcgatttatttagaaaacaagagagacgccttctttccccctttacaccagttctgcacaaaccctaagaatccggtcactgtaataaggggcctggctggcgcattaaagcttgacctggggctgttttctacaaaaaccctagtggaagccaacaatgaacacatggtcgaagttagaacgcagctgctgcagcctgctgatgagaattgggaccccaccggcaccaagaaaatctggaggtgcgagtctaacaggtctcatacaacaatagccaagtacgctcagtaccaagcaagtagttttcaagagagccttcgggaggaaaatgagaaaagaactcagcataaggaccattcagacaatgaatctactagctccgaaaattctggcagacggagaaaaggtcctttcaaaaccatcaagttcggaactaatattgacttatccgacaacaaaaagtggaagctccagctccacgaactgaccaaactacccgctttcgctcgggtcgtgagcgcagggaatctgctgacccatgtaggtcacacaattctgggcatgaatacagtccaactgtatatgaaagtgcccggttctcgaaccccaggtcaccaggagaacaataacttttgctcggtcaatatcaacattggtccaggcgactgcgaatggttcgtagtccccgaggactactggggcgtactaaatgacttctgtgaaaaaaataacctcaacttcttaatgagcagttggtggcctaacctcgaagacctctacgaggctaatgtcccagtttaccggttcattcagcggcctggcgacctcgtctggattaatgcaggcaccgttcactgggtccaggccgtcggttggtgtaacaatatcgcttggaacgttggacctcttactgcctgtcagtataagttagccgtggagagatacgaatggaataagttgaaaagcgtcaagtcccctgtacccatggtccacctgtcctggaacatggccagaaacatcaaggtgagcgatcctaagctcttcgaaatgattaagtactgtctgctcaaaatcttgaagcaataccaaacccttcgcgaggccctggtagcagcaggcaaagaagtcatttggcacggccgaactaatgatgaaccagcgcattattgtagcatctgtgaagtagaggtctttaacttgcttttcgtgactaacgagtccaatacgcaaaaaacttatattgtgcactgccacgactgtgccaggaagacttccaagtctttagaaaacttcgtggttctggagcagtacaagatggaggacctaatccaggtgtacgaccagttcaccctagccctgagtctgagctctagtagttag

SEQ ID NO: 246103 - DNA, 3723 bp, synthetic construct
  misc_feature 1..3723: note = Description of Artificial Sequence: Synthetic coding sequence
  source 1..3723: mol_type = other DNA
atgaagtcatgcgccgtatctttaaccacggccgctgtggctttcggggatgaggccaaaaaaatggctgaaggcaaagcatctagagaaagtgaagaggagtctgtctctttaaccgttgaggagagggaggccttgggagggatggacagcaggctgttcgggtttgtgcggctgcatgaggacggggctcgcaccaaaaccctgttaggaaaggctgtgagatgctacgaaagccttatattaaaggctgagggaaaggtggagagcgattttttctgccaactcggccatttcaacttgctcctagaagactattccaaagccttatccgcctaccagcgatattactcactgcaggccgactactggaagaacgcagcctttttgtacggcttagggctggtgtatttttactataacgcctttcactgggcaatcaaggctttccaggacgtgctatacgtcgacccttcattctgccgggctaaagagatccatctcagactcggcctcatgttcaaagtaaatacagactataaatccagtctgaaacacttccaactggccctcatcgattgtaatccttgtaccctcagtaacgccgagatccagttccatatcgcgcacctgtatgaaacccaaagaaaataccacagtgctaaagaggcttatgagcagctgttacagactgagaacctgccagcacaggttaaggccacagttctgcagcaactcggctggatgcatcacaacatggacctggttggcgacaaggcaacaaaggagagttatgcaattcagtatctccagaagtctctggaagctgacccgaatagcgggcagtcttggtactttctggggaggtgctattcaagtatcggtaaagtgcaggacgctttcattagttacagacaaagtattgacaagagtgaagccagcgccgacacatggtgctctattggggtcctctaccagcagcaaaatcagcctatggacgcactgcaggcatatatctgtgccgtgcagctcgatcacgggcatgccgctgcttggatggacctcggcaccctgtatgagtcctgcaaccagccacaggatgccatcaaatgttacctaaacgccgcacgaagcaagaggtgctcgaatactagtaccctggccgcaagaattaaattcctacaaaacggaagtgacaattggaacggagggcagtcactttctcaccaccccgtgcagcaggtctatagcctctgtctgaccccgcagaagctgcagcacctcgagcagctccgtgccaaccgcgataatcttaaccccgcacaaaaacaccaactggaacagttggagtcacaattcgtgctgatgcagcagatgcgtcataaggaggtggctcaggtgaggaccactgggatacataatggggcaattaccgatagctctctgccaaccaactcggtctccaatagacagccacacggcgctctaaccagggttagctccgttagccagcctggggttcggcctgcttgtgtagaaaaactgttgagctcaggtgccttcagtgctggttgtattccctgtggcacctcaaaaatcttaggaagtactgacacgattcttctggggagcaattgtattgccggatctgagtcaaatggtaacgtgccatatctacagcagaacacacacaccctcccccacaatcacaccgatctcaatagcagcacggaggagccatggcgtaaacagttatctaactcagcccagggactccacaagtcacagagtagttgcctgagcggcccaaacgaagagcaaccactattctcaaccgggagtgctcagtaccatcaggccacgtccacagggattaagaaggcgaatgagcacctgactttaccttccaatagcgtccctcagggagatgccgactcgcacttgtcgtgccacactgccacctcgggaggccagcagggaatcatgtttaccaaggaaagcaagccaagcaaaaatcggagtcttgtgccagaaaccagtaggcatacaggcgatacttctaacgggtgtgcagacgtgaaaggactgtcaaaccatgttcatcagttgatcgccgacgccgtttcctctcccaaccacggggactctcctaatctgctgatcgccgacaatccccagctatcagctctgctgatagggaaggccaatggaaacgttggtaccgggacatgtgataaagtaaataacattcatcccgctgtgcatacaaagacagaccacagcgtcgcaagctccccctcctcagcaatctctaccgccacacccagccctaagtcgacagaacagagatctattaacagcgtgacgagcctaaatagccctcattcggggctacatactgtcaacggagagggcctggggaaatcccagtcttctaccaaggtggacttgcccctcgcttctcaccgctcaaccagccagatactgccatctatgtccgtgtcaatttgtccatcatctaccgaagtgctaaaagcgtgtcggaaccctggcaaaaatggcctgtctaactcatgtattttactggataaatgccccccaccaagacctcccacgtctccctatccgcctcttcccaaagacaagctaaacccgcctactcccagcatctacctcgagaacaagcgggatgcattctttcctccacttcatcaattttgcaccaacccaaagaatcccgtgactgtaattaggggcctcgccggtgccctgaaactagatctcggacttttctccactaaaactttggtggaagccaataacgagcatatggtcgaagtccggacgcagctgctgcagccagccgatgaaaactgggaccccactggcaccaagaagatttggaggtgtgaatccaacaggtcccacactaccatcgccaagtatgcccagtaccaggccagtagcttccaagagtccttacgcgaagagaatgagaaaagaacccagcacaaagatcacagcgataacgaatccacatcgagcgagaattctggcaggaggcggaagggtccttttaagaccataaagttcggaaccaatatcgacctatcagataacaaaaaatggaagcttcagctgcacgagctgacgaaactaccagcgttcgctagagttgtgtccgccggaaacttactgacgcatgtcggtcacacaatcctcgggatgaacactgtgcagctgtatatgaaagtcccagggtctcgaactcccggacaccaagagaataacaatttttgttcagtcaatatcaacattgggccaggcgactgtgagtggttcgtcgtacctgaagattattggggggttttgaacgatttctgtgaaaagaataacctgaacttcctgatgtctagttggtggccgaatctagaggacctgtatgaagccaatgtccctgtctatcgttttattcagcgcccaggagacctcgtatggattaacgcaggtacagtgcattgggtccaagctgtggggtggtgcaacaacatcgcctggaatgttgggcctctcactgcctgtcagtacaaactagcggtagagcgctacgagtggaataagctcaaatccgtgaaaagccccgtcccaatggttcacctaagttggaacatggccaggaacattaaagtgagcgacccgaaattgttcgagatgattaaatag

SEQ ID NO: 246104 - DNA, 624 bp, synthetic construct
  misc_feature 1..624: note = Description of Artificial Sequence: Synthetic coding sequence
  source 1..624: mol_type = other DNA
atgaaatcatgtgccgtgagcttgactacagccgcagtggcatttggagatgaggccaagaagatggctgaagggaaagcgtcacgggagtcagaagaagaatccgtgtccctaaccgtggaggagagagaagctctcggcggtatggactcccggttatttggctttgtacgattgcatgaggacggggctaggaccaaaactctcctcggcaaggcagtcagatgctatgagagtctcatactgaaagccgaggggaaagttgaaagtgactttttctgccagcttggccactttaacctgcttctggaggattattcaaaagccctctcagcatatcaacgatactatagtctgcaggctgattactggaaaaacgctgcctttctgtacggactgggattagtctacttttactacaacgcatttcattgggccataaaagcatttcaggatgtgctgtacgtggatcccagtttttgcagagcgaaggaaattcatctgcggctcggtctgatgtttaaggtgaataccgactacaagtcaagccttaaacacttccaactggcactcattgactgcaacccatgcacactttcaaacgccgagagcaagtacttctag

SEQ ID NO: 246105 - DNA, 4179 bp, synthetic construct
  misc_feature 1..4179: note = Description of Artificial Sequence: Synthetic coding sequence
  source 1..4179: mol_type = other DNA
atgaagagctgcgcggtctcactgaccacagccgcagtagcttttggcgatgaggcaaagaagatggccgagggaaaagccagtagggagagtgaggaagagtcagtctctctaaccgtcgaagaacgagaggccctgggcggaatggactctagactctttggcttcgtgagactccatgaagacggcgcacgaactaaaaccctgctcgggaaggcggtcagatgctatgagagcctgattttaaaggccgagggtaaagtggagagtgatttcttttgccaattaggtcactttaatctgttactggaggactacagtaaggccctttccgcttatcagcgctattactctttacaagccgactattggaagaatgcagcattcttgtatggacttggccttgtgtacttttactacaacgctttccattgggccattaaagcctttcaagatgttctgtatgtggacccctccttttgtcgcgcaaaagagatccacctcagactcggcctgatgtttaaggtcaataccgattacaagtccagcttgaaacactttcaactagccctgatcgactgtaacccttgcaccctgtccaacgcggagatccagttccatatcgcccacctctatgagacccaacggaagtaccactctgcaaaggaagcgtacgagcagctgcttcagaccgagaacctaccagctcaggtgaaagcgacagtactccagcagctgggttggatgcaccacaatatggatctggtaggcgacaaggcaactaaagagagttatgcgatccagtatcttcagaaatcactggaggctgatcctaactccggtcagagctggtactttctgggaagatgctatagcagtatcgggaaggtgcaggatgcattcataagttatcgtcagtctatagacaagtccgaggctagcgcggacacctggtgcagcatcggggtgctctaccagcaacaaaatcagcccatggatgcattacaggcctacatctgcgccgttcagctagaccacgggcacgcagccgcatggatggatttgggcaccctgtacgagtcttgcaaccaaccccaggacgccattaagtgttatctgaacgcagccaggtccaagcgctgctcgaatacttctactcttgctgcacgcatcaaatttttacaggcacagctgtgtaaccttccacaatcctccctgcaaaacaaaacgaaacttttaccaagtatagaagaggcatggtccctgcccataccggctgagctcacatccagacagggtgctatgaatacagcacagcagaatgggtcagataactggaatggcggacagtccctttctcaccatcctgtccagcaggtatatagtctctgtcttactccacagaagttacagcacttggagcagctccgggctaatcgcgataatctgaacccagcccagaagcatcagttagaacagctcgagagccagtttgtgctaatgcagcagatgagacacaaagaagtggcccaagtgcggacaactggtatccacaatggtgctatcaccgactcctcactccccactaatagtgttagtaaccgccagccccacggtgcactcaccagggtatccagtgtgagtcagcccggagtaagacccgcatgcgtggaaaagctgctgtcatccggcgcattctccgcaggatgtatcccatgcgggacaagtaaaatactgggatccaccgacaccatacttttgggctcaaattgtattgccggatcagagtctaatggcaatgtgccctacctacagcaaaatacacacaccttgccacataatcacacagatcttaatagctccacagaggagccatggaggaaacagttgtcaaactcggcgcagggactacacaagagccagtcatcatgcctgtccggacctaacgaggaacagccattattttccaccgggagtgcccagtatcaccaggctacgtctaccggaattaagaaagccaacgaacatctgaccctgcctagcaacagcgtgccccaaggggacgcagacagccacctctcttgtcacactgccacttcaggcggtcagcagggaattatgttcacaaaggaaagcaaaccttccaaaaataggtcattagtgcccgaaacaagtcggcacacaggggacactagcaatggatgcgcagatgtgaagggcctcagcaatcacgtgcaccagttgatcgccgacgcagtgtcatccccaaatcacggagattctcccaatctcctgatagctgacaacccccagctgagcgctctgctgatcggcaaggccaatggaaacgtggggacagggacctgtgataaggtaaacaatatccatcccgctgtccacaccaaaaccgaccattctgtagcttcatccccatctagcgccatttctacagcgaccccttcccctaaatccaccgagcagaggtccattaactccgtgacctctctcaatagcccccacagtgggttacataccgtcaatggcgagggactgggaaagagccagtcgagcaccaaagtagacctgcccttagcctcacacaggtctacaagtcaaatccttccctctatgtccgttagcatctgcccttcttccactgaagttctcaaagcgtgtcgtaatccgggtaagaatggcctgagtaactcatgtattctattggacaaatgcccaccacctcgaccaccgactagcccatacccgccacttccaaaagacaagctcaatccccctacaccatcaatatacctggaaaataaacgcgacgcgtttttcccacctctgcaccagttctgcacaaacccaaagaacccagtgactgtgattcgcggattagcaggagctctgaagctggatttaggattgttcagtactaaaactcttgtcgaagctaacaatgagcacatggtggaggtgcggacgcagctgcttcagccggctgatgaaaattgggatcccactggcaccaagaaaatctggcgctgtgagagtaatagatcccatacgactatcgcaaagtacgcccaatatcaggcttcaagtttccaagagtcacttcgggaagaaaacgaaaaaagaacacagcataaagaccactcggataacgaaagtaccagcagcgagaacagtgggcgtaggagaaagggcccttttaaaaccattaagtttggcaccaacatcgacctgtccgacaataagaagtggaaactgcagctgcacgagctgacaaagctgcccgcttttgccagggtagtgtccgctggcaatctgttgacccacgttgggcataccattctgggcatgaacacggttcaactgtacatgaaagttcctggtagccgcacccccggacatcaggagaataacaacttttgcagcgtaaacatcaatattgggcctggcgactgcgaatggttcgtggtacctgaggactattggggggtcctgaatgatttttgtgaaaagaacaatttgaatttcttaatgtctagttggtggcccaacttggaagatctctacgaagccaatgtcccggtgtatcgatttatccaacgtccgggtgacctggtttggataaacgccggtactgttcactgggtgcaggcggttgggtggtgtaataatatcgcctggaatgtgggccctctgactgcctgtcagtacaaacttgctgtggagaggtacgagtggaataagctgaaaagcgtgaaaagtccagtcccaatggtgcacctgtcgtggaatatggcccgtaacatcaaggtctccgatcctaaacttttcgaaatgataaagtattgtctgcttaaaattctgaaacaataccagactctgagagaagcactcgtcgccgcaggcaaggaagtaatctggcatggtcgaactaacgacgaacctgcccactattgttccatttgcgaggtcgaagtcttcaacctcttgtttgttactaacgagagcaacacccagaaaacctacatcgtacattgccatgattgtgctcgcaagacaagcaagtcactagagaactttgtggtgctggagcagtacaaaatggaggaccttatccaggtatatgatcaattcactctggctctctccctgtccagttccagctag

SEQ ID NO: 246106 - DNA, 3636 bp, synthetic construct
  misc_feature 1..3636: note = Description of Artificial Sequence: Synthetic coding sequence
  source 1..3636: mol_type = other DNA
atgaagtcttgtgctgtgagcctgaccaccgctgctgtagccttcggagatgaagcgaaaaagatggccgaaggcaaggcgagcagggagtctgaggaagaaagcgtcagccttaccgttgaggaacgggaagctttggggggaatggatagcaggttgttcgggtttgttcgccttcacgaggacggagcgagaactaaaacgctgttggggaaggctgtgcgttgctacgaatccctgatcctcaaagcggaggggaaggtggaatcagacttcttttgtcaacttggacactttaatttgcttctcgaggattactccaaggctctgagtgcctaccagagatactacagcctgcaggccgattactggaaaaacgccgcattcctatacggtcttggactcgtgtacttttattacaatgcatttcactgggccataaaggctttccaagacgttttgtacgtagatccatctttctgccgcgctaaggagattcatctaaggctgggtctgatgtttaaggttaacacagattataaatcatctcttaagcactttcagcttgcgctgatcgattgcaacccctgcactctgagcaacgccgagatccagtttcacattgctcacttgtatgagacacagagaaagtaccatagcgccaaggaagcctatgaacagctgttgcagacagagaatctgccggcacaggtgaaggcaacagttctgcagcaactgggctggatgcatcacaatatggatctggtgggcgataaggccactaaggaatcgtacgcaatccaataccttcaaaaatctcttgaggccgatcctaacagcgggcagtcctggtatttcttgggacgatgctattcctccatcggcaaagtccaggacgcatttataagttatagacagtccatagacaaaagcgaggctagcgcagacacctggtgtagtatcggggttttataccagcaacaaaaccagcccatggacgctctccaggcctatatttgtgcagtgcagctggaccacggacacgccgctgcctggatggacttaggaaccctttacgagtcatgcaatcaacctcaggacgcaatcaagtgttacctcaacgcggcacgctctaagcgctgtagtaacactagcacgctggctgctagaatcaaatttctgcaggcgcaactatgtaacctgccacagagtagtttgcagaataaaaccaagctgctgccaagtatcgaggaagcgtggtcgttgccaatccccgctgagctcacctctagacagggtgcaatgaacaccgcccagcagaacgggtccgacaattggaatggtggccaaagcctatcccaccatcccgtgcagcaggtgtatagcctgtgcctgacaccgcaaaaactgcaacacctggaacagctccgggcaaatagggataatcttaatcctgcccagaagcaccaacttgaacagctcgaaagccagtttgtattgatgcagcaaatgcgtcacaaggaggtggctcagggactgcataaatctcagagttcatgcctctctggtcccaacgaggaacagccactgtttagcactggcagtgcacagtaccatcaggctacctccaccggaattaagaaagccaacgagcacctgacattgcccagtaacagcgtaccccagggcgacgccgactcccatctgtcatgtcatactgccacctcaggaggacagcaaggaattatgtttactaaggaaagcaaaccatccaagaatcgaagtctggtacctgaaacatctcgtcatactggcgatacttccaatggctgcgcggatgtgaagggtctttccaatcacgtgcaccaactgattgctgacgctgtttcctcacctaaccatggagactccccaaatcttctcatcgccgacaacccacaactgtccgctctcctgataggaaaggccaacgggaatgtcggcacgggcacatgcgacaaggtcaataatattcaccctgctgtacatacaaaaactgatcactcagttgcaagcagccctagctcagcaatctcaactgccaccccttctccaaagtctaccgagcagcggtctatcaactccgtgacatccttgaattccccccattccggtctgcacactgtgaacggcgagggtctgggtaagagccagagcagtaccaaggtcgacctgccactggccagtcacagatctaccagccagattctcccttcaatgagcgtgtcgatttgtcccagttcaacagaggttttgaaagcttgccggaaccccggaaagaatggtctaagcaatagttgtatcttgctcgataagtgtcctcccccacggccacccacttccccttatccacccctaccaaaagacaaactcaacccccctactccatctatttatctcgaaaataagagagacgcattcttcccacctctgcatcagttttgtaccaatcccaaaaaccctgttaccgtaattaggggcctggccggagcgctgaagttagacttgggactatttagcactaagaccctggtcgaggcgaataacgaacatatggtcgaggtgcgtacccagctgttacagcctgcagacgagaattgggaccccacagggacaaagaagatttggagatgtgaatccaaccgatcccacaccaccattgctaagtacgcccagtaccaagccagttcattccaagaatctctgagagaggagaacgaaaagcgaactcaacataaagatcactctgacaatgaatctactagctcagagaactctggcagacgacgcaaaggccctttcaaaaccattaagttcggcactaacatcgaccttagcgacaataaaaaatggaaactccagttgcatgagcttacgaagttgcctgctttcgcgagggtggtgtccgccggtaacctgctaactcatgtggggcatacgatcctgggcatgaataccgtccagctatacatgaaggtgcccggatcgaggactcctggccaccaggaaaataacaacttttgtagcgtcaacataaatattggccctggagattgtgaatggttcgtggttcccgaagattactggggcgtactgaatgatttttgtgaaaaaaataacctcaatttcctgatgtcatcgtggtggcctaacctagaggacctgtacgaggccaacgtaccagtctataggtttatccagaggcctggcgatctagtgtggatcaatgctggcacagtccactgggtccaggccgtggggtggtgcaacaacatcgcttggaatgtgggtccactcactgcatgccagtacaaactggccgtggagaggtacgagtggaacaaactgaaatccgtgaagtcaccagtgccaatggtgcatctctcctggaatatggctagaaatatcaaggtgtctgatcccaagctattcgaaatgatcaagtactgcctccttaagattctgaagcagtatcaaacactgagggaggcattggtagctgccggaaaggaggtcatctggcacggcaggacaaacgatgagcccgctcactattgtagcatttgtgaagctttgagtctgtcttcgtcttcctag

SEQ ID NO: 246107 - DNA, 3141 bp, synthetic construct
  misc_feature 1..3141: note = Description of Artificial Sequence: Synthetic coding sequence
  source 1..3141: mol_type = other DNA
atgaaaagctgtgccgtgtccctcacaactgccgctgtggcattcggcgacgaggccaagaagatggccgaggggaaggcaagtagggagtcagaggaagagagcgtcagtctcacggtggaggaacgggaagcactcggaggtatggacagtaggctgttcggctttgtgagactgcacgaggacggggcacggaccaaaaccctcttaggaaaggccgtgaggtgttacgaatctctcatcctcaaagcagagggaaaagtcgaatcggacttcttttgtcagttgggccattttaacttgctgctggaggactacagtaaggcactctccgcgtatcaacgatattacagccttcaggctgattattggaagaatgccgcattcctctatggactcgggctggtatatttttactacaatgcatttcactgggcaatcaaggctttccaggacgtgctctacgtggaccctagtttctgcagggccaaggagatccacctccggctgggtctgatgtttaaagtgaataccgactacaaaagtagcctcaagcacttccagctggccttgatagactgcaatccttgcaccctctccaacgccgagatccaattccacatcgcccacttatatgaaacacagcgtaaatatcactccgcgaaggaagcttacgagcagctgttgcaaacggagaacctccccgcacaagtgaaggccacagtactccagcaacttgggtggatgcaccataacatggacctggtgggcgataaagccacaaaggagtcgtacgcgatccagtatctccagaaaagcctggaagccgatcccaattctggacagtcttggtactttttaggctccgtgctgtatcagcaacagaatcagcccatggacgctttacaagcttatatttgtgccgtccaacttgaccatggtcacgcagcagcctggatggatctgggtactctgtatgagagttgtaatcagccccaggacgccattaagtgttatctgaatgcggctcgatccaagcggtgcagtaacacatccaccctggcagcaagaatcaagttcttgcaaaacggaagcgacaattggaatgggggtcagagcctgagccaccatcccgtgcagcaggtgtactcgctctgcctgaccccacagaaactccaacatctggagcagttacgagctaatagagacaaccttaaccccgctcagaagcaccagctagaacaattagagtcccaattcgtactcatgcagcagatgcggcacaaggaggtggcacaggttcgcactaccggaatccacaatggggctatcaccgattcttcattgccaacaaattctgtctctaaccggcagccacacggagccttaactcgcgtttcctcagtgagccagccaggtgtcagacccgcatgcgttgagaagctcctctcgtctggagcattttcagctggctgtatcccttgcggtacctcaaaaattctcggttcgaccgacaccatcctgctggggagcaattgtatcgctggatccgaaagcaatggaaatgtaccctatctgcagcagaacacacacaccctgccccacaatcacacagacttgaactcctcaaccgaggagccttggcgcaaacaattgagtaatagcgcccaggggctccataaatcccagagcagttgtctgagcggtcccaacgaggaacagccattgttctcaacgggctcagcccagtaccaccaggctacttcgacaggaatcaagaaggctaacgagcacttgacactaccttcaaacagcgtgccccagggagacgccgactcacacctgagttgccatactgccacctcaggcggacagcagggaatcatgtttacaaaagagtctaagcctagtaaaaatcgcagccttgttcctgaaacaagcaggcatacgggagacacaagtaatggatgcgctgatgtaaaggggctgtccaaccatgtccatcagctcattgcagacgctgtatcgtcacccaatcacggcgatagtccaaatctgcttattgctgataatccacagttatcagcccttctgatagggaaggctaatggaaacgtaggtacagggacctgtgataaggtcaataatattcaccctgccgttcacacaaaaacggaccacagtgtggcctctagcccatccagtgcaatttcaactgccacccccagccctaagtctaccgaacagcggagcatcaattctgtaacgtccctgaattctcctcacagtggcctccacacggtgaatggtgagggcctgggtaagtctcagagctctaccaaggttgatctaccactggccagccacagaagcactagccagattctaccatccatgagcgtatctatctgcccttcttcgacagaggtacttaaggcctgtcggaatcccggtaagaatggactgtccaactcctgtattcttctggataaatgcccccctcctagaccacccacttcaccttatcccccactgccaaaagacaaactgaacccacccaccccatcgatatacctcgaaaataaacgggatgctttctttcctccactccaccagttttgtacaaacccaaaaaaccccgtgacagtgatacggggacttgctggggctctcaagctcgatttaggcctgttctccaccaagacactggtggaggccaataacgaacacatggtggaggtgcgtacacaactgctgcaacctgctgacgaaaactgggaccccacaggaaccaaaaaaatttggcggtgcgagagtaataggagccataccaccattgccaaatatgcccaataccaggcatccagtttccaggagagtctgagggcaggcatgcagtggtgcgatttgtcatctttacaaccccctccacctgggttcaaacggttctcccatctaagccttcccaatagctggaattaccgccacctcccatcttgtccaactaatttctgtatctttgtagaaacaggattccaccacgttggccaagcgtgtctagaactgctgacgtccggaggactgctggcttcagcatcgcagtctgctggcatcactggagtctctcaccacgcacgctag

SEQ ID NO: 246108 - DNA, 3018 bp, synthetic construct
  misc_feature 1..3018: note = Description of Artificial Sequence: Synthetic coding sequence
  source 1..3018: mol_type = other DNA
atgaagtcctgcgctgtatctctcaccacagcagccgtggccttcggcgatgaggccaagaaaatggccgagggcaaggcaagtagggagagtgaagaggagtcagtctctctgactgtagaggaacgggaggcactaggtggcatggactccagattgttcggcttcgtccgcctgcacgaagacggggctcggaccaagaccttgctgggaaaagccgtacgctgctatgagagcttaatactgaaagcggaggggaaagttgaatcagactttttctgccagctaggtcacttcaacctgctgttagaggactactccaaagctttgtccgcataccagagatattactcccttcaagccgactactggaagaatgctgcttttctctatggcctgggcctggtatatttttattataacgccttccactgggcaatcaaggcattccaggatgtgctgtacgtagatccatcgttctgccgcgcaaaagagatacacctgcgtctgggactaatgtttaaagtgaatactgactacaaaagctctctcaagcacttccagctggccctaatcgactgcaatccttgcacactgtccaacgccgagatccaattccacatagctcacctctacgagacgcagcgcaagtaccattccgccaaagaggcttacgaacagctgctacagactgaaaacctgccagcccaggtcaaagctaccgtcctgcaacagctgggctggatgcaccataatatggatctggtgggcgacaaggccaccaaggagtcttatgctatacagtacttgcagaaaagcctcgaagctgatcccaactcaggtcagtcatggtacttcttgggctccgtgctgtaccaacagcaaaaccaacctatggatgcactgcaggcttacatttgcgccgtccagcttgatcacggacacgccgcagcgtggatggatctcgggacactgtacgagagctgtaaccagccccaagatgctattaaatgctacttgaacgcagctcgatcaaagcgttgttctaatacaagcactctggcggcaagaataaaattcctccagcaatccctgagtctgcacatgatcacaagctcgcaggtggagggcctctcatccccagcaaagaagaagcgtacttcgagccctacaaaaaacggaagtgataactggaatggcggacagagcctgagtcatcatccagtgcagcaggtttatagtctctgcctgactccacagaagttgcaacatctggaacagctccgggcaaatagagacaacctcaacccagctcagaagcaccaacttgaacagcttgagtctcaatttgttcttatgcaacaaatgaggcacaaggaagttgcccaggtgcggactacaggcatccataacggagcaatcactgattcctcattacccactaacagtgtgtctaatcggcagccccacggggcactgacccgcgtttcatccgtgagccagcccggagtgagacccgcttgcgtggagaaactgctgagctccggcgctttcagcgctggctgcattccctgcgggaccagcaagatcctgggatcaaccgacaccatcctattaggctctaactgtatcgctggtagcgaaagtaacggcaatgtcccctacctgcagcagaacacccataccctccctcataaccacaccgacttaaatagttcaacagaggagccttggcggaaacagctgagcaactctgctcagggattgcacaaatcacaaagtagttgcctgtccgggccaaacgaggagcagccgctgttctctactggcagcgctcagtatcatcaggcaacatcaaccgggattaagaaggccaatgagcacctgaccttgccgtccaatagtgtccctcagggggacgcggactcacatctgtcttgtcacactgcaacgagtgggggtcagcaaggcatcatgtttaccaaagaaagtaaaccctccaagaaccgatcattagtgccggagacctctcggcatactggcgataccagcaacgggtgtgccgatgttaaaggcctgtcaaaccacgtgcaccagctgattgcagacgccgtatcttcccctaaccatggagactcacctaacttgttaattgctgataatcctcagctctctgccctacttattggaaaagccaatggcaacgtcggcacgggcacctgcgataaagtaaacaatatacaccccgcagtccacactaaaaccgaccactccgtggcttcgagccccagcagtgctatatccacggcaacaccttcaccaaagtccacagagcagagatctattaactcagtgactagccttaacagcccgcacagtggccttcacacagttaacggtgagggtctaggtaaaagccagagctccacaaaggtggacctaccgctggctagtcaccggagtaccagccaaatactcccctcgatgtctgtatctatctgtccatctagcactgaagttttgaaagcctgtcgtaaccccggaaagaatggactatcaaactcttgtatcctgctcgataaatgcccgccacctagaccgcctactagtccttaccccccacttcccaaagataagctcaatccccctaccccaagcatctacctggagaacaagcgggacgcatttttcccccctctgcatcagttctgcacgaaccctaagaatcccgtgacagtcatccgagggctggctggcgctctcaagctggacctgggcttattctccacaaaaactttggtcgaagcgaacaatgagcacatggtagaagtgcgtacacagctgttgcaaccggcagatgaaaattgggaccccaccggcactaaaaagatctggagatgtgagagtaatcgttctcacaccactattgctaagtacgcccagtaccaggcatcaagcttccaggaatcgctccgatccctgattctgagtcatccaggatggaatgccatggtgtag

SEQ ID NO: 246109 - DNA, 3213 bp, synthetic construct
  misc_feature 1..3213: note = Description of Artificial Sequence: Synthetic coding sequence
  source 1..3213: mol_type = other DNA
atgaaatcctgcgccgttagccttacaacggccgctgtcgcttttggggatgaagccaaaaagatggcggaaggcaaagcatctagggaatccgaggaagaatctgtgtccttaacagtggaagaaagggaggctctggggggaatggactctcggctcttcggctttgtgcgcctgcatgaagacggggctcgaaccaagactcttctgggaaaggccgtgcgttgttacgagagcctcatactgaaggctgaggggaaggtagagtctgacttcttctgtcagctgggacacttcaatctgcttctcgaggattattcgaaggctctctccgcttatcagcgctactacagtcttcaagctgactattggaagaacgccgctttcttgtatggactcgggttggtgtacttctattacaacgcttttcattgggcaattaaggcctttcaggacgtcctgtacgtagaccctagtttttgtagggccaaggaaatccacctgcggcttggcttaatgttcaaggtgaatacagattataaaagttctttgaagcattttcagcttgccttaatcgactgtaatccttgcactctgtcaaatgctgaaattcaatttcatatagcacatctttatgaaacgcagcgaaaataccattctgcaaaggaggcctacgagcaactattgcaaactgagaatctgcccgctcaggtgaaggcaacagtgctccaacaactgggctggatgcaccacaacatggacttagttggagataaagccacaaaggaaagttatgctatccaatatctgcagaaatctcttgaggctgaccctaatagcgggcaatcttggtactttctgggcaggtgttattcaagcatagggaaggtgcaggatgccttcatttcatatcgccagagcattgacaaatctgaggcttctgcagacacttggtgctcaatcggagtcctatatcaacagcaaaaccaaccaatggacgccttacaggcttacatctgcgcggtccagctggatcatggacacgctgccgcatggatggacctaggtaccctgtacgaatcatgtaatcaacctcaagacgctatcaagtgttacctcaacgccgcacggtcaaagcgttgcagtaacacctccaccctggcggcaaggattaagttcctgcaggcacagttgtgcaacctgccgcagagttctctgcagaacaaaaccaagttactgccatctattgaggaagcttggagcctgcccatccccgcagagttgactagtaggcaaggggcaatgaacacagctcaacagcaaagcctatcactgcatatgatcacctcatctcaggtggagggattatcttccccggcaaaaaaaaagcggacctccagtccaactaagaacgggagtgacaattggaacggtgggcagagcctcagtcatcaccccgttcaacaagtgtattcactgtgcctgacccctcagaaacttcagcacctggagcagttgcgcgcaaaccgtgataacctaaaccccgctcagaaacaccagctggagcagctggaaagtcaattcgtcctaatgcagcagatgcgtcataaagaggtagctcaggtccggaccacgggtattcacaatggtgcaattacggatagttccttgcctaccaacagtgtgtcaaacaggcagcctcacggcgctctgacccgggtcagttccgtatcccagccaggtgtgcgacctgcatgcgtggaaaaacttctttcaagtggggcattctctgcaggatgcatcccatgcgggacgagcaagatcctggggtctaccgatactatcctactggggtctaactgcatagctgggagcgagagcaatgggaatgttccctacttgcagcagaacacccacaccctgccacacaatcataccgaccttaatagtagtacagaagagccgtggaggaagcagctctctaattccgcccagggattgcacaaatcacagagcagctgtctgagtgggcctaacgaggagcagccactgttctcaacggggtcagcacagtaccaccaggccaccagcactggcattaaaaaagccaatgagcaccttacactcccatctaactctgtcccccagggagatgcagacagccacctcagctgtcatacagcgacttctggtggacagcaggggatcatgttcactaaagagagcaagcctagcaagaatcgctcattagttcctgagacttcaagacataccggcgacacctccaacggatgcgctgacgtcaaggggctgtccaaccatgtccaccagttgattgctgacgcggtttcaagcccaaatcacggagattcacctaacctgctaattgcagacaacccccagttatctgctcttctcatcggaaaagccaacggcaacgtgggaacaggtacctgcgataaggtgaataacatacatccagctgtccataccaagactgaccacagtgtggcttcaagcccaagctccgcaattagtactgccaccccctctccgaagagtacagagcaacgatccatcaactcagtgacaagtctgaacagcccccattctgggcttcatacagtcaacggagaaggcctgggtaagagccagagcagtactaaggtggacttacccctggcatcacaccgaagcacttcgcaaatactgccatccatgagtgtgtccatttgtccctccagtaccgaagtactgaaggcttgccggaacccaggtaaaaacggcttaagtaattcctgcatactcctcgacaagtgtccgccacccaggccacctacgtccccctacccacctctgccaaaggacaaactcaatccgccaacccctagtatttacctggaaaacaagcgcgacgccttcttccctccccttcaccagttttgcacaaatcccaagaatccagttactgtgatcagagggctggccggagccttaaaactggacctgggactcttttccaccaaaaccctggtggaggctaacaacgaacatatggtggaagtgagaacccagttgctgcaacccgctgatgagaactgggatcccacggggaccaagaaaatctggcggtgtgagagcaatcggtcccataccaccattgccaaatatgcccagtatcaggcatcttcattccaggagtctctgcgatag

SEQ ID NO: 246110 - DNA, 798 bp, synthetic construct
  misc_feature 1..798: note = Description of Artificial Sequence: Synthetic coding sequence
  source 1..798: mol_type = other DNA
atgcccaatatggtattcatcgggggtataaactgtaaaaagcgtaaggatctctcccaggaattcgaggcatacattaacgcttctggcgaacatggtatcgtggttttctccctaggaagtatggttagtgaaatccctgagaaaaaggctatggccatagctgatgctctgggcaagatcccccagactgtgctgtggcgatatacaggcacccggccaagcaatctggcaaacaacaccatactcgttaagtggctgccacagaatgacctcctgggacacccaatgacaagagccttcatcacacacgcgggaagccatggggtctatgagagtatctgcaatggcgtgccgatggtgatgatgccgcttttcggcgaccaaatggacaacgctaagaggatggaaactaagggcgcaggtgtgacactcaacgtgttggagatgacaagtgaagacctcgaaaacgctctcaaagccgtaattaatgacaagtcatataaggagaacattatgcgactcagcagcctgcacaaggatcggccagtcgagcctctggatttggccgtattttgggtggagtttgtcatgagacacaagggcgcacctcacctgaggcccgctgcccacgatctgacttggtaccagtaccactctcttgatgttatcgggtttttgttggccgtcgttctgacggtggcttttatcacgttcaaatgttgtgcttacggatatagaaaatgtctgggaaagaaaggccgtgtcaagaaagcacataagtccaaaacgcactag

SEQ ID NO: 246111 - DNA, 1605 bp, synthetic construct
  misc_feature 1..1605: note = Description of Artificial Sequence: Synthetic coding sequence
  source 1..1605: mol_type = other DNA
atggccaccgggctacaggtccccctaccccagctggcaaccggtctcctgcttctgctgtctgttcagccctgggcagagtcaggaaaggtgttagtggtacccacagacggatcacactggttaagcatgcgggaagccctgcgcgacttgcacgcacgagggcatcaggtagtggtactcaccctggaagtcaacatgtacatcaaagaggagaatttcttcactcttaccacatacgccatctcctggacccaggatgaatttgaccgactgttgcttgggcatacacaaagtttctttgagaccgaacatttactcatgaaattttctcgcaggatggccattatgaacaatatgtctttgataatacatcgttcatgcgtggagctgctgcataatgaagccctcattaggcatctacacgcaacctcgtttgacgtcgttctcacggaccccttccatctctgcgccgcagtcctggcaaagtatctcagcataccagcggttttttttcttaggaacattccatgcgacctggacttcaaaggcactcaatgtccaaacccttcatcctacatcccacggctgctgaccaccaattctgatcatatgaccttcctgcaacgcgtcaagaatatgctgtatcccctagccctatcctacctctgtcatgcagttagcgccccttacgcctccctcgccagcgaactgtttcagcgggaggtttctgtcgtggatttagtcagccatgcttccgtgtggctcttccgcggtgacttcgtgatggactatccaaggcccatcatgccaaacatggtgtttataggcggtataaactgcgccaacgggaaaccactatctcaggaattcgaggcatatataaatgcctccggggagcatggtatagttgttttcagtctaggatctatggtgtcagagattccggagaagaaagcaatggccatcgccgacgccctaggtaagattccccagaccgttttgtggagatacacaggcaccaggccttctaatctggctaataatactatcctggtgaaatggctcccacagaatgaccttcttggtcaccccatgactagggcctttataactcacgcaggatcacacggtgtttacgagagcatctgcaacggggtaccaatggtgatgatgcctctgttcggggaccagatggacaatgcaaagcggatggaaaccaagggggcaggagtgacactgaatgtgttagagatgacatcagaagatttggagaacgctctgaaagccgttataaacgacaaatcatataaggagaacattatgaggttatctagtctccataaggaccgtcccgtcgagccactggacctggcggtattctgggtcgagtttgtgatgcgccataaaggggctccacacctgcgacctgctgcccacgatctcacttggtatcagtatcactctttggacgtgattggctttctgcttgccgttgtactcactgttgcctttattaccttcaagtgttgtgcctatggctaccgcaagtgtctgggaaagaaagggagggtgaaaaaggcacacaaatccaagacccattag

SEQ ID NO: 246112 - DNA, 1599 bp, synthetic construct
  misc_feature 1..1599: note = Description of Artificial Sequence: Synthetic coding sequence
  source 1..1599: mol_type = other DNA
atggcttgtctgcttcgtagcttccagcggatttctgccggagtgttcttcctggcactctggggcatggttgtcggcgataaacttctcgtggttccccaggatggttcccattggctgagcatgaaggatatagtagaggttctgagcgataggggacatgagattgtggtggtggttcctgaagtgaatctacttctaaaagagtccaagtactatactcgcaaaatttaccctgtgccttatgatcaggaagaactgaagaaccgctaccagagttttggaaacaatcattttgctgaaaggagctttctcacagctcctcagacggaataccgcaacaacatgatagtgatcggtctgtacttcatcaattgtcagtcattactgcaggatcgggacacactgaacttcttcaaagagagcaaatttgacgctctcttcacggatcccgctttgccatgcggggtgattctggcagaatatcttgggctcccatcagtatacttattccgaggttttccttgctcgctcgagcacacattctcccggagcccagaccccgtgagttatatacctcgatgctataccaagtttagcgaccacatgactttcagccagagggtggctaactttcttgtcaatctgctcgagccgtacctgttctactgcctgtttagtaagtacgaggagctagcttccgcagtccttaaacgggatgtcgatataatcaccctctaccagaaggtcagcgtgtggctgttgcggtacgacttcgttttggaataccctcgccctgttatgccgaatatggtgtttattggcggaataaattgcaaaaagcggaaggatctctcacaggaattcgaggcgtacatcaacgcctcaggggaacatggaatcgtcgtcttctctctaggctctatggtctcagagatcccggagaaaaaggcaatggcgatagctgatgccctcggcaagattcctcagactgtgttgtggcgttacaccggtacacgcccttctaatcttgcgaacaacaccatcctcgtaaagtggctgccccagaatgatttgcttggccatccgatgacccgcgctttcatcacacatgccggatcccacggcgtgtatgagtccatatgtaacggcgtcccgatggttatgatgcctcttttcggcgaccagatggacaatgccaaacgcatggagacgaaaggcgcaggggtcacgcttaacgtgctggaaatgacgagcgaggaccttgaaaatgcccttaaggcagttattaatgataaatcctacaaggagaatatcatgagactatcaagcttgcacaaagaccgcccagtggagccactggatctggccgtattttgggtcgaattcgtgatgcggcataagggcgcaccccacttacgacctgcagcgcacgatctgacttggtaccagtaccactctttagacgttatcgggttcctgctggccgtggtcttgactgtggcgtttataaccttcaaatgttgtgcctacggctatcgaaaatgcctggggaagaagggcagagtgaagaaagctcacaaaagtaagacccattag

SEQ ID NO: 246113 - DNA, 570 bp, synthetic construct
  misc_feature 1..570: note = Description of Artificial Sequence: Synthetic coding sequence
  source 1..570: mol_type = other DNA
atggcttgcttgcttcgctcattccagcggatctccgctggcgtattttttctagccttgtggggcatggtagtaggggataaattactggttgtcccacaggatggatctcactggctgtccatgaaggacatcgtggaggtgctatccgataggggacacgaaattgttgtcgtggtgccggaagttaatttgctgctcaaggagagtaaatactacaccagaaagatctaccccgtaccgtacgaccaagaagaattgaaaaatcgttatcagtccttcgggaacaaccactttgcggagcgctcattcctgacagctcctcagaccgagtatcgcaacaatatgattgtcatcggcctgtatttcattaactgtcagagcctgttgcaagatcgcgacactcttaatttttttaaagaatctaaattcgacgccctgtttaccgacccggcactgccctgcggagtgatcttagccgagtacctagggcttccgtcggtgtacctcttcagaggattcccatgtagcctcgaacataccttcagcaggagccccgatcccgtgtag

SEQ ID NO: 246114 - DNA, 1593 bp, synthetic construct
  misc_feature 1..1593: note = Description of Artificial Sequence: Synthetic coding sequence
  source 1..1593: mol_type = other DNA
atggcccgagccggttggaccgggttgcttcccctgtacgtttgtctgctgttaacttgtgggttcgcaaaagccggtaaactgctggtagtgccgatggacggttcacactggttcactatgcaaagcgtggtcgagaagctcatcctccggggtcacgaggtcgttgtcgtgatgccagaggtctcttggcagcttggaaggtctttgaactgtacggtgaaaacctactctacaagctacaccttggaggatcaggatcgtgaatttatggtattcgctgacgcgcgttggactgctccgctccggagtgccttttcgctcctcaccagctcttcaaatggcatttttgatctgttctttagcaattgtcggtctttatttaacgacaggaaactggtcgaatacttgaaagagtcctgctttgacgcagtgttcctggatccctttgacgcttgcggtctaatcgttgccaaatacttcagtctcccttctgtggtgtttgctcggggaatcttttgtcactatctggaagagggagcccagtgtccagcccctctgagctatgtgccccgacttctactaggattttctgatgccatgacctttaaggaaagggtttggaaccatattatgcatctggaggaacacctgttctgtccctatttctttaaaaacgtcctggaaatcgccagcgaaatcctgcagacccctgtgactgcctatgatctctactcccacacctccatttggttgctgaggaccgactttgtactcgagtaccctaaacccgtcatgcctaatatgatattcattggcggtattaactgccaccagggaaagcccgtgcccatggaatttgaagcgtacataaacgcctcaggcgagcatggcatagttgtgttctccctcgggtccatggtttccgaaatacctgaaaagaaagcaatggcaatcgccgatgccctggggaagattccccagacggtgttatggcgatataccggaactagaccctccaacctcgccaacaataccatacttgtcaagtggctgccccagaatgacctcttaggccacccgatgacacgagccttcatcactcacgccggttctcatggggtgtacgaatctatatgcaatggagtgccgatggttatgatgccgctgtttggggatcaaatggacaatgcgaagcggatggagactaagggagcaggcgtgacgctgaatgtattagagatgacttccgaagatctcgagaacgccctgaaggcagtgatcaatgataaatcatacaaggaaaatattatgagattgtccagcctgcacaaagatcgtcctgtagaacctctcgacctcgccgttttttgggtggagtttgtgatgcgccataagggcgctcctcacctgagaccagcggcacacgatctaacctggtaccaatatcattcactggatgtcataggtttcctgctggccgtggtgctcactgtagccttcattacctttaagtgctgtgcttatgggtacagaaagtgtcttggtaaaaagggaagagtgaaaaaggctcacaagtccaaaacccattag

SEQ ID NO: 246115 - DNA, 1593 bp, synthetic construct
  misc_feature 1..1593: note = Description of Artificial Sequence: Synthetic coding sequence
  source 1..1593: mol_type = other DNA
atggcccgaactggctggacttcccccattcctctttgtgtgagcctgttgctaacatgtgggtttgctgaagcagggaagctcctggtggttcctatggatggtagtcactggttcactatgcagtctgtagttgagaaactcattctgcggggacacgaggttgtggtggttatgccggaagtgtcgtggcaactggggaagtcacttaactgcactgtgaaaacatattctacctcctataccctggaagacctggaccgcgagtttatggatttcgccgatgcccagtggaaggcccaggtaagaagcttattttctctcttccttagttcatcaaacgggttcttcaatctttttttctctcactgccgaagcctgttcaatgatagaaagttggtagagtacctaaaggaatcaagctttgacgctgtgtttctggacccattcgatgcttgcggtctcatcgtggcaaagtacttcagcctcccatcagtggttttcgccagagggatcgcctgccactatcttgaggagggcgcacagtgccccgcaccactgagctatgtaccgaggatcctgcttggattttccgacgctatgacgttcaaagaaagggtgaggaaccacattatgcatctggaggagcatctattttgccagtacttttccaaaaacgctttggaaattgccagcgaaattttgcagactccggtgacggcctatgatctgtacagtcatacgtccatttggctgttaaggactgacttcgtcttggactaccctaagcccgtcatgccaaacatgatttttataggcggaattaattgccaccaaggcaagccgctgcccatggagtttgaagcctatatcaacgcgtccggcgagcatggcatagttgtcttcagccttgggtccatggtcagtgagatcccagagaaaaaagccatggccatcgcggatgctctaggtaaaattccgcagacagtattgtggcggtatactgggactaggccgtctaatctggctaacaataccatactggtgaaatggcttccgcagaatgaccttttgggccacccaatgacaagagcctttattacacacgcaggaagtcacggggtctacgagtcaatttgtaatggggtccctatggtgatgatgccactgttcggggatcaaatggataacgccaaaagaatggaaacaaaaggcgcaggcgttacattgaacgtcttggagatgacctcggaagacttggagaacgccttaaaggccgtgataaacgacaaatcctataaagaaaacattatgagactgagcagcctccacaaagaccgccctgttgagcccctggacctggcagtgttctgggtggaattcgtcatgagacacaaaggagctccgcacctgcgcccagcggcacatgatctgacgtggtaccagtatcattcactagacgtaatcggatttctgcttgccgtggtcttgacagtcgcatttatcacattcaaatgttgcgcttatggctaccggaaatgcctgggtaaaaaggggagggtgaaaaaagcgcacaagtccaaaacccactag

SEQ ID NO: 246116 - DNA, 1593 bp, synthetic construct
  misc_feature 1..1593: note = Description of Artificial Sequence: Synthetic coding sequence
  source 1..1593: mol_type = other DNA
atggcgtgcacaggctggactagccccttaccactttgtgtctgcttgcttcttacatgcggttttgcagaggccggtaagttacttgttgtgccaatggatggctctcattggtttacaatgcgtagtgtagtggagaagcttatcctgagagggcatgaggtcgtggtggttatgcctgaggtatcttggcaattagggagaagcttgaactgcaccgtaaagacctactccactagctacacgctggaagatctggatagggaatttaaagccttcgctcacgcccagtggaaagcacaggttaggagtatctacagccttttgatgggcagttacaatgatatcttcgacctcttcttttccaactgccgatccctctttaaggataaaaaactggttgagtacctcaaggaatcctcatttgatgcagtcttcttagacccatttgataactgcggtctgattgtggccaaatacttcagcctgcctagtgtggtctttgcacgcggaatcctgtgccactacctcgaggaaggcgctcagtgccctgctcccctctcgtacgtgcctcggatcttgctgggatttagcgacgccatgaccttcaaggagagagtgcgcaaccatatcatgcatctggaggaacacctcctgtgccacagatttttcaagaatgctttagaaattgcgtccgaaatcttacagacccccgttacagagtatgatctgtacagccatacctctatctggctgttgaggacggactttgttcttgattaccccaaaccagtgatgcccaacatgatctttatagggggaatcaattgtcaccagggaaaacccttgcctatggagttcgaagcctacataaatgctagcggcgagcacggcattgttgtcttctcccttggatctatggtaagtgaaatacctgaaaagaaggccatggctatagcggacgcattgggcaagatccctcagactgtgctgtggagatacactgggacccgcccatcaaatttggccaacaataccatcctagtgaagtggcttccccagaatgacttacttgggcatcctatgacacgcgcatttatcacgcatgcgggatcccacggcgtgtatgaatccatctgtaatggggtgcctatggtaatgatgccattattcggggaccagatggacaacgcaaaaaggatggaaacaaagggcgcaggtgtgacacttaatgtgctggagatgactagcgaggatctggagaacgccctgaaagcagtgatcaatgataagtcctataaagaaaatatcatgcggctaagttccctgcataaggatcgcccagtggagcctcttgatctcgcggtgttctgggtcgaatttgttatgcgtcacaagggggcaccgcacctgcgcccagccgctcacgaccttacatggtaccagtaccatagcctggatgtaataggattcctgctggctgttgttttgacagtcgcctttatcacatttaagtgctgcgcttacggatacagaaaatgtctcggtaaaaaaggaagggtgaagaaagcacacaaatctaaaacacactag

SEQ ID NO: 246117 - DNA, 1584 bp, synthetic construct
  misc_feature 1..1584: note = Description of Artificial Sequence: Synthetic coding sequence
  source 1..1584: mol_type = other DNA
atgctcaataatctgctcctattctctcttcagattagcttgataggaactacgctgggtggtaatgtgctgatttggccaatggaagggagccactggttgaacgttaagattattattgatgagctcattaagaaggagcataacgtcacggtgctggtggcaagcggggctttgttcataacccctacaagcaacccaagccttacgttcgaaatttaccgggttccattcggaaaggagcggatagagggcgtgataaaagatttcgtgctcacgtggctcgaaaataggcccagtccttcgaccatatggagattctatcaagaaatggccaaggttatcaaagactttcacatggtgagtcaagagatctgcgacggcgtcctgaagaatcagcagctcatggcaaaacttaagaaatccaaattcgaagtgctggtaagcgatcctgttttcccttgtggggatattgtggccctgaaactcggcattccgttcatgtactctctccgcttcagccccgcttctacagtggaaaagcactgtggtaaagtgccatacccaccctcatacgtgccagccgtgctcagcgaattaacagaccagatgtctttcactgaccggattaggaacttcataagctatcacttgcaggattatatgtttgaaaccttgtggaaatcctgggacagctattacagtaaggctctgggcggtctactgctgtgttgcccaggatggagcgccgttgccgatctgggatcactccagcctctgttgcccggattcaagcggttctctagactgtctttacactgcagttgggattatagactcccggctgggagacctactactctttgtgagaccatgggcaaggctgagatctggctcataaggacgtattgggatttcgagttcccacgcccatatctgccgaacttcgaatttgtggggggactgcattgtaaacctgcaaaacccctgcccaaagtgttatggcgatataaaggaaaaaagccagctacattgggcaacaatacacagttatttgactggataccccaaaatgacctgctggggcacccgaaaactaaagcttttatcacccatggaggcactaatggaatttatgaagcaatatatcatggggtgccgatggttggcgttccgatgtttgcggaccagcctgacaacatcgctcacatgaaggctaaaggcgcagctgtcgaggttaacctgaatacaatgacatctgtcgatttactcagcgccctaagaaccgtgattaacgaaccatcatataaagaaaacgcaatgcgactgtcacgcatccatcatgatcagcctgtaaagcccctggaccgggcagtcttctggatagagtttgtgatgagacacaaaggagcaaaacacctgcgcgttgccgctcacgatcttacgtggtttcagtaccactccctggacgtgattggtttcctgttggtgtgtgtgacaacggcaatttttctggtgatccaatgttgcctattcagttgtcaaaagttcggcaaaatcggaaaaaaaaaaaaaagagaatag

SEQ ID NO: 246118 - DNA, 2082 bp, synthetic construct
  misc_feature 1..2082: note = Description of Artificial Sequence: Synthetic coding sequence
  source 1..2082: mol_type = other DNA
atgcttaataatttactactgtttagccttcaaatcagtcttatagggactacactggggggtaatgtcttgatatggccaatggagggctcacactggttgaacgtgaaaattattattgatgaattgattaaaaaggaacacaacgttaccgtgttggttgctagcggcgcattgttcattacgcctacctctaacccctctctcaccttcgaaatttaccgtgtcccattcggaaaggaacgcattgagggtgttataaaggatttcgtactcacctggttggagaaccggccatcccctagtaccatttggcggttttatcaggagatggccaaagtaattaaggactttcacatggtgagtcaggagatctgcgacggagtattgaagaatcaacagctgatggcgaagctcaaaaaatccaaatttgaagttctcgttagcgatcccgtgtttccctgcggcgatattgtcgcccttaagctgggaatcccctttatgtactcacttagatttagtccagctagtaccgtagagaagcactgtggcaaggtgccgtacccaccaagctacgtaccagcagtcctaagtgagctcaccgatcagatgtcattcactgatcggattcgcaattttatctcctaccaccttcaggactacatgttcgagaccctgtggaaatcatgggacagttactactccaaggcacttgatggctcccactggctgaacataaaaatcattctggaagaactgattcaacgcaaccataacgttacagtgttagcttcaagtgccactcttttcatcaacagcaaccctgacagtcccgtaaacttcgaggtgatcccagtgtcttacaagaagagcaacattgactcccttatcgaacacatgattatgctttggatagatcatcgccctacaccactgaccatctgggcgttttacaaggagctggggaaactgctggacacattctttcagattaatatccagctctgtgacggcgttctcaagaaccccaaacttatggctagactccagaagggaggttttgatgtcctggtggctgacccagttactatttgtggcgacctggttgctctcaaactcgggattccgtttatgtacactcttaggttctcacccgcatctacagtggaaaggcattgcggaaagatccccgctcctgtgtcctatgtccccgcagccctgtcagagctcacagatcagatgacttttggtgagcggattaaaaacaccatatcctactccctgcaggattatattttccagtcctattggggcgagtggaattcttattattccaaaatccttggaagaccgaccaccctctgtgaaaccatgggcaaggctgaaatttggctgatcagaacatattgggattttgaattcccacgaccttatctgccaaattttgaattcgtgggtggcctccactgtaaacctgcaaagccccttcccaaagtcctctggcggtacaaggggaaaaaacctgcaacgctggggaacaatactcagctcttcgactggatcccacaaaacgacctgttgggacatcccaaaacaaaagcctttatcacacatggtgggaccaacggcatttatgaagccatctaccacggagttccaatggtgggtgtgcccatgtttgccgaccagcctgataatatcgcgcatatgaaagctaagggtgcagccgttgaggtcaacctaaataccatgacctcagtggacctgctctctgctctcagaactgtgattaacgagccatcctacaaggagaacgcaatgagactcagccggattcaccatgatcagcccgtgaaaccactggatagggctgtcttctggatcgagtttgttatgcggcataaaggcgcaaaacatctgcgagtcgccgcacacgacctgacgtggttccagtatcacagtctcgacgtgattggattcctcctggtgtgtgtgactaccgctatcttcctcgtgattcagtgctgcctgttctcgtgccagaaattcggcaagattggaaagaagaagaagagagagtag

SEQ ID NO: 246119 - DNA, 1611 bp, synthetic construct
  misc_feature 1..1611: note = Description of Artificial Sequence: Synthetic coding sequence
  source 1..1611: mol_type = other DNA
atggtgtctattcgagattttactatgcctaagaagttcgtgcagatgctggtattcaatctcacccttaccgaagtggttttaagtgggaacgtgctgatttggcctacagatggctctcactggttgaacatcaagatcatccttgaggaactgatccaacgaaaccacaacgtcacagtcctggctagttctgctacactgttcattaactctaatccagattccccagtcaacttcgaggttatccccgtgtcctataagaagtctaatatcgacagcctgattgaacacatgatcatgctctggatcgaccatagacccactccacttacaatatgggccttctacaaggagctgggcaagttgctggatactttcttccagattaacattcaactatgtgacggcgtgctgaagaatccaaaattgatggctcggttacagaagggagggttcgacgtattagtggcggaccccgtgacaatatgtggggatctcgtggccctcaaactgggaatacccttcatgtatacactgcggttcagtccggcatctactgttgagaggcactgtggcaaaatccctgctccagtgagctacgtgcctgctgccttgtctgagttaaccgaccaaatgaccttcggcgaaagaatcaaaaatacgatctcatattccctgcaggactacatcttccagtcctactggggggagtggaacagctattactccaaaatcctcggcagacccactacgctttgcgagaccatgggcaaggcggagatctggcttatcaggacatactgggacttcgaatttcctcgaccgtatctgccaaatttcgagtttgtcggcggactgcactgcaagccggcaaagcccttaccaaaggagatggaggagtttatccagagctcggggaagaatggcgtggtggtgttctctctgggctctatggtaaagaatctgaccgaagagaaggccaacttgatcgcgagcgccttagcacagattccccaaaaagtgttgtggagatataaaggcaaaaaaccagcaactctgggcaataatactcagctctttgactggatcccacagaacgatctgctgggccaccccaaaactaaggctttcattacccatggcggaacaaacgggatatacgaggccatctaccacggcgtacctatggtaggggtgcctatgtttgcagaccagcctgataatattgcgcacatgaaggctaaaggggctgctgtagaggtgaacctgaacacgatgacttcggtcgacctgttgagcgccctgcgtaccgttataaacgagccctcgtacaaggagaacgcgatgcgcttgtctaggatccatcatgatcagcccgtgaaaccgcttgacagagctgtgttctggattgaatttgtcatgcggcacaaaggggcaaaacatctgcgcgtggcagctcacgacctgacatggttccagtaccattccctggacgtaataggctttcttctggtgtgtgtgacaaccgccatctttttagtcatccagtgctgtctgttcagctgtcaaaagttcggaaaaattggtaaaaagaagaagcgcgaatag

SEQ ID NO: 246120 - DNA, 1584 bp, synthetic construct
  misc_feature 1..1584: note = Description of Artificial Sequence: Synthetic coding sequence
  source 1..1584: mol_type = other DNA
atgctcaacaaccttctgttgtttagcctccagatctctctcattggaaccaccctggggggaaacgtcttgatttggcccatggagggctcacattggctgaacgtaaagatcattattgatgaattgattaagaaagaacacaacgtcaccgtgctggttgccagtggcgcactgttcattacacctacgagtaacccttctcttacatttgagatttaccgggttccgtttggaaaggaaaggatcgaaggcgtcattaaggatttcgtcttgacctggctggagaaccgaccatccccttccaccatttggagattctaccaagagatggccaaagtgattaaggacttccacatggtctctcaagagatttgtgatggtgtgttaaagaaccaacagctaatggctaaactgaaaaagtcaaaattcgaagtcttggtttcagaccccgtgtttccatgcggagatatcgtagcgctgaagctggggatcccctttatgtactcactgcgctttagtcctgctagtaccgtggagaagcactgtggaaaggttccgtaccccccatcttacgtgcctgccgtactctctgagctcactgaccagatgtctttcaccgaccggattcgtaattttatatcataccacctgcaggactacatgttcgaaactttgtggaaatcctgggatagctattacagcaaggccctgggccgaccgacaactctgtgcgagaccatgggcaaagcagagatctggctcatcagaacgtattgggacttcgagttccctaggccctatctccccaacttcgagttcgtcggcggactgcactgtaagcccgctaagccactgccaaaggagatggaggagttcatccaatccagtggaaaaaacggagtcgtggttttttctctcggatcgatggtgaagaacctcacggaagagaaggcaaatttgatcgcgagcgctctagcccaaatcccccagaaagtactgtggagatataaggggaagaaacctgccacgttggggaacaacacgcagctcttcgactggatccctcagaacgacctcctcggacaccctaaaacgaaggcatttattacccatggtggcaccaacggaatttatgaggccatttatcacggggtgcctatggtcggagtgcccatgttcgctgatcagcctgataatatcgctcacatgaaagccaaaggtgcagcagtggaggtgaatctgaacacaatgacaagcgtggacctcctgtctgcactccgcaccgtgatcaacgaaccatcctataaagaaaatgctatgaggctgtctagaattcatcacgatcagccagtgaagccactggaccgtgccgtgttctggatcgaattcgtcatgcggcacaagggggcaaaacatctgcgggtggccgcacacgacctgacatggtttcagtatcatagcctggatgtaattgggttcttgctggtgtgcgttactacagctatctttttagtcatacagtgctgtctcttcagctgtcagaagtttggaaaaattgggaaaaaaaaaaaaagagagtag

SEQ ID NO: 246121 - DNA, 477 bp, synthetic construct
  misc_feature 1..477: note = Description of Artificial Sequence: Synthetic coding sequence
  source 1..477: mol_type = other DNA
atgctgaataatctccttctattctcgctgcagataagtctgataggaactacactgggcggtaacgtattaatttggcccatggaggggagccactggctcaatgttaaaatcattatcgacgaactcatcaagaaagagcataatgtgactgttctggtcgcttccggtgccttgtttataaccccaactagcaacccatctctgacattcgagatctatcgcgtcccatttgggaaggaaagaatcgagggcgtgattaaggatttcgttttgacctggctcgagaataggccgagcccaagcaccatttggaggttttaccaagagatggcaaaggtaattaaagactttcacatggtttcgcaagaaatatgcgacggggtgctgaaaaaccaacagcttatggcgaagctcaagaagtccaaattcgaggtcctggtgagtgaccccgtttttccttgtggcgatatttag

SEQ ID NO: 246122 - DNA, 1590 bp, synthetic construct
  misc_feature 1..1590: note = Description of Artificial Sequence: Synthetic coding sequence
  source 1..1590: mol_type = other DNA
atgacactgaagtggactagtgtgcttttgttgatccatctatcatgttatttcagctccggatcatgcggaaaagttttagtctgggccgctgaatatagccattggatgaatatgaagacaatattgaaagaactcgtgcagagaggtcacgaggtgactgtgctggcatcctcggcgtcaattctattcgatccaaatgatgcctctaccctcaagtttgaagtctatcccactagcctaaccaaaaccgaatttgaaaacattatcatgcaacaagtcaaaaggtggtccgacattcgtaaggattccttttggctgtacttctctcaagagcaggaaatattatgggagctctatgacatctttcgcaatttttgtaaggacgttgtcagcaataagaaggtcatgaaaaaactccaggagtctcgatttgacattgtgttcgctgacgctgtctttccatgcggcgaacttctggctgcccttcttaacatccggtttgtgtacagtctgaggttcacccctggttacacaatcgagagacatagcggcggactgattttcccgccatcttatatcccaatcgtgatgagcaagctgtctgatcaaatgaccttcatggagcgtgtcaaaaatatgatatatgttctctacttcgacttttggtttcagatgtccgacatgaaaaaatgggatcagttttactcagaagtgttgggccgaccaactacgctcttcgagactatggggaaagctgacatctggctgatgcgcaattcttggtccttccagtttccccaccccttcctgcctaacgtggattttgtcggcggttttcattgcaaaccagccaaaccgctccccaaggagatggaagaattcgtgcagagtagtggcgagaatggcgtggtggtcttctcattgggatccgttattagtaacatgacagcagaaagagcaaacgtcatcgccaccgcccttgccaaaatcccccaaaaagtcctttggcgcttcgacggaaacaaacctgatgcgttgggcctgaataccaggctctataaatggatccctcagaatgacctactaggacaccccaaaacccgggctttcatcacccatggtggtgcaaacggaatttacgaggcaatttaccatggcatacctatggttgggataccattgttttttgaccagccagataacattgcccacatgaaggccaaaggcgctgccgtgagactggactttaacacaatgtcctcaacagacttgctgaatgccctcaagacagtgattaatgaccccctctacaaagaaaacatcatgaagttaagccgcattcagcatgaccagcccgtcaagcctctggacagggcagttttctggattgaattcgttatgccacataaaggtgcaaagcacctgagggtcgccgcacatgacctgacctggtttcagtaccatagtctcgatgtgataggatttctgctggcctgtgtcgccacggtgatcttcataataaccaaattttgcctgttctgcttttggaaattcgctcggaaaggaaagaaaggcaaaagagactag

SEQ ID NO: 246123 - DNA, 1593 bp, synthetic construct
  misc_feature 1..1593: note = Description of Artificial Sequence: Synthetic coding sequence
  source 1..1593: mol_type = other DNA
atgtccctaaaatggacatcagtatttttactgattcagctatcttgctacttcagctcgggttcctgcggcaaggtgttggtttggccaaccgagtactcccattggattaatatgaaaactatactcgaagagctcgtgcagagaggtcacgaagtgaccgtattgacttcatccgcttcgacgctggtcaacgcttctaagagttctgcaatcaaattggaggtgtatcccacctctctcactaagaactacttggaagactcgctcctcaaaatattggacagatggatttacggagtgagcaagaacacattctggagctacttctcacagttgcaggagctgtgttgggaatactacgattactccaacaagctgtgtaaagacgccgtgctgaacaaaaaactaatgatgaaactgcaggagtctaagttcgacgtaatcttggcggatgcactcaatccatgtggggagttacttgcggagctgttcaatatcccttttctgtacagcctgcggttttcagtaggttacacgttcgaaaaaaatggcggaggcttcctattccctcccagttatgtgcccgtcgtcatgtctgagctatcggaccagatgattttcatggaaaggatcaaaaatatgattcatatgctgtatttcgatttctggtttcagatctacgaccttaagaagtgggaccagttctactcagaggtgctggggaggcccacaactctgttcgagactatgggcaaggcagagatgtggttaatccggacttactgggattttgagtttcctcggcctttcctgccgaatgtagactttgtagggggattacattgtaagcctgccaagcccctcccaaaagaaatggaggaatttgtccagtcatcaggcgagaatgggatcgtggtttttagccttggctctatgatcagcaacatgtccgaggagagcgcaaatatgatagcctctgccctggctcaaattcctcagaaagtgctgtggaggtttgatgggaaaaaacccaacactctggggagcaacacgcgactctacaaatggctccctcagaatgatttactcgggcatcctaaaactaaagcatttatcacacacggtggtacaaatggtatctacgaagcaatctaccacggcatccctatggtgggcattcctttgtttgcggatcagcacgacaacatcgcccacatgaaggccaagggagccgcactgtcagtggacatcagaaccatgtcaagccgggatcttttaaacgccctgaagtcagtgatcaacgaccccgtatacaaggagaacgtcatgaaattgtcgcgcatccaccacgatcagcccatgaagccactcgaccgagcagtgttctggatcgaattcgtgatgcgacataagggtgctaaacatctgagggttgccgcacataatctaacatggatccagtaccattccttggacgtgatcgcgttcctcctggcttgtgtagcaaccgtgatattcataattacaaagttctgcctgttttgcttccggaagctggcgaaaaagggtaaaaaaaaaaagcgagactag

SEQ ID NO: 246124 - DNA, 1593 bp, synthetic construct
  misc_feature 1..1593: note = Description of Artificial Sequence: Synthetic coding sequence
  source 1..1593: mol_type = other DNA
atgtcactcaagtggatgagcgtctttctcctcatgcagctgtcttgttattttagctcaggatcctgtggaaaagtgctggtctggcccacagaatactctcactggataaatatgaaaaccatcctggaagagctggtccaacggggtcacgaagtcatcgtgctgacctcttctgcgtcaattctagttaacgcctccaagagctccgccattaaactggaagtgtacccgacatctctgacaaagaacgatcttgaggactttttcatgaaaatgttcgacaggtggacgtattccatctctaaaaataccttttggtcctatttctctcagctccaggagctgtgttgggaatactcagactacaacattaagctttgtgaagacgccgtcctgaacaagaagttgatgcgtaagctccaggagtcaaaattcgatgtgttgttagcggacgcagtcaatccgtgtggggaactactagccgagctactgaacatccccttcttgtacagtctgcggtttagcgtcggctataccgtggaaaaaaacggaggcggtttcctattcccaccgagctatgtcccggtggtgatgtcggaactgagcgaccaaatgatcttcatggaaaggattaagaacatgatctacatgctgtacttcgatttctggttccaggcctatgatctgaagaagtgggaccaattttactccgaagttctgggcaggcccaccacgctctttgaaacaatgggtaaagcagagatgtggctgatccgtacctactgggactttgagttccctcggcctttcctgcccaatgtagatttcgttggtggactgcactgcaagcctgctaaaccactacccaaagagatggaggagttcgtgcagtccagcggagaaaatggaatcgtggtgttctccttggggtcaatgatctctaatatgagtgaagaatccgcaaatatgatcgcttcggctctggcccagatcccccagaaggttctttggcgcttcgacggaaagaaacccaatactctcggatccaacacccgtttgtataagtggctgccccagaacgacctcctgggacatccgaaaacaaaggcgtttataactcatggtggtactaatgggatatatgaagcaatctaccatggtatcccgatggtcggtatccctctgttcgcggatcagcacgataacatagcgcatatgaaagcaaaaggggctgctttatctgtagacatcaggaccatgagttccagggacctactaaatgcactgaaaagtgtgattaatgatccaatatataaggaaaacatcatgaagctttccagaatccaccatgatcagccagtgaagcccttggaccgtgcagtattttggatcgaatttgtcatgaggcacaaaggtgctaaacaccttcgagtggccgctcataatctcacatggatccaatatcattcgctcgacgtgatcgccttcttgctcgcctgcgtggccaccatgatatttatgataactaagtgctgtctgttttgttttcgtaaactagccaaaacaggaaaaaaaaagaaacgcgactag

SEQ ID NO: 246125 - DNA, 1590 bp, synthetic construct
  misc_feature 1..1590: note = Description of Artificial Sequence: Synthetic coding sequence
  source 1..1590: mol_type = other DNA
atggctttaaagtggacgagcgtgctgctgctgattcacttggggtgctatttctcctctgggagttgtggcaaggtactcgtgtggaccggcgagtattcacattggatgaacatgaagacgatccttaaggaactggtgcagcgaggccatgaggtgactgtgcttgcatcatctgcatcaattttgtttgatccgaacgacgcttttacactcaaattagaggtgtatcctacaagcctgacaaaaaccgaattcgagaatataattatgcagcaggtgaagagatggtcggatatccagaaagactcattttggctctatttttcccaggaacaagagatactgtgggagttccatgatatttttagaaatttttgcaaagacgtggtcagtaacaagaaggttatgaaaaaactgcaagagagcagattcgatatcatctttgcggacgctttcttcccatgtggggagctgcttgccgcactgcttaacatcccattcgtgtactcgctctgtttcacacccggttacaccatcgaacgccattccgggggactgattttcccacctagctacattcctgtggtgatgtcaaaactcagtgaccagatgacttttatggaaagagtaaaaaacatgatttacgtgctttacttcgatttttggttccaaatgtgcgacatgaagaagtgggaccagttctactcagaggtactgggtaggccaactactctgttcgagactatgggcaaggcagatatttggttgatgcgtaatagttggtctttccagttcccccacccgtttctgcccaatatcgatttcgtgggaggcttacattgcaagccagccaagcctcttcctaaggaaatggaggagttcgtacagagcagcggagaaaacggcgttgtcgtctttagcctgggctctgtgatttctaacatgactgctgagcgggctaatgtgatcgcgactgcactggctaaaattccccaaaaggtactgtggaggtttgatggtaacaagcccgacgccctagggttgaacactagattgtacaaatggatcccccagaacgaccttctgggactgcccaagacgcgcgcttttattacacatggaggggcaaacggaatttacgaagccatctatcatggcatcccaatggtcggcattcctctcttctgggaccagccagataatatcgctcatatgaaagccaaaggtgctgcggttcgcctcgactttcacaccatgtctagcacggatcttcttaatgccctgaaaacagtgatcaacgatcctagctataaggaaaatgtcatgaagctgagtataattcagcacgatcagccggtgaagcccctgcacagggcagtgttctggatcgagttcgttatgtgccataagggcgctaaacacctacgagtggccgctcgagatttgacctggtttcagtatcatagcctggatgtgattggatttttgttagcatgtgtcgccaccgtcatttttgtcgtgacaaagttctgccttttctgtttctggaagtttgcacgcaagggaaaaaagggtaaacgcgactag

SEQ ID NO: 246126 - DNA, 1008 bp, synthetic construct
  misc_feature 1..1008: note = Description of Artificial Sequence: Synthetic coding sequence
  source 1..1008: mol_type = other DNA
atggccttgaagtggacctcggtgcttcttctgatacacttgggctgttatttcagttctggctcgtgtgggaaagtcctagtgtggaccggtgagtacagccattggatgaatatgaaaaccatcctgaaggagttggtccaaagaggacacgaggtcactgttctcgcatccagcgcctcgatcttattcgatcccaacgacgcatttacactgaagctggaagtgtatccaacctcactgaccaagaccgagttcgagaatatcattatgcagcaggtaaagagatggtctgacattcagaaagacagtttttggctgtacttctcccaggagcaggaaatcctatgggaattccacgatatttttcgcaacttttgtaaggacgtggtgtctaataagaaggttatgaagaagctccaggaaagccggttcgacatcatcttcgctgatgccttcttcccttgcggtgagctgctcgccgcactgctcaatattccatttgtctactccctatgtttcactccagggtatacgatcgagcggcacagtggaggtctgatttttccccctagctatattccagtggtgatgtcgaaactatcggatcagatgacattcatggagcgggtcaagaacatgatctacgtcctgtacttcgatttctggtttcagatgtgcgatatgaaaaagtgggatcagttctacagtgaggtcttagggaggcctactaccctctttgagaccatgggtaaggctgacatttggctgatgagaaacagctggtcttttcagttcccccaccctttccttccgaatattgattttgttgggggtctgcactgcaagccggctaagcccctgcctaaagaaatggaagaattcgttcagagtagtggcgagaatggcgtggtagtcttcagcttggggtcagtgatatcaaacatgacagcagagagagctaacgtgatcgccaccgcgcttgcaaagatcccgcagaaaatatag

SEQ ID NO: 246127 - DNA, 1587 bp, synthetic construct
  misc_feature 1..1587: note = Description of Artificial Sequence: Synthetic coding sequence
  source 1..1587: mol_type = other DNA
atgtctatgaagtggacatctgccttgttgctgattcagctatcatgttatttctcctcaggatcttgcggaaaggtgctcgtttggccaaccgagttcagccattggatgaatataaaaacaatcctcgatgagctcgtccagcggggacatgaggtgacggtcttggccagcagcgctagtatctctttcgatcccaacagcccctctaccctcaaatttgaggtgtatccagtgtctctgactaagactgaattcgaagacattattaagcagttggtgaagcgctgggctgaactgcccaaggacactttctggtcctatttttcacaggtacaagagattatgtggactttcaacgacattctgaggaagttttgcaaggacatagtgtccaataagaaactcatgaagaagctccaggaatcgagattcgacgtcgttttggctgatgccgtttttccattcggagaactcctggccgaactgttgaagatcccctttgtgtacagtctacgattctcccctggctatgctatcgagaaacactctgggggactgctatttccgccttcctatgtacccgtggtgatgtcagaactgagcgaccagatgacgttcatcgagcgcgttaaaaacatgatctacgtcctgtactttgaattttggtttcaaatctttgatatgaagaagtgggatcagttttactctgaagtgctgggcaggccaacaaccctgtcagaaaccatggcgaaagccgatatttggcttatcagaaattactgggattttcagtttccacatccattactcccgaacgtggaatttgtcggagggctccactgtaagcccgctaaacctttgccgaaggaaatggaggagttcgtgcagtcctccggcgagaacggcgtagtggttttcagcctcggatctatggtctcaaacacctccgaggaaagagcaaacgtaatcgcctcggccctggctaaaattccacagaaggtgctctggcgattcgatggcaataaaccagacactctgggcctgaatacccggctgtataaatggatccctcagaatgatctgctggggcatcccaagacacgagctttcatcacccatggaggcgctaatgggatttatgaggctatttaccacgggattccaatggtgggagtccccctgtttgccgaccagccggacaacattgcccatatgaaggccaagggagctgccgtcagtctcgacttccacactatgtcatctaccgatctgcttaacgcgctaaagactgtgattaacgatccgctttacaaggagaatgctatgaaactgtccagaatccaccacgatcagcctgtgaagcccctggatcgggctgtgttttggatagagttcgtcatgcgccacaaaggtgctaagcatctgcgggttgccgctcatgatcttacttggttccagtatcacagtctggacgtcaccggattcctcctggcctgtgtagcaacggttatttttataattaccaagtgcttgttctgcgtgtggaagttcgtaaggacaggaaaaaagggaaagagagactag

SEQ ID NO: 246128 - DNA, 1179 bp, synthetic construct
  misc_feature 1..1179: note = Description of Artificial Sequence: Synthetic coding sequence
  source 1..1179: mol_type = other DNA
atgttcttcgcactgctacacgtttcaagcacaaacggactggatgctgtcttccctttcggggaactcctcgcggagctcttaaaaatccctttcgtgtacagcctccggttctcaccagggtatgccattgaaaaacatagcggtggcctcttgttcccgccaagttatgtgccagtcgttatgagtgaattatccgaccagatgacattcattgaaagagtcaagaacatgatttatgtgctctactttgagttttggttccagatcttcgatatgaaaaagtgggatcaattttattctgaagtacttggacggcctactacactcagtgagacaatggccaaggctgacatctggctcatccgaaattattgggattttcagttcccacaccccctattacccaatgtagagtttgtgggtggactccattgtaagcccgctaagccattgcccaaggagatggaggagttcgtccagtcctccggcgagaacggcgtggtggtgtttagtctcggatctatggtttcgaacacaagcgaagagcgagcaaatgtgattgcctctgccttggcaaagattcctcagaaggtcctgtggagattcgacggtaataaacccgatactctcggcctgaacactagactctacaagtggattccgcagaatgacctccttggccatcccaagacccgagctttcatcacccatggcggagcaaacggcatttacgaagctatttatcacggcattccaatggtaggcgtgcctctattcgctgaccagcccgataatatcgcacatatgaaggccaaaggtgcagctgtgtccctcgactttcataccatgtcctcaacagacctgctcaatgccctcaagactgtcatcaacgatccgttatataaagagaacgccatgaaacttagccgaattcaccatgatcagccagttaagccattggaccgcgctgtcttctggatcgagtttgttatgcggcacaaaggtgcaaagcaccttagagtggcggctcatgaccttacctggtttcagtaccattcattagatgtgaccggttttctgctggcttgtgtggccacagttatcttcatcataactaaatgcctgttttgcgtctggaaattcgtgagaacagggaagaagggcaagagggattag

SEQ ID NO: 246129 - DNA, 165 bp, synthetic construct
  misc_feature 1..165: note = Description of Artificial Sequence: Synthetic coding sequence
  source 1..165: mol_type = other DNA
atgagcatgaagtggacgtccgcactcttgctgatacagttgtcctgttactttagttctggatcttgtgggaaagtcttggtgtggcccactgagttctcacactggatgaatattaaaactattctcgacgaactcgtgcagcgaggacacgaagtgacatag

SEQ ID NO: 246130 - DNA, 1590 bp, synthetic construct
  misc_feature 1..1590: note = Description of Artificial Sequence: Synthetic coding sequence
  source 1..1590: mol_type = other DNA
atgtccgttaagtggacatctgtcattttgctcatccaactgtctttctgtttcagctccggcaactgcggcaaggttcttgtatgggctgccgagtactctcactggatgaacataaaaacaatcttggacgagcttattcaaagggggcatgaggtgaccgtgctggcttctagcgccagtatcttatttgatccaaataattccagtgcactcaagatcgagatctatcccactagtctgactaagaccgaattagagaattttatcatgcagcagatcaagagatggagtgacctgcccaaagacacattttggctgtattttagccaggtgcaggagatcatgtctatttttggcgacatcacaaggaagttttgtaaggacgtagtaagcaataagaaattcatgaagaaagttcaggagagccggtttgatgtcatttttgcagatgccatttttccctgcagcgagctcctggccgagctttttaacatccctttcgtgtatagcctttcctttagtccagggtatacgtttgagaagcattcgggagggtttatttttcctccaagctacgtgcctgtggtcatgtcagagttaactgatcagatgactttcatggaaagagtgaaaaatatgatctacgttttatactttgatttctggttcgaaatcttcgatatgaaaaaatgggatcagttctactccgaagtcctagggcgtcccactactctttcggaaacaatgggtaaagccgacgtttggcttattagaaattcttggaactttcagtttccctaccccttgctccccaacgtggacttcgttgggggtctccactgcaagcctgcgaagccactgccaaaggaaatggaagactttgtgcagtctagtggggagaatggcgtggttgtcttttccttaggcagtatggtgagcaatatgactgaggaaagagctaacgtgattgcctctgctctggctcagatcccacagaaagtactgtggcgctttgacggtaacaagccagacaccctgggcctaaatacacggctctacaagtggatcccccagaacgatctattggggcatccaaagaccagagctttcatcactcacggcggtgcaaacggtatctatgaagcaatatatcatgggatccctatggtcggaatccctctctttgcagatcagcctgataatatcgcacacatgaaggctaggggcgctgctgtgagagttgatttcaacactatgtcatccaccgatctgctaaacgcactcaagagagtcattaatgacccctcctataaagaaaacgtcatgaaactttcacgtatccaacatgaccagccagtgaaacccctcgacagggctgtcttttggatcgagttcgtgatgcgccacaagggcgcaaaacatctgagagtcgccgcacatgatttaacgtggttccagtatcacagtcttgatgtcatcgggtttttgctcgtttgtgtcgcaacggtgatcttcatcgtgacaaaatgttgcctgttttgtttttggaagtttgccaggaaggcaaagaagggaaaaaacgattag

SEQ ID NO: 246131 - DNA, 1269 bp, synthetic construct
  misc_feature 1..1269: note = Description of Artificial Sequence: Synthetic coding sequence
  source 1..1269: mol_type = other DNA
atgctccagtggaggagacgccattgttgtttcgccaagatgacttggaacgccaaaaggtctctgttccggacacacctgataggcgttctttctttggtgttcctcttcgccatgtttctattctttaatcatcatgattggttgcctgggagggcgggatttaaggagaaccccgtcacctacacattcagaggcttccgctcgacaaaatcggagactaaccacagtagcctgcggaatatttggaaggagaccgtgccccaaaccctgagaccacaaacggcaacaaattccaacaataccgatctttctccgcagggcgtgacaggactcgaaaacactttgagtgcaaatggaagcatttataacgagaaggggacaggacatcctaactcgtatcactttaagtacatcattaatgagccagagaagtgccaggaaaagtccccgtttctgatcttgttgattgccgctgagccgggtcagattgaagctcggagggcgattagacagacttggggcaatgaatctctggccccaggcatccagatcacaagaatttttcttctgggactgtcaattaagctgaacggttacttgcaacgggctatcctcgaagagtctcggcagtaccacgacattatacagcaggaatatctggacacatattataatctgaccatcaagaccctgatggggatgaactgggtggctacgtattgccctcatatcccgtatgtgatgaaaaccgacagcgatatgtttgtcaatacagaatacctcattaacaagctgctcaaacccgacctgccacctagacacaactacttcacaggatacttgatgcgcggatacgcccctaatcgtaataaggactctaagtggtatatgcccccagacttgtacccaagcgaacgctatccggtattctgctccggaacagggtacgtcttctcgggggacctcgctgaaaagatctttaaagtgtctcttggaatcagaaggctgcacctcgaggatgtctatgtcggaatctgtctcgctaaacttaggatagacccagtaccccctcccaatgagtttgtgttcaatcattggagggtttcgtactcctcctgtaaatactcgcatcttattaccagccaccagttccagccaagcgagctgataaagtattggaaccacctgcagcaaaacaaacacaacgcttgcgcaaatgcagccaaagagaaagccggaagatataggcacagaaagctccattag

SEQ ID NO: 246132 - DNA, 1137 bp, synthetic construct
  misc_feature 1..1137: note = Description of Artificial Sequence: Synthetic coding sequence
  source 1..1137: mol_type = other DNA
atgcagctgaggctttttagaaggctgttacttgcggctctgctgctggtcatcgtatggacactttttggcccttccggccttggagaggaattgctgagcctttcattagccagccttctgccggctcctgcttctcccggtccacctcttgccctccccaggttgttgatcccgaatcaagaggcctgcagtggcccaggagcccctccgttcctgctgatactagtctgtaccgcacccgaaaatttgaatcagcggaatgcaattcgtgcatcatggggcggtctccgcgaagctaggggattgagggtgcagacactgtttctgctgggcgagcccaacgcccagcaccccgtgtggggctcccagggctcagatctcgcaagcgagagcgcagcgcagggggacatcttgcaagcagcctttcaagatagttataggaatctgactctgaagacattgtcaggcctgaactgggccgagaaacattgcccgatggccagatatgtcttaaaaaccgatgacgatgtttatgtgaacgtaccagaacttgtatccgagttggtcctgcgcggtgggagatgggggcagtgggagcgctctacagagccccagcgagaagccgaacaggagggcggacaggtcctgcattcagaagaagttccactcctatatctggggcgagtccattggcgcgtgaacccctcacgaacgcccggaggacgccaccgcgtgtccgaggagcagtggcctcacacctgggggccttttcctccctatgctagtggaactggatatgtgctgtctgcatccgccgtccagctaatcctaaaggtggctagcagagctcccttgttacctctggaggatgtttttgtaggtgtttcagctcgcaggggcggactcgcccctacacaatgtgttaagctggcgggagcaacccactacccactcgaccggtgttgctacggcaagtttttactcacgagccacagactagatccatggaaaatgcaggaggcctggaagttggttggcggtagcgacggcgagcgcacagccccattctgcagctggttccagggcgtgctggggattctgagatgtcgcgctatcgcatggctccagagttag

SEQ ID NO: 246133 - DNA, 1137 bp, synthetic construct
  misc_feature 1..1137: note = Description of Artificial Sequence: Synthetic coding sequence
  source 1..1137: mol_type = other DNA
atgcagctgcggctcttcaggcgtttactgctcgccgctctgcttctggtgatcgtctggactttgttcggaccatccggactgggggaggagttgctgtccctgagccttgcctcgctgctccccgctcctgcttctcccggaccaccgctggctttgcccagactcttaattcccaatcaggaggcctgctctggccctggggcacccccattcctgctcattctggtctgtacagcaccagagaatctcaatcaacggaatgctatacgggcatcatggggaggtctccgcgaagctcggggtctccgggtccaaaccctgttcttgctgggcgagccaaacgcacagcaccctgtatggggcagccagggctcggacctcgcaagtgagtctgccgcacaaggcgatattctgcaggctgctttccaagattcatatcggaatctaacgctgaagaccctttccgggctaaattgggctgagaagcattgtccaatggctcgctacgtccttaaaaccgacgatgacgtgtacgtcaacgtccccgagctggtcagtgaactcgtgctccgcggtggcagatggggccaatgggaaaggtctacagagccccagcgcgaagctgagcaggagggcggacaggtgttgcactctgaagaagtgccactgttgtacttggggagagtgcattggagagtaaacccgtcgcgcacgccaggaggccgacacagggtgagcgaggaacagtggccccacacgtggggtccctttcccccatacgcgtcaggaactggctacgtcctaagcgcttccgccgtccaactgatcctgaaggtagcttccagggccccactgctgccacttgaagacgtgtttgtgggtgtgagtgcccgacgtggcggtctggcaccaactcagtgcgtcaagctggcaggtgccactcattacccactagataggtgttgctacggcaagtttctgttgacttcgcatcgtctggatccttggaagatgcaagaagcgtggaaactcgtgggcggaagcgatggcgagagaaccgccccattctgctcatggtttcagggcgtgctcggaatcttgcgctgccgtgcgatagcctggcttcaatcgtag

SEQ ID NO: 246134 - DNA, 1137 bp, synthetic construct
  misc_feature 1..1137: note = Description of Artificial Sequence: Synthetic coding sequence
  source 1..1137: mol_type = other DNA
atgcaactgcgcttatttcgcaggcttctgctggccgcactgcttttagtgatcgtttggaccctcttcggacctagcggcctgggcgaggaactcctgtctctctccttggctagtcttctgccagcccctgcaagtcccggacctcctttggctcttcccaggctgttgattcccaatcaggaggcatgttcaggtccaggagctcccccattcctcttaatcctggtgtgcacagctcccgagaatcttaaccagcgcaacgccattagggccagctggggaggtttgcgggaagctcggggtctgcgcgtgcagaccctgttcttgctcggggaaccgaatgcccaacaccccgtttggggatcccaaggcagcgacctggcctcagagtctgcagcccagggcgacatcctgcaggccgctttccaggactcatatcgcaatctgaccctgaaaactttgtccggcctcaattgggccgagaaacattgtcccatggccagatatgtgctgaagaccgacgacgacgtgtatgtgaatgtgcctgagttggtttctgaactggtgctgcgcggaggacgctggggccagtgggagaggtccaccgaaccccagagagaagctgagcaggaagggggtcaggttctgcattctgaagaagtgcctctcctgtatctgggcagagtgcactggagagtgaacccaagccgcactccgggagggagacaccgtgtgtctgaggaacagtggccgcacacctggggaccttttcctccctacgcttctgggactggatacgtcctcagtgccagcgccgtgcagcttatcttaaaggtcgcctctagagccccactcctgccactcgaggacgtgtttgtaggcgtgtctgctcggaggggcggtctggctccaacacagtgcgtgaaacttgccggagcgacccactaccctctcgatcgctgttgttatggtaaatttctattgacttcccacaggctcgatccctggaaaatgcaggaggcctggaaattggtgggcggatccgatggcgaaaggacagcccctttctgctcgtggttccagggcgtcctcggcatccttaggtgccgggctatcgcatggctgcaatcatag

SEQ ID NO: 246135 - DNA, 1137 bp, synthetic construct
  misc_feature 1..1137: note = Description of Artificial Sequence: Synthetic coding sequence
  source 1..1137: mol_type = other DNA
atgcagttgcgcctgtttagacggttgctgctcgccgcattgcttcttgtgattgtgtggacattgttcgggccttccggcctcggagaggagctgctcagcctaagtctcgctagcctgctgccagccccagcgagtccgggacctcccttggccttaccgaggctgttaatccccaaccaagaggcctgttctggcccaggagcccctccctttctgttgatcttggtgtgcacggcccctgaaaatctgaatcagcgcaacgccatacgcgcaagttggggaggtctaagagaagctagaggattaagggtgcagactctcttcctgctgggggaaccgaatgctcaacacccggtttggggaagccagggaagtgacctggcatccgaaagcgctgctcaaggagacatcctccaagctgctttccaggactcatacagaaacctgaccctcaagacactttccgggctcaactgggctgagaagcactgtcccatggcgcgttatgtgctgaaaacagatgatgacgtgtacgtcaacgtccccgagctcgtgtccgagctggtgctgagagggggaagatggggacaatgggagaggtcaaccgaacctcagcgcgaggctgagcaagagggcggacaagtcttgcatagtgaggaggtgccattgctgtacctgggacgcgtgcactggcgcgttaacccgtcacggacgcctggaggacgccaccgtgtttccgaagagcaatggccccacacatggggcccttttccaccttacgcaagtgggaccggatatgtgctctctgccagcgctgtccaattgatcctgaaggttgcgtctagggccccactcttacccctcgaagacgtctttgttggtgtctctgcgaggcgcggaggcctggccccaacccaatgcgtcaagctcgctggtgccacacattaccctctagaccggtgctgttacggaaaatttctcctgaccagccatcgcttggatccctggaagatgcaagaggcctggaaactcgtgggaggaagcgacggggaacgtacagcaccgttctgctcttggtttcagggcgtactgggcatactgagatgtagagccattgcttggcttcagagctag

SEQ ID NO: 246136 - DNA, 1137 bp, synthetic construct
  misc_feature 1..1137: note = Description of Artificial Sequence: Synthetic coding sequence
  source 1..1137: mol_type = other DNA
atgcagctgcgactgttccggcgtctattactggccgctctgctactggtgattgtttggactctctttggaccaagtggcctgggggaggagttgctttccctcagcctggcttccttactgcccgcacccgctagccccggacctccattagcccttccgcgactcctaattccaaatcaagaagcatgcagcgggcctggagcgccacccttcctgctgatcctcgtatgtacagccccagaaaatttaaatcaaaggaacgctattcgcgcatcttggggaggcctccgcgaggctaggggactgcgggtgcagactctgttcctccttggggagccaaatgcccaacaccctgtttggggctctcaggggtccgatttagcttctgagagtgctgcccagggagacattctgcaggccgcatttcaagactcttacagaaacttgactctgaaaaccttgtccggcctcaactgggctgagaagcactgtcccatggccagatatgtgctgaagaccgacgatgacgtgtacgtcaatgtgcctgagctggtgagcgagctcgttctgagagggggacggtggggccagtgggagaggagcaccgagccccagagagaggcagagcaggaaggaggacaggtgctgcactccgaggaagtgccactgctgtatctcggccgagttcactggagagtcaacccatcaaggacccccggtggccgtcacagggtgagtgaagagcagtggcctcacacatggggaccgtttcccccttacgctagcggtacagggtacgttctgagtgcgagcgctgtgcagttgatactgaaagtcgcatccagggcccctctcctgcccttggaggatgtctttgtgggcgtctccgccaggagggggggtctggctcccacacagtgcgttaaactggccggagccactcattatcccctagacagatgctgctatggaaagtttctcttaacgtcccataggctcgatccttggaagatgcaggaggcctggaagctggtgggcggaagtgatggcgaaaggaccgcccctttctgcagttggtttcagggggtgcttgggatcctgcggtgtcgcgctattgcttggctgcagtcatag

SEQ ID NO: 246137 - DNA, 933 bp, synthetic construct
  misc_feature 1..933: note = Description of Artificial Sequence: Synthetic coding sequence
  source 1..933: mol_type = other DNA
atggcctttcccaaaatgcgcctcatgtatatctgtctactcgtcctgggagccctgtgcctctatttctcaatgtattcgctaaatccattcaaagagcagtcatttgtatacaaaaaggacggtaacttcctgaagctgcccgatacagactgcagacagacccctccattcttggtgcttctcgtcacaagcagccacaagcagctggccgaacgcatggccatacgtcagacctggggaaaagaacggatggtgaagggaaaacagcttaaaaccttcttccttttgggtaccacttcttccgccgctgagaccaaggaagtcgatcaggaaagccaacggcatggcgatataattcaaaaggattttttggatgtatattacaaccttaccctcaaaacaatgatgggcattgaatgggtacaccgcttctgcccccaggccgcatttgtcatgaaaaccgactccgatatgttcatcaacgtcgactatctgacggagcttctactcaagaaaaaccggactacacgtttcttcacgggcttcctgaaacttaatgaattcccgatacggcaaccattcagcaagtggttcgtcagcaaaagcgaatatccctgggacaggtaccccccattttgcagcggtaccggatatgtcttctctggcgacgtcgcaagccaagtgtataatgtaagtaaatccgtgccgtatatcaaacttgaggatgtattcgtgggactttgcctggaacggctgaacattagacttgaagagttacactcccaacccaccttcttcccgggtggactgcgattctcagtgtgtttatttcgcaggatagtggcgtgtcactttatcaaaccacggacactcttggattattggcaggctctggagaactcccggggagaagactgcccgcctgtgtag

SEQ ID NO: 246138 - DNA, 933 bp, synthetic construct
  misc_feature 1..933: note = Description of Artificial Sequence: Synthetic coding sequence
  source 1..933: mol_type = other DNA
atggccttcccaaagatgcggctcatgtacatatgtttactggtactcggcgcactgtgtctctatttctccatgtactcactgaaccccttcaaagagcaaagtttcgtgtacaagaaagacggcaactttctcaaactgcccgacacagattgcagacaaacaccccctttccttgttctgcttgtgacttcctcccacaaacagctggctgagcggatggcaatccggcaaacgtggggcaaggaaagaatggtgaaaggcaagcaactgaagacctttttccttttgggaaccacttctagcgcagcggaaaccaaagaggtcgatcaggaatctcagaggcacggggatatcatccagaaggactttctcgacgtgtactataaccttaccctgaaaacaatgatgggcatcgagtgggtgcatcgcttctgccctcaggcagcattcgtgatgaagactgatagtgatatgtttattaatgttgattacttgaccgagctactcctgaaaaagaatagaactacgcggtttttcactgggtttttgaagctgaacgagtttccaatccggcagccgtttagcaaatggtttgtcagcaagtctgagtacccgtgggaccgctatcctcctttctgttccgggacagggtacgtgttctccggggatgtggccagtcaagtgtacaatgtgtctaagtccgtcccttacataaaactggaggatgtttttgtaggtctgtgcctggaacggctgaatattcgtttagaggagctccacagccagccaactttcttccctgggggtcttcgattctctgtatgcctgttccgcaggattgtagcttgtcactttataaaaccgaggactttacttgactactggcaggccctggaaaattcgcgcggagaggactgtccccctgtgtag

SEQ ID NO: 246139 - DNA, 933 bp, synthetic construct
  misc_feature 1..933: note = Description of Artificial Sequence: Synthetic coding sequence
  source 1..933: mol_type = other DNA
atggcattccccaaaatgagactgatgtatatttgcctgctcgtgctgggagctctttgtctgtatttcagcatgtactcactgaacccattcaaagagcaatcattcgtgtacaagaaagatgggaactttctgaaactgcctgatacggattgccggcagaccccgccattcctggtgttactggtgactagctcccataaacagctggctgagaggatggctatccgtcagacttggggaaaagaacgaatggtcaaaggcaaacagttaaaaactttctttctactaggcactacatcaagcgctgcggagactaaggaagtggaccaggagtcccagcggcatggcgatatcatccagaaagacttccttgatgtgtattacaacttaactttgaagaccatgatgggaatcgaatgggtccataggttctgtccccaggctgcctttgtcatgaagacagattctgacatgttcatcaacgtggattacctgaccgaactgctcctcaaaaaaaatagaactacccgatttttcacaggctttctgaagctgaacgagttcccgattcgccagcctttttccaaatggtttgtgtccaaatcagaatatccctgggaccgatacccccctttctgcagtggaaccggctatgtgttctcaggagacgtcgcctctcaggtgtacaatgttagcaaatctgttccctacataaagttggaggacgttttcgtgggtctgtgcctcgaacggcttaacatccgcctggaagagctgcactcacagcccactttctttcccggaggacttcggttcagcgtgtgtctgttcaggagaatcgtcgcatgccattttatcaaaccacgaactctgctggactactggcaggccttagaaaactctcgaggtgaggattgccctcccgtttag

SEQ ID NO: 246140 - DNA, 933 bp, synthetic construct
  misc_feature 1..933: note = Description of Artificial Sequence: Synthetic coding sequence
  source 1..933: mol_type = other DNA
atggcatttccaaaaatgcgacttatgtacatctgtctgcttgtgttgggcgctctgtgtctatactttagcatgtacagtctaaacccgttcaaggagcaaagcttcgtgtacaagaaagatggaaactttttgaagctgccggacaccgactgtaggcagacccccccatttcttgtcctcctggtgacgtccagccataagcagttagccgaaagaatggctatcaggcagacctggggaaaggagagaatggtgaaagggaagcaattaaagactttcttcttgctgggcaccacatcctctgccgcagagactaaagaagtagatcaggaaagccagcgccacggggatatcattcagaaggatttcctagatgtctactataatctcactttgaagacgatgatggggattgagtgggtacaccggttttgcccgcaggcggcttttgtgatgaaaaccgattcagacatgttcattaatgtggattatctgaccgagttactgctgaaaaagaataggacaacaagattcttcactggtttcctgaaactaaacgaattcccaatccgccaacccttcagcaaatggtttgtgtccaaaagcgaatacccttgggacagatatccaccattctgctctgggacgggatacgtcttctccggcgatgttgcttctcaggtctacaatgtcagtaagagtgtgccgtatatcaaactggaggatgtcttcgtcgggctgtgcctggaaagactaaatattcgcctcgaggagctgcatagccagcctaccttcttccccggtggacttcgcttctccgtctgcctcttcagacgaattgtggcctgccatttcattaagccgagaaccttgctggattactggcaggcgctcgaaaactcacgtggcgaggactgtcccccagtgtag

SEQ ID NO: 246141 - DNA, 1197 bp, synthetic construct
  misc_feature 1..1197: note = Description of Artificial Sequence: Synthetic coding sequence
  source 1..1197: mol_type = other DNA
atgcgactgcgagaacccctgctgtccggctctgctgccatgccaggcgcttctctccaacgggcatgcaggctgctggtggccgtctgcgcgctccacctgggagtgacacttgtgtattacctcgccggtcgcgatctttcgagattgcctcaactggtaggcgttagcacacccctgcaagggggaagcaacagcgccgcagccattggacagtccagtggggaattgcgcacaggaggagcccgtccgcctccccctttgggcgcttcctcacagccacgccctggcggagactccagccctgtggtcgattcagggcctggaccagcctccaatctaacaagcgtgccagtccctcacactaccgcactttctcttcccgcatgtcctgaggagagtcctctcctcgtgggcccaatgcttatcgagtttaatatgccagtggacctggaactggtggcaaagcagaaccctaatgtgaagatgggtggacggtacgcgcctagagattgcgtatccccacacaaggtggctattatcattccctttcggaaccggcaggagcacctgaagtactggttgtattatctgcatccggttttgcagagacagcaactggattatggaatctatgtcatcaatcaagcaggcgataccatattcaatcgcgcaaagctcctcaatgttggattccaggaagcgcttaaggactacgattacacgtgctttgttttttctgatgtggatctgatcccaatgaacgaccataacgcctacaggtgttttagccagcctagacacatctcggtcgccatggataaattcgggttttccctcccatacgtccagtactttgggggagtatccgcccttagtaagcagcagtttctgaccatcaacggcttccctaacaattattggggctggggcggtgaagatgacgatatctttaatcggctggtcttcagaggtatgtccatatcccgccctaatgctgtcgtaggacgatgcagaatgataaggcacagtcgagataaaaagaatgagcccaacccgcaacggttcgaccgaattgctcacacgaaggagacgatgctcagcgacgggctgaacagcctgacatatcaggtattagatgtccagcggtatccgctctacacacagatcaccgttgacattggtacgccatcgtag

SEQ ID NO: 246142 - DNA, 678 bp, synthetic construct
  misc_feature 1..678: note = Description of Artificial Sequence: Synthetic coding sequence
  source 1..678: mol_type = other DNA
atgagactgcgcgaacccctgctttcaggatcagccgcaatgcctggagcctcactgcagcgtgcttgcagactgttggtagccgtttgtgcgcttcacctgggagtcacgctggtgtactatcttgccggacgggatttatccagactcccgcaacttgtgggagtctccacaccgcttcaggggggttcaaacagtgctgcggctattggacaatcatccggtgaattaagaaccgggggagctaggcctccgcctcctctaggtgctagctctcagccccgaccgggaggtgactcatccccagtcgttgactccggccctgggccagcctccaatttaacctcagtccctgtgcctcacactaccgctctaagcctgcccgcttgccccgaggaatcaccactgctcgttggtcctatgctgattgagtttaacatgcctgtcgatctagagttggtcgcaaagcagaatcctaatgtcaagatggggggacggtatgcgcctagggactgtgtctccccccacaaagtggctatcataataccgttccgaaacaggcaggaacacctcaagtactggctgtactatttgcaccctgtgcttcagcgccagcagctggactatgggatctatgtgatcaatcagtatgaaaagatccgccgattactttggtag

SEQ ID NO: 246143 - DNA, 1068 bp, synthetic construct
  misc_feature 1..1068: note = Description of Artificial Sequence: Synthetic coding sequence
  source 1..1068: mol_type = other DNA
atgcgcctccgcgagccattactgagtggctcagcggcaatgcccggagcaagtttacagcgcgcttgtcgtcttcttgtcgccgtttgtgcgctccatcttggggtgactttggtctactacctggcaggcagggacttaagtaggcttccacagctggtgggcgtatcaacacctgtcgtggatagtggtccaggcccagcaagcaacttgacaagcgtccctgttccgcatacaacggccttgtcactgcccgcttgtcctgaggagtctcccctactcgtgggacccatgcttatcgagtttaacatgccggttgacttggaacttgtggctaaacagaatccaaatgtgaaaatggggggaagatatgctccacgtgactgtgtgagcccacataaagtcgccattatcataccgtttaggaaccgccaagagcatttaaaatactggctctactatctacaccccgtgctccagcggcagcaacttgactacgggatttacgtgatcaaccaagccggagatacaattttcaacagagccaagctgttgaacgtaggcttccaagaggctttaaaggactacgattatacatgttttgttttctcggacgtcgacctaattccaatgaatgatcacaacgcttataggtgcttctcgcagcctagacacattagcgtggccatggacaaattcggctttagcctcccatacgtccagtattttggcggtgtgtctgcgttaagcaagcaacagttcctcacaataaacggtttcccaaataactactggggatggggaggggaggatgacgacattttcaatcggcttgtcttccgaggcatgagtatttcacgccctaacgcggtagtggggcgatgccggatgatcagacactcccgtgacaaaaaaaacgaacccaacccccagcgattcgaccgcattgcccatacgaaggaaactatgttgagcgacggcctgaactccctcacctatcaagtcctggacgtgcagcgctatcccctgtacactcagatcacagtggatatcggcaccccgtcgtag

SEQ ID NO: 246144 - DNA, 438 bp, synthetic construct
  misc_feature 1..438: note = Description of Artificial Sequence: Synthetic coding sequence
  source 1..438: mol_type = other DNA
atgaacgatcacaacgcttacaggtgtttcagccagccgaggcacatttccgtggccatggataaatttgggttttcactaccatacgtgcagtacttcggtggtgtgtctgccctttccaagcagcagttcctgaccatcaacgggttcccaaataactactggggttggggcggagaggatgatgacatttttaatcgcttggtgtttagggggatgtccatctccaggcccaatgccgtcgtcggcaggtgtcgaatgattagacacagccgggacaagaagaatgagccaaaccctcagcgattcgatcgaattgcccacacaaaagagactatgttaagtgacggtctgaactccctcacctaccaagttctcgacgtgcaacggtatcccctatacacgcaaatcaccgttgatattggaactccatcatag

SEQ ID NO: 246145 - DNA, 1206 bp, synthetic construct
  misc_feature 1..1206: note = Description of Artificial Sequence: Synthetic coding sequence
  source 1..1206: mol_type = other DNA
atggctgtggaagtgcaggagcagtggccctgccttcctgccgcaggttgtccgggacccctgggcggtccggtggcagcttgtgggatgtccaggctgttgggcggtaccctggaacgcgtgtgcaaggctgtactacttctctgcttgttgcatttcctcgtggccgttatcctttactttgatgtctatgcccaacacctggcttttttttcgcggttctccgctcggggaccagcgcacgccttacaccccgctgcctcatcctcatcctcaagcagcaactgttcacgtccaaatgccactgctagttcatctggcctgcctgaagtgcctagcgccttacccggacctaccgcccctacattgccaccttgtcctgatagtcctcccggactggtcggtcggctgttgatcgagtttacgtccccaatgcccctggagcgggttcagcgcgagaaccccggagtcctcatgggtgggaggtacacacccccagactgcacccctgcccagactgtcgccgtgataattccattcaggcacagagaacatcatcttagatattggctacactacttacatcccatactgcggagacagcgtctgagatacggcgtttatgttatcaatcaacatggcgaagacaccttcaatcgggcaaaactgttaaatgtcggcttcctggaagcgcttaaggaagatgccgcttacgactgctttatctttagcgacgttgacctcgtgcctatggacgaccgcaatctgtacaggtgcggcgatcagcccagacattttgccatagccatggacaagttcggattcaggctcccgtatgcaggctacttcggtggcgtatcagggttgagcaaagcccagttcctccggatcaacggtttccccaacgagtactggggatggggcggtgaagacgacgatatttttaaccgaatctctctaactggcatgaaaatctcacgcccagatatccggattggccgatatcgcatgattaaacatgaccgagacaagcacaacgagccaaacccacagcgtttcactaaaatccagaacacgaagctcacaatgaagcgcgacggtattgggagtgtgagatatcaggtactcgaggtctctagacaaccactcttcacaaacattaccgttgatattgggcgtcctcctagctggccacccaggggttag

SEQ ID NO: 246146 - DNA, 1119 bp, synthetic construct
  misc_feature 1..1119: note = Description of Artificial Sequence: Synthetic coding sequence
  source 1..1119: mol_type = other DNA
atgagtagactcctgggaggcactctggaaagggtgtgcaaggctgtcttgttactgtgcttgctgcattttctagtggctgtgattctgtacttcgatgtctatgctcagcaccttgcattctttagtcggttttcagcaagaggaccagctcatgccttgcaccctgccgcatcttcctcaagcagctcatcgaactgttcccgcccaaacgctacagctagctccagcggcttgcctgaagttccttcagctttaccaggcccaaccgccccaaccctgcctccgtgccccgactctccgcctgggttagtgggccgactgctgattgagttcacctcccccatgcctctcgagcgtgtgcagcgtgagaatccaggggtcctgatgggtgggagatacacaccccctgactgtacccctgcccaaacggtggcagtcattatcccatttcgccacagagaacatcatttacggtactggctgcactatctacaccctattctgcgcagacaacgtctgcgctatggggtctatgttattaatcagcacggggaagatacattcaacagggcaaaactgctcaatgtgggatttctcgaagctctgaaagaagatgctgcttacgactgcttcatcttctctgatgtggacctggtgccaatggacgaccgtaatctgtaccggtgcggagaccagcctagacacttcgcaatcgcaatggataagtttggcttcagactgccttacgcgggatacttcggaggcgtcagcgggttgagtaaggctcagtttcttcgcatcaatgggttccccaacgaatattggggctggggtggcgaggacgacgacatattcaacaggattagcctaaccggaatgaagatctctcgacctgatatcaggatcgggaggtatagaatgatcaagcacgatcgagataagcataacgagcctaaccctcagagattcactaaaattcagaacaccaagttgacaatgaagcgagatggcattggtagcgtaagatatcaagtgcttgaagtgagccgccaaccactcttcactaacattaccgtcgacattgggaggccaccaagctggcctccccgtgggtag

SEQ ID NO: 246147 - DNA, 1119 bp, synthetic construct
  misc_feature 1..1119: note = Description of Artificial Sequence: Synthetic coding sequence
  source 1..1119: mol_type = other DNA
atgtccaggcttctgggtggaacgttagaacgagtatgcaaggcggtcttgctactgtgcctgttgcacttcctggttgcagtgattttgtatttcgacgtttatgcccagcacctggcgtttttctctcgattctccgccaggggccctgcccacgcactgcatcccgctgcgagttcatccagcagctcctcaaattgttccagacctaatgccactgcttcttcctcagggctgcctgaagtcccaagtgctctgccgggacccacagcccctacactaccaccctgcccagactctcctcccggtctcgtaggcagactgctgatcgaattcacaagtcctatgccactggaacgtgttcagcgtgagaaccctggcgtgctcatgggcggtcgctacactccacccgattgcactccggctcagaccgtggcggtgattattccttttagacaccgcgaacaccaccttaggtattggctccactacctccacccgattttacgtaggcaacgtctgcgttacggcgtgtatgtcatcaatcagcatggagaggacaccttcaatagagcaaaacttctgaatgtgggatttctagaggccctgaaggaagacgcagcctacgattgttttatattttccgacgtcgacctcgtccccatggacgaccgcaacctctatcggtgcggtgaccagccgcgacattttgctatcgccatggataaattcgggttcaggcttccgtatgctggatactttgggggagtctctgggctgagcaaagctcagttcctccgcatcaatggattccctaacgaatattggggctggggcggtgaggatgatgatatcttcaatcggattagtctgaccgggatgaagatcagtcggccagacattagaattgggcgatacaggatgattaagcacgacagggataagcataacgaacccaacccccaacgcttcactaagattcagaacacaaagctcacaatgaaaagagatggcattgggtccgtcaggtaccaggttctcgaggtgtctcgacagcctttgtttacgaatatcactgtggatatcgggcgaccaccttcatggcctccgagagggtag

SEQ ID NO: 246148 - DNA, 921 bp, synthetic construct
  misc_feature 1..921: note = Description of Artificial Sequence: Synthetic coding sequence
  source 1..921: mol_type = other DNA
atgcccagcactcagcttcttgccgctgcagccgctgccgctactgccccaggtccaacgccccctccgctggcccctgggagtctacgaagtccggttccgtgccccgtgccgagactgccacggtgccatcccgtactgacaagacatcttgtgctgcgtgtgcaaagagagaaccccggtgtgctcatgggcggacgatacacacctcctgactgtacacctgcccaaacagtcgcggtgataattcctttccgccacagagaacaccacctgcggtattggctgcattacctgcatccaatattacgaagacagaggctgcggtatggggtctatgttattaaccagcacggcgaagatacatttaatagagccaaactcctcaatgtgggtttcctggaagcgttaaaagaggacgccgcttacgactgttttatattctcagatgtcgacttggtaccgatggatgacagaaatctgtaccgatgcggggatcagcccagacatttcgccatcgccatggataagtttggatttcgcctcccatacgccggttatttcggtggtgtgtcaggcctcagcaaggctcagttccttcgaatcaatggctttcctaacgagtattggggctggggcggagaagacgatgacatcttcaatcgaatctcactgacagggatgaagattagccgcccagatatcagaatcggaagataccgcatgatcaagcatgatagagataaacacaatgaaccaaacccccaaaggtttaccaagatccagaatactaaacttactatgaaaagagacggcataggcagcgtgagataccaagtactcgaggtatcaagacagcccttattcactaacatcactgtcgacattggccgacccccttcttggccgccaagaggatag

SEQ ID NO: 246149 - DNA, 441 bp, synthetic construct
  misc_feature 1..441: note = Description of Artificial Sequence: Synthetic coding sequence
  source 1..441: mol_type = other DNA
atgttgaggaggctcctggagcggccatgcactctcgcgttactagtgggctcacagctggcagttatgatgtatctgagcctcggtgggtttaggtccctgagcgcactgttcggacgcgaccagggcccaacctttgattactcacatcccagagacgtgtactctaacctgtctcaccttcccggtgccccaggcggtccccctgcccctcagggactgccctattgccccgaacgctcccctctgctcgttggacccgtgtcagtctccttctctcccgtgccttctttggccgagatcgtggagagaaatccaagagtggaaccaggcggtagataccgcccacctgctgctctgcccccagcacctttattggccgctcctgctgcatgcctctggcatctgtgtcaccctcccggttggaaatggaacatttag

SEQ ID NO: 246150 - DNA, 1182 bp, synthetic construct
  misc_feature 1..1182: note = Description of Artificial Sequence: Synthetic coding sequence
  source 1..1182: mol_type = other DNA
atgttaaggcgtttactggagcgcccttgtactttggctctccttgtcggctcccagttggcagttatgatgtatctctccctaggtggctttcggtccctcagcgcactgtttggacgcgaccagggcccaaccttcgactatagccaccccagagacgtttactccaatctgtcccacctgcccggagcacccggaggccctcccgctccacagggcctcccgtactgtcccgagaggtcacccctgctggttggtcccgtttctgtgagcttctcccctgttccttccctggctgagatcgtagagcgaaaccccagggttgaacctggagggcgttatcggcctgccggatgtgaaccccgtagcaggactgcaataatcgttcctcaccgggctagagaacaccacctgcgattgctactataccatttgcatccattcctgcagcggcagcagctggcctacggaatctacgtgattcaccaagcgggtaacggcacatttaatcgagcaaagctgttaaacgtcggcgtgcgtgaggcccttagagatgaagagtgggattgcctctttcttcatgatgtcgacctcctgccagaaaacgaccataacctctatgtctgcgatcccaggggccctcggcacgtcgctgtagccatgaacaaattcggatactctctcccgtacccacagtacttcgggggtgtgtcggctttgaccccagaccagtacctgaaaatgaacggattccctaacgagtattggggctggggaggtgaagacgatgatatagccaccagggtgaggctcgctggtatgaaaattagcaggccccctacctcagtgggtcattacaagatggttaagcacaggggggataagggcaatgaggagaaccctcatagatttgacctgctcgtgcggacccagaattcctggacccaggacgggatgaacagcctgacttaccagcttttggccagggaactgggtccactttacactaacatcaccgcagatatcggcactgacccgaggggcccacgggctcctagcggccctaggtatcctcccggaagcagtcaggctttccgacaggagatgctgcagagacgcccaccagccagacccggacccttgagtactgctaatcataccgcgctccgtggatcacactag

SEQ ID NO: 246151 - DNA, 1182 bp, synthetic construct
  misc_feature 1..1182: note = Description of Artificial Sequence: Synthetic coding sequence
  source 1..1182: mol_type = other DNA
atgctacggaggctgctcgaacggccatgtacactggctctgctcgtcgggtcacaactggctgttatgatgtacttgtcccttggcggattccgctctctctccgcattattcggtcgggaccaaggacctactttcgactactcccacccacgcgatgtatacagcaatctgtcccacctcccaggcgctccgggaggccctccagctcctcagggactgccttattgcccggaaaggtcgcctctgctggttggaccagttagtgtgtccttcagccctgttccttcactagcagagattgtcgagcgcaacccaagggtggaacctgggggtcgatataggccagcgggttgcgagcctcgcagtcgaactgcgatcatagtcccccaccgggctagagagcaccacttacgcctgctgctgtatcatctgcatccattcttgcaaaggcaacagttggcgtacggtatctacgtcatccaccaggccggaaacgggaccttcaatagggccaagctgttgaacgtgggtgtacgggaggctcttcgtgatgaagagtgggactgcttgtttctccacgacgtcgatttgcttcctgaaaacgatcacaatctctatgtctgcgaccccagaggacctagacacgttgcagtagcaatgaataaattcgggtattcactgccctaccctcagtattttggtggggtcagtgcactcaccccagatcagtacctgaagatgaatggctttcccaacgaatactggggctggggcggagaggatgacgacatcgccacacgagtgagactggcgggtatgaagatatccaggccgcctacctcagtgggtcattacaaaatggtcaagcacagaggtgacaaagggaacgaagagaatccccatcgattcgatctgttagtacgaacccagaattcatggacacaggacggcatgaacagcctgacttaccagctgctagcaagggagctgggtcctttatatactaacattaccgccgacattggtaccgaccccagaggcccaagggctccttccggcccaaggtaccccccagggagctcacaggcctttcgccaggagatgctgcagaggaggccaccagcacgacccggaccactgagtacagccaaccacacaccgagcgaagttcacacctag

SEQ ID NO: 246152 - DNA, 1182 bp, synthetic construct
  misc_feature 1..1182: note = Description of Artificial Sequence: Synthetic coding sequence
  source 1..1182: mol_type = other DNA
atgctgagaagactcctcgagcgaccttgcacactcgccctgctggtgggttcacaattagccgtaatgatgtacctgtccttggggggattccggtctttgagtgcactttttgggagggatcaggggccaacattcgattacagccatccccgtgacgtgtattccaatctgagccaccttcctggtgctccagggggtccccctgcccctcagggactgccttattgtccagagcggtctcctttgctagtgggccctgtttccgtctcattcagtcccgtgccaagtttggcagagatcgtggagagaaacccccgtgtggagcccggaggcaggtatcgaccagcaggatgcgagcctaggagccggacggctatcatcgtgcctcaccgtgcacgagagcaccatctaagattgctcttatatcacttgcatccttttcttcagcgacaacagttggcttatggcatctacgttatccatcaggccggtaacgggaccttcaacagggctaagctgctgaacgtgggcgtgagggaagcgctgagggacgaggagtgggactgcctgttcctccacgacgttgaccttctgccagaaaatgaccacaatctttacgtttgtgatcctcgaggcccacggcatgttgccgtggccatgaacaaattcggttacagcttgccttacccacagtatttcggaggagtctccgctctcacgccagaccagtacctgaaaatgaacgggttccccaacgagtattggggttggggtggtgaggacgacgatatcgcgacacgggtgcgtttagctggcatgaagataagtcgacctccaacgtctgtcggccactacaaaatggtgaaacacaggggtgataaggggaacgaagagaacccccaccgctttgatctgctggtgagaacacagaatagttggactcaggacggtatgaactcgttaacttaccaactgctcgcgagggaattggggcctctgtacacaaacataacagccgacatcgggacggaccctcgaggtcctagggcaccctcagggcctcgctatccgcctggctcctcccaagcgtttaggcaggagatgctccagagaaggccaccggcacgcccaggaccccttagtacagctaatcacacagcgctgcgcggatctcattag

SEQ ID NO: 246153 - DNA, 1113 bp, synthetic construct
  misc_feature 1..1113: note = Description of Artificial Sequence: Synthetic coding sequence
  source 1..1113: mol_type = other DNA
atgctccgaagattgctcgagcgcccatgcacactcgcattgttcggcagggaccagggacccacattcgactactcccacccgagggacgtctatagcaacctgtcacatctaccgggtgccccaggagggcctcccgcaccacaggggctcccctattgccccgaaagaagccctctactggttggaccagttagcgtgtccttttccccagtcccatcactggctgagatagtagagaggaatcctcgagtcgaacccggtggacggtacagacccgctggatgcgagccaagaagccgtaccgccattatcgtgccccacagagccagggaacatcacctcagattactactctatcatctccatcccttcctccagagacagcagttggcttacggaatttacgtgattcaccaggctggaaacggcactttcaatcgggcaaagctgttaaatgtgggggttcgggaggcactgagagacgaggagtgggactgccttttcttgcatgacgtcgacctattgccagagaatgatcataatctgtacgtgtgcgatccccgaggccctaggcatgtggccgttgccatgaacaaattcggctacagcctgccttacccccagtatttcggtggggtgtcggccctgactcccgatcagtaccttaagatgaatgggtttcccaacgagtattggggttggggcggagaggatgatgatatagcaactagagtgcgtctcgctgggatgaaaatttctcggccacccacctcggtcggtcattataaaatggttaagcatcggggtgataagggcaacgaagagaaccctcaccgcttcgatctgttggtgcggactcagaattcctggactcaggatgggatgaactctttaacataccaactgctcgctcgcgagcttggacccctgtataccaatatcacggctgatattggcactgatccgcgaggtccacgggcaccctccggccctcggtatcctccaggctccagccaagctttcagacaagaaatgcttcagcgacggccacctgccaggcccggacccctttcgacagctaatcacaccgccctgcggggttctcactag

SEQ ID NO: 246154 - DNA, 684 bp, synthetic construct
  misc_feature 1..684: note = Description of Artificial Sequence: Synthetic coding sequence
  source 1..684: mol_type = other DNA
atgttacgtcgattgctggagagaccctgcacgctggctctgctggtaggctcacaactggccgtcatgatgtacctgtccttaggtggatttaggagtctgtcagctttgttcggtagggatcagggcccaacattcgactatagccacccaagagatgtgtacagcaatctctctcatctccctggcgctccgggaggtcccccagctcctcagggcctgccttactgcccagagcgaagccccctgctagtgggcccagtgagcgtgtccttctctcctgtgccttctctggctgagatagtggaacgaaatcccagagtagagcccggtggcaggtatagacccgctggctgcgaacctcggtcccggactgccatcattgtcccgcacagggcaagagaacatcatctgaggctgctgttgtatcacctccacccattcctgcagagacagcagttggcttatggtatctacgtgattcatcaggccggaaatgggacgttcaaccgtgcaaaactgctgaatgtcggagtaagagaagccctgcgcgacgaggaatgggattgtctgttcttacacgatgtagatctgctccccgagaatgatcacaacttgtacgtttgcgaccctagggggccaaggcacgtggcggtcgcaatgaacaagtttggatataggtag

SEQ ID NO: 246155 - DNA, 1035 bp, synthetic construct
  misc_feature 1..1035: note = Description of Artificial Sequence: Synthetic coding sequence
  source 1..1035: mol_type = other DNA
atgggcttcaatcttaccttccacctcagttataagtttaggctactgttgttgttaactctttgcctgaccgtggttgggtgggcaacttctaactactttgtgggagccatccaagagatcccaaaggccaaggagtttatggccaactttcataagactctcatactcggtaaaggaaagacgctgaccaatgaggccagcaccaagaaggtggagctcgacaattgcccaagtgtgagtccatacttgcggggtcagagcaaattgatcttcaaaccggacctcaccttggaggaagttcaggccgaaaatcccaaagtctctcgcggtcggtataggccccaggagtgtaaggctctccagagggttgcaattctcgttccccaccgaaatagggaaaaacacttaatgtacctgctcgagcacttacacccttttctccagcgacagcagctggattacggaatttatgtcatccaccaggcagaagggaaaaagtttaatagagcaaaactcctgaatgttggctacctggaagcgctcaaagaagaaaactgggattgctttatttttcacgatgttgatctggtccccgagaacgattttaacctctacaaatgcgaagagcatcctaaacatttggtcgtcggtcggaacagcacggggtaccggcttcggtatagcggatatttcggcggtgttaccgctttgtctcgcgagcagttctttaaggttaatggcttcagcaataattattggggatgggggggtgaggacgatgatctgcgcctgagggtggagctgcagagaatgaaaattagcaggccgctccccgaggtgggaaagtacacgatggtattccacacccgcgataagggaaacgaagtgaatgccgagcgaatgaagcttctacaccaagtgtctcgagtctggcgcaccgacggactttcttcatgcagttacaaactcgtatcagtagaacacaatcctttgtacattaacattacagtggatttctggtttggcgcttag

SEQ ID NO: 246156 - DNA, 1035 bp, synthetic construct
  misc_feature 1..1035: note = Description of Artificial Sequence: Synthetic coding sequence
  source 1..1035: mol_type = other DNA
atgggatttaacttgacatttcacctgtcttataagttcaggcttctgctactactgaccctgtgcctgacagtggtcggctgggcaacctccaactactttgtgggggcaatccaggaaatacctaaagccaaggagtttatggccaactttcacaagacgctcatactgggtaagggcaaaacactaacgaatgaggcctccaccaagaaagtggaactggacaactgcccctccgtttccccctaccttcgcggacagtcaaaacttatatttaaaccggatctgaccctggaggaggtgcaggcagagaaccctaaagtaagtagggggagatatcggccacaggaatgtaaagcactgcaaagggtcgcaatccttgtccctcatcggaatagagaaaagcacctgatgtacctccttgagcatctgcacccctttctgcagagacagcagttggattacggaatctatgtgattcaccaggcagagggcaagaagttcaatagagccaaactcctcaacgtcggatacctagaagcactgaaagaggagaactgggattgctttatttttcacgatgtggacctcgtccccgagaatgattttaatctctataaatgtgaagagcatcccaagcacctggtcgtgggaagaaactccactgggtacagactcaggtatagcggttacttcggcggtgtcacagctctgtccagggaacaatttttcaaggtcaacggatttagcaacaactattggggctgggggggtgaagacgacgatctccggctgcgtgtggagctgcagcggatgaagataagccgcccactaccagaggtaggcaaatatacgatggtctttcataccagagacaagggcaatgaagtgaacgccgagaggatgaaactcttacaccaagtgtcacgggtgtggcggaccgatgggctttcttcttgcagttacaagctcgttagcgttgagcataaccctctgtacataaatatcacggtcgatttttggttcggggcttag

SEQ ID NO: 246157 - DNA, 21 bp, synthetic construct
  misc_feature 1..21: note = Description of Artificial Sequence: Synthetic coding sequence
  source 1..21: mol_type = other DNA
atggggtttaatttgacctag

SEQ ID NO: 246158 - skipped

SEQ ID NO: 246159 - DNA, 168 bp, synthetic construct
  misc_feature 1..168: note = Description of Artificial Sequence: Synthetic coding sequence
  source 1..168: mol_type = other DNA
atgggattcaacctgacttttcatctgtcatacaaattccggcttctcttgttattgaccctgtgtctgaccgtcgtcggttgggcgacctcaaactatttcgtgggcgctattcaagaaatcccaaaggccaaggaattcatggccaacttccacaagacgttgtag

SEQ ID NO: 246160 - DNA, 66 bp, synthetic construct
  misc_feature 1..66: note = Description of Artificial Sequence: Synthetic coding sequence
  source 1..66: mol_type = other DNA
atgggatttaacttgacctttcacctatcgtacaaatttagactgttactgctgctgacactatag

SEQ ID NO: 246161 - DNA, 411 bp, synthetic construct
  misc_feature 1..411: note = Description of Artificial Sequence: Synthetic coding sequence
  source 1..411: mol_type = other DNA
atggggtttaaccttacctttcatctgagttacaagttccgattacttctgctccttactctctgcctaacagtggtgggctgggccacgagcaactattttgtgggcgctatacaggagatccctaaagcgaaggagttcatggctaatttccataagactcttattctcggaaaggggaagaccctcaccaacgaagccagcacaaaaaaggtagagctagacaattgccctagtgttagcccatatctcagaggccagtccaagctgatttttaaaccagatctgacgctcgaggaagtgcaagctgaaaatccgaaggtctcacgtggtcgatacaggcctcaggagtgcaaggccctccaaagggtcgcaattctcgtgcctcaccggaatcgagagaagcactag

SEQ ID NO: 246162 - DNA, 357 bp, synthetic construct
  misc_feature 1..357: note = Description of Artificial Sequence: Synthetic coding sequence
  source 1..357: mol_type = other DNA
atggggttcaacttaaccttccacttaagttataaattcaggctgctgttgttgttaactctttgtttgactgtagtagggtgggcgacgtctaattatttcgttggagctatccaggagatccctaaagcaaaagaattcatggctaactttcacaaaaccctcatcttgggaaaagggaagactctcacaaatgaagctagcaccaaaaaggtggagctcgacaattgcccgtcagttagtccttacctgcggggacagtctaagctgatcttcaagcctgacctcactctggaggaggtgcaggccgagaacccgaaagtgtcgagaggcaggtataggccccaggaatgctag

SEQ ID NO: 246163 - DNA, 1035 bp, synthetic construct
  misc_feature 1..1035: note = Description of Artificial Sequence: Synthetic coding sequence
  source 1..1035: mol_type = other DNA
atgggttttaatctcacatttcacttgagctataagttccggctgcttctcctcctcaccttatgcttgacagttgtggggtgggcgacaagcaactattttgttggagccattcaggagatccccaaagccaaggagtttatggcaaacttccacaaaaccttaatactgggaaagggtaagacccttacgaatgaggcctccactaagaaggttgaactggacaactgcccgtcagtgagtccgtatctacgcggtcagtccaaactgatttttaagcccgacctgaccctcgaggaagtgcaggccgaaaatccaaaggtttctagaggcaggtatcgacctcaggagtgcaaggctctgcagagggttgccatactggtcccacacaggaatagggaaaagcatctgatgtacttgctggagcacctgcatccgttcctacagaggcaacagttagactacggcatctatgtaatccaccaggccgaaggaaagaagtttaatcgtgctaaacttttaaacgtgggttacctggaagctctcaaggaagagaactgggactgttttatctttcatgacgttgatctagtacctgagaacgacttcaatctgtacaaatgcgaagaacacccaaagcatctggtggttggccgaaactccaccggctaccggctgcgctatagcggatactttggcggagttaccgctttatcaagggagcagttctttaaagtaaatggattctccaataattactggggctggggaggcgaagacgacgacttaagactgcgcgtggaactgcagcgcatgaaaataagtcgccctcttcctgaagtgggtaaatacacaatggtctttcacacaagggataaaggaaatgaggtgaacgcagaacgaatgaagctattgcaccaggttagcagagtttggcgaaccgacggcctgtcttcctgctcttacaagctggtgtccgtggagcacaaccccctgtatatcaacataactgtcgatttttggttcggcgcttag

SEQ ID NO: 246164 - DNA, 129 bp, synthetic construct
  misc_feature 1..129: note = Description of Artificial Sequence: Synthetic coding sequence
  source 1..129: mol_type = other DNA
atgggcttcaacttgacttttcatttgtcatataaattccggctcctgctcttgctgacactctgtcttactgtcgtaggctgggccactagcaactatttcgtaggcgcaatccaggaaattccttag

SEQ ID NO: 246165 - DNA, 1167 bp, synthetic construct
  misc_feature 1..1167: note = Description of Artificial Sequence: Synthetic coding sequence
  source 1..1167: mol_type = other DNA
atgagggccagacggggactgctgcgcctgccacgtagaagccttctcgccgcactctttttctttagcttgtcaagtagcttgctgtactttgtgtatgtagcgcctggcatagtcaatacatatttgtttatgatgcaggcgcaagggatcttaattagagacaatgtgcgcacaatcggcgctcaagtctacgaacaggtgctcagatctgcctacgctaagaggaacagcagcgtcaatgattctgactatcccctggatttaaatcacagcgaaacattcctgcaaactacgacgttcctcccagaagacttcacctattttgctaatcacacttgtcctgagaggcttcctagtatgaaggggcctattgacatcaacatgtctgagattggcatggactacatacacgagcttttttctaaagatccgaccataaagctcgggggtcactggaagccgagcgattgcatgccgagatggaaagtagccattcttattccctttaggaaccgccacgagcacttgccagtactgttccggcatcttctcccaatgctccagcgccagcgactgcagttcgcattttacgtcgtggaacaggtcggtacgcagcctttcaaccgggcaatgctgttcaatgttgggttccaggaggctatgaaggatctggactgggactgtctgattttccacgatgtggatcacatacctgagagcgaccgcaactattatggctgcggacaaatgcctaggcatttcgcaacgaagctagataaatacatgtatctgcttccctacacggagttctttggcggagtcagtggattgaccgtcgagcagttcagaaaaatcaacggatttcccaacgctttttgggggtggggcggtgaagatgacgacctgtggaaccgagtccaaaatgccggatactccgtgagtcgcccagagggagatactgggaaatacaaatctattccacatcaccacagaggagaggttcagttcctgggcagatacgcactcctgaggaagtcaaaggagcgccagggcctggatggccttaacaatctgaactatttcgccaacatcacatatgatgccctgtacaagaacatcaccgtgaatctgacaccggagctggctcaggtcaacgagtattag

SEQ ID NO: 246166 - DNA, 1032 bp, synthetic construct
  misc_feature 1..1032: note = Description of Artificial Sequence: Synthetic coding sequence
  source 1..1032: mol_type = other DNA
atgtcggtactgaggagaatgatgagagtttccaataggtctcttctagctttcattttctttttcagtctgtcatcttcttgtctgtatttcatctatgtcgccccaggcatagattatccagagggcaacaattccagcgactatctggtgcagacaaccacgtatctgcctgaaaatttcacctattccccctacctgccatgccccgagaagcttccttacatgaggggattcctgaacgtgaatgtgagcgaagtgtcgttcgatgagatccaccagcttttctctaaggacttagacatagaaccaggaggacactggcgcccaaaggattgtaaacctagatggaaagtggcggtgctgatccccttcagaaacagacatgaacatctccctattttctttctccatctgattcccatgctacagaaacagcgtcttgaatttgcgttctacgtgatcgagcagacgggtacccagccctttaaccgcgctatgctgttcaatgttgggtttaaggaggccatgaaggattcagtctgggactgcgtgattttccacgacgtggatcacctgcccgagaatgaccgtaactactatggctgtggcgagatgccaaggcacttcgctgccaaattggacaagtatatgtacatccttccatataaggaattcttcggaggtgtctctggtctgacagtcgaacagttccgcaaaatcaatggttttccaaacgccttttgggggtggggcggagaggacgacgatctgtggaacagagtccactatgccggatacaacgtgacacgacctgaaggtgatctcggcaaatataagagcatacctcatcaccaccgcggagaggtgcagttcttggggaggtataagctgttgaggtattccaaggaaagacagtacatcgacggcttaaataatttgatctatcgacccaagattttggtggacagactatacacaaatatttcagtgaatcttatgccagagttagcaccaattgaggattattag

SEQ ID NO: 246167 - DNA, 1149 bp, synthetic construct
  misc_feature 1..1149: note = Description of Artificial Sequence: Synthetic coding sequence
  source 1..1149: mol_type = other DNA
atgagtgtcttgcggaggatgatgagggtgagcaacaggtctctcctggcatttatcttcttcttctcgctgagctcatcctgcctctattttatctacgttgccccagggattgccaatacttatctttttatggttcaggccaggggaattatgctgagagagaatgtgaagacgattggccacatgattcgcctctacacaaacaagaattctacacttaacggtaccgattatcccgagggaaacaactcctctgattatctggtgcagactactacctatctgccagagaatttcacctattccccctacctaccatgcccagagaagctaccctacatgagaggattcctgaatgttaacgtaagcgaagtatcctttgatgaaatccatcaactgttttcaaaggacttggatattgagcctggaggccattggcgccctaaagattgcaaaccacggtggaaggtggccgtccttatcccttttcggaaccgccatgagcatctgccgatctttttcctgcaccttatcccgatgctccagaaacagcgtctcgaattcgccttttatgtgatcgagcagacaggaacacaaccctttaaccgcgctatgctcttcaacgttggctttaaagaagctatgaaagacagcgtttgggactgcgtgattttccatgacgttgatcacttacccgagaatgaccgaaactactatggatgcggggagatgcctaggcacttcgctgccaaactggataagtatatgtatatcctcccctataaagagttcttcggcggagtcagcgggctgactgttgagcaattccggaaaatcaatggattccctaatgccttttggggatggggtggagaagacgacgacctgtggaaccgcgtgcattacgccggatataatgtgactaggcccgaaggcgacctcggcaaatataagtccatacctcaccaccatagaggtgaagtccagttcctcggtcggtataaacttctgcgctactccaaggagcgtcagtatatcgacggactaaacaacctgatttaccgcccaaaaatcttagtggaccgcctgtacacaaacattagcgttaacctgatgccggagctcgcccctatagaagactactag

SEQ ID NO: 246168 - DNA, 1032 bp, synthetic construct
  misc_feature 1..1032: note = Description of Artificial Sequence: Synthetic coding sequence
  source 1..1032: mol_type = other DNA
atgagtgttctgcggagaatgatgcgggtctcaaatcgatctctgttagcctttattttttttttcagcttaagcagcagctgcctgtatttcatttatgtggccccaggaatcgctaatacatatctgtttatggtccaggctagggggattatgctgcgggagaacgttaagaccattgggcacatgatcagactgtatactaataaaaattcgaccctcaacggcaccgactacccagagggcaacaactctagcgactacctggtacagacgacaacttacctgccggagaacttcacatacagcccttatctaccctgtccggaaaagctgccttatatgaggggcttcctgaatgtgaacgtgtctgaagtctcattcgacgaaattcatcaactgttctctaaggaccttgatatcgagccaggcggacattggaggcccaaggactgcaaacctagatggaaaaccggcacccagcccttcaatcgagctatgctgttcaatgtgggattcaaggaggcaatgaaagacagcgtttgggactgcgtgatattccatgacgtcgatcatttacctgaaaatgatcgcaactactatgggtgcggcgagatgcctcgccatttcgcagctaagttagataagtacatgtacatactcccgtataaagaattctttggcggtgtgagtggtctcactgtcgaacaatttcgtaagattaacggatttccaaatgcgttctgggggtggggaggagaagacgacgatctgtggaatagggtgcactacgccggatataatgttactcgacctgagggagacctgggaaagtataagtctattccacatcaccaccgcggtgaggtgcagttcctcggtaggtataaactcctgcggtatagcaaggaaagacagtatatcgatggcctgaataacctgatctaccgtccaaaaattctagtcgatcggctctacacgaatatttctgttaatttaatgccagaacttgcccctatagaagattattag

SEQ ID NO: 246169 - DNA, 1047 bp, synthetic construct
  misc_feature 1..1047: note = Description of Artificial Sequence: Synthetic coding sequence
  source 1..1047: mol_type = other DNA
atggcagaaaaagtgctagtgactggcggagcgggttatatcggcagtcacacagtgctagagttgctcgaggccggttacctgcccgtggtgattgacaactttcacaatgcttttcgaggaggagggtcgcttcctgagtcattaaggagagtccaagagctgaccgggagatccgtggagttcgaggaaatggacatcttggaccagggcgctttacaaagactcttcaaaaagtactccttcatggccgtaattcatttcgccggtctcaaggcagtcggcgagtccgtacagaaacctctggattactatcgcgtcaatctgactgggacaatccagctactggaaatcatgaaggcgcacggcgtgaagaacctggtgttcagctcatctgccactgtgtatggcaaccctcagtatctgccactggatgaggctcatcccacagggggttgcaccaacccttacggcaaatcgaagttctttatcgaggaaatgataagagacctgtgtcaggccgataaaacatggaacgccgttctgcttcgttacttcaatccaaccggtgcgcacgcttccggctgcattggcgaggatccacaagggatcccaaacaatctcatgccttatgttagtcaagttgctatagggaggagagaagctctcaacgtctttggcaacgactatgacacagaggacggcacaggcgtgagggactacatacacgtggtcgacctggcaaaaggacatattgcagctcttcggaagctcaaagaacagtgcggttgtcggatctataacttaggcactggcacaggctacagcgtccttcaaatggttcaagccatggagaaggcctcaggaaaaaaaattccatataaggtggtcgccaggagagaaggagacgtcgctgcatgctatgcaaaccctagcctggcccaggaggagctgggctggacagccgcacttgggctcgataggatgtgtgaagatctgtggcgctggcagaagcaaaatccgtccggctttggcacccaagcctag

SEQ ID NO: 246170 - DNA, 777 bp, synthetic construct
  misc_feature 1..777: note = Description of Artificial Sequence: Synthetic coding sequence
  source 1..777: mol_type = other DNA
atggatattctggatcagggagctctgcaacgcctttttaagaagtatagtttcatggctgtgattcattttgcaggtctcaaagctgtcggcgagtctgtgcaaaaacccctagactattacagagtcaacctgaccggcactattcaactgctggagattatgaaagcccatggcgtgaagaatttggtgttttcatcctccgcaacagtgtacgggaatccacagtacttgcctctcgacgaagcacacccaactggcggatgcacaaacccttatggcaaatctaagttttttatcgaggagatgatcagggacctgtgccaggcggacaaaacttggaacgctgtgttgttgcgatacttcaatcccactggagcacatgcatccggatgcataggggaggatccacagggtatcccaaataacctgatgccctacgttagccaagtagcaatcgggcgaagagaagccctcaatgtttttggcaacgattatgatacagaggacgggactggcgtacgcgattacattcatgtggtcgacctcgcgaagggccatattgcagcactccgcaagctgaaagaacagtgcggatgccgtattccatacaaagtcgtcgcccgacgtgagggagatgtggctgcttgttatgcaaatccttccctggctcaggaggagcttggatggactgccgcattgggattagacaggatgtgcgaggacttatggaggtggcaaaagcaaaaccctagcggattcggcacccaggcgtag

SEQ ID NO: 246171 - DNA, 684 bp, synthetic construct
  misc_feature 1..684: note = Description of Artificial Sequence: Synthetic coding sequence
  source 1..684: mol_type = other DNA
atggatatcctcgaccagggcgctctgcagagactgtttaagaagtacagcttcatggcggtgattcacttcgccggtctgaaggcagtgggcgaatctgtgcaaaagcccctggactattatcgcgtgaacctgacgggtaccatccagttgctcgaaataatgaaggctcacggcgtcaagaatcttgtcttctcatcgtctgccacggtctacggtaacccccagtatctgccactggatgaggcccatcccacagggggttgtactaacccttacggaaagagcaaattcttcatcgaggagatgatacgcgacttgtgtcaagccgacaagacctggaacgctgtcctgttgagatatttcaatcccaccggtgcccacgcatccgggtgcataggcgaggacccccagggtatacccaataacctgatgccctatgtttcacaggtagcgatcgggagaagggaggctctaaatgtgtttggcaacgactacgatacagaggatggcaccggcgtacgtgactacatacatgtcgtcgatcttgccaaaggtcacattgcggcattacggaagctcaaggaacagtgcggctgtcgaatttacaatctcggcaccgggaccggatactcggtattacagatggtgcaggccatggagaaagcctcgggaaaaaagtag

SEQ ID NO: 246172 - DNA, 588 bp, synthetic construct
  misc_feature 1..588: note = Description of Artificial Sequence: Synthetic coding sequence
  source 1..588: mol_type = other DNA
atggcagaaaaagtgctggtgactggaggtgctgggtacatcggtagccatacagtcctggagctcctggaggctggataccttcccgttgtaattgacaactttcataacgccttcagaggcggtggaagcttgccggaatctttaaggcgggtgcaagagctcactggcaggtctgttgaattcgaggaaatggacatcttggaccagggggctctgcagcgcctgtttaagaagtacagtttcatggccgttatacacttcgccggtctgaaagcagtgggcgaaagcgtgcagaagcctcttgactactatcgagtgaatctcaccggcacaatccagctgctggaaatcatgaaggcacatggagtcaaaaatctcgtgttctccagtagcgccacggtgtatggaaatccacagtatctgccccttgacgaagctcatcccacaggtgggtgtaccaatccatatgggaaaagtaagttctttatcgaggaaatgatccgggacctttgccaggctgacaaaacatggaacgccgtgctcctaagatattttaatcctaccggagcccacgcttcaggttag

SEQ ID NO: 246173 - DNA, 720 bp, synthetic construct
  misc_feature 1..720: note = Description of Artificial Sequence: Synthetic coding sequence
  source 1..720: mol_type = other DNA
atggacatcttggaccagggcgcactccagcggctgttcaaaaagtactcttttatggccgttatacattttgctggtctgaaggcagttggagagtcagtgcaaaaacccctggactactatcgtgtgaaccttacaggtacaatccagttgcttgaaatcatgaaagcacacggagtgaaaaatctcgtcttcagttctagtgctactgtgtacggcaacccacagtacctgccccttgatgaggcacatccaaccggcggttgtaccaatccctatggcaagagtaaattctttatagaggagatgatcagagacctgtgtcaggccgacaaaacctggaatgccgttttgctccgctatttcaaccccaccggagctcatgccagcgggtgtattggcgaggacccccaggggataccaaataatcttatgccctacgtgtctcaggttgctattggacgcagagaggctctcaatgtctttgggaatgactacgataccgaagatggcaccggggtgcgggactatatccacgtggtggaccttgccaagggtcacatcgcagcccttcggaaactcaaagaacaatgcggctgccgtattccctataaggtggttgcacggagagagggggacgtggccgcatgttacgccaatcccagcctggcgcaagaagagctgggctggactgccgcattgggcttagaccgtatgtag

SEQ ID NO: 246174 - DNA, 585 bp, synthetic construct
  misc_feature 1..585: note = Description of Artificial Sequence: Synthetic coding sequence
  source 1..585: mol_type = other DNA
atggccgagaaggttctggtcactgggggagcgggttacattggaagccatacagtgctggaattgttggaggccggttaccttccagtcgttatagataactttcataacgctttcaggggaggcggttcgttaccagagagcctgaggagagtgcaggaattgactggtaggagcgtcgagttcgaagaaatggacatcctcgaccagggagcactccaaagactcttcaagaaatactcatttatggcagtgattcacttcgctggactgaaagcggtgggcgagagcgtgcagaaaccgctagactattatagggttaacctcaccggcacaattcaactacttgagatcatgaaagcacatggtgtcaagaatctcgtgtttagttcctctgccacagtttacggcaatccccagtatctgccgttagatgaagcgcacccaactgggggatgtacaaacccgtatggcaaatccaaattctttattgaagagatgatcagagatctatgtcaggcagacaagacctggaatgccgtccttcttaggtattttaatccaaccggcgctcatgcatcctag

SEQ ID NO: 246175 - DNA, 327 bp, synthetic construct
  misc_feature 1..327: note = Description of Artificial Sequence: Synthetic coding sequence
  source 1..327: mol_type = other DNA
gttgctattggcaggagggaggctctgaatgtgttcggcaatgattacgacacagaagacgggaccggtgtccgcgattacattcatgtcgtggacctggcaaaagggcatatcgcggcactcagaaaactgaaggagcaatgcggctgccgcataccctacaaagtggtcgcaagacgggagggcgacgtagctgcctgctacgccaatccttccctggcccaagaggagctggggtggaccgctgcactgggcctggacaggatgtgtgaagatctgtggaggtggcagaagcagaatccaagcggattcggcacccaggcttag

SEQ ID NO: 246176 - DNA, 1119 bp, synthetic construct
  misc_feature 1..1119: note = Description of Artificial Sequence: Synthetic coding sequence
  source 1..1119: mol_type = other DNA
atgaagtatttgcgtcataggagaccaaacgccactctgatcctcgccatcggggcttttactctgctattgttctcccttttggtgagcccacccacttgtaaggtgcaggagcagccccctgccatccccgaggccctggcctggcccacccctccaacaaggcctgccccagccccatgccatgctaacacctcaatggtcacgcatccggatttcgccacccagccacaacacgtacagaattttctcctctatagacactgcaggcacttccctctcctacaggacgtgcccccatcaaaatgtgctcagccggttttcttgctgttagttatcaagtcgtcaccctccaattacgtcagaagggagctgctgcggcgtacttggggcagagagcgtaaggtgagagggctccagctccggctgttgttcctcgttggcacggcctcaaatcctcacgaagcgcgaaaggtgaaccgtttgttagagcttgaggcccagacccacggggatatactacagtgggattttcacgatagctttttcaatctgacactcaagcaggtgctctttctgcaatggcaggaaacaagatgtgctaatgcctcctttgtgctgaacggagacgacgacgtcttcgctcataccgacaatatggtgttttacctccaggaccacgatcccggaagacacttgttcgtgggccagctgattcagaacgtgggcccaattagggctttttggtctaaatactacgttccggaagtggtgactcagaatgaacgctatcctccttattgtggaggcggaggctttctactgagcagatttactgctgccgcactgcggagagccgcacatgtgttagatattttccccatcgatgatgtgttcctgggtatgtgtctagagctggaggggctcaaaccagcatcacattccggaatccgcacctccggagttcgcgcaccaagccagcggttatcctcatttgatccgtgcttttatcgcgatctgctgctcgtccacaggtttctcccctacgagatgctgctcatgtgggacgctctgaatcagcccaacctcacctgtggcaaccaaacgcagatatattag

SEQ ID NO: 246177 - DNA, 1137 bp, synthetic construct
  misc_feature 1..1137: note = Description of Artificial Sequence: Synthetic coding sequence
  source 1..1137: mol_type = other DNA
atgttgcctccacaaccgtcggctgcccaccagggacggggtggccgttctggtttacttcccaagggcccagcaatgctgtgccgtctgtgctggttggtgagttatagcctcgccgtcctgttattgggctgcctgttgttcctacgcaaggccgcaaagcctgccggagacccgactgctcaccagcccttctgggcgccaccgacacccaggcattcacgctgcccgccaaaccacaccgtatcatcagcttccttgtctctcccaagtagacacaggctgttcctgacatatcgacattgtaggaatttcagtatcttgctggaaccaagcggctgcagtaaggataccttcctcctgctcgctatcaagtcacagcctgggcacgtggagcggagagcagctatccggagcacctgggggagagtcgggggatgggcacgaggacgtcagctgaaactggtatttttgctcggcgtagctggcagtgccccacctgcgcaactcttagcatacgagtctcgcgaatttgacgatatcttgcagtgggacttcactgaagacttttttaatctgactctgaaggagctgcacctccagcgctgggtggtggcagcctgcccacaggcgcatttcatgctcaaaggggatgacgacgtgttcgtgcacgtgccgaacgtgttggagttcctggacggatgggatccggctcaggacctgctggtgggcgatgtgatccgtcaagccctgcccaacaggaataccaaagtaaaatactttatcccccctagcatgtatcgtgccactcattaccccccttacgctggtggcggtgggtatgtcatgtcacgagcaaccgtccgaagacttcaggccatcatggaagatgcagaactcttcccgatagacgatgtcttcgtgggcatgtgcctgcggagactggggctcagtccaatgcatcacgcgggatttaagacatttggaatccggagacctctcgacccactggatccctgtctgtaccgaggattgctactggtgcacaggctgtccccactggaaatgtggacaatgtgggcactagtcactgatgaaggtttaaagtgcgcggctggacccataccccagagatag

SEQ ID NO: 246178 - DNA, 1062 bp, synthetic construct
  misc_feature 1..1062: note = Description of Artificial Sequence: Synthetic coding sequence
  source 1..1062: mol_type = other DNA
atgttatgccggttgtgctggctcgtgagttacagcctcgcggtactgttgttgggatgcctcctgttcttacgcaaggctgctaaacccgcaggagacccaaccgcgcaccaaccattctgggctccaccgacccctagacactctagatgtcctcctaaccacacggtttcaagtgctagtttatcattgccctcccgccatagactgttcctcacataccgtcattgtaggaattttagcatactcttggaaccaagcggctgcagcaaagatacattcctgctcttggccatcaaatcacagcctggccacgtcgagcgcagagccgctattcgctcgacctggggccgagtagggggatgggccagaggacggcagctgaagttggtgttcctcttgggggtggccggatctgctcctcctgctcagctgctcgcctatgagagccgcgagtttgacgacatcctgcagtgggactttacagaggatttcttcaatctgaccttaaaagagctgcatctgcagcggtgggtggtcgccgcatgcccacaggctcactttatgctcaaaggggatgatgacgttttcgtgcatgtgcccaatgtactagaatttttggacggttgggatcctgcccaggatcttttagtcggggacgtgataaggcaagctctgccgaaccggaacacaaaggtgaagtacttcattccaccctctatgtaccgtgccactcactacccaccctacgcaggcggaggaggctacgtgatgtcgagagctacagtgagaagacttcaggccattatggaggacgcagagcttttccctatagatgacgtttttgtgggcatgtgcctaagacgcctcggactgtcccccatgcaccacgcgggatttaagacattcggtattagaagacccctggacccactggacccctgtctttatcgtgggcttttgctggttcataggctttcgcctctggaaatgtggaccatgtgggccctggtgacggacgagggcttgaaatgcgctgccggacctatacctcagcggtag

SEQ ID NO: 246179 - DNA, 1062 bp, synthetic construct
  misc_feature 1..1062: note = Description of Artificial Sequence: Synthetic coding sequence
  source 1..1062: mol_type = other DNA
atgctgtgtagattgtgctggttggtatcctattcactcgcagttctcctgcttggttgtttgctgtttctcagaaaagctgccaaacccgctggggaccccacagcccaccagcccttctgggcacctccgaccccgcgacatagtcggtgtcctccaaaccacaccgtgtcaagcgcttcactgtcactcccatctcggcaccgccttttcttaacctacagacactgtagaaatttcagcattctgctggaaccctcaggttgcagcaaggacaccttcctgctccttgcaatcaagtcgcagccgggtcacgtcgagaggagggcggcaattcgaagtacttggggtagggtgggagggtgggccaggggtagacagctcaagctcgtgttcctgctcggtgtagccggtagtgcgcctccggcacagctactggcatacgagtctcgcgagtttgacgacattctgcagtgggatttcacagaagatttcttcaatctcacactgaaggagctccatctgcagaggtgggtggttgccgcatgtccgcaggcccatttcatgctgaagggggatgatgacgtctttgtacacgttcctaatgtgctcgagtttctggatgggtgggatccggcacaggatttgctcgtcggcgacgtaatacggcaggccctccctaatcgtaacaccaaagtcaagtatttcatcccaccgtccatgtaccgagccacccattatcctccgtacgcagggggaggtggctacgtgatgtctcgcgcaacggtccggaggctgcaagccattatggaagatgccgaactctttcccatagatgacgtttttgtaggcatgtgtttgcgacgattaggactgtctccaatgcaccatgcgggattcaagactttcggcatccgcagacctctggatccattagacccgtgtctgtatcggggtctcttgctggtgcaccgactctctcctctggaaatgtggacaatgtgggctttagtaactgatgaaggcttgaagtgcgctgcagggcctataccccagcgttag

SEQ ID NO: 246180 - DNA, 1485 bp, synthetic construct
  misc_feature 1..1485: note = Description of Artificial Sequence: Synthetic coding sequence
  source 1..1485: mol_type = other DNA
atgttcgagattaaaaagatctgctgcataggcgctggatacgttggtggaccgacctgctcggtgatcgcccatatgtgccccgagattcgtgtgacagttgtggatgttaacgaatcaaggattaacgcctggaattcacctacactgccaatatacgaaccaggactgaaagaagtggtggagtcatgcagaggcaagaacttgttcttctctacaaacattgacgacgcaattaaagaagctgatttggtcttcataagtgtgaacacacccacgaagacttatggcatgggaaagggaagagctgccgatctcaagtatatcgaggcctgcgcccgacggatcgtacagaactcaaacggatataagatcgtgaccgaaaagtctacagtcccagtgcgagcggcagaatctattcgcagaatttttgacgcaaataccaaacccaatctcaatctccaagttcttagcaatcccgaattcttggccgaggggacagctattaaggacctgaagaaccctgatagggtgctcattggtggtgatgaaactcctgagggccagagggctgtccaagccctgtgtgccgtatacgaacattgggtgccccgtgagaaaatcttgaccactaatacatggagctccgaactgagcaagcttgctgctaacgctttcctcgcccagcggatctcttctattaatagtatttcagcactgtgtgaggccactggggctgacgtggaagaggtggctaccgcaattggtatggaccagcgaatcggtaacaagttcctgaaggcttctgtggggttcggtgggtcttgctttcagaaggacgtgctcaacttggtgtatttatgtgaagcgcttaaccttcctgaagtagctaggtactggcagcaggttatcgatatgaatgattatcaaagacgtcgcttcgcttctcggatcattgactctctcttcaacactgtgaccgacaagaagatcgctatcttgggattcgcgttcaaaaaggacacaggtgatacacgggagagctcctcaatctatattagcaaatatttaatggacgagggcgctcatctccatatctacgacccgaaggtgccaagggaacaaattgttgtcgacttgagccatcccggagtcagcgaagatgaccaggtgagccgcctggtcacaattagcaaggatccctacgaagcttgtgatggcgctcacgcagttgtgatatgcaccgagtgggacatgtttaaggagctggattatgaacgaatacacaaaaagatgctcaaacccgcttttatctttgacggcagaagggtcctagatggtctacacaacgaactccagactattgggtttcagatcgaaacaattggtaagaaagtttcttctaagaggatcccatatgctcccagtggggagatcccaaagttcagtctgcaggacccaccgaacaaaaagcccaaggtctag

SEQ ID NO: 246181 - DNA, 1284 bp, synthetic construct
  misc_feature 1..1284: note = Description of Artificial Sequence: Synthetic coding sequence
  source 1..1284: mol_type = other DNA
atgttcgagattaagaagatttgttgtatcggcgctgggtatgtgggcggacctacttgttcggtgattgcacacatgtgtcccgagatacgagtaactgtggtcgacgttaatgagagtcgcatcaatgcttggaactctcctaccctccctatctacgagccaggcctgaaagaggtagttgaaagctgtagaggaaaaaacctattcttcagtacaaacatcgatgacgctatcaaggaagctgacttagtgtttatctctgtcctgtcaaacccagaattcctcgcagagggtactgcgatcaaggatctcaagaatcccgatcgggtcctcattggcggtgatgagacgcctgaaggccaacgggctgttcaggccctgtgtgctgtatatgagcactgggtgccgagagaaaaaatcctgactactaatacatggtcaagtgagctctccaaactcgccgctaacgcatttcttgctcaaaggatcagcagtattaacagcatttcagctttatgcgaggccactggcgcagacgtcgaggaagtcgcaactgctatcggaatggaccaacgaatcggcaataagtttctcaaagcttccgtggggtttggcggaagctgctttcagaaagatgtgctcaacctagtctacttatgtgaggccctcaacctgccagaagttgcgcgttactggcagcaggtgatcgacatgaatgattatcaacggcgacggtttgcctcacgcatcattgactccctctttaataccgtgaccgataaaaaaatcgccatactcgggtttgctttcaagaaagacaccggggacaccagagaaagctctagcatctacatctccaaatacctaatggacgagggtgctcatctgcatatctacgatccaaaagttccccgagagcagatcgtggtggatcttagccatcctggtgtgtccgaggatgatcaagtatcaagactcgtgacaatatcaaaggatccatatgaggcctgcgacggcgctcacgccgtagtgatttgcactgagtgggatatgttcaaagagttggattacgaaaggatccacaaaaagatgttgaaaccagcctttattttcgacggcaggagggtgctggatggtctccacaacgagctgcagacaataggttttcaaatcgagacaatcgggaaaaaagtcagttctaagcggatcccatacgcaccgtctggcgagatccccaaattttcactgcaggatcccccaaataagaaacctaaggtatag

SEQ ID NO: 246182 - DNA, 168 bp, synthetic construct
  misc_feature 1..168: note = Description of Artificial Sequence: Synthetic coding sequence
  source 1..168: mol_type = other DNA
atgttcgaaatcaagaaaatctgctgcataggagcaggctacgtaggtggacctacctgttcagtgattgcacacatgtgccccgagattagggtcacagtggtggatgttaatgaatctagaataaatgcttggaactcccctactctgcctatttacgaggactag

SEQ ID NO: 246183 - DNA, 258 bp, synthetic construct
  misc_feature 1..258: note = Description of Artificial Sequence: Synthetic coding sequence
  source 1..258: mol_type = other DNA
atgttcgaaattaaaaaaatctgttgtatcggtgctggatacgtgggcggacctacgtgttccgtcattgcccacatgtgcccagagatcagagttaccgtcgtagatgtgaatgagagccgcataaatgcctggaacagccctacattgccaatatatgagcctggtctgaaggaggtggtcgaatcctgcagaggaaagaacttattcttcagcacgaatatcgacgatgcaatcaaagaggccgaccttgtttag

SEQ ID NO: 246184 - DNA, 1485 bp, synthetic construct
  misc_feature 1..1485: note = Description of Artificial Sequence: Synthetic coding sequence
  source 1..1485: mol_type = other DNA
atgtttgagattaagaagatttgctgcatcggggcaggatatgtgggtgggcctacgtgtagcgtgatcgctcatatgtgccccgagattagagtgaccgttgtggatgtgaatgaatccagaataaacgcctggaattccccgaccctgcctatctacgagcccggtcttaaagaagtagttgagtcgtgtcgtggaaaaaacttatttttcagcacgaacatcgacgacgcaatcaaggaagctgatttggtctttatatcggttaatacgccaacaaagacgtatggaatgggaaaaggacgggcagctgatctgaagtacattgaggcgtgcgctagaagaatcgtacagaattccaacggctataaaattgttactgagaagtccaccgtcccagtgcgcgctgccgagtccattcgccgtattttcgatgcgaatactaaacctaacttgaatctgcaagtattgagcaaccccgagttcctggctgaagggacagctatcaaggatctgaagaacccagacagggtgttaatcggtggcgacgagaccccggagggccagagggccgtccaggctctttgcgccgtctatgagcactgggtgccccgagagaaaatactgaccaccaatacctggagttcagagctatccaagctggctgctaacgcattcttggcccaaagaatctcatctattaatagtatttctgccctctgcgaagcaacgggcgctgatgtggaggaggttgcaaccgccatcggcatggatcagcgcattggcaacaaattccttaaggccagtgtgggctttggcggatcttgttttcaaaaggacgttctcaatctagtctatctatgcgaggcgctcaacctgcctgaggttgctaggtattggcagcaggtgatagatatgaacgactaccagagacggaggttcgcatccagaattatcgacagtctgttcaacaccgtaaccgataaaaagattgcgatactcggctttgccttcaaaaaagatacaggagacactcgcgagagctcaagtatctacataagcaaatacctaatggacgagggggctcatctgcacatttacgaccctaaggtgcccagagaacagatcgtggtggacctgagtcatcctggagtgagtgaagacgaccaggtctctaggcttgttactatcagcaaggatccatacgaggcgtgtgacggcgctcacgctgtggtgatctgcaccgagtgggacatgtttaaggagctggattatgaacgtatccacaagaaaatgctcaagccggcattcatttttgatggcaggagagttcttgatgggctgcacaacgagctacagactataggcttccagattgagactatcggtaagaaagtgtcgtccaagagaatcccctacgctccgtctggcgaaatccctaagttctcattacaggacccccctaacaagaagccaaaagtgtag

SEQ ID NO: 246185 - DNA, 1194 bp, synthetic construct
  misc_feature 1..1194: note = Description of Artificial Sequence: Synthetic coding sequence
  source 1..1194: mol_type = other DNA
atggggaaaggcagagccgcagacctgaagtacattgaggcatgcgccaggagaattgtgcagaattcaaatgggtacaagatcgttacagagaagagtactgtgcccgtccgggctgcagagtcaattcgcagaattttcgatgcaaacacaaaaccgaatctgaacttacaggtgctttctaatccggagtttttggcagaagggaccgctatcaaagatctcaagaatcctgatagagtgcttatagggggtgatgaaacacccgaaggtcagcgggcagttcaggctctttgcgccgtatacgagcactgggtgcctcgggagaagatccttaccactaacacttggtcatccgaactttctaaactcgccgcaaatgcctttctggctcagcgtatttcatccataaactctatatcagccctgtgcgaggcgacgggcgctgacgtggaggaggttgccaccgccatcggaatggatcagagaataggtaacaagttccttaaggcgtctgtcggcttcgggggatcctgttttcaaaaggacgtactcaatctggtgtatctgtgcgaggctttaaatttacccgaggttgcaagatattggcagcaagtgatcgatatgaacgattatcagagaagacgcttcgcctcccgtattattgatagtctttttaacaccgtcactgataagaagattgccatattgggcttcgcttttaagaaagacacaggggatacgagggagtcaagtagtatctatatatcaaagtatttgatggacgagggagcccacctgcacatttacgatcccaaggtcccgagggagcagatagtagtggacctttcgcatcccggagtcagcgaggacgaccaggtcagccggctggtcaccatcagtaaggacccatacgaagcctgtgacggcgcacacgccgtggtgatttgtacagagtgggatatgttcaaggagttagactatgagcggattcataaaaagatgctcaaacccgctttcatcttcgatgggcgaagggttttagacgggttgcataacgagctgcagaccatcggattccagatcgaaaccataggcaagaaagtgagcagcaaaagaattccctatgccccatccggggaaattccaaaattttccctgcaggacccccctaataagaagccaaaagtctag

SEQ ID NO: 246186 - DNA, 393 bp, synthetic construct
  misc_feature 1..393: note = Description of Artificial Sequence: Synthetic coding sequence
  source 1..393: mol_type = other DNA
atgttcgagatcaaaaagatatgctgcattggggctggatacgttggcggacccacctgctccgtcattgcacacatgtgtcccgagattcgggtgacagtggtggacgtcaacgagagcagaatcaatgcttggaacagtcccaccctgccaatctatgaacccggtttgaaggaggtggtggaatcgtgcagaggtaagaatctctttttcagcacaaatattgacgatgccatcaaagaagccgatctcgtgtttatctcagtgaatacaccgacgaagacatatgggatgggaaagggaagggctgccgacctcaagtacatagaggcctgtgcacggagaattgtccaaaatagtaatggctacaagatcgtgaccgagaaatcatag

SEQ ID NO: 246187 - DNA, 162 bp, synthetic construct
  misc_feature 1..162: note = Description of Artificial Sequence: Synthetic coding sequence
  source 1..162: mol_type = other DNA
atgtttgaaatcaagaagatctgttgcatcggcgcaggatatgtggggggtcccacttgctcggttatagcccacatgtgccctgagatcagggtaactgtggtcgatgtcaacgaatcccgtataaatgcttggaacagtccaacgctgccaatatactag

SEQ ID NO: 246188 - DNA, 168 bp, synthetic construct
  misc_feature 1..168: note = Description of Artificial Sequence: Synthetic coding sequence
  source 1..168: mol_type = other DNA
atgtttgagattaaaaaaatctgttgtattggggcaggatacgtcggcggtccgacctgtagcgtcatcgcccatatgtgccctgagatccgagttactgtcgtggatgtgaatgagagtcgaatcaatgcctggaacagtcccaccttaccaatatacgaggactag

SEQ ID NO: 246189 - DNA, 462 bp, synthetic construct
  misc_feature 1..462: note = Description of Artificial Sequence: Synthetic coding sequence
  source 1..462: mol_type = other DNA
atgtttgagatcaaaaaaatttgttgtattggggctgggtacgttgggggtccgacctgttctgttattgcccacatgtgtcctgagatcagagttaccgtagtagacgttaacgagagccgcatcaacgcgtggaattctcccactcttcctatttacgaacctgggcttaaggaagtggtggagtcctgcagagggaagaacctatttttcagcacgaatatcgacgatgccataaaggaggctgacctcgtattcatctcagtgaatacccccaccaaaacgtacggcatgggcaaaggacgtgccgctgatttgaagtacatcgaagcctgtgctcggaggattgttcagaactccaatgggtacaagattgtgaccgagaaatcaaccgtccccgtccgcgctgccgagagcatcaggcgtatcttcgacgccaacactaagcccaacctgaattag

SEQ ID NO: 246190 - DNA, 546 bp, synthetic construct
  misc_feature 1..546: note = Description of Artificial Sequence: Synthetic coding sequence
  source 1..546: mol_type = other DNA
atgtggtcttcaggacttcttattcaggacagcactattatgttcgaaataaagaagatctgttgtatcggtgctggatacgtggggggacctacttgctcggtgatagcgcacatgtgccctgaaattagagtcactgtcgtggatgtgaacgaatcacgaatcaatgcctggaattcccccaccctgccaatatatgagcccggactgaaagaggtggtagaatcctgccggggtaaaaacctgttcttctcgactaacatagacgatgccatcaaagaagcggacctggtattcatcagtgttaacacgccgaccaagacttatggcatggggaagggcagagccgcagaccttaaatatatcgaggcctgtgcccgaaggatcgtacaaaatagcaacgggtataaaatcgtcacggaaaaatcaactgtgcctgttagagctgccgaatctatccgcagaatcttcgatgctaacacaaaacctaatctgaacctacaagtcttgtctaatccagagttcctcgccgaggggactgcctag

SEQ ID NO: 246191 - DNA, 1185 bp, synthetic construct
  misc_feature 1..1185: note = Description of Artificial Sequence: Synthetic coding sequence
  source 1..1185: mol_type = other DNA
atggccctcctggacttggctctggagggaatggccgtttttgggttcgtgcttttccttgtcctgtggttgatgcatttcatggctatcatctacacccgactgcacctgaataaaaaagccacagataaacaaccctattctaagctgcctggcgttagcctccttaaacccttgaagggggtggatccaaacctgattaataacctggagacattctttgaactagattatcccaaatacgaggtattgctatgtgtgcaggatcatgacgaccccgctatcgacgtgtgcaagaaactcctcggcaaataccccaatgtggacgctcggctttttattggagggaagaaggtcggcatcaaccctaagataaacaatttgatgccaggctacgaagtcgcaaagtacgacctcatctggatctgtgacagcggcatccgggtgataccagacacattaacggacatggttaaccaaatgactgagaaggtcgggctcgtccacggcttaccatatgtggccgacaggcagggctttgccgcaactctggaacaggtctacttcggaacctcccatccaaggtactatatttccgccaatgtcactggattcaaatgcgttacaggaatgagctgcctgatgagaaaggatgtcctagaccaggccggaggtctgattgcttttgcacaatatatcgcggaagattatttcatggcaaaagccatagcagatcgaggctggcgcttcgcaatgtccacacaggtggccatgcagaacagcggcagttatagtatcagtcagtttcagtctagaatgatcaggtggaccaaactgcgcatcaacatgctgccagctactattatctgtgaaccaatatcggagtgctttgtagcttcacttattattgggtgggcagcgcaccacgttttccggtgggatattatggttttttttatgtgccactgcctcgcctggttcattttcgactacatccagctccgcggagtccagggcggaactctttgtttttctaagctggattacgccgtcgcctggtttataagagagagtatgaccatctacattttcctgtcagcactgtgggatccaaccatttcgtggcgtactggtcgctaccgcctgaggtgcgggggtacagcagaagagatcttagacgtctag

SEQ ID NO: 246192 - DNA, 4667 bp, synthetic construct
  misc_feature 1..4667: note = Description of Artificial Sequence: Synthetic coding sequence
  source 1..4667: mol_type = other DNA
atggggtgcaaaggagatgccagtggtgcttgtgcagcgggtgctcttccagtaaccggggtatgctacaaaatgggggtcctcgttgtgctcacagtattgtggctgttcagcagtgtaaaggcagatagcaaggccataaccacctccctgacaaccaaatggttttccacaccactcctgctcgaggccagtgaatttctggccgaagattcccaggaaaaattttggaacttcgtggaagcttcccaaaatattggcagctctgaccacgatggcaccgactactcctattaccacgcaatcctcgaagcggcttttcaattcctcagcccgcttcagcagaatctattcaagttctgtttgtcgctaagatcatatagcgccacgatacaagccttccaacagatcgccgctgatgaaccaccgcctgaaggctgtaatagtttcttcagcgtacatgggaaaaaaacatgtgagagcgataccctggaagcactcttactgaccgccagcgagcgcccaaagcctttgttattcaagggcgaccacagatatccctcttctaacccagaatctcccgtggtaattttttactccgagatcggatccgaagagttttctaactttcatcgccagttaatctccaaaagtaacgccggaaagattaactatgtgttcagacactatatctttaacccaagaaaggaacctgtatacctttccggatatggcgtcgagctggccattaaatccaccgaatacaaagcaaaagatgatacgcaggtgaagggcacggaggtcaatacaacagtgatcggagagaatgatcccatagacgaggttcagggatttttgttcggaaaactgcgggatctgcaccctgatctcgaaggccaattaaaagagttgcgtaaacatctcgtggagagtactaacgaaatggccccactaaaggtctggcagctccaggatcttagcttccagacagctgcacgaattttagcgtcccccgttgagctagcgttagtggtgatgaaggacctatcccagaacttccccactaaggccagggccatcaccaaaacagccgtgtctagtgagttaagaaccgaagtagaggaaaaccagaagtatttcaaagggacactcggtttacagcctggtgactctgccctattcatcaacggtctacacatggacctggacacccaggatattttttccctgtttgacgtgctcagaaacgaggctcgtgtgatggaaggattgcatcggctcggaattgaggggttatccttacacaacgtactgaagctcaacatacaaccgagcgaagcagactacgccgtggacattcggtcacccgcaattagctgggtgaataacctagaagtggatagccgatacaacagctggccttcttccctccaagagcttctgcggcctacctttcccggtgtgatacggcagattagaaagaatctgcacaatatggtcttcattgtcgaccctgctcatgagaccactgccgaactaatgaataccgccgagatgttcctatccaatcatatccccttgcgcatcggattcatcttcgtggttaatgactctgaggacgttgacggaatgcaggatgctggcgttgctgtgctgcgcgcttataactacgtcgctcaggaggtggacgattaccacgcgttccaaacactgacccacatttataacaaggtgcgtaccggtgagaaggtgaaagtcgaacacgtggtgtccgtgctcgagaaaaaatacccctacgttgaagtgaattcaatcctagggatcgattccgcctacgacaggaatcggaaggaagctaggggctactacgagcagactggcgtgggccctctgcccgttgtgctgtttaatggcatgcccttcgaaagagaacagcttgaccccgacgagcttgagaccatcacgatgcacaagatcttagagactacaacatttttccaacgtgccgtctatctgggagagcttccacatgaccaggacgtggtcgagtatattatgaaccagcccaacgtggtgccccgtatcaactcccggatactcacagcagaacgagattacctggatctcaccgccagcaataacttctttgttgatgattatgccagatttaccattttggacagccagggaaagactgccgcagtcgcaaacagtatgaactatctcacaaagaagggcatgtcctctaaagaaatttacgatgattcctttattcgaccggtcaccttttggatcgttggagattttgacagcccttcaggcaggcagttgctatacgacgcaattaagcatcagaaatcctcaaataatgtgcgcatctccatgatcaataatcccgctaaggagatctcctacgagaacactcaaatttcacgagccatttgggccgcactacagactcaaacgtccaatgcagccaagaacttcataactaaaatggcaaaagagggcgctgccgaggccctggccgcaggcgcagatatcgccgaattttcggtcggcggtatggatttttctcttttcaaggaagtgttcgaatcctccaaaatggactttatcctaagtcacgcggtgtattgcagggatgtgctcaaattgaaaaaggggcaaagggctgtgataagcaatggtcggatcatcgggcctctggaggacagcgagctgtttaatcaggacgactttcatcttctggagaatattatcttgaagacaagtggccagaagatcaagagccatattcaacaactgcgggttgaggaggatgtcgccagtgatctggtaatgaaggtggatgctctcctcagcgctcaacctaaaggggacccaaggatcgaatatcagtttttcgaagataggcattcagcaattaaactccgtcctaaggaaggcgaaacctacttcgatgtcgttgccgtagttgacccggttactcgcgaggcacaaaggcttgcaccactcctgctcgtgctcgcgcaattgattaatatgaaccttcgggtcttcatgaattgtcaatccaagctttcagacatgcccctgaaaagcttctaccgctatgtgctggaacccgagatatctttcacgagcgacaatagtttcgcaaagggcccaatcgcgaaatttctcgatatgccacagtctcccctcttcacgttgaacctcaatacgccagaaagttggatggtggagtctgtgcggacaccatatgacctcgacaacatttacctcgaagaggttgattcagtggtagccgcagaatacgagcttgagtatctcttgttggagggacactgttatgatattaccactgggcagcctcctagaggactgcaatttactttggggacatctgcaaaccccgttatagttgatactatcgtcatggccaacctggggtactttcaactgaaggccaatccaggggcttggatcctgagacttagaaagggacgctccgaggatatttataggatttacagccatgacggcacggatagcccgccagatgcagatgaagtggttattgtactaaataatttcaaaagcaaaatcatcaaagtgaaagtgcaaaagaaggccgacatggtcaatgaggacctcttaagcgacggaacatcagagaatgagtccggcttttgggattcattcaaatggggttttactggacagaagaccgaggaggtaaaacaggataaggacgatatcatcaatatcttttcagtcgcctcaggccatctctacgaacgattcctacgaattatgatgctgtcagtgctcaaaaatactaagacccccgtgaaattctggtttttaaagaattatttgtctcctacctttaaggaatttatcccttatatggctaatgaatataatttccagtacgagctagtgcagtacaaatggcctagatggctccaccaacagactgaaaaacagcgaattatttggggatataagattctatttcttgatgtgctcttccccctggtggtcgacaaatttctgttcgtcgacgccgatcagatcgtcagaacggacctaaaggagctgcgggacttcaacctcgacggagccccatatggatacacaccgttctgcgactcacggagagagatggatggctacagattttggaagagtggctattgggcctctcacctcgccggaaggaagtaccacatcagtgcactgtacgtcgttgatctcaaaaagttccgaaagattgcggctggcgatcgtctacgaggccaatatcagggcctgtcgcaggatccaaattcgctgagtaatctggaccaggacctaccgaacaatatgattcatcaggttcccattaaatccctccctcaggaatggttatggtgtgaaacatggtgcgacgatgcgagcaaaaagagagccaaaacaattgacctgtgcaacaacccaatgaccaaagagccaaagctggaagccgctgtgaggatcgtccccgaatggcaagattatgaccaggaaattaagcaattacagatcagattccaaaaggaaaaggagaccggcgcactatataaggaaaagaccaaggagccttcgcgggaaggcccacagaagcgggaggagcttta

SEQ ID NO: 246193 - DNA, 4595 bp, synthetic construct
  misc_feature 1..4595: note = Description of Artificial Sequence: Synthetic coding sequence
  source 1..4595: mol_type = other DNA
atgggggtgctggttgtccttaccgttctctggctgtttagtagtgttaaagcagatagcaaggctatcacaaccagccttaccacaaaatggttttccacacctcttcttctcgaagcttccgagtttctcgctgaagatagccaggaaaaattttggaatttcgtagaggcttcgcaaaatattggttcaagtgaccatgacggtactgattactcctattaccatgccatcctggaagctgcttttcagtttctgtcacctttgcagcagaatctgtttaagttttgcttgagtctgagaagctatagcgcaactatacaggcctttcagcaaattgctgccgatgaaccaccccctgaaggatgcaatagctttttcagcgtgcacggtaaaaaaacctgcgagtctgacaccctggaggcgctgttgctgacagctagtgagcggccaaagccgctgcttttcaagggtgatcatcgatacccaagcagcaaccctgaatcacccgtcgtaatcttttactccgagatcgggagcgaagagttttctaactttcaccgccagctgatctcaaagtccaacgccggaaaaattaattacgtcttccgtcattacatctttaaccctagaaaagaaccagtttatctctctggttacggcgtagagctggcaatcaagagtaccgaatacaaggcgaaagacgatacacaggtgaagggaaccgaagtgaatacaacggtcattggagagaacgaccccattgacgaggtccaggggttcctctttgggaagctgagagacttacaccctgacctggaagggcagcttaaggagctgaggaaacacctggtggaaagcacgaacgaaatggctccgttgaaggtgtggcaactgcaagatctgagcttccagacagcggctcgtatccttgcgagtcccgtggaactggcgttggtggtgatgaaagacctatcccagaattttcctacaaaggctcgcgcaatcacaaagactgccgtctcaagtgagctgcggactgaggtagaggagaaccagaaatatttcaagggcactctggggctgcagcctggggacagtgccctgttcataaacggactccatatggatctcgacacgcaggacatcttttcattattcgacgtgttgcgcaacgaggcacgggtcatggaggggctgcacagactgggaatcgaggggcttagcctgcataatgtcctcaagctcaatattcaaccatcagaggccgattatgcagttgatattagatcaccggcaatatcatgggtgaataatctggaagtggacagcaggtacaatagttggcccagttctctccaggagcttctccggccaacctttccaggggtcattaggcagatacggaagaatttacacaacatggtgtttatcgtggatcccgctcacgagactaccgccgaactgatgaacaccgcggaaatgttcctgtccaaccatatccccctccgcatcggtttcatattcgtcgtgaacgacagcgaagacgttgatgggatgcaagatgctggagttgctgtcctgagggcttacaactacgtggcgcaggaggttgatgactaccacgccttccagacgttaacccatatctacaacaaggtcaggactggggaaaaagtgaaggttgagcacgtcgtgtccgtgctggagaaaaaatacccatacgtggaggtgaactccattctgggcatcgattccgcctacgaccggaatcgcaaggaggcgagaggatactatgagcagacgggagttggtcccctgcccgtagttctgttcaatgggatgccctttgaaagggaacagttagaccctgatgagctcgaaacaatcactatgcacaaaatactggagacaaccactttttttcagcgagctgtttacctgggggagctaccacacgatcaggatgtggttgagtacattatgaatcaacctaacgtggtgcccaggataaactcaaggatcctgacagccgaacgggattatctggatctgactgcttcaaacaacttttttgtggacgattatgcgagattcactattcttgattctcagggcaagacagccgcagtcgctaactccatgaactatcttaccaaaaaaggcatgtcttcaaaggaaatttacgacgacagcttcattcgtcctgtaacattttggatcgtaggcgattttgacagtccaagcggccgtcagcttttatatgatgctatcaaacatcaaaagagcagcaacaatgtccggatctctatgataaataatcctgcaaaagagatttcttacgaaaatactcagatcagccgtgccatttgggccgctctgcagacccagacgagcaacgctgcgaaaaatttcattaccaagatggctaaggagggcgctgcagaggccttagctgctggagccgatatcgccgagtttagtgtgggaggcatggacttcagcttgttcaaagaggtcttcgaaagttccaagatggactttatactgtcacacgccgtgtactgccgagacgtgctgaaactaaaaaaggggcagcgagccgtgattagcaacggcaggattatcggtcctctcgaggactctgagctgttcaatcaagatgactttcatcttctagagaacatcatattaaaaacttccggacagaagattaagtctcatattcagcagctgcgcgtcgaggaagacgtcgctagtgacctggtgatgaaagtggacgccttgttaagcgctcagcctaaaggagacccgagaatcgagtaccagttttttgaagacagacattcagccataaagctccggcctaaagaaggtgaaacatacttcgatgtcgttgccgtagttgaccctgtgactcgcgaagcccagcgcttagcacccttgctcctcgtgctggcacaactaattaatatgaatctcagggtgttcatgaattgccagagtaagcttagcgacatgccattaaagtctttttacagatacgtattagaacctgagatcagttttacttcagataattcctttgccaagggtcctatagccaagtttcttgatatgccccagtcgccccttttcacactgaacctgaatacgccagagtcctggatggtcgagtctgtacggaccccctatgacctggataacatttatcttgaggaggtggatagtgtggtcgcagctgaatacgagttggaatatcttctactggaagggcactgctacgatattacaacaggacagcccccaagaggcttgcagttcaccctgggcacgtcggccaatccggttattgtggataccatcgtgatggccaatctgggctactttcagctgaaggctaaccctggagcctggatactgaggcttcgcaagggaaggagcgaggatatctacagaatatacagccacgacggtacggactccccacccgatgccgatgaagtggtgatcgtgctcaataactttaagtcgaaaatcatcaaagtaaaagttcaaaaaaaagctgatatggtcaatgaagacctcctctccgatggcacaagcgaaaacgaatccggcttctgggatagttttaagtggggctttaccgggcagaaaactgaagaagtgaagcaagacaaggacgatattattaatatcttttcagtggctagcgggcatttgtacgagcgatttttgcgcatcatgatgctcagtgtacttaagaacacgaaaacgccagtcaaattttggttcttaaaaaattatcttagccctacttttaaagagttcatcccttacatggccaatgagtacaattttcagtatgagcttgttcagtacaaatggcctagatggctgcatcaacaaacagagaagcagagaatcatttgggggtataaaatcctgtttcttgacgtcctgttccctcttgtggtcgacaagttcctctttgtggacgccgaccagatagtacgaaccgatttgaaggaactgcgcgacttcaatctggatggagcaccttacggctatacccctttctgtgattcaaggcgcgagatggatgggtacaggttttggaaatctgggtactgggcgtcacatttggcaggtcggaagtaccacatctccgccctgtacgtggtggatttaaagaaattccggaagattgccgctggagaccggcttcgcggtcagtaccagggacttagccaggatcctaacagcctgagcaacctggaccaagatctcccaaacaacatgatccaccaagtcccaattaagtcactgccacaggaatggctctggtgcgagacgtggtgcgatgacgcatccaaaaagcgcgcaaagacaatagacctctgtaacaaccctatgactaaggagcccaaactggaggccgctgtgcggatcgtgcctgagtggcaggactatgaccaggaaattaaacagctccagatccggtttcaaaaggaaaaggaaacaggagcactgtacaaggaaaagactaaagaacccagtcgcgaggggcctcagaaaagagaggagttgta

SEQ ID NO: 246194 - DNA, 843 bp, synthetic construct
  misc_feature 1..843: note = Description of Artificial Sequence: Synthetic coding sequence
  source 1..843: mol_type = other DNA
atggctcccgcaaaggccacaaatgtggttcggttgctgcttggatccaccgccctttggttatcacagctcgggtcaggaactgtggcagctagcaagtccgtgaccgcccacctggcggcaaagtggcctgaaacaccactgttgctggaggcatcagagttcatggcagaagaatcgaacgagaagttttggcagttcttggagaccgtccaagagctggcaatctacaagcagactgagtcagattactcttattataatctgattctgaaaaaggctggacagttcttagataaccttcatattaacctgcttaagttcgccttttcaataagggcctactctccggctattcagatgtttcagcagatcgccgctgatgagccacccccagatggttgtaatgctttcgtagtcattcataagaagcatacctgtaaaatcaatgagatcaagaagttgctcaagaaggcagcatccaggacacgtccatatctttttaagggggaccataagtttcctactaacaaggagaacctgccagtggtgattctttacgccgaaatgggcacacggactttcagcgcattccataaagtgttaagcgaaaaggctcagaacgaagagattctctacgtgcttagacactacatccaaaagccaagcagccgtaagatgtacttgtccggatatggggtcgaattagccattaaatctaccgagtacaaggccttagatgatacccaagtgaaaacagtaacaaacacaactgtagaggatgaaaccgagactaacgaagtgcaaggctttttgttcggtaaacttaaactcgtctactag

SEQ ID NO: 246195 - DNA, 837 bp, synthetic construct
  misc_feature 1..837: note = Description of Artificial Sequence: Synthetic coding sequence
  source 1..837: mol_type = other DNA
atggccccagctaaggcgacgaatgtagtgcggctcctgcttggatcgactgccctctggctcagtcagttaggatcgggaaccgttgccgcatcaaagtctgtgaccgcccatctggccgctaagtggccagagacccccttgttgctggaggcgtccgaatttatggccgaagagtccaacgaaaagttctggcaatttctggaaacagtacaggaactagccatctataagcagactgaatctgattactcctactacaatctcatcctgaagaaggccggacagtttcttgataatttacatattaacctcttgaagtttgccttctccatacgggcatattctccagccatccagatgtttcagcagatcgctgccgatgaacctccgccagacggatgcaacgcatttgtggtcattcacaagaaacacacatgcaaaattaatgagatcaagaagttgcttaaaaaggcggcatccagaacaaggccctacctcttcaagggcgaccacaaatttccaaccaacaaagagaatctgcccgtcgtgatcctgtacgctgaaatggggaccagaacctttagcgcatttcacaaggtactgtctgaaaaggcccagaacgaagaaatactgtatgtgctgaggcattacattcagaaaccctcatcccgtaagatgtacctctccggctatggcgttgagctggcaattaaatcaaccgaatacaaggccttagatgacacccaggtgaaaactgtcactaatacgaccgttgaagacgaaacggaaacaaacgaagtgcagggcttcctctttgggaagctcaaatcctag

SEQ ID NO: 246196 - DNA, 786 bp, synthetic construct
  misc_feature 1..786: note = Description of Artificial Sequence: Synthetic coding sequence
  source 1..786: mol_type = other DNA
atggccccagccaaagcaaccaatgtagtgagactgttgctcgggtctaccgctctgtggctgtcacagcttggcagcgggactgtagcggcttctaaaagcgtcacagcccacctggctgccaagtggccagagacccctctcctgctggaggcttctgagttcatggctgaggaatccaacgagaagttctggcaattccttgaaaccgtacaagagcttgcaatatataagcaaaccgagagcgactactcatattacaatctaatcttgaagaaagctggacagtttctggacaatctgcatattaacctgctgaagttcgcattttccattcgggcatatagcccagcaatacagatgtttcaacagattgcagccgatgaacctccgcctgatgggtgtaacgcctttgttgtgatccataagaaacacacttgtaagatcaatgaaatcaaaaagctgctcaagaaggctgctagcagaaccaggccatacctcttcaagggagaccataagtttccaaccaataaggaaaacctgccagtcgtaatcttgtatgccgaaatgggcactcgcacattcagtgccttccataaggttttgtcagagaaagcccagaacgaggaaattttatacgtgctcagacattatatccaaaagccatccagtaggaaaatgtatctgtcaggctatggcgtggaattggccatcaaatccacagaatacaaggcgttagacgacacacaagttaaggtctttcaggatcccgaggcattcttttag

SEQ ID NO: 246197 - DNA, 4551 bp, synthetic construct
  misc_feature 1..4551: note = Description of Artificial Sequence: Synthetic coding sequence
  source 1..4551: mol_type = other DNA
atggcacctgcgaaggctactaacgtcgtacggcttttactgggatctactgctttgtggctcagccagctggggtccgggaccgttgctgcgagcaaaagcgttaccgcccatttagctgcgaaatggcctgaaaccccgctccttcttgaggcaagcgaatttatggcggaggagagcaatgagaaattttggcagtttctggagacagtccaggaattggccatctataaacagaccgaaagtgattattcatactacaatctgatactcaagaaagctggtcagttcttggacaacctccacattaacttgctgaaatttgccttcagtatccgggcatactctcctgccatccagatgttccaacagatagctgctgatgaaccaccacctgacgggtgcaatgcttttgtggtaattcacaagaagcatacctgtaagatcaatgaaattaaaaaactcctgaaaaaggcagcatcccgaacgcgcccatatctttttaagggggaccacaagttcccaacgaacaaagagaacctgcccgtggtcatcctctacgcagaaatgggaacacgtacattctctgccttccacaaggttctctccgagaaggcccagaacgaggaaatcttatatgttctgaggcactatatacagaagccatcaagtcgcaaaatgtacctgagcggatacggggttgagctggcaattaagtcgacagagtataaggccctggatgacacccaggtgaaaaccgtgaccaacaccacagtggaggatgaaactgaaacaaacgaagttcaggggttcctcttcgggaagctcaaagagatttacagcgatctgcgggataacctgacggcattccaaaaatacttgattgagagtaacaagcagatgatgcccctgaaagtttgggagctgcaagacctgtcgttccaggccgcaagccagatcatgagcgcgcctgtgtatgactcgatcaagctcatgaaagacatatcccagaacttccctattaaggctaggagcttgactcgcatagctgttaatcaacatatgcgggaagaaattaaggaaaatcaaaaagacctgcaggtgcgcttcaagatacaaccaggggacgctaggctttttattaacggacttcgtgtcgatatggacgtatacgacgcgttctcaattctggacatgctgaagctcgaggggaagatgatgaacggtctgagaaacttgggcattaatggggaagatatgagtaagtttctcaaactgaactctcacatttgggaatatacctatgtgctcgacattcgtcactcctccattatgtggataaacgacctggaaaacgatgatctttacatcacctggcccacttcgtgtcaaaaactcctcaaacccgtgttcccagggagtgtgccgagtatacggcgaaatttccataatctggtgttatttattgacccggctcaggagtatacccttgatttcatcaaactggccgatgtgttttattcccatgaagtgccattgcgaattggctttgtgttcatcctgaatacggacgacgaggtggacggggctaatgatgccggagtcgccctctggcgggcatttaattacatagctgaggaattcgacatctcagaagccttcatctctattgtgcatatgtaccaaaaagtgaaaaaggatcagaatatactgactgtcgacaatgttaagtctgtgcttcaaaatacatttccccacgctaacatttgggatattctgggaatccattccaaatatgatgaggaacggaaggctggggctagcttctacaaaatgactgggctcgggcctttgcctcaagctctctacaatggggagccattcaagcatgaggaaatgaatataaaggagctcaaaatggcagtgctccagcgtatgatggacgccagtgtttatttgcagcgcgaagtgtttctgggcaccctgaatgatagaactaacgccattgacttcctgatggacaggaataatgttgtcccgcgaataaacacactgattctgcggacgaaccagcagtatctaaacctcatatcaacaagcgttactgccgacgtcgaggattttagcacattctttttcctcgacagtcaggacaagagtgcggtcatcgctaaaaatatgtactacttgacccaagacgatgagagcatcatctcagccgtcacactgtggatcatcgcagacttcgacaaaccatcggggcgaaaactgctgtttaatgcacttaaacacatgaagacgagcgtgcattcacggctcggaattatatacaatccaactagcaagattaacgaggaaaacacagccatatcacgcggaatcttagccgcattcctgacccagaaaaacatgtttctgcgcagctttttgggccagcttgcaaaggaggagatagctactgcaatttacagcggggacaagatcaagacctttctcatagaaggtatggacaaaaacgcctttgagaagaagtataatacggtgggcgtgaacatcttccgcactcatcagctgttctgccaagacgttctcaagctgcgaccaggcgagatggggattgtgtcaaacggaagatttctgggccctctcgacgaagacttctacgcagaggacttttacctgcttgaaaaaattactttctcaaatctcggcgagaaaataaagggaatcgttgaaaatatgggcatcaacgctaataacatgtcagactttatcatgaaggtggacgctctgatgtcctccgtcccaaagcgggcttctcgttatgatgtgacattcctgagggagaatcacagcgtaattaagacaaacccacaggagaatgatatgttcttcaacgtgattgccattgtggacccattgacccgggaagcccaaaagatggcacagctgctagtggtgcttggcaagataatcaatatgaaaattaaacttttcatgaactgccggggtcgcctgtccgaggctccattagaaagcttttatcggtttgtccttgagccagaattaatgtcaggcgcaaatgatgtgagctctttaggtcctgttgcaaaatttctggatatccctgagtcccccttactgattttaaatatgatcacgccggaaggttggcttgtggagacagtgcactctaactgcgatctggacaatattcatctcaaagacactgagaagacagttactgccgagtatgagctggaatacctgctgctagagggccagtgtttcgacaaagtgacagaacagccacctcgaggcctgcagtttaccctgggaaccaaaaataagccggcagtagtggacactatcgtgatggcccaccacggatattttcaacttaaggctaaccctggtgcctggattctccgcctgcatcaaggcaagtcagaagacatctatcagattgtgggacacgaggggactgactctcaagccgatttggaggatattatcgtggttttgaattcgttcaaaagtaaaatcctgaaagtcaaagtgaagaaggaaactgataagataaaggaggacatactgactgacgaggacgagaagactaagggcttgtgggatagcatcaaatcatttacagtctctctgcacaaagagaacaagaaggagaaagacgtgctcaatatcttttctgttgctagcggacacttgtacgagagatttctgagaatcatgatgctgtctgtacttaggaataccaaaacacctgtcaagttttggctgctgaaaaactatctctcccccacgttcaaagaggtgatccctcacatggctaaggaatacgggtttcggtatgaactggtacagtacaggtggcccaggtggctcaggcagcaaactgagaggcagaggatcatttggggctataagatcctgtttctcgacgtgctgttcccactggctgttgataagatcatattcgtggatgccgaccagattgttcggcacgatctcaaggagctcagagactttgacctcgacggggcaccctatgggtataccccgttttgtgacagcagacgagaaatggacggatacaggttctggaaaacgggatattgggcatcccacctcctcagacgcaagtaccatatttcagcactctacgttgtcgatttaaagaaatttagacgtattggggctggggaccgcctgcggtcacagtaccaggccctctcccaggatcccaattccctatctaacttagaccaggaccttcctaataacatgatctaccaagtggcgattaagtctctgccacaggattggctgtggtgtgagacttggtgtgacgatgagtcaaagcagagggccaaaaccatagatctctgcaacaaccccaaaactaaggagtctaaactcaaagcagccgctagaattgttcccgaatgggttgaatatgacgccgaaatccgacaacttcttgatcatctcgagaacaagaaacaggacaccattctaacccatgacgagctctag

SEQ ID NO: 246198 - DNA, 1119 bp, synthetic construct
  misc_feature 1..1119: note = Description of Artificial Sequence: Synthetic coding sequence
  source 1..1119: mol_type = other DNA
atggccccagctaaagccactaatgtggtgagactgcttctggggtcaaccgctttatggttgagtcaattgggaagtggaactgtggccgctagcaaatcagttacagcgcatttagcggcaaagtggcctgagaccccactccttcttgaagcctcagagtttatggcagaagagagtaatgaaaaattctggcagtttctagagaccgtgcaggagctggccatctacaaacagactgagtctgattatagctactacaatctgatcctgaaaaaggcaggccagttcctggacaacttacacattaatcttctaaagttcgccttctccattcgggcatacagccccgctattcagatgtttcagcagatcgctgcggacgaaccaccacccgacggctgtaacgcttttgtcgtgatccataagaaacacacctgtaagattaatgagatcaaaaaactactgaagaaagctgccagccggactagaccgtatttatttaaaggcgatcataagtttcccactaacaaggaaaacctgcctgttgtcattctgtacgcagagatgggcactcggacattttcggcctttcataaggttctcagtgagaaggcccagaacgaagaaattctatatgtgttgaggcactatattcagaaaccaagtagtaggaaaatgtatctgtcgggatacggagtagaactagccatcaagtccactgagtataaggcgcttgacgatacgcaggtcaaaaccgtcactaacaccacagtcgaagacgagactgagacgaatgaggtccagggtttcctgttcgggaagttaaaagaaatttattccgacttgagggataacctgaccgctttccagaaatacctgatcgagtctaacaagcaaatgatgccattgaaggtgtgggagctgcaggacttgagctttcaggccgctagccagatcatgtccgccccagtgtatgactccatcaaattaatgaaagatattagccagaactttcctattaaggcaaggttacgcatgaatattctgatttgcttattccagagcaccttgaatgtcaagaatctgcgctcaaggcatctctataacaagacttag

SEQ ID NO: 246199 - DNA, 1527 bp, synthetic construct
  misc_feature 1..1527: note = Description of Artificial Sequence: Synthetic coding sequence
  source 1..1527: mol_type = other DNA
atgtcacgatttgtccaggatctcagtaaagctatgtcacaggacggggcttcccagttccaagaagtcattcgacaagagcttgagctctctgtgaagaaggagcttgagaagatcctaacgactgcctcctctcacgagtttgagcacacgaagaaggatctggacggcttcaggaaattattccatcgcttcctgcaggagaaaggaccatcggtggactgggggaagatacagagaccccctgaggattctattcagccctacgagaagatcaaggccagaggcctgcccgacaacatcagctccgtgttaaataagctggtggtcgtgaagctcaacggtggactgggtacatcaatgggatgtaaaggtcccaaaagcttgattggagtaaggaatgaaaacacttttttggacctaactgtacagcaaattgaacacctgaacaaaacctataataccgatgttcctttagtcctcatgaactctttcaacacggacgaggatacaaagaaaatcttacaaaagtataaccattgcagagttaagatctacacatttaatcagagtagataccctcggatcaataaggagtctctgttgcccgttgctaaagatgtgtcctactcaggggagaatacagaggcctggtacccccctggccatggggatatttatgcctcattctataatagcggcctgttggataccttcataggagaaggaaaggagtacatcttcgtctctaatatcgacaacttgggcgcaaccgtggatctctatattttgaaccacctgatgaatcccccaaatggcaagaggtgtgaattcgtaatggaagtgacgaacaagacccgtgccgatgtgaagggcggaacactgacacagtatgaggggaagctgaggctggtagaaattgcccaggtgcctaaagcgcacgtcgacgagttcaaatcggtgtctaagttcaaaatttttaatactaacaacctgtggatcagcctagctgccgtaaagaggcttcaggagcagaatgctatcgacatggaaataatcgtgaatgctaagaccctggacgggggacttaatgttatccagcttgagacagctgtgggtgctgccattaagtcctttgagaattctttgggcataaacgtgcctagaagcaggttcctccccgtcaaaacaactagcgacttgctcctggtgatgtctaatctttactccctgaacgctgggtcacttacaatgtccgaaaagcgggagttccccaccgtccctcttgtcaagcttggatctagctttaccaaggtgcaagactacctgcggagatttgagtccatccccgacatgcttgagctagaccatctgaccgtgtctggcgacgtgactttcggtaaaaatgtgtctctcaaagggactgtaattatcatcgccaatcacggcgatcggattgacatcccaccgggagccgtgctggagaacaagattgtgagcgggaacctgcggatccttgaccactag

SEQ ID NO: 246200 - DNA, 1494 bp, synthetic construct
  misc_feature 1..1494: note = Description of Artificial Sequence: Synthetic coding sequence
  source 1..1494: mol_type = other DNA
atgagtcaggacggcgcatcccagtttcaagaggttattaggcaggagctggagctgtcagtgaaaaaggaactggagaaaatcctgaccaccgcatcctctcacgagtttgaacataccaaaaaggatctggacggcttcaggaagctttttcataggttcttacaggaaaagggaccctctgtcgactggggaaagatccaaaggccacccgaagattcaatccagccctatgaaaaaatcaaggcacgaggtttgcctgacaatatcagcagcgttctgaataagttggtcgtggttaagctaaacgggggtctagggacttctatggggtgcaagggaccaaagagtctgattggcgtgcggaacgagaacaccttcttggatctcaccgtacagcaaatcgaacatctgaataagacctataatacggatgtcccactggtgctgatgaactccttcaataccgatgaggacactaagaaaatcctgcagaaatataatcactgccgcgtgaagatctataccttcaaccagtctcgctaccccaggatcaacaaggagagcttattgccagtggcaaaagatgtctcttattcgggggaaaatacagaggcatggtatcctcccggacatggtgacatctatgcaagcttctataattccggactgctcgacacgttcattggcgaaggtaaggaatacatatttgtgtcgaacatcgataacctcggagcaacagtggacctctacatactaaaccacctcatgaacccccctaacggcaagagatgcgagtttgtgatggaggtaaccaacaaaacgagggccgacgtcaaagggggaactctcacccagtacgaaggtaagctgagacttgtggaaatcgctcaagtgccaaaggcccacgtggacgagtttaagtccgtttcaaaatttaaaattttcaataccaacaatctgtggatttccctggcggctgtcaagagactgcaggagcaaaacgcaatcgacatggagatcattgttaatgcgaaaacactggatggtgggctgaacgtgatccagctcgaaacagctgtaggtgctgccataaagagcttcgagaactctttggggataaatgtgccacgcagcagattcctcccggtcaagaccacttcagacctattgctggtgatgtcaaacttgtacagtctcaatgccggttctctgacgatgtcggaaaagcgcgaatttccgactgttcctctagtgaagctaggatcatctttcacaaaagtgcaggattatctccgacgcttcgagtcaatcccagatatgctggagcttgaccatctgacagtgtcaggggatgtaaccttcggtaagaatgtatctctgaagggcaccgtcatcatcattgctaaccacggcgaccggattgacattccccctggcgctgtgctggaaaataaaatagtgagcggtaatttgcggatactggaccattag

SEQ ID NO: 246201 - DNA, 1554 bp, synthetic construct
  misc_feature 1..1554: note = Description of Artificial Sequence: Synthetic coding sequence
  source 1..1554: mol_type = other DNA
atgctcctttacccagctggtttctccttcgcctcactgaagagcgatctgtcaaaagcgatgagtcaagatggggcatcacagtttcaagaagtcattcgtcaggaattggagctgtctgttaagaaggaactagagaaaatactgacaactgcaagctctcatgaatttgagcataccaagaaggaccttgacgggttccgaaagctgtttcataggtttctgcaagagaaagggccaagtgtggactgggggaagattcagcgccctcccgaggactccatacagccctatgaaaagattaaagcaagaggcctgccagataacatttcctcagtgctgaacaaactggttgttgtgaagctgaacggcggactcgggacatcaatgggatgtaaggggccaaagtccctgatcggcgtgcgaaatgaaaatacgtttctagatctaacagtgcagcagattgaacatcttaacaaaacctacaataccgacgtgcccctcgtgctcatgaatagtttcaatactgacgaagataccaagaagattctgcaaaaatacaatcactgtcgggttaaaatttacaccttcaaccaaagccgataccctagaattaataaggagtctctactgccagttgcaaaggacgtcagctacagtggggagaataccgaggcctggtacccacccggacatggcgacatctacgcaagcttctacaacagcgggcttctcgatacttttatcggagagggtaaagaatatattttcgtgtcgaatattgacaatctgggcgcaacggtcgacctgtacatattgaatcacctgatgaaccctcccaacggcaagcgctgcgaattcgtaatggaagtcaccaataaaacacgggctgatgtaaagggagggaccctgacacagtacgagggtaaattaaggttagtggagatagcacaggtgccaaaagctcacgtcgatgagtttaagagcgtgtcaaaatttaaaatatttaatactaacaacttatggatttcactggccgcagtgaagcggctgcaggagcagaacgcaattgacatggagattattgttaacgcgaagacactggatggcggattgaacgtgattcagctggagaccgcggtgggggcagcgattaagagttttgaaaatagtctgggaattaacgtgccgagaagcaggttccttcccgtcaagaccactagcgacctgctcctcgtgatgagcaatctgtatagtctcaacgccggatcactgaccatgtccgagaaacgcgagtttccgactgtgccactcgtgaaactggggagtagttttacaaaagtacaggattacttgcggaggtttgaatcaatcccagacatgctggaactggaccacctgacggtgagtggggatgtcaccttcgggaaaaatgtatctctgaaggggacagttatcatcatcgctaaccacggtgaccggattgacataccaccaggggcagtgttagagaataagatcgtttctggaaatctcagaattcttgatcactag

SEQ ID NO: 246202 - DNA, 1494 bp, synthetic construct
  misc_feature 1..1494: note = Description of Artificial Sequence: Synthetic coding sequence
  source 1..1494: mol_type = other DNA
atgtcccaggacggagcgtcccagtttcaagaggttatacggcaggaacttgagctatcggtcaagaaggagctcgagaaaattcttactaccgcctcctcacacgagtttgagcatacaaaaaaggatttagatgggttccgtaagctgttccataggttccttcaggaaaaaggccctagcgtagactggggcaaaatccagagacctcccgaagatagcatccagccgtatgagaaaatcaaggcgcgtggactgcctgacaacataagctccgtgctcaacaagctcgtggtggtgaagctgaatggcggactgggtacctccatggggtgtaaaggccctaagtctctgatcggcgtgcgaaacgaaaacactttcctggacttgacagtccagcaaatcgaacacctcaataaaacatacaataccgatgtgcctctggtgttgatgaactcttttaacacagatgaagatactaagaagatcctccagaagtacaatcattgcagggtcaagatctatactttcaatcagagtcgctaccccaggatcaataaggagtccctgctgcctgttgccaaggacgtttcctactccggggaaaatacagaagcttggtatcctcccggacatggagacatttacgcctccttttataattccggcctgctggacacctttatcggagagggcaaggagtatatcttcgtttctaacatcgacaacttaggcgctacagtggatctgtatatcctaaatcatcttatgaacccccctaacgggaaaagatgtgagtttgtaatggaagtcactaataaaacccgggcagacgtgaaggggggaacactgacccaatacgagggcaagctgaggctggtcgaaatcgcacaggtgcctaaggcacatgtggacgagttcaagtccgtgtccaagttcaaaatcttcaatacgaacaacctctggatcagcctggcggcagtgaaaagattgcaggaacagaatgccatcgacatggagattatcgttaatgccaaaacactggatggcggacttaacgtcattcaactggaaactgcagtgggtgccgcaattaagagtttcgaaaattctcttggcatcaacgtccccagatctcgatttctgcccgtaaaaaccacaagcgacctccttctggttatgtctaacctatactctctcaatgcgggaagcctgacaatgtccgaaaaaagagagttccccacagtgcctctggtgaagctgggctctagcttcacaaaagttcaggactatcttagacggttcgagagcatcccagatatgctggaactggaccacctgacagtgtcaggtgacgtgaccttcggaaagaacgtgtccctgaaagggacagtgatcatcatcgctaatcatggtgatcgcatcgatatccccccaggggctgtgttagagaacaaaatcgtgtcagggaatctccggatactggaccactag

SEQ ID NO: 246203 - DNA, 453 bp, synthetic construct
  misc_feature 1..453: note = Description of Artificial Sequence: Synthetic coding sequence
  source 1..453: mol_type = other DNA
atgagtcaagatggcgctagtcagttccaggaggttatcaggcaggaactggaattatccgtgaagaaagaattagaaaaaattctgacaaccgcctctagtcacgagttcgaacacacaaagaaagaccttgacgggttcagaaaattattccaccgattccttcaagagaagggcccaagcgtcgattggggaaagatccagcgaccgcctgaagatagcatccagccatacgagaagattaaggctagaggactaccagataacatttccagcgtgctgaacaagctggtggtcgtaaaactcaatggagggctgggcacgagtatggggtgcaaaggacccaaatcactcattggcgtccgaaacgagaatacatttctagatctgaccgtacaacaaattgaacacttgaacaagacgtacaacactgatgtgcccctggtcctgtag

SEQ ID NO: 246204 - DNA, 516 bp, synthetic construct
  misc_feature 1..516: note = Description of Artificial Sequence: Synthetic coding sequence
  source 1..516: mol_type = other DNA
atgtcccaggacggagcttcgcagtttcaagaagttattcgacaagaattagagctgtccgtgaaaaaggaactcgaaaagattctgaccaccgcatcaagtcacgaatttgaacacacaaaaaaggatctggatgggttcagaaagctgtttcaccgatttttacaggagaaaggtcctagtgtcgactggggcaagatccagaggcctcccgaagattccatccagccatacgaaaaaattaaggcaagaggcctgcccgacaatatatcgtccgtgctgaacaagctcgtagtcgttaagttgaatggcggactgggcactagtatgggatgtaagggccctaagtcccttattggggtccgtaacgaaaatacattcctcgatctgaccgtgcagcagattgagcacttgaacaaaacgtataataccgacgtgcctctcgtgctgatgaacagcttcaacaccgacgaggacaccaagaaaatcctgcaaaagtataaccattgtaggtag

SEQ ID NO: 246205 - DNA, 117 bp, synthetic construct
  misc_feature 1..117: note = Description of Artificial Sequence: Synthetic coding sequence
  source 1..117: mol_type = other DNA
atgtcccaggatggtgcttcacaatttcaggaggttatacgacaggaattagagttgagcgttaaaaaagagctcgagaaaatacttacgactgcaagtagtcacgaattcgaatag

SEQ ID NO: 246206 - DNA, 318 bp, synthetic construct
  misc_feature 1..318: note = Description of Artificial Sequence: Synthetic coding sequence
  source 1..318: mol_type = other DNA
atgagccaagacggagcttcccaattccaggaagttatccggcaggaattagagctgtcggtgaagaaggaactggagaagatcctgaccacagcttcatctcatgaattcgaacacacaaagaaagatctagacggcttcaggaaactgtttcaccgattcttacaggagaaaggaccctctgtggattggggaaagatacagcgacccccagaagacagcatccaaccctacgagaagataaaggccaggggactgccagataacattagctcagtgttaaacaagctggtggtggtgaagctgaacgggggatag

SEQ ID NO: 246207 - DNA, 150 bp, synthetic construct
  misc_feature 1..150: note = Description of Artificial Sequence: Synthetic coding sequence
  source 1..150: mol_type = other DNA
atgtctcggtttgtgcaggatctgtccaaggctatgtcccaagatggggcatctcagtttcaggaggtgatcagacaggaactggagctgtcggtcaagaaagagctagagaaaattctgacaactgcgagttctcatgaatttgaatag

SEQ ID NO: 246208 - DNA, 408 bp, synthetic construct
  misc_feature 1..408: note = Description of Artificial Sequence: Synthetic coding sequence
  source 1..408: mol_type = other DNA
atgagtcaagatggtgcgtctcaattccaggaggtgattcgacaggagctggagttgtccgtcaaaaaagaactggagaaaattctcacaaccgcctcatcgcacgagtttgaacatacaaaaaaggacctggacggttttcgaaagctgtttcacagattcctgcaggaaaaaggcccttccgtcgattggggcaagatacagaggccacctgaggatagcattcagccctacgaaaaaatcaaggccaggggattacccgacaatatcagtagtgtgctgaacaagttagtagtggtgaagctcaatggcggactgggcacgtccatggggtgtaaagggccaaagtccttgatcggtgtgcgcaacgagaatacattccttgatctgacagtgcagcagatctag

SEQ ID NO: 246209 - DNA, 642 bp, synthetic construct
  misc_feature 1..642: note = Description of Artificial Sequence: Synthetic coding sequence
  source 1..642: mol_type = other DNA
atgtctcaagacggtgctagccagtttcaggaggtgattaggcaagagctagagctaagcgtaaaaaaggaactcgaaaagatactaacaacggccagctcacacgagttcgagcatacaaagaaggatctggatgggttccgcaaactttttcataggtttttgcaggagaaaggaccttccgtggattgggggaagatccagagaccacccgaggattccattcagccatatgaaaaaataaaggccagaggtctgccggacaatatcagctctgtgttgaacaaactggtagtggtgaaactgaatggagggttggggacaagtatgggttgcaaaggtccgaaaagcctgattggggtcagaaacgaaaatacctttctcgatctaacagtccagcaaattgaacacctgaacaagacatacaacacggacgtgcctctggttctgatgaattcattcaacactgacgaagataccaaaaagatcctgcagaaatacaaccactgccgggtgaaaatttacactttcaaccagagtagatacccccgtatcaacaaggagagcctgctcccagtcgcaaaagacgtgtcctatagcggcgaaaatacggaggcatggtatccacctggacacggctag

SEQ ID NO: 246210 - DNA, 1278 bp, synthetic construct
  misc_feature 1..1278: note = Description of Artificial Sequence: Synthetic coding sequence
  source 1..1278: mol_type = other DNA
atggtcagcaaggctctgctgcggctagtgagcgcagtcaataggcgacggatgaaactcctcttaggtatagcacttttggcgtatgttgcgagcgtgtggggcaacttcgtgaatatgagcttcttgttgaatcgctccatacaggagaatggtgagctgaaaatcgagagcaagatcgaagaaatggttgagcccctgagagaaaaaattagagatctggaaaagtccttcactcagaagtacccgccagtcaagttcctctcagagaaggaccgcaaacggatcttaatcacaggaggcgctggattcgtcggatctcacttaaccgacaagctgatgatggacggacatgaggttacggtcgtagataacttttttaccggcagaaaaaggaacgtggaacactggattggacacgagaattttgaactgatcaatcatgacgtcgtggaacccctatacatcgaggtcgaccagatttaccacctagcttcccctgcctcacccccaaactacatgtacaaccccatcaaaacgctcaagaccaacacaatcgggacattgaatatgctgggcctggccaaacgggtgggggcacgcctgctcctcgcgtctaccagcgaggtgtacggtgatcccgaagtccatccccagtctgaagattactggggacacgtaaacccaataggcccaagagcttgttacgatgagggcaaacgagtggcagagactatgtgctatgcctatatgaaacaggaaggggtggaggttagggtggcccgaatctttaataccttcgggccacgcatgcatatgaacgatggcagagtcgtgagcaactttattctgcaggccttgcagggagaacctctaacggtctacggttcgggatcccagaccagagcatttcagtacgtctctgatctagtgaatgggctggtggccttgatgaatagcaatgtgagcagccccgtcaatctgggaaacccagaagagcataccatcctcgaattcgcccaactcattaaaaatctggtgggctcgggctctgagattcagttcctgagtgaggcccaggacgacccacagaaacgcaagcccgatataaagaaagccaaactgatgctcggatgggagcctgtggtacccctggaagaaggactcaataaggccatccattacttccggaaggagcttgagtatcaggcgaataaccagtacattccgaagcccaaaccagccaggattaagaagggacgtaccaggcattcctag

SEQ ID NO: 246211 - DNA, 759 bp, synthetic construct
  misc_feature 1..759: note = Description of Artificial Sequence: Synthetic coding sequence
  source 1..759: mol_type = other DNA
atgtataaccctatcaaaacactgaagacaaatactattggaacactaaatatgctcgggctggccaagcgggtgggtgctcggctgcttctcgcatccactagcgaagtgtatggagaccctgaggtacacccacagtctgaggattactggggacacgttaaccctatcgggccacgagcatgttacgacgaggggaagagagtggccgaaacaatgtgctatgcctatatgaaacaggagggtgttgaagttcgcgtggccagaatcttcaataccttcggacccaggatgcatatgaacgacggacgtgtggtgagcaatttcatactccaggctctacaaggcgaaccgttgactgtttatggatcagggagtcagacgagggctttccagtatgttagtgacctggtcaacggccttgtcgctctcatgaattcaaatgtttccagcccagtcaacctaggcaaccccgaggagcacactatcttggaatttgctcaacttatcaagaatctggtgggttcaggctcagagatacagttcctcagtgaggctcaggacgacccccagaagcggaaacccgatattaaaaaggccaagctgatgctgggttgggagcccgtcgtccctctggaggaaggtctgaataaagctattcactacttcaggaaggagctcgagtaccaggccaataatcaatatatccctaaaccaaagcctgcaagaattaagaagggaagaactaggcatagctag

SEQ ID NO: 246212 - DNA, 1263 bp, synthetic construct
  misc_feature 1..1263: note = Description of Artificial Sequence: Synthetic coding sequence
  source 1..1263: mol_type = other DNA
atggtgagcaaggccctcctgcgactggtaagcgcagtcaacagaagacggatgaagttgcttctcggcatagccctgttggcctacgttgctagtgtctggggcaatttcgtaaatatgagatcaattcaggaaaatggagaattgaagattgagtcaaaaatcgaagagatggtcgaaccactgcgtgaaaaaatccgcgatctggagaagtccttcactcagaagtatcccccagtgaagtttctgtcagaaaaagacagaaaaagaattctcatcacagggggtgctgggttcgtgggttcgcacctgactgacaagctgatgatggatggtcatgaggtgaccgtcgtggacaacttcttcacaggcaggaagcgcaatgtggagcactggatcggacacgagaacttcgaattaataaaccatgacgtcgtggaacccctctatatcgaggtggaccagatctaccacctagcatcaccagcaagccctcctaactatatgtataatccaatcaagacactcaagactaacactattggcacactgaacatgctgggattggctaagagggtgggcgcaaggctcctgttagccagcacttccgaagtatatggggacccagaggtccacccccagtcggaagattattggggacacgtcaatccaatcggtccgagggcctgctacgatgaaggcaaacgcgtggctgaaacaatgtgttatgcctatatgaaacaagagggggtggaggtgcgcgtggcccgtatctttaacacatttgggccacgtatgcacatgaatgatggcagggtggtgtccaactttatcctgcaggctctgcagggcgagccattgacggtgtatggatctggaagccagacgcgcgcttttcagtacgtctccgatctcgtgaacgggctggttgcccttatgaatagtaatgtgtcatcaccggtgaacctgggcaacccggaagaacacaccattctggagttcgcccagctaataaagaatctcgtgggatccggcagtgagattcaatttctgagtgaggcacaggatgacccccagaaaaggaaacctgatataaaaaaggccaagcttatgctagggtgggagccggtggtaccactagaggagggtctgaacaaggccattcactattttcggaaagaactcgagtaccaggccaacaaccagtatattcccaagcctaagcccgcaaggattaagaagggccgaactcgccattcgtag

SEQ ID NO: 246213 - DNA, 405 bp, synthetic construct
  misc_feature 1..405: note = Description of Artificial Sequence: Synthetic coding sequence
  source 1..405: mol_type = other DNA
atgtacaaccctatcaagacactgaaaactaacaccattgggacgctcaacatgttgggcttggcaaagagagtgggagccagactcctgttagccagtacatccgaagtgtatggtgaccccgaagttcacccacagagcgaagattactggggacatgtcaaccctattggaccacgtgcctgttatgacgaggggaagcgcgtggccgagaccatgtgctatgcctatatgaagcaggaaggcgttgaagtccgagtcgcccgtattttcaacaccttcggccctaggatgcatatgaacgacggacgggtggttagtaactttatcctgcaggctctgcagggagagcccctgaccgtgtatggctctggtagtcagacacgagcattccaatacgtttag

SEQ ID NO: 246214 - DNA, 558 bp, synthetic construct
  misc_feature 1..558: note = Description of Artificial Sequence: Synthetic coding sequence
  source 1..558: mol_type = other DNA
atggtgtccaaggcactgctcagactggtgtctgctgtaaatcggaggcggatgaagctgctcctcggaatcgctctgctcgcttacgtggcatggctggcaaagcgcgtcggcgcacgactgctgctcgcgagcacaagcgaagtttacggcgaccccgaggtacatccccagtctgaggactactggggccatgtaaatcccattggccctagggcctgctacgacgagggtaaaagagtcgcggaaaccatgtgctacgcctacatgaaacaggagggcgtggaggtcagggtggccagaatctttaacacatttggaccacgcatgcacatgaatgacggacgagtcgttagtaatttcatcctccaggccctacaaggagaacccttaaccgtgtatggcagcggctcccaaacacgtgccttccaatacgtgtcagatctggtcaacgggctagtggcattgatgaactctaacgtgtcgtcaccagtgaacttggtcagtgcacccctgccacctttgtgccggacggcccagaccttcgttcatctttag

SEQ ID NO: 246215 - DNA, 159 bp, synthetic construct
  misc_feature 1..159: note = Description of Artificial Sequence: Synthetic coding sequence
  source 1..159: mol_type = other DNA
atgtacaatccaatcaagacgttgaagaccaatactataggaaccttgaacatgctgggcttggccaagagggtgggcgctcggctcctgctcgcatcaacatccgaggtgtacggagatccggaggtgcacccccagtcagaggattattggggttag

SEQ ID NO: 246216 - DNA, 366 bp, synthetic construct
  misc_feature 1..366: note = Description of Artificial Sequence: Synthetic coding sequence
  source 1..366: mol_type = other DNA
atgtataaccctatcaagactctgaagactaacaccatcggcaccctcaatatgttgggcctcgcgaagagagtgggtgcacgacttcttctcgcatcgactagcgaggtatacggggatcctgaggtacaccctcagtcagaggattactggggccatgtcaaccccatcggaccaagggcctgttacgatgaaggtaagagagtcgccgaaacaatgtgctacgcgtatatgaaacaggagggcgtggaggtacgggttgccaggatttttaatacattcggcccacggatgcacatgaatgatgggcgagtagtaagtaattttatactccaggccttgcagggagagccactgactgtgtag

SEQ ID NO: 246217 - DNA, 1092 bp, synthetic construct
  misc_feature 1..1092: note = Description of Artificial Sequence: Synthetic coding sequence
  source 1..1092: mol_type = other DNA
atggttgagccactgcgggaaaaaattcgtgatctagagaaatcgttcactcagaaataccctcccgtgaagttcttatccgagaaagacaggaaacggatcctgatcaccgggggagcaggcttcgtgggcagccatctcaccgacaagctaatgatggacgggcatgaagtgactgtggtggacaattttttcacgggtcgcaagcgcaacgtggagcattggatcggccacgaaaattttgagttaatcaatcatgacgtggtggagcctctgtacatagaagtggatcaaatatatcacttggcttcacctgcatccccgccaaactacatgtataacccaattaaaacattgaagactaacactataggaacactgaatatgttagggctggcaaaaagagtcggggcacggctccttcttgcatcaacctccgaggtgtacggggatcctgaagtacaccctcagtcagaggactactggggtcacgtgaatccgatcggacctcgggcttgttatgatgaaggcaaaagagttgctgagacaatgtgctacgcttatatgaagcaagagggcgtggaagttcgagtcgcccgaatttttaataccttcgggcctagaatgcatatgaatgacggtcgcgtagtgtcaaatttcatcttacaggctctgcagggggaacctctgaccgtgtacgggagcgggtctcaaacacgggctttccagtacgtgtcggaccttgtaaacggcctggtcgctctcatgaactccaatgtgtcttctcccgtgaacttgggaaaccccgaagaacacactatactagagtttgcccagctcataaaaaatctcgtcggttcaggcagcgaaatacagtttctaagcgaagcccaagacgatccccagaaacgcaagcccgatattaaaaaagccaagctgatgctcggctgggagcccgtggtgccactcgaagagggactaaacaaggctatccattatttcagaaaggaacttgaatatcaggcgaataaccagtatattcccaaaccaaagcccgcacggatcaagaagggacgaactcgtcattcgtag

SEQ ID NO: 246218 - DNA, 1680 bp, synthetic construct
  misc_feature 1..1680: note = Description of Artificial Sequence: Synthetic coding sequence
  source 1..1680: mol_type = other DNA
atgcgtaaatttgcgtactgcaaggtggttctcgccacctctctgatttgggtgctactcgacatgtttctgcttctctacttttctgagtgcaataagtgcgacgagaaaaaggagaggggactgccagccggagatgtgctggagcccgtccagaagcctcatgagggccctggggaaatgggaaagcccgtcgtgataccgaaggaggaccaggaaaagatgaaagagatgtttaaaatcaaccagttcaatcttatggcctccgagatgatagcgttgaatcgcagcctgcccgatgtccggttagaaggctgcaaaaccaaggtgtatccggacaatctccccactacctccgtggtgatcgtgttccataatgaagcctggagtactctgctccgtacagttcactctgtcataaaccggtctcctcgccatatgattgaggaaattgtgctggtggacgatgcatcagaacgggactttctcaaacgcccattggagagctatgttaagaaattgaaggtgcctgtgcacgtgattaggatggaacaacgttctgggttaatccgcgctagattgaaaggggctgccgtgagtaaaggccaggtaataaccttcctggacgctcactgcgagtgtaccgtaggctggctagaaccactcctcgcccgaatcaagcatgaccgacgcacagtcgtgtgccctattatcgacgtgatcagcgatgatacattcgaatacatggccggttccgacatgacatacggaggctttaactggaaattaaatttcagatggtacccggtgccgcagcgtgagatggaccggaggaaaggtgatcgtacgctgccagtacgaactccaacaatggctggcggacttttttccattgatagggactatttccaggagatagggacgtatgatgccggaatggatatttgggggggagaaaacttagaaatctctttccggatctggcaatgcgggggaaccttagaaattgtgacgtgtagccatgttggtcatgtgttcaggaaagctactccatatacttttcctgggggaactggccaaatcattaacaagaataacagaagacttgctgaagtgtggatggacgagttcaagaactttttctacatcatctcacccggtgtgacaaaggttgactacggagatatttccagtagagtgggcttgaggcacaaactccaatgcaagcctttcagctggtatctggagaatatatacccagattcccagataccacgtcattatttttcactgggtgagataagaaacgttgagaccaaccagtgtctggataacatggctagaaaggagaatgagaaagtggggatcttcaattgtcacggcatggggggaaaccaagtatttagctatactgccaacaaagagatacggacagacgacttgtgcctggacgtctctaagctaaatgggccagtgaccatgcttaagtgccaccatttaaagggaaaccaattgtgggaatatgacccagttaaacttacccttcaacacgtgaacagcaatcagtgcttggacaaggcaactgaggaggactcccaggtccccagcattcgcgattgtaacggaagtcgttcccaacagtggctgctgcgcaatgttacactccctgaaatcttttag

SEQ ID NO: 246219 - DNA, 1500 bp, synthetic construct
  misc_feature 1..1500: note = Description of Artificial Sequence: Synthetic coding sequence
  source 1..1500: mol_type = other DNA
atgggcaagcctgtggtaatccccaaagaagaccaggagaagatgaaggaaatgttcaagatcaatcaattcaatctgatggcttctgaaatgatagccctaaataggagcttacctgacgtgagactggagggatgtaagaccaaagtgtatcctgacaatttgcctacaacgtctgtagtgatagtgttccacaatgaggcctggagcacgctactgcgcacagtccactctgtcatcaatcgctcaccacggcatatgattgaagagatcgtcctggtcgacgatgcgtcggagcgggatttcttgaagagaccactggagtcatacgtcaagaaattgaaagttcctgtacacgtcatacgtatggagcagagaagcggattaattcgagccaggctaaagggagcggctgtgtccaagggtcaagtaatcacctttcttgatgctcattgtgagtgcacagtgggatggttagagcctctgctagcacggatcaagcacgataggaggacggtcgtgtgccctatcatagatgtgatttccgacgacactttcgagtacatggctggcagcgatatgacatacgggggattcaattggaaactgaatttcagatggtatcctgtgcctcagcgagagatggacaggcggaagggagataggactcttccggtaagaacccctacaatggccggaggcctgttttctatcgatagggactatttccaggagattgggacatatgacgcaggcatggacatttgggggggtgagaatttggagatctcctttcggatatggcagtgtggaggtacgctagagatagtcacatgttcgcacgttggccatgtgttccggaaagccacgccatatacttttcccggtgggactgggcaaattatcaacaagaacaacaggaggctggcagaggtctggatggatgaatttaaaaacttcttttacatcatctcacccggtgtaacaaaagtagactatggcgacatctcctcacgcgtgggactccgacacaagctccagtgtaaaccattcagctggtatctggaaaatatctatcccgattcacagattccaagacattacttcagcctgggtgagattcgcaatgtggaaacgaatcagtgcctcgacaatatggcccgaaaagagaacgagaaggtcgggatctttaattgtcatggtatgggcggaaaccaagtcttttcctacaccgctaataaggagatccgtaccgatgatctctgcctcgatgtatccaaattgaatggtcccgtcactatgctgaaatgccatcacctgaaagggaaccagctctgggagtacgatcctgtcaagctgactctgcagcacgttaattccaatcaatgcctggataaagcaactgaggaggattcccaggtcccatcaatcagagattgtaacggctcccgatcccaacaatggctgctgcggaatgtcacactgcccgagatattctag

SEQ ID NO: 246220 - DNA, 1680 bp, synthetic construct
  misc_feature 1..1680: note = Description of Artificial Sequence: Synthetic coding sequence
  source 1..1680: mol_type = other DNA
atgcggaagtttgcttattgcaaagtcgttctcgctacctccttaatttgggttttactggacatgttcctcttgctgtattttagtgaatgtaacaagtgcgatgagaaaaaggagagaggtctgccagcaggagatgttttggaaccagtccagaaaccgcacgaagggcctggggagatgggaaagcccgtcgttatcccaaaggaagatcaagaaaagatgaaagaaatgtttaaaattaatcaattcaacctcatggcatctgagatgattgccctgaatcggtccttgccggacgtgagactcgaaggttgtaagacaaaagtgtacccagacaatctaccgactacctctgtggttatcgttttccacaatgaagcttggtccaccctcctgcggactgtgcacagtgtgataaatcgctcaccacgtcacatgatcgaagagatcgttctcgtcgatgacgcctccgagcgagacttcctgaaaaggccactcgagagctacgtgaaaaagttgaaagttcctgtccatgttattaggatggaacagaggagtggcttgatccgtgcgagactaaagggggcagccgtgtctaaaggacaggtcatcaccttccttgatgcccattgcgaatgcaccgttggctggctggagcctctcctggctcgaattaaacacgaccgcagaaccgtggtttgccccattatcgacgtcatcagtgacgataccttcgagtacatggccggttctgacatgacctacggcggattcaactggaagctgaacttcagatggtaccctgttccccagcgtgagatggacagacgtaaaggcgaccgcaccctgcccgttagaacgcctacaatggcaggcggtctgttctccatcgatcgtgactactttcaggaaatcggcacttatgacgcgggtatggacatctgggggggtgagaatctggaaatttcctttaggatctggcagtgcggcggtactctcgagatcgtgacgtgcagtcacgtcggtcacgtcttccggaaggctaccccctacacgttccccggaggcaccggacaaatcattaataaaaataatagacgattggccgaggtatggatggatgagtttaagaattttttttatattatatctcccggtgtcactaaagtggattatggcgatattagtagcagagtagggctccggcacaagctacagtgcaaacccttttcttggtaccttgagaacatctatccagactcccagattcctcgacactattttagcctcggtgagatacgaaatgtcgaaacaaaccagtgtttagacaacatggccagaaaagagaacgaaaaggtgggaatctttaactgccacggaatgggtggcaatcaagttttttcctacaccgctaataaagaaatccgcactgatgacctctgcctcgacgtcagtaagctgaacggccctgtcactatgctcaaatgccatcacctcaagggtaaccagctctgggaatatgaccccgtgaagttaacgctccagcatgtcaatagcaatcagtgtctggacaaggctacagaggaagacagtcaggttccatcaatccgcgactgtaacggaagccgatcccagcagtggctcctgcgtaacgtcacactccccgagatcttctag

SEQ ID NO: 246221 - DNA, 1812 bp, synthetic construct
  misc_feature 1..1812: note = Description of Artificial Sequence: Synthetic coding sequence
  source 1..1812: mol_type = other DNA
atgcggagaaaagaaaagcggcttttgcaggccgtggctttagtgctcgctgccttggtcctcttacccaatgtcggtttatgggcgctataccgtgagcggcagcctgatggaacccctggcggatcaggggcagctgtagccccagctgccggtcagggctcacattccagacagaaaaagacgttctttcttggagatggacagaagctgaaagattggcacgacaaagaagcgatccggcgagatgcacagagggtgggaaatggtgagcagggccgaccctatcccatgaccgacgctgagagagtggatcaggcctaccgggaaaatgggttcaacatctacgtaagcgacaagatttcactgaaccgctccctccctgacatacgacatcccaactgcaacagcaaacgatacctggagacactcccgaacacaagcattatcattccctttcacaacgagggttggagctccttactccgtactgtgcactccgtcttgaatcggtctcctcctgagctggtggccgagatcgtgctagtggacgacttctctgacagagagcatctcaagaaacctttagaggattatatggcgttgttcccttcagtgaggatcctacggacgaaaaaaagagaggggctgatccgcaccaggatgctaggagctagcgttgccaccggcgacgtgatcacgttcctggactcccattgcgaggcaaacgtaaattggctcccacctcttttggaccggatcgccaggaacagaaaaacaatcgtctgccctatgatcgacgtgattgaccacgacgactttcgctatgaaacgcaagctggggacgctatgaggggcgctttcgattgggagatgtactataaacgcattccgatccctcccgaactccagaaagcagaccccagcgaccctttcgaaagtcccgttatggcaggaggactctttgccgtggaccggaaatggttctgggagctgggaggctacgaccccggactggaaatttggggcggtgagcaatacgagatctccttcaaagtctggatgtgcggaggcaggatggaggatattccttgctcccgtgtcgggcatatttacagaaaatatgtgccttataaggtacccgctggggtgagcctggccagaaatctgaagcgggtggcagaggtgtggatggacgagtacgcagagtacatctatcaaaggcgaccagagtatagacacctgagcgccggtgatgttgctgtgcagaaaaagctcaggtcgagcctcaattgcaagagcttcaaatggtttatgactaagatcgcgtgggacctgcccaagttctaccctccggttgaacctccggctgccgcttggggagagataaggaatgtaggcactgggctgtgcgccgacacaaaacatggtgctctggggagccctctccgtctggaagggtgtgtgcgtggccgaggcgaggcggcttggaacaacatgcaagtctttacatttacctggcgagaagatattcggccaggagatccccagcacaccaaaaagttttgctttgacgctattagtcacacgtccccagttactctttatgattgccattccatgaaagggaaccaactttggaaatacaggaaagataagactctctaccacccagtgagcgggtcatgtatggattgctcagaaagtgaccaccgtatctttatgaatacctgcaatccctcatcgctcacgcagcagtggctcttcgagcacaccaattcaacagttcttgagaaattcaaccggaattag

SEQ ID NO: 246222 - DNA, 831 bp, synthetic construct
  misc_feature 1..831: note = Description of Artificial Sequence: Synthetic coding sequence
  source 1..831: mol_type = other DNA
atgctcgcctggcgtgacggcgaattagaagccgagaccagcagttctctcttccttttagcaatgcaggtatggatgtgcggtggcaggatggaggacatcccgtgtagcagggtcggtcacatataccgtaaatacgtgccttacaaggtgccagccggtgtgtccctggccagggtgagaaacctgaagcgcgttgccgaagtttggatggatgaatacgccgaatacatctatcagcgcaggcctgaatatcgacatctcagtgcaggggatgtagctgtgcagaaaaaattaaggtcctccctcaattgcaagagcttcaagtggtttatgacgaagatcgcctgggacttacccaaattttatcccccagttgaaccccctgctgcagcttggggcgagattaggaacgttggaacgggcctttgtgctgataccaagcatggcgctttggggtctccgttgcgactggaaggctgcgtcagaggcaggggcgaggccgcatggaacaatatgcaggtttttacttttacttggagagaggacatccgccctggcgatccccagcacacaaagaaattctgtttcgatgctatcagtcatacttcacctgttacgctgtatgattgccattccatgaaggggaaccagctgtggaagtataggaaagacaaaactctgtatcacccagtgtccggcagctgcatggattgttcagagtccgatcataggatctttatgaatacctgcaacccatcctcgctgactcagcaatggctattcgaacacacaaattccacagtgttagaaaagttcaatagaaattag

SEQ ID NO: 246223 - DNA, 1626 bp, synthetic construct
  misc_feature 1..1626: note = Description of Artificial Sequence: Synthetic coding sequence
  source 1..1626: mol_type = other DNA
atgagaaggaaagagaagagacttctgcaggcggttgcactggtgctcgcagcactggtgctccttcctaatgtggggctatgggcactgtaccgcgagaggcagccagatggcactccgggaggttctggcgcagcagtcgcccctgcagccggacaggggtctcactcccgccagaaaaaaaccttttttctgggcgacggtcaaaaacttaaagactggcatgacaaggaggcgatacggagggacgcccagcgagtagggaatggcgaacagggacggccataccctatgaccgatgccgaaagggtagaccaggcctatagagaaaacgggttcaacatttacgtgtccgacaaaatctccctcaatcgctctctcccagatatccggcacccaaattgtaacagcaaaaggtacctagagaccctccccaatacaagcattataatcccctttcataatgagggatggtcaagcctgttgcgcacagttcatagcgttctgaatcgctcacctcctgagctggtggcggagattgtgttagttgatgacttctccgaccgcgaccgcatagcacgaaaccggaaaaccattgtgtgtcccatgatagacgttatcgaccacgacgactttagatacgagacacaggcaggggacgctatgcgtggagcttttgattgggagatgtattataaaaggattcctatcccgcctgagctccagaaagccgatcctagcgacccttttgagtcacccgtcatggccggtggtctgttcgccgtggaccgcaagtggttctgggaactgggagggtatgacccagggctcgagatttggggcggtgaacagtatgaaatttccttcaaggtgtggatgtgtgggggtcgcatggaagacattccatgtagccgcgtgggccatatttacaggaagtatgtgccatacaaggtccctgcgggagtcagtttggcacggaacttaaagcgcgtagcagaagtatggatggacgagtatgccgaatatatctaccaaagacgtcccgagtatcgccatctgtccgctggcgatgtagcagtgcaaaagaagctgcgttccagcctgaactgcaaatccttcaaatggttcatgaccaagattgcctgggacctaccgaaattctacccgccagtcgaacctcctgcagctgcttggggcgaaatcagaaatgtaggcaccggtctctgcgcggatacgaagcacggagcattaggaagccccctgcgattagaggggtgtgtgagagggagaggcgaggccgcttggaacaatatgcaggtcttcactttcacctggagggaagacatcagacccggtgacccacagcatacaaagaaattctgctttgatgcaatcagccataccagcccagtgactttgtacgattgccactcaatgaagggcaaccagctgtggaaatacaggaaagataagaccctctaccatccagtctctgggagttgcatggactgctcagagtcagaccaccggatcttcatgaatacttgcaacccgtcctcactgacacagcaatggctttttgagcatacaaattctaccgtgttggagaagttcaatcgcaactag

SEQ ID NO: 246224 - DNA, 1101 bp, synthetic construct
  misc_feature 1..1101: note = Description of Artificial Sequence: Synthetic coding sequence
  source 1..1101: mol_type = other DNA
atgcgtcggaaggagaagcgactgttacaggccgttgcacttgtactagctgccttggtcctgctccccaacgtcgggctttgggcactctatcgcgaaaggcaacctgatgggactcctggcggatccggcgcagctgttgctcctgctgccggacagggcagccactccaggcagaagaagacttttttcttgggagacggtcagaagctaaaggattggcacgataaggaagccatccgtagagacgcccagagggtcggcaacggcgaacagggccgaccctacccgatgactgacgccgaacgggtagaccaagcctatagggagaatgggtttaacatctacgtgtctgacaaaattagcctgaatcgcagcctccctgacattcgacatcccaactgcaattccaaacgctacctggaaacgctcccaaatacatcaatcataatcccttttcacaacgagggctggtcgtcccttttacggactgtccacagcgtgctgaaccgaagccccccagaactagtggcagagatcgtgctggttgatgacttctctgatcgagagcacctgaaaaagccattagaggactacatggccttgttccctagcgtgagaatcctcaggacgaaaaaaagggaggggctcatacgcaccaggatgttgggagcgagtgttgctacaggagatgtgattacattcctggactctcactgcgaggcaaacgtcaactggttgccccctctgcttgacaggatagccagaaataggaagaccatcgtgtgcccaatgattgatgtaattgaccatgacgacttccgctacgaaacccaagcgggtgacgcgatgagaggagcctttgattgggagatgtactataagcggatccccatcccacccgaactccagaaagcggacccaagcgatcccttcgagtctcccgtgatggccggtgggctttttgccgttgatcggaaatggttttgggagctgggaggctacgacccaggcctcgagatttggggtggggaacagtatgagatctctttcaaggtcagtcaattgtctagacggccagtactaggaacagcctcatag

SEQ ID NO: 246225 - DNA, 1746 bp, synthetic construct
  misc_feature 1..1746: note = Description of Artificial Sequence: Synthetic coding sequence
  source 1..1746: mol_type = other DNA
atgtggggaaggaccgccagacggaggtgcccacgcgagcttagacggggacgggaggccctcctggtcctcctggccctgcttgccctcgcaggtctcggttccgtgcttcgagcgcagcgtggcgcaggagccggtgcagccgaacccggtccgcctaggactccacgccctggtagacgagaaccggtcatgcctcgtccacctgtccccgctaacgcactcggggctcggggagaagctgtccggctgcagctgcaaggagaggaactccgtctccaggaggagagcgtcaggctgcatcagataaatatttatctctctgaccgcatatcactgcacaggcgcctgcctgaaagatggaatccgctgtgcaaggaaaagaagtatgactacgataatttgcccagaacttcagttatcatcgctttctataacgaggcctggtccacactgttaaggaccgtgtatagcgtgttagaaacctcgcccgatatcctgctggaggaagttatattggtagatgattactcagatcgggaacatttaaaagaacgtctcgccaatgaactgtctggtctccccaaggtacgactgattcgggctaataaacgggaaggcctggtccgtgcacggctgctgggcgcttctgctgcccgaggagacgttctaacatttcttgactgccactgcgaatgccacgaaggctggctcgaacccttgctgcagaggatccacgaggaggaaagtgctgtcgtgtgtcctgtgattgatgtgatcgactggaacacattcgagtatctgggcaattccggcgagccacagattgggggattcgattggaggttggtcttcacctggcataccgtgcccgagagagagcggatacgaatgcagagtccagtcgatgtgattagaagtcccacaatggcgggaggacttttcgcagtgtcaaagaagtatttcgaatatctcggctcctatgatacgggaatggaagtgtggggaggcgagaacttggagttcagtttcagaatctggcagtgtgggggtgtgctggagacacacccgtgttcccacgtgggccacgttttccctaaacaggcgccatatagtcggaataaggcgctggccaactcagtaagagccgctgaggtatggatggacgagttcaaggagctgtattaccatcgcaacccacgtgctaggctcgagccattcggtgatgttaccgagaggaaacagctgcgtgacaagctgcagtgtaaggatttcaagtggttcctggagaccgtgtacccagaactacacgtcccagaggacaggccgggatttttcggcatgttgcagaataaaggcctgaccgattactgttttgactataatccaccagatgagaaccaaatcgtgggacaccaggtaatcttgtatctatgtcacggtatgggtcagaaccagttcttcgaatataccagtcagaaggagattaggtacaacacccatcagcccgaaggttgcatcgccgtggaagcgggaatggacaccctgattatgcatttatgcgaggagactgctcctgaaaaccagaagttcatactgcaggaggatgggtctctcttccatgaacaaagtaagaaatgtgtacaagccgctaggaaagagagctcagacagtttcgtccccctcttgcgggattgcaccaatagcgatcaccagaagtggttctttaaggagaggatgttgtag

SEQ ID NO: 246226 - DNA, 1671 bp, synthetic construct
  misc_feature 1..1671: note = Description of Artificial Sequence: Synthetic coding sequence
  source 1..1671: mol_type = other DNA
atgaggcggtttgtttattgtaaggttgtgctcgcaacctctctgatgtgggtcctggtggacgtgttcctgctgctttacttttctgaatgtaacaaatgtgacgacaaaaaagagagaagcctgttacctgcacttcgcgcagttatctcccggaaccaggagggacccggagaaatggggaaggctgttttgatccccaaagacgatcaggagaaaatgaaagagttgtttaaaattaaccaattcaacctgatggcaagtgatctcatagctctgaataggagccttccagatgttcgcctcgaggggtgtaaaaccaaagtgtatcctgacgaactccccaacacctctgttgtaatagtgttccacaatgaggcctggagcacactcctgcgaacagtctactctgtcataaatagatctcctcactatttgctgagcgaggtgatccttgtcgatgatgcaagtgagcgagactttctgaagctgaccctagagaattatgtcaagaatctagaggttcctgtgaagataatccgtatggaagaaagatcaggcctgatccgagcaagacttagaggcgctgctgcttccaagggacaagttattacttttctcgacgcccattgtgagtgtactctggggtggctggaaccattactagctcgtattaaggaggataggaaaaccgtcgtgtgccccatcatagatgtgatttcggacgatacatttgagtacatggccggatccgatatgacatacggagggtttaactggaaactgaattttcggtggtaccccgtcccacagagggagatggacagaaggaaaggagatcggacattgccggtgagaaccccaactatggccggagggctgttcagtattgatagaaactactttgaggagattggcacatatgacgctggcatggatatctggggaggcgaaaacctagaaatgagcttccgcatttggcagtgtggaggctccctggaaattgttacatgtagccacgtcgggcacgtcttccgcaaagcaactccatatacatttccgggaggaactggccatgttattaacaagaataacagacgactggccgaggtgtggatggatgagtttaaggactttttttatattatcagccccggtgttgttaaagttgactatggcgacgtcagcgttcgaaagacattgagggaaaatcttaagtgtaaacccttctcttggtacttggaaaacatataccccgacagccagattcctaggaggtattatagtctgggggagataaggaatgtggagactaatcagtgcctggacaatatggggagaaaggagaatgagaaagtgggaatatttaattgccacgggatgggtggaaatcaggtcttctcctatacggccgataaagagattcggacagatgacttgtgtctggacgtgtcaagactcaacggacccgtgataatgctgaagtgccaccacatgcgaggcaatcagctgtgggagtacgacgctgagcgccttacattaagacatgtgaatagcaaccagtgtctggatgaaccaagcgaagaggataagatggttcccaccatgcaggattgtagcggaagccgctcccagcagtggcttctgcggaacatgacccttggtacatag

SEQ ID NO: 246227 - DNA, 1686 bp, synthetic construct
  misc_feature 1..1686: note = Description of Artificial Sequence: Synthetic coding sequence
  source 1..1686: mol_type = other DNA
atgagacggtttgtgtactgcaaggtcgtgcttgccacaagtctgatgtgggtgctcgtggacgtttttctgttgttgtacttcagtgagtgcaacaaatgcgatgacaagaaagagcgctctctgctgccagccttaagagcagtcatcagccgcaatcaagagggcccaggagagatgggaaaggcagtgctcatcccaaaagatgatcaagagaagatgaaggagttgtttaaaattaatcaattcaatttaatggcctctgacttaatcgccctgaatcgatcccttcctgacgtgcgcttggaaggctgcaaaacgaaggtctatcctgacgaactgcccaacaccagcgtcgttattgtgtttcacaacgaagcctggtccaccctgcttcggaccgtctattctgtgattaatagatcacctcactatctcctcagcgaggtgatccttgtggacgatgccagcgagcgcgacttcctgaagctgactctagagaactacgtcaagaatctagaagtccctgtcaaaatcatccgcatggaggagagaagtggactcattcgggcacgcctccgaggcgcagcagctagcaaagggcaggtgattacctttctggatgcacattgcgaatgtaccctcggatggttagagcccctgttggccaggattaaagaagaccggaagaccgtggtctgtcctattatcgacgttatttccgatgacacatttgagtacatggctgggagcgacatgacatatggaggcttcaattggaagttgaatttccgctggtatccggtcccacagagagagatggatcgccgtaaaggcgacaggacattgcccgttcggactccaacaatggctggaggcttatttagcatcgacagaaattactttgaggagatcgggacttacgatgccggaatggatatatggggaggggaaaatttggagatgagttttcgaatctggcagtgcggcggatctctggaaatcgtgacctgcagccatgtgggccatgtgttccgaaaagccacaccttacacgttccccggaggtacggggcacgtgatcaacaagaataaccgaagattggccgaggtgtggatggacgaattcaaggatttcttttatattatctcccctggggttgtcaaagtggattacggcgatgtgagtgttcgcaagactctgcgggaaaacctgaagtgtaagcccttctcttggtatcttgaaaacatttacccagactctcagatccctagacgctattactccctcggtgagattagaaatgtagagaccaaccagtgtctcgataacatgggaagaaaagagaatgaaaaggtcggaattttcaactgccacggcatgggcggtaatcaggtgttctcctataccgctgataaagagatcaggaccgacgacctgtgcctcgacgtgagccggctgaacggccctgtgatcatgcttaagtgtcaccatatgcggggaaaccaactctgggaatatgatgctgaaagctgcctgtctgtgaataaggtcgccgacggttctcagcaccccaccgtggagacatgcaacgatagcaccttgcagaaatggctgctgaggaactacacccggatggagatttttcggaatatttttggtaactccacagactacatattatag

SEQ ID NO: 246228 - DNA, 60 bp, synthetic construct
  misc_feature 1..60: note = Description of Artificial Sequence: Synthetic coding sequence
  source 1..60: mol_type = other DNA
atgcgacggtttgtttattgtaaggtcgttttggctacaagcctgatgtgggtcttgtag

SEQ ID NO: 246229 - DNA, 1659 bp, synthetic construct
  misc_feature 1..1659: note = Description of Artificial Sequence: Synthetic coding sequence
  source 1..1659: mol_type = other DNA
atgaggaggctgaccagaagactggttcttcctgtgttcggagtactgtggatcacagtgctgctgttcttctgggtaactaaacgaaaattagaggtcccgacaggtccagaagttcagacccccaagccaagcgatgcagactgggacgacctttgggatcaattcgatgagagacggtatctgaacgccaaaaaatggcgtgtcggagacgatccctataagctttatgccttcaaccagcgcgaaagtgaacgcatatcctctaaccgggctatccccgacacccgccatctcagatgtacgttgttagtctattgtaccgatctccctccgactagtatcatcatcactttccacaacgaagctagatcaactctcctcagaactataaggagtgtgttgaatcggactccaacacacctcatcagagaaatcattctggttgacgatttttctaacgacccggacgattgcaagcagcttatcaaactgcctaaggtgaagtgtttacgaaacaacgagcgccagggcttggtgcgctcgcgcatccgcggtgccgatattgcccagggcacaaccctcacattcctcgacagccattgcgaggtgaatagggattggcttcaaccgctgctgcaccgggtgaaagaggactacactcgcgtcgtttgtccagtgattgatatcataaacctcgatacttttacatacatcgagtcggcctccgagttgagagggggatttgactggtctctacacttccagtgggagcagctgtctccagagcagaaagcccgtaggctcgaccctactgaaccaatcaggacacctatcatcgccggaggtttatttgtcatagacaaggcgtggtttgactacctcgggaaatacgatatggacatggacatctggggaggtgagaactttgaaatttcgttccgcgtgtggatgtgtggcggatctctggaaattgtcccctgtagcagggtgggacacgtcttccgcaagaaacatccatacgtgttccctgatgggaacgcaaatacttatatcaagaatacaaagcgaaccgctgaagtttggatggatgagtacaaacagtactactatgcagccagacccttcgcactggagaggcctttcggcaacgtggaatcgcgacttgacttaagaaagaatctcaggtgtcagagttttaagtggtatctggagaatatatatccggaactcagcataccaaaagagagcagcattcagaagggtaacattcgccaaagacagaagtgtctggaatcccagcggcagaataaccaagagactccaaatctgaagctgtccccatgcgctaaggtgaaaggtgaagacgccaagagtcaggtatgggctttcacctatactcagcaaatactgcaggaagagttatgcctgagtgtgatcactctctttcccggtgcccctgtggtactagttttgtgcaagaatggcgacgacaggcagcagtggaccaagacaggatcccacatcgagcacattgcctctcatttgtgtctcgacacagacatgtttggggacgggacagaaaatggaaaggagattgtggttaatccctgcgagtcttccctcatgagccagcattgggacatggtgtcttcttag

SEQ ID NO: 246230 - DNA, 1560 bp, synthetic construct
  misc_feature 1..1560: note = Description of Artificial Sequence: Synthetic coding sequence
  source 1..1560: mol_type = other DNA
atgagaaggctgacacgtcggctcgtgctccctgtttttggcgtcttgtggataacagttctgcttttcttctgggtcaccaagcgaaagctcgaggtacctacgggcccagaagtacaaacgccaaaaccaagtgacgctgattgggacgacctttgggatcagtttgacgagcggagatatctgaacgctaagaagtggagggtgggggacgacccgtacaagctttacgcctttaaccaacgggagtcagagcgcatttcctcaaaccgggcaattcccgacacccggcacctgtcagtgctgaaccgaactccaacccatctcattcgtgagattatccttgtggacgattttagcaatgaccccgacgattgcaagcagctgatcaagctcccaaaagtgaaatgtctaaggaataatgagagacagggactggttcgttcgagaatcagaggggcagatattgcacagggcaccacactgacgttcctggattcccactgcgaagtgaatcgtgactggttgcaacccctgctccaccgagtaaaggaggactacaccagggtggtttgtcccgtcatagacattattaatctcgacacctttacgtatatcgagtctgcctccgagcttcgcggaggatttgactggtctctgcacttccagtgggagcagctttcgcccgaacagaaggcgaggcgtctcgatccaaccgagcctatacggaccccgatcatcgccggaggattgttcgtgattgacaaagcatggttcgactatttaggcaagtatgacatggatatggacatctgggggggtgagaactttgaaatcagttttagggtctggatgtgcggcggaagcctggaaattgtaccctgctccagggtggggcacgtgtttagaaagaagcatccctacgtcttcccagatggcaatgctaacacatacattaagaatactaagcgtaccgcagaagtgtggatggacgagtataaacagtattattacgccgctcggccatttgcgcttgagcggccatttggaaacgttgaatctcgattggatttgcgcaaaaacctccgatgccagtccttcaagtggtatctcgagaatatctaccctgagcttagtattcccaaagagagttcaatccagaagggtaacattaggcaaagacagaaatgtctggagtcccagcggcagaataatcaagaaacacctaacttaaagctgtccccctgtgctaaagttaaaggagaggacgcaaaatcccaggtatgggctttcacctacacccagcaaatactccaagaggaactgtgtctgtctgtcattactttgtttccgggagcacccgtagtcctggtgttatgcaagaacggggatgatcgtcagcagtggaccaaaacagggagccacatcgaacacattgcctctcacttgtgtctggacaccgacatgttcggagacggcaccgagaatggaaaagagatcgtagtgaatccatgcgagtcttccctgatgtcccagcattgggacatggtgtcttcctag

SEQ ID NO: 246231 - DNA, 1599 bp, synthetic construct
  misc_feature 1..1599: note = Description of Artificial Sequence: Synthetic coding sequence
  source 1..1599: mol_type = other DNA
atgagcttcccaatgagtctggcgagatcgagtgtcccgttcgccgactcaggcctgtcctctagccagccctccgacgcggactgggacgacctgtgggaccaattcgacgaaaggaggtatctgaacgctaaaaagtggagggttggtgacgacccctataagctatatgccttcaaccagagggagtcagaacgaattagttcgaatcgggctattcccgatactagacacctgcgctgtaccctgctcgtgtactgtactgacctaccacccaccagtatcattatcacattccacaacgaggctaggtctactctcctgcggaccatcagatccgtgctgaatcgtaccccgacgcacctgatcagagaaattatcctcgtagacgactttagtaatgatccggatgattgcaagcagcttatcaagcttcccaaggtgaaatgtctgaggaataacgagagacagggacttgttcggagcagaattcgaggggcagatattgcacagggcaccacactgaccttcctcgactcacattgtgaggtgaatcgcgactggctgcagccgctgctccatcgcgtgaaggaagactacaccagggtagtgtgtccggttattgatatcatcaacctggacacgttcacgtatatcgaaagtgcctccgagctgaggggtggctttgactggagcctgcacttccagtgggagcagctgagtcccgaacagaaagctagaagattagaccctacggagcccatcaggactcctattattgctggaggtctctttgtgatcgacaaggcatggtttgactacttgggcaagtacgatatggacatggatatttggggaggggagaatttcgaaatcagcttcagggtttggatgtgcgggggatctctggaaatagtgccctgctctcgcgttggccacgtttttagaaaaaagcatccgtacgtgtttccagacggcaatgcgaacacctatattaaaaatacaaaacgtactgccgaagtctggatggatgagtataagcagtattattatgccgctcgccctttcgccctcgaaagaccttttggtaatgtggaaagtcgcctcgatctgaggaagaatttgagatgccagagcttcaaatggtacctagagaatatctatccggaactcagcatacccaaggagagttctatccagaaaggtaacatccggcagaggcagaagtgcctggagagccaacgccagaacaaccaagaaacccccaatctgaaactatcaccttgtgcaaaagtgaaaggtgaggacgccaagtcacaagtttgggccttcacatacacgcagcagatccttcaggaagagttgtgcctgtctgtgattacactgttccccggagccccagtcgtgttggtgctctgtaagaatggggatgatcggcagcagtggaccaaaaccgggtcccatatagagcatatagccagtcacctgtgcctcgatacagacatgtttggggacggcaccgagaatggcaaggagattgtggtcaatccctgtgaatcctccctgatgtcccagcactgggatatggtgtccagctag

SEQ ID NO: 246232 - DNA, 1554 bp, synthetic construct
  misc_feature 1..1554: note = Description of Artificial Sequence: Synthetic coding sequence
  source 1..1554: mol_type = other DNA
atggcccaggatgaaagttgcccgcctagtgatgctgactgggacgatctgtgggatcaattcgacgagcgcagatacctcaatgccaagaaatggcgagtcggtgacgacccctacaagctttatgcttttaatcagcgcgagtccgagcgtatctcatcaaatcgcgcaataccagacacccgacatctgaggtgcactctcctggtgtactgtactgatctcccgccaacaagtatcattattaccttccataacgaggcaaggtccactttgctgaggacaattcgctctgttctgaatcgaacccctactcatcttattcgtgagatcatcctggtggatgacttcagcaacgaccccgatgactgtaaacagctcatcaagctccctaaggtcaagtgtcttcgcaataatgaacgacagggactggtcagatcccgtatccggggagcagatattgcgcagggcacgacccttacatttttagacagtcactgtgaagtgaaccgcgactggttacagcccctactgcatagagtgaaagaagactacactagggttgtgtgtccggtgatagacataattaatctggacacattcacatacatagagagtgcctccgagctcagaggtggtttcgactggagtttacacttccagtgggagcagctctcccctgagcaaaaagctcgaaggctggatcccacagaaccaatccgcacacccattatcgccggagggctgttcgtgattgacaaggcctggtttgattatctaggcaagtacgatatggacatggacatctgggggggagaaaacttcgaaatatctttccgagtttggatgtgtgggggatccctcgagatcgtgccttgttcaagggtgggacacgtttttcgcaaaaaacacccatatgtgtttccggatggaaatgcaaatacatacatcaaaaacaccaaacgtactgccgaagtttggatggatgaatacaagcaatattattacgctgctagaccattcgccctggaacggcctttcgggaacgtggagtcgaggctagacctgcggaaaaacttacgctgtcagtctttcaagtggtatctggagaacatatatccagagctttccattcctaaggaaagtagcattcaaaagggtaacattcgtcagaggcagaaatgtctggaaagccaaagacagaataaccaggaaacacccaatcttaagctatccccttgtgccaaggtgaaaggggaagatgcaaaaagccaggtgtgggcattcacctacactcagcagatcctgcaggaggagctgtgtctatctgtcattacactctttcccggtgcccctgttgtcctggttttatgtaagaacggagacgacaggcagcagtggacaaaaacagggagccacatcgagcatatcgcctctcatctatgtctcgatacggatatgtttggagatggcactgagaacgggaaagaaatcgtcgtcaacccctgtgagagcagccttatgtcccaacactgggatatggtttcatcttag

SEQ ID NO: 246233 - DNA, 1674 bp, synthetic construct
  misc_feature 1..1674: note = Description of Artificial Sequence: Synthetic coding sequence
  source 1..1674: mol_type = other DNA
atgcggaggctgacgcgcaggcttgtgctgccggtcttcggcgttctttggatcaccgtgctgttgtttttttgggtgactaaacgcaaattagaagtgccgactgggcctgaagtgcagacaccgaaggtctggagcctgttctttaaggtggcgggtatgtcgccatgggctcctcaagttcccgtatcccccacgccaccctaccaacgcggacacctgcctactggtggccatctggcagtgtgccactttccttgcctgctgcaggaggcacagttccacctccaaacacaggtgtttctgcaggtaaggtgcacactgttagtgtactgcacggacttgcccccaacaagcattatcatcactttccataacgaggcgagatctacccttctgaggaccatccgaagtgtgctcaataggaccccgactcacttaatcagagagatcatcttagttgatgacttctccaatgacccggatgattgcaagcagttaattaagctgcctaaggtgaaatgcttgcgcaacaatgaacgccagggcctggtgcggagtaggatccgcggagcggacattgcccagggcaccaccctcacttttttggatagccattgtgaagtcaatagggactggctgcagcctttactccaccgggttaaagaggattacactcgggttgtgtgccctgtaatcgatattataaacttggacacttttacatacattgagtcggcttccgagctgcgaggcggattcgactggtccctgcattttcagtgggaacaactctctcccgaacaaaaagcccgacggttagaccctacggaaccaattcgcacacctataatcgccggtggactgttcgttatcgacaaagcgtggttcgactaccttgggaaatacgacatggatatggatatctggggtggagaaaacttcgaaatttcctttcgagtttggatgtgcggcggttccctggagatcgtgccctgcagtcgtgtcggccatgtgtttcgaaagaaacatccctacgtgtttccggacgggaatgctaatacttatatcaagaacacgaagaggactgccgaggtttggatggatgaatacaagcaatattattacgccgctaggccattcgcactcgaacgcccttttggcaacgtagaatccagactggacttgcggaagaacctgagatgccaaagcttcaaatggtatttggaaaacatctatcctgaattatccatccctaaagaatcgtcaatccagaagggtaacatcaggcagaggcagaaatgcttagaatctcagcgccaaaacaaccaagagactccaaacctcaaactgagcccttgcgcaaaagtgaagggtgaggatgcgaagtcccaagtctgggctttcacatatacacagcagattctgcaggaagaactatgcctgagcgtcataaccttgtttcctggagctcctgtggtgcttgtcctgtgtaaaaatggagacgaccggcagcaatggaccaaaactgggagccatattgagcatatcgcatctcacctgtgcctggacactgacatgttcggagatgggactgagaatggcaaagaaattgtggtgaacccatgcgagtcctccctgatgagccagcactgggatatggtctcttcttag

SEQ ID NO: 246234 - DNA, 1716 bp, synthetic construct
  misc_feature 1..1716: note = Description of Artificial Sequence: Synthetic coding sequence
  source 1..1716: mol_type = other DNA
atgcggaggaggtccaggatgctgctgtgtttcgcatttctttgggtcctgggtatcgcctactatatgtattccggcggagggtcagcactggccggaggagctggcggaggtgctgggagaaaggaggactggaacgagatcgatcccattaagaagaaggatctgcaccactcaaacggtgaggagaaggctcaatcaatggagacactccccccagggaaagtgaggtggccagactttaaccaagaggcctatgtgggcggaaccatggtcagatccgggcaggacccatatgccaggaacaaattcaatcaagttgagagcgataagctcaggatggaccgcgcaattcctgatactaggcatgaccaatgccagcgcaagcaatggagggtcgaccttcccgctacctccgtggtgattacattccataacgaagccaggtctgctctgttaaggactgttgtgtccgtcctgaagaagtctcctccccatcttatcaaagagatcattttggtcgacgactattcaaacgatccagaagacggagcgctactaggaaagattgagaaagtgcgggtactgcgcaacgacaggcgggaagggttgatgcggagcagagtgcgtggcgctgacgccgcacaggccaaggtgcttaccttccttgactcccactgtgagtgcaatgagcattggttagaaccacttctggagagggtggcagaggatcggacccgcgtcgtttcaccgatcatcgacgtaatcaacatggacaattttcagtacgtgggcgcttccgcagacctgaagggaggatttgactggaatctcgtctttaaatgggactacatgacacccgaacagcggaggtccagacagggtaatcctgtagccccaattaaaacgcctatgatcgccggtggcctttttgtaatggacaaattttacttcgaggaactagggaagtacgacatgatgatggacgtttggggcggagagaatctggagatctcgtttagggtctggcagtgcggtggcagcctggagattataccatgttctagagtcggtcatgtgtttcgaaaacagcacccttatacatttcccggtgggtccggaactgtgtttgcccgtaatacccggagggccgctgaggtgtggatggatgagtataagaacttctactacgccgcagttccttccgccagaaatgtgccctacgggaacatccagtcacgtctggaactcagaaaaaaactgtcctgcaagccctttaagtggtacttagagaatgtctacccagaattaagagttcctgaccaccaggacattgcatttggagcacttcagcagggaacgaattgcctagatactctgggccatttcgccgacggcgtggttggcgtgtacgagtgtcataatgccggaggtaaccaggaatgggctctcacaaaggagaaatccgttaagcatatggatctttgcttgaccgtagtcgatcgggctccagggtccttgattaagttacaggggtgcagagagaatgattcccgccaaaagtgggagcagatagaaggaaattcaaagttaaggcatgtgggttccaatctgtgcttagattctcgtactgcaaaatccgggggtttatcagtggaagtttgcgggccagccctcagccagcagtggaagtttacgctgaatctgcagcagtag

SEQ ID NO: 246235 - DNA, 798 bp, synthetic construct
  misc_feature 1..798: note = Description of Artificial Sequence: Synthetic coding sequence
  source 1..798: mol_type = other DNA
atggtgcgcagcgggcaggacccatatgcacggaacaagttcaatcaggtggagtctgacaaactccgtatggacagagccattccggacactagacacgaccaatgccaacgcaagcagtggagggtcgaccttccggctacctctgtcgtaattactttccacaacgaggccagatctgccctgcttcgcaccgtggtttctgtgctgaagaaatcgccccctcacctaattaaagaaatcatcctggtagacgattactccaatgatccagaagacggagcgttgcttggcaaaatcgagaaagtacgggttctgaggaacgatcgtcgtgaaggactgatgcgatcccgcgttagaggagccgatgccgctcaggccaaggtgctgaccttcctcgattcacattgcgaatgtaacgagcactggttagagccactgctggaacgcgtcgcggaagacagaacacgcgtagtctcacccattatcgacgtgatcaacatggacaacttccaatacgtaggggcttccgccgatctgaagggaggctttgattggaatctcgtctttaagtgggattatatgactcctgagcagcggcgtagtagacagggaaatcccgtggcacccatcaaggacttggtcccaagagtagcagtgtggtggcagcctggtgatcatccggttcaaccctgtggtacaagagtacccgaggcggctccgctgcacgtacccggttggcagtggcattgcctgtgtcctaaacacccgcctgggagcaggggcttggacggttag

SEQ ID NO: 246236 - DNA, 1086 bp, synthetic construct
  misc_feature 1..1086: note = Description of Artificial Sequence: Synthetic coding sequence
  source 1..1086: mol_type = other DNA
atgaggcggaggagtcgcatgctcctgtgtttcgcctttctctgggtcctgggtatcgcttactacatgtacagtggaggcggttctgcactagccggtggggcaggcggaggagcaggccgtaaggaggattggaatgaaattgatccaatcaagaaaaaggatctccaccacagcaatggggctgaggacggggctttacttggaaaaatcgagaaggtccgagtcctgaggaacgaccgccgagagggactcatgcggtctcgggtgcgcggagcggacgcagcacaggctaaggtactgacttttctggactctcactgcgaatgcaacgagcactggttagagccattgttggagcgtgtggcggaagatcgcactagggtcgtttctcccattatagacgtgatcaatatggataacttccaatacgtcggcgcaagtgcagacctcaaaggagggttcgattggaacctggtgtttaagtgggactacatgacccccgagcagaggcgttcgcgccagggaaaccccgtggctcctattaaaacaccaatgatcgcagggggtttgttcgtgatggataaattctactttgaggagctgggtaagtacgatatgatgatggacgtttggggcggagaaaatctggaaatatcctttagagtttggcagtgtggagggtctctggaaattataccctgttcaagggttggacacgtgtttagaaagcagcacccttatacgtttcccggagggtctgggacggtgtttgctaggaatacgaggagagctgcagaggtgtggatggacgagtacaaaaacttttactacgcagccgtgccctccgctagaaatgtgccctacggaaatattcaaagtcgtctggagctgcggaagaaactcagctgtaagccgtttaaatggtatctcgaaaacgtctacccagagcttcgggtacctgatcaccaggatatagcctttggagcccttcaacagggtacaaactgcttggatactctcggacacttcgctgatggcgtggtgggggtgtatgaatgccacgtggctggactccggcagtag

SEQ ID NO: 246237 - DNA, 1602 bp, synthetic construct
  misc_feature 1..1602: note = Description of Artificial Sequence: Synthetic coding sequence
  source 1..1602: mol_type = other DNA
atggcggatcgcgaggactggaacgagattgatcctattaagaagaaagacctacatcacagcaacggagaagagaaagcccagtccatggaaacattgcctcctggaaaggttagatggcctgattttaaccaggaggcatacgtgggtgggaccatggtgagatctggacaagacccttacgcccgaaacaagtttaaccaggtcgaaagtgacaagctgaggatggatcgggctatcccggataccagacacgaccagtgccagcggaagcaatggagggttgacctaccagctacatctgtggtcattacattccacaatgaggctcggtccgccctgttgaggacagtggtgtccgtcctgaagaagagcccccctcatcttataaaggagatcattctggtagacgactacagcaacgaccctgaagatggcgctctgctcggaaagatcgagaaggtgcgagtgctgagaaatgacaggcgggaagggttgatgcgatctagagtgagaggagctgacgctgctcaagccaaggtcctgacctttctggattcccattgcgaatgcaatgagcattggcttgaacctctgttagaacgtgtggccgaagatcgcacacgggttgtaagtccaataatcgatgtgattaatatggacaacttccagtatgtcggcgcatctgccgaccttaagggtggctttgattggaatttggttttcaagtgggactacatgacccccgaacagcgcaggagccgccagggcaatccagtggccccaattaagactccgatgattgctggcggactgtttgtcatggacaaattctacttcgaggagcttggtaaatatgacatgatgatggacgtgtggggcggagaaaatctggaaatatcttttagagtctggcaatgcggcggatcgttggagattatcccgtgttctcgcgttggccacgttttccgtaagcagcacccatatacatttccaggtggcagcggcacagttttcgctaggaataccagacgcgctgccgaggtatggatggacgagtataagaatttctactacgccgctgtgccatccgccagaaatgtcccatacggcaatatccagagcaggctcgagttacgcaagaagttatcatgtaaaccgttcaaatggtacctggagaacgtatacccagagttgagggttcccgaccatcaggacatcgctttcggcgcacttcagcagggcaccaactgcctggacactctaggccactttgccgacggcgtggtcggggtttatgagtgccataacgccggaggcaaccaggagtgggcactgacaaaagagaagtcagtgaaacatatggacctctgtttaacagttgttgaccgggcacctggatctctgatcaagctgcaagggtgtagggaaaacgattcacggcagaaatgggagcagatcgaaggcaactctaaattaagacacgtgggttccaatttgtgcctcgatagtcggacggcaaagtccggcggactgtcagtcgaagtctgtggacccgctctttcacagcagtggaagtttactctgaatctgcaacagtag

SEQ ID NO: 246238 - DNA, 1902 bp, synthetic construct
  misc_feature 1..1902: note = Description of Artificial Sequence: Synthetic coding sequence
  source 1..1902: mol_type = other DNA
atggcccacttgaagagactggtgaaactccatatcaagcggcactaccataaaaagttctggaagctgggcgctgtgatcttttttttcataattgtgctggtgttgatgcagcgggaggtatctgtacaatactccaaggaagagagtcgtatggagagaaacatgaagaacaagaacaagatgctcgatttgatgcttgaagccgtcaacaatataaaagacgccatgccaaagatgcagattggtgcccctgtcagacagaatatcgatgcaggtgagcggccatgcctgcaagggtactacacagccgcagaactcaaaccagttttagatcggcctccacaagatagcaatgcccctggagcctcaggaaaggcttttaaaactaccaatctgtcagtggaggagcagaaggagaaggaaagaggggaggcgaaacactgtttcaacgctttcgcatccgaccgcatctccctccatcgggacctaggtccggacaccagacctccagagtgcatagaacagaagttcaagcgctgcccccctctgccaaccacaagtgttatcatcgtttttcataacgaagcttggtcgactctcttgaggaccgttcactccgtgttatactcgtcgcctgctattctgctaaaagagattatcctggttgacgacgccagtgtggacgaatacttacacgacaagcttgacgaatatgttaaacagtttagtatcgtaaagatcgtgaggcagcgtgaacggaagggacttatcacggctcgtctgctgggggctacagttgcaaccgctgaaacgctgacattcctagacgctcattgcgaatgtttctacgggtggctagagcccttgcttgcacggatagctgaaaattatacagctgtcgtcagtcctgacattgcctctatagacttaaacacttttgagttcaataaaccctctccatatggctctaaccacaatcgcggaaacttcgactggagtttgtcattcggatgggaaagcctgcctgaccatgagaagcaaaggagaaaggatgagacataccctattaaaaccccgacatttgcaggtgggctcttctctattagcaaggagtactttgaatacatcgggagctacgacgaggaaatggagatctggggaggcgagaacattgaaatgagctttcgggtgtggcagtgcggagggcagttggaaattatgccttgcagcgtggtgggacatgtcttcagatccaagtctccccactccttcccgaagggcacccaggtcattgccagaaatcaagttcgtctggcagaagtttggatggacgagtataaggaaatcttctacaggagaaatacagatgcagctaaaattgtcaagcagaaggctttcggggatctctcaaagcggtttgaaatcaaacataggcttcaatgcaagaactttacatggtatctcaacaatatctaccctgaggtatacgtgcctgatctgaaccccgtgatcagcggctatattaagtctgtagggcagcctctatgtttagatgtgggggaaaacaatcagggtgggaagcctctcatcatgtatacatgtcacggactgggcggtaatcagtatttcgaatacagtgctcaacacgagattcgacacaacatccagaaagagctgtgcctgcacgctgcccaaggactcgttcagcttaaagcctgtacctataagggccacaagactgtcgttaccggcgaacagatctgggagatccagaaggaccaactcctgtacaatcccttccttaagatgtgcttgtcagcgaacggagaacatccatcgctggtgtcctgcaacccctctgatcctttgcagaaatggatcctgtctcagaacgactag

SEQ ID NO: 246239 - DNA, 1395 bp, synthetic construct
  misc_feature 1..1395: note = Description of Artificial Sequence: Synthetic coding sequence
  source 1..1395: mol_type = other DNA
atggcacacttaaagaggctggtgaagttacacattaagcggcactaccacaaaaagttctggaaactgggagccgttatcttctttttcattatcgtgcttgttttgatgcagcgcgaagtgtccgtgcagtacagtaaggaagagtccaggatggaacgcaatatgaagaataagaataagatgttggacttaatgttagaggccgtgaacaacatcaaggatgccatgcctaagatgcaaattggcgcaccagtgagacagaacatcgatgccggtgagcggccttgcctgcagggatattacaccgctgccgagcttaagcccgtcctcgatcggcctccgcaggactcaaacgcccctggggcaagcggtaaggcatttaagacgacaaacctcagcgtggaagagcagaaagaaaaggagcgaggagaggctaaacattgttttaatgctttcgcatccgatcgcatatctctccatcgggatttgggccctgacacccgcccaccagaatgtatcgagcagaaatttaagagatgcccgcctctgcctaccacaagcgtgatcatcgtttttcacaacgaggcgtggtcaacccttctcagaacagtgcacagcgtgctctactcatcaccagctatcctgctgaaagagataattctggtagatgacgcctcagtggacgagtatctgcatgataagctggacgagtacgtgaaacagtttagcattgtgaaaattgttagacagagggaaagaaagggcttgatcactgcacgattgttaggggcaactgtggccacagcagagacactgactttcctggacgctcactgtgaatgtttctacggttggctggagcccctcctggctcggatcgcggagaactataccgcggttgtctctccagatattgcatccatagacctgaacacctttgagtttaataaaccatctccgtacggatctaatcacaatcggggtaacttcgactggtctctgtctttcggctgggagagcctacccgatcatgagaaacagagacgcaaagatgagacctaccctattaaaacccctacttttgcaggcggtcttttctccatatccaaagaatacttcgagtacatcggttcttatgatgaagagatggagatttggggcggagagaatatagaaatgtctttccgcgtttggcagtgtggtggacagctagaaatcatgccctgttctgtcgtcggacatgtgtttcggtctaaatccccacattcgttccccaaggggacccaggtgattgctcgcaaccaggtgcggttagctgaggtgtggatggacgagtataaggaaatcttttatcggcgaaacactgacgccgctaaaattgtcaagcagtag

SEQ ID NO: 246240 - DNA, 174 bp, synthetic construct
  misc_feature 1..174: note = Description of Artificial Sequence: Synthetic coding sequence
  source 1..174: mol_type = other DNA
atggcccacctgaagagactggtgaaactgcacataaaaagacactatcataagaaattttggaagctgggggctgttatatttttctttatcattgtcctagtgctgatgcagagagaggtgtccgtgcagtatagtaaagaggaatcgaggatggagaggaacatgaaatag

SEQ ID NO: 246241 - DNA, 78 bp, synthetic construct
  misc_feature 1..78: note = Description of Artificial Sequence: Synthetic coding sequence
  source 1..78: mol_type = other DNA
atggcccacctcaagaggctggtcaagctgcatattaagaggcattaccataagaaattctggaagctgggggcatag

SEQ ID NO: 246242 - DNA, 273 bp, synthetic construct
  misc_feature 1..273: note = Description of Artificial Sequence: Synthetic coding sequence
  source 1..273: mol_type = other DNA
atggctcaccttaagcgcctggttaaattacacattaagcgtcattatcataagaagttctggaaactgggcgctgttatttttttctttattatcgtgctcgtgctgatgcagcgcgaggtatcagtgcaatactccaaggaagaatcccgtatggagcgcaatatgaagaacaagaataaaatgctcgatcttatgttagaggctgtgaataatatcaaagacgctatgcctaaaatgcaaatcggtgcccctgtaaggcagaacatttag

SEQ ID NO: 246243 - DNA, 36 bp, synthetic construct
  misc_feature 1..36: note = Description of Artificial Sequence: Synthetic coding sequence
  source 1..36: mol_type = other DNA
atggcacatctgaagaggctcgtgaaacttcattag

SEQ ID NO: 246244 - DNA, 1737 bp, synthetic construct
  misc_feature 1..1737: note = Description of Artificial Sequence: Synthetic coding sequence
  source 1..1737: mol_type = other DNA
atggccgtgagatggacctgggcaggcaagagttgcctgcttctggccttccttacagtcgcctatatttttgtggagctgctggtgtcaacattccatgcttccgccggagccggacgcgctcgcgaactgggcagtaggcggctgtcagatctgcagaaaaacacagaagacctttcccggcctctctataaaaagcctcccgctgattcccgggcactgggggagtggggcaaggcatccaaactgcagcttaatgaagacgagctgaaacagcaggaggagctgattgagcggtatgccattaacatatacctatcagatcgcatctctctgcacaggcacatcgaggataaaagaatgtatgaatgcaagtcccagaagttcaattaccggacacttcccactaccagcgtgatcatcgctttttacaacgaagcatggagcaccctcctgcggactatccattcagtgctggagacctcacctgcagtcctgcttaaagagataatcctggtggatgatctctcagatagggtttacctcaagactcagttggaaacgtatatatccaatctggaccgggtgcgactgatcaggacaaacaagcgggagggacttgtgcgcgctcggttgatcggtgcaaccttcgcaaccggtgatgtgttgaccttccttgattgtcattgtgaatgcaattccgggtggctggaaccattgctggaacggattggccgagatgagacagcggttgtatgcccagtcatcgataccattgactggaacacatttgaattttatatgcagattggcgaaccaatgatcggcggttttgattggcggctgaccttccaatggcattcagtccccaaacaggagcgagatagaagaatcagcaggatagaccccattcgttctcccaccatggccggaggcttgttcgccgttagtaagaagtacttccagtacctggggacctatgacactggaatggaggtgtggggaggggaaaacctggaactttcctttagggtttggcagtgcggcggtaaactagaaatccatccctgttctcacgtcggtcacgtgttccccaagagagccccttatgccaggcctaattttctgcagaacactgcacgagccgctgaagtttggatggacgaatataaggaacacttttacaaccgtaatccacccgcacggaaagaagcctatggcgacatctccgagcgcaagctgctgagggaaagacttcggtgtaaatctttcgactggtatttgaagaacgtgtttcctaacctgcatgtacctgaggaccggcctggctggcatggagcaatccgatcacggggaatttcaagtgagtgtctggactacaactcaccagacaacaacccaactggggctaatctgtctctttttggttgtcatggccagggcggtaaccaattctttgagtatacctctaacaaggaaatccgttttaatagcgtgacagagctgtgtgcagaagtaccagaacagaagaattacgtgggaatgcaaaactgccccaaagacgggttcccggttccggctaatatcatatggcatttcaaggaggatgggacaattttccaccctcattcgggactttgcctgtccgcttataggactcccgaaggaaggcctgacgtgcaaatgaggacctgtgacgcactggataaaaaccagatatggtcatttgagaaatag

SEQ ID NO: 246245 - DNA, 1869 bp, synthetic construct
  misc_feature 1..1869: note = Description of Artificial Sequence: Synthetic coding sequence
  source 1..1869: mol_type = other DNA
atgcgccttctaaggcggaggcacatgccgctgaggctcgccatggtggggtgcgctttcgtgttatttcttttcttacttcatcgggatgtgtccagccgggaggaggccaccgagaaaccctggctcaagagccttgtgtcccgcaaggaccatgtgctggacctcatgctcgaggctatgaataacctgcgcgatagcatgccaaagctccaaatcagagcacccgaggcccagcaaacgctgttttcgattaatcaatcctgtctccctggcttctacactcccgctgaactcaaacctttttgggaacgacctccccaggatcctaatgcacccggtgctgacgggaaagcctttcagaagtcaaaatggactccactggaaacacaggagaaggaggagggatacaagaaacactgtttcaatgcttttgcttctgatcgcatctcgttgcagagatctcttggaccggacacgagaccacctgagtgtgtggatcaaaagtttagacgctgtccgccactcgccaccacatccgttattatcgtgtttcacaatgaggcctggtccaccctgctgcggaccgtgtactcagttttgcatacgactcccgcaatcctgcttaaagaaatcatactggtcgacgatgccagcactgaagaacatctcaaggaaaagctcgagcagtacgtgaaacagttgcaggtggttcgggtggtgcgacaggaagaacgcaaaggcctgatcacggctcgccttctgggggcatccgtcgcccaggccgaggtcctgacctttctggatgctcactgcgagtgtttccatggttggctggagccgctgctggccagaattgccgaggacaaaactgttgtggtgtcgccagatatcgtgacaatcgatctgaacaccttcgagtttgcgaagcccgtgcagcgaggtagggtgcacagtcggggaaattttgactggagtctgacctttggctgggagaccctcccacctcatgagaaacaaagacggaaagacgagacctatccaataaaatctcccacctttgccggtggtctcttttccatctcgaagtcatactttgaacatattggcacatacgacaaccaaatggagatctggggcggagagaacgtggaaatgagtttccgtgtgtggcagtgtgggggtcagctagaaattatcccatgttcagtggtggggcacgtgtttcgcaccaagagccctcataccttcccaaagggcacatcagtcatcgctcggaaccaagtgcgcctagcagaggtatggatggattcatataagaaaatcttctatagacgcaaccttcaggcagctaagatggctcaggaaaagtctttcggagatataagcgagcgcctgcagctccgagagcaactccactgtcataatttctcgtggtacttacataatgtgtatcccgagatgtttgtcccagacctcactcctaccttctacggagctatcaagaatttgggcacaaatcagtgtctcgacgtgggtgagaacaatcgcggtgggaaaccccttattatgtattcttgccatggcctggggggtaatcagtacttcgaatacactactcagcgagacctgcggcacaatatagctaagcagctgtgcctacacgtaagtaaaggcgctctcggccttggatcttgtcatttcaccggcaaaaactcccaagtccccaaggatgaggaatgggagttggctcaagaccagctgatcagaaatagtggatctggcacatgtctcacatcacaggacaagaagccagcaatggcaccatgcaatccatcagatcctcaccagctttggttatttgtctag

SEQ ID NO: 246246 - DNA, 1869 bp, synthetic construct
  misc_feature 1..1869: note = Description of Artificial Sequence: Synthetic coding sequence
  source 1..1869: mol_type = other DNA
atgcgcctgctgaggagaaggcacatgcctctgaggctggctatggtcgggtgtgcgttcgtgcttttcctatttctgctgcaccgggacgtgagctcacgggaggaagctacggagaagccatggctcaaatcactggtgtcccgaaaagaccatgttctggacctgatgttagaggccatgaataatttgagagattctatgccaaaattgcaaatcagagctcccgaagcacagcagacgcttttcagcatcaatcaatcttgtctacccggtttttacacccccgcagagttaaagccgttttgggaacgcccacctcaggaccccaacgcacccggtgccgacggtaaggcatttcaaaaatctaaatggacaccattggagactcaggagaaagaagaaggctacaagaagcactgctttaacgcctttgccagcgatagaatttcgttacagcggagccttggaccggacaccaggcctcctgaatgcgtcgatcagaagtttcgtagatgccctccccttgccaccacgagtgtgattatcgtgttccacaacgaggcctggtcaacacttctgaggactgtgtatagcgtcctgcatacaacccccgctatattacttaaagaaataatcctggtcgacgatgcttcaacagaggagcacctgaaagagaaactcgaacagtatgtgaaacagttacaggtcgtgagagtcgtacgtcaggaagaacgcaagggacttattaccgctagactcctgggcgcttcggtggcccaagctgaggtgctgaccttccttgatgcacattgcgagtgcttccatggctggctggagccattactggctcggatcgcagaagacaaaaccgttgtggtgagcccagacatcgtgacgattgatctgaatacattcgaatttgccaaaccagtgcagcgagggagagtgcactccagagggaactttgactggagccttactttcggctgggagaccttacctcctcatgaaaaacaacggagaaaagacgagacttatccaataaagagtcctacctttgccggtggcctattttccatcagcaagtcctatttcgagcatattggtacttacgataatcagatggagatttggggaggagagaatgtggaaatgtcgttccgggtgtggcagtgtgggggtcaacttgaaatcatcccttgctcggttgtggggcacgttttcagaaccaagagccctcatactttccccaaaggaacaagcgtcattgcacggaatcaggtacggcttgccgaagtatggatggatagctacaagaagatcttctacagacggaacctccaggccgcaaaaatggcgcaggaaaagtctttcggagacattagcgaacgcctgcagttaagagagcagttgcattgccataatttcagctggtatttgcataacgtctatcctgagatgttcgtccctgatctaaccccaacgttctatggggctatcaagaacttgggaacaaaccagtgtttggacgtgggggagaacaatagagggggaaaaccgttgatcatgtattcctgtcatggacttggtggcaatcagtacttcgaatacacaacccaaagagatttgcgtcacaacatcgctaaacagctctgcctccacgtgagcaaaggcgctctgggcttgggttcatgtcactttactgggaaaaacagccaggtgccaaaagacgaggagtgggaattagcccaggatcagctgatccggaattcaggatcagggacgtgtcttacctcccaggataaaaaaccggctatggccccatgcaacccttccgatcctcaccagctctggctcttcgtctag

SEQ ID NO: 246247 - DNA, 1812 bp, synthetic construct
  misc_feature 1..1812: note = Description of Artificial Sequence: Synthetic coding sequence
  source 1..1812: mol_type = other DNA
atgagactattacggaggcgccacatgcccctcaggctggcaatggtgggctgtgcgttcgtccttttcctcttcttactcgtgagcagaaaagaccacgtgctcgacctgatgctggaggccatgaacaacctgagagacagtatgccaaagcttcagattagggccccagaagcccaacaaaccctcttctccattaatcagtcctgcctaccgggattctataccccagctgaactgaagcccttctgggaaaggcctccacaagatccaaacgcacccggagcagatggtaaagcatttcagaaatctaagtggacacctctggagacacaggagaaggaggagggctacaaaaagcattgtttcaatgctttcgcctctgatagaatttccctgcagcgtagcctcggacccgatacgagaccacccgagtgcgtggaccaaaagttccggaggtgtccccctttagccactacctccgtgattatcgtttttcacaatgaagcgtggtccacattactgcggacagtttatagcgtgctgcataccactcccgcaattctactcaaagagatcattctcgtcgatgatgcatctactgaagaacatctcaaagagaaactcgagcaatatgtcaaacagctgcaggtggtgagagtcgtgaggcaggaggagcgcaaagggctgatcaccgcacggttgctgggcgcaagcgtggcccaggccgaggtgctgacttttctggatgcccactgcgaatgcttccacggatggctcgagccactgctggcgaggatagctgaggacaaaacagtcgtggtgtcaccagatatcgtaaccatcgatttgaacactttcgaattcgcgaagccagtgcagcggggtagagtgcatagccggggtaatttcgattggagtctgacgtttgggtgggagaccctgccacctcatgagaagcagagaagaaaggacgagacatatcctatcaagagtcccacatttgccggtggactgtttagcatttcgaaaagttacttcgagcacattggaacgtacgacaatcagatggaaatttggggaggtgaaaacgtcgagatgtcttttagggtgtggcaatgcggtgggcaactggaaatcatcccatgcagcgtggtggggcacgtgttccgcactaaaagccctcataccttccccaaaggcacttctgtcattgccaggaatcaagtccgactcgctgaggtttggatggattcatacaaaaagatattttataggcgtaacctccaggctgctaaaatggcacaggagaaatccttcggtgacatcagtgagagacttcagctccgggaacagttgcattgccataattttagttggtatttacacaacgtctaccccgaaatgtttgtacctgatcttacccccacgttttatggcgctatcaagaacttggggacaaaccaatgtttggacgtgggagaaaacaaccgagggggtaagccattgattatgtattcctgccatgggctgggtggtaaccaatatttcgaatacaccacccaaagagatctcaggcacaacatcgccaaacagctatgcctccacgtctcaaaaggcgcacttggtctaggctcctgccatttcacaggaaagaattcacaggtgccaaaggatgaggagtgggagcttgctcaagatcagctgattcgcaacagcggctcaggcacctgcctcacaagtcaagataagaagcccgctatggccccatgtaatccctccgatcctcaccaactctggctgtttgtatag

SEQ ID NO: 246248 - DNA, 1974 bp, synthetic construct
  misc_feature 1..1974: note = Description of Artificial Sequence: Synthetic coding sequence
  source 1..1974: mol_type = other DNA
atgagacttaaaatcggattcatactccggagtttactcgtggtgggcagtttcttaggcttggtcgtactgtggtcctctctcactccaaggcccgatgacccctccccgctgagtaggatgcgtgaggatcgggacgtgaatgatcccatgcccaaccgcggtgggaatggccttgcacccggagaagataggttcaaacccgtggtgccttggccacacgtcgagggggtcgaggtggaccttgaatcaattcggagaataaacaaggcaaagaatgagcaggagcatcatgcaggtggcgactcgcagaaggatattatgcagagacagtacttaaccttcaagccgcagacctttacatatcatgatcctgttcttcgtccagggattcttgggaattttgaacctaaggagcctgaacctcccggagttgtggggggacccggagaaaaggctaaacctctggttctgggtcctgagtttaagcaggccattcaggcttctatcaaagagttcggatttaatatggtagcgtccgacatgattagtctggaccgatctgtgaacgacctgcgtcaggaggaatgcaagtattggcactatgatgagaatctactgacttcctccgtcgtgattgtgttccacaacgaggggtggtcaacgctgatgagaactgtgcattcagtgatcaagagaacacctcgtaagtacttggctgaaattgtgcttatagatgatttttccaataaagaacatcttaaggagaagctcgatgagtatataaagctgtggaacggcttagtcaaggtttttcggaatgaaaggcgggaaggtttgatccaggcaaggagcataggcgctcaaaaagctaagctgggacaggtgctgatttatttagatgcccattgcgaagtggccgtcaactggtatgcccctctggtggccccaatcagcaaggacagaacaatctgcacagtgccgttaattgatgtgatcaacggcaacacttacgagatcatcccccaaggaggcggagacgaggatggttatgccagaggagcctgggattggtctatgctttggaaacgggttcccctcacaccacaagaaaagcgcctgagaaaaaccaaaacggagccttatcggagtccggcaatggcgggaggcttgtttgctattgaacgcgagttcttttttgaactgggcctttatgatccaggcttacagatttgggggggtgaaaatttcgaaatctcctataagatctggcaatgcgggggtaagctcctattcgttccatgttctagagtaggtcatatctacagactcgagggttggcagggcaatccacccccaatatacgtcggaagttccccaacactgaaaaactatgtgcgggtcgtggaggtgtggtgggacgaatataaagattacttctacgcgagtaggcctgaaagtcaggctctgccctacggtgatatttcggaactgaagaagttcagggaggaccacaattgtaagtcttttaagtggtttatggaggagatagcctacgacataacttcacactatccactgccaccaaagaacgttgattggggcgagattcgaggttttgagacggcctattgcatcgatagcatgggcaaaaccaatggcggtttcgtggaactgggcccatgtcacaggatggggggaaatcaattgtttcgtattaacgaggctaatcaactgatgcaatatgatcagtgcttgacaaagggcgcagacggtagcaaggtgatgattacacattgtaacctcaacgagtttaaggaatggcagtattttaaaaacctgcatcggtttacacacattccctccggcaagtgtctggatagatcagaggtccttcaccaagtgttcatttctaactgcgattcatcaaaaactacacagaagtgggaaatgaacaacattcattctgtttag

SEQ ID NO: 246249 - DNA, 717 bp, synthetic construct
  misc_feature 1..717: note = Description of Artificial Sequence: Synthetic coding sequence
  source 1..717: mol_type = other DNA
atgagaacagtgcattccgtgattaaaaggactccccgtaagtatctggctgagattgtacttatcgatgacttcagtaataaagaacaccttaaggagaaattggacgagtatatcaagttgtggaatggcctggtcaaggtgttcaggaacgagcggagggaggggctgatccaagccagatctatcggtgcgcagaaagccaaactggggcaggtcctgatatatctggacgcccactgcgaggtggctgttaattggtatgcccctctcgttgcacccatctcaaaggatcgcaccacgtgcaccgtgcccctcattgattacattgacggcaatgactactctattgaacctcaacagggaggcgatgaggacgggtttgccagaggggcttgggattggagtctcctctggaaaaggatcccattgtcccacaaagagaaagccaagaggaagcataagactgaaccgtaccggtcacctgctatggcaggcggactgttcgctattgagcgggagttcttttttgagctgggcctttacgatcctgggctgcagatctggggcggaaaaaccttgcgatcccatactagatatggcagcgtcgtggcgaattattaccttttcctcgtgctcgtgctggatatatcgaccgtgctcagagctggtaaagaaattcttcggccatttatgctgggattgttgcaactctag

SEQ ID NO: 246250 - DNA, 1914 bp, synthetic construct
  misc_feature 1..1914: note = Description of Artificial Sequence: Synthetic coding sequence
  source 1..1914: mol_type = other DNA
atgatgttctggcggaagttgccaaaggcactgtttattgggctgaccttagcgattgcggtgaatctgctgttggtcttcagttccaaaggcaccctgcagaatctgttcactggcggtctgcaccgggagctacccctgcatcttaacaaaaggtacggcgcagttattaagcgcctaagccaccttgaggtcgaactgcaggatctaaaggagagtatgaaacttgctttaaggcagcaggaaaatgtgaactccacactgaagagagcaaaggatgaggtgcgccctttgttgaaagccatggagaccaaagtgaacgagacaaagaaacacaagacacagatgaagctgtttccgcattcccagctgttcagacagtggggagaggacctgtctgaagcccagcagaaggcagcccaggatttattccggaaatttggctataacgcctacctgtctaaccagttacccttgaaccgtaccattcccgatacccgagattaccggtgtctgcgaaagacatatccgtcacagctgccctccttatctgtcatactcatcttcgttaatgaggcactgtccatcatacaaagggcaattacctcaatcattaaccgcacacccagccggctgttgaaggaaatcatcctcgtggacgacttttccagtaatggggagctgaaagtgcatctggacgaaaaaattaagctctacaatcagaaatatcctgggctgctgaaaatcatccggcaccctgagagaaagggacttgcacaggccaggaataccggctgggaagccgctacagcagacgtggtagctattctagatgctcacattgaggtgaatgtgggctgggcagagcctatcctcgcccgaattcaggaagaccggactgtgattgttagtcccgtgtttgataacatcagattcgatactttcaagctcgacaagtacgagctcgccgtggatggcttcaactgggagctgtggtgtcgctatgatgctcttcctcaagcttggattgatctgcatgacgttacagcaccagtgaagtcaccctctatcatggggattctggccgctaacagacactttctaggggaaattggctccctggacggaggcatgctcatttacggaggggagaacgtggagttgtccctgcgggtgtggcagtgtgggggaaaggttgagatcctcccttgctcccgtatcgcccatctcgagcgccatcataaaccctatgcattagacctgacggccgctttgaagaggaatgctctgagggtcgctgaaatctggatggacgagcataagcacatggtttacttggcctggaatatccccctccagaactctggcatagatttcggcgatgttagtagccggatggctctgcgggagaaacttaaatgcaaaacctttgattggtatctgaaaaacgtctatcccctcctgaagcccttgcacacgatcgtgggctatgggaggatgaagaacctgttggatgagaatgtgtgcctggaccagggcccagtgccagggaacacccccattatgtactactgccatgaattcagtagtcagaacgtgtactaccacctgacgggtgagctgtatgttggccagcttatagcagaggcctctgcgagtgatcgctgcctgacagacccgggaaaggctgagaaacccaccttagaaccatgttccaaggccgctaaaaacaggctgcacatatactgggatttcaagcctgggggagctgtgatcaatcgagatactaagcggtgtctcgagatgaagaaagacctactgggctctcacgttctcgtactccagacttgcagtactcaggtgtgggagattcagcacactgtccgggattggggacagacaaattcccagtag

SEQ ID NO: 246251 - DNA, 648 bp, synthetic construct
  misc_feature 1..648: note = Description of Artificial Sequence: Synthetic coding sequence
  source 1..648: mol_type = other DNA
atggaattcgactgcgaaggtctgcgccgtctcctgggtaagtataagtttcgggacttaactgtggaggaactcaggaacgtgaacgttttctttcctcatttcaagtacagcatggacacctatgtctttaaggactcatcccagaaagacctgttaaactttactggcaccatacctgtgatgtatcaaggaaatacctataacattcctatccggttttggattctcgattcccacccctttgcaccacccatttgtttcctgaagccgacagctaatatgggaatactcgtaggcaagcatgtcgatgcccaagggcgtatttacctgccctacctacagaactggtcccatcctaagtctgttatcgtggggttgatcaaagaaatgatcgccaagtttcaagaggagctgcctatgtactctctgtcctctagtgatgaggcccgtcaagtagacttgttagcatacattgctaagataaccgaaggcgtatccgatactaatagtaagtcatgggccaaccacgagaataagacagtgaataaaattactgtcgtcggagggggtgagctgggtatcgcctgtacactcgccatctccgccaaggttgagagccggtccgtgacccaggcaggtgtgtag

SEQ ID NO: 246252 - DNA, 1416 bp, synthetic construct
  misc_feature 1..1416: note = Description of Artificial Sequence: Synthetic coding sequence
  source 1..1416: mol_type = other DNA
atggaattcgattgcgaaggccttcggcgactgctcggaaaatacaagtttagagatctgaccgtggaggagctgagaaacgtgaatgtgttttttccacactttaagtatagtatggatacctatgtatttaaggattcttcacagaaggatttgctgaacttcactgggactattccggtcatgtaccaaggcaatacgtacaatatccctatccgtttttggatcctggacagccatccttttgcaccacctatctgttttttgaagccaacagccaatatggggatcctggtgggtaagcatgtggacgcacaagggcgtatctacctgccctacttacaaaattggtcccacccgaaatcagttatcgtgggtcttatcaaggagatgatcgccaaatttcaggaagagctccctatgtacagtctgagctcaagtgacgaagcacgccaggtcgatctgctggcttacattgcgaagatcacggaaggggtgtcggataccaattcaaaaagctgggccaaccacgagaataaaacagtcaacaaaattacggtagtgggcggaggggagctcgggatcgcttgcactctggccattagtgccaaggggatcgcagatcgtcttgtgctactagacctcagcgaggggaccaagggagctaccatggacctggaaatcttcaacttaccaaatgtcgaaatttccaaagatctgtctgcttccgcacactccaaggttgtcatctttacagtcaattctctgggatccagtcagtcttacctggacgtcgttcagtcaaacgtcgatatgttccgggcactagtgcccgcattgggacactactcacaacacagcgttctgttagtggcttcccagccggttgagattatgacatatgtgacctggaaactgagtacattcccagcaaatcgagtgatcggaattgggtgtaatttggattcccagcgattgcagtatatcatcactaacgtccttaaagcccagacttccggcaaggaagtgtgggttattggggagcagggggaggacaaggtactgacatggagcggccaagaagaggttgtgtcacatactagtcaggtccagctctccaatcgcgcaatggaactactacgcgtgaaaggacagagatcatggtctgtgggtctgtccgtggccgatatggtagacagtatcgtaaacaataaaaagaaggtgcactcagtcagtgcgctcgccaagggatattacgacattaattctgaggtcttcttgtctttgccctgtatcctcggcacaaatggagtgtccgaggtgatcaagaccacccttaaagaggataccgttaccgagaagctgcagagctccgcctccagtattcacagtctgcagcaacagctcaaactctag

SEQ ID NO: 246253 - DNA, 747 bp, synthetic construct
  misc_feature 1..747: note = Description of Artificial Sequence: Synthetic coding sequence
  source 1..747: mol_type = other DNA
atggacttggagatatttaatcttcctaacgttgagatcagcaaagatctgtcagcatccgcccactctaaggttgttatcttcacagtcaactcgctgggttctagccagagttacctggatgttgtacaaagcaacgtggatatgttcagggcgttggtacctgcattgggacactacagtcagcacagcgtcctgttggtggccagccagcctgtggagatcatgacctatgtgacttggaaattgtcaacattcccagccaatcgagtcatcggcatcgggtgcaatcttgattcacagcgtctgcagtacataattacaaacgtcctgaaggcacagaccagtgggaaagaagtgtgggtcattggcgaacagggtgaggacaaggtcttaacctggagcggtcaggaggaagtagtgtcccataccagtcaagtgcagctctctaaccgagcgatggaattactccgggtaaaaggccagagaagctggtccgtcggacttagcgtagcagacatggttgactctatcgtgaacaacaagaagaaggttcacagcgtgtcagccctcgccaagggctattacgacatcaattctgaggtgttcctaagcctgccttgcattctaggcacgaacggcgtttccgaggttatcaagactactttgaaggaggacactgttacagaaaaattacagagctctgcgagcagtattcactcactccagcagcagttgaaactgtag

SEQ ID NO: 246254 - DNA, 1140 bp, synthetic construct
  misc_feature 1..1140: note = Description of Artificial Sequence: Synthetic coding sequence
  source 1..1140: mol_type = other DNA
atggagtttgattgtgaaggcctgcggagactcctaggcaaatacaaattccgagacctgactgtggaggagctccgcaatgtcaacgttttctttccccacttcaagtactctatggatacctatgttttcaaagacagttcccagaaggacctgttaaattttacaggtactatacctgtcatgtatcaggggaatacatacaacatccctattagattttggatcctggacagccacccctttgcaccacctatttgtttcctgaaacctacagcaaatatgggcattttggtgggaaaacacgtggatgcccagggcaggatctatctcccctatctgcagaattggagccaccccaaatctgtaatcgtagggttaatcaaagaaatgatagccaaatttcaggaggagctgcccatgtactctttatcaagctcagacgaagctcgccaggttgaccttctcgcttacattgccaaaattacagagggtgtcagcgacacaaacagcaagtcatgggcaaatcatgaaaataagacagtcaacaagatcacggtcgtcgggggaggtgaactcggcattgcttgtacattagctatctccgcaaaagggattgctgataggctggtgctgctggacctgtccgaaggaaccaagggggcaacaatggaccttgaaatatttaacttgcccaacgtggaaatttccaaagacctcagcgctagcgcgcacagtaaggtggtgatatttactgtgaactctttgggctctagccaatcttaccttgatgtcgtccaatcgaacgtggatatgtttcgcgctcttgtccctgccttggggcattactcccaacattcagtcctgctagtggcatcacagccagtggagatcatgacatatgttacctggaaactatccacattccctgccaatcgggtgatcggcatcggttgtaatctggacagccagcggctgcagtacatcattaccaatgtgctgaaagcccaaacctctggaaaagaggtctgggttataggagagcagggcgaagataaggtactgacttggagcgggcaagaagaggtggtcagtcacaccagccaggtgcaactgtcaaacagggacattatgatctag

SEQ ID NO: 246255 - DNA, 1350 bp, synthetic construct
  misc_feature 1..1350: note = Description of Artificial Sequence: Synthetic coding sequence
  source 1..1350: mol_type = other DNA
atggaatttgattgtgagggacttaggcggctgttagggaagtacaaatttagggatctcaccgtcgaggagttacgaaatgttaacgtgttttttcctcacttcaaatacagtatggatacctacgggaatacctacaacatccctatccgattttggattctagactcacaccctttcgcacctcccatctgctttcttaagcccaccgccaatatgggaatcctagttgggaagcacgtcgatgcgcagggacggatctacttgccgtatctgcaaaactggagccatcccaagtccgtgattgtgggactgattaaggagatgatcgccaagtttcaggaagaattgcctatgtactcactcagctcgagtgatgaggccaggcaggttgacctcttggcatatatcgccaagattaccgagggggtgtccgacacgaattcgaagagctgggctaaccacgagaacaaaactgtcaacaagattaccgtcgtggggggtggggagttgggtatcgcatgcacactggctatctcagctaagggtatcgcagatcgactcgtgttgctcgacctcagcgagggcaccaagggggcaacgatggacctggaaatctttaatctgcctaatgtggagatttctaaggatctctctgcatcagcccactcaaaggtagtaatctttacagtaaattctttggggtcctcccagagctacctcgatgtggtccagagtaatgtggacatgttccgggctctggtgcctgccttggggcattactcgcaacatagcgtgctgctggtcgcctcacagccagtggaaataatgacttatgtgacctggaagctgtcaacgttccccgctaaccgggtgatcgggattggctgtaacctggatagtcaacgactgcagtacatcataaccaatgtgctgaaggcccagacatcaggaaaggaggtctgggtgatcggggaacagggggaagacaaggtgctgacctggagcggtcaggaagaggtcgtgtctcacacgagtcaggtccagctgtccaatcgtgcgatggaactgcttcgagttaaagggcaacgcagctggtctgttggcctgtccgtagcggacatggtcgactctatagttaacaacaagaagaaggtacattccgtcagcgcactagccaaaggttattatgacattaactccgaagtcttcctgagtctgccttgtattttgggaactaatggggtgagcgaggtgatcaagaccaccctgaaggaagacacggttacagagaaactccaatcctctgcctctagtatacatagtctccagcagcagctcaaattgtag

SEQ ID NO: 246256 - DNA, 429 bp, synthetic construct
  misc_feature 1..429: note = Description of Artificial Sequence: Synthetic coding sequence
  source 1..429: mol_type = other DNA
atgggggacaaacctccaggttttagggggtcaagggactggataggctgcgtggaagcttcactgtgcctcgcccactttgggggaccccaggggcgtctctgtcacgttccacgcggtgtcggcctacacggcgagctggaacgtctttactcccactttgccggtggcggtggccctgtcatggtgggaggtgatgcagacgcgcgtagtaaagcattgctgggagtttgtgtaggctcggggaccgaggcgtacgtattggtgctggacccccactactgggggacgccaaagtccccaagcgagctccaagcggctgggtgggtgggttggcaggaagtgagcgccgctttcgaccctaactctttctataatctctgtcttaccagtctatcgtcccaacagcagcagaggacactggattag

SEQ ID NO: 246257 - DNA, 1410 bp, synthetic construct
  misc_feature 1..1410: note = Description of Artificial Sequence: Synthetic coding sequence
  source 1..1410: mol_type = other DNA
atggtcattagcgagagcatggacatcctgttcaggatccgcggaggactggacctggcctttcagctggccactcccaacgagatattcctcaaaaaggcactcaagcacgtcctgtcagacctgagcaccaagctctcttcaaatgccctggtgttccgtatctgccacagcagtgtttacatttggccttcatccgacatcaacactatcccaggcgagctcaccgatgctagtgcttgcaagaacatactaaggttcattcagttcgagccagaggaggacatcaagaggaaattcatgaggaagaaagacaagaagctgtcggacatgcaccagatcgtgaacatcgatctcatgctcgaaatgagcacctcacttgccgctgtgacgcccatcatagagcgagaatccggaggtcaccactacgtaaacatgacactgccagtggatgctgtgatctcggtcgcgccagaagagacctgggggaaagtacgaaagcttctggtggacgctatccataaccagctgactgatatggaaaaatgcatcctcaagtacatgaaaggcacatccattgtggtacctgagcctttacacttcctccttcctggcaaaaagaacctggtcaccataagttatccaagcgggatacctgacgggcagctccaagcctatcggaaagaattacacgatctgttcaatttgcctcatgatcggccatacttcaaacgcagcaacgcataccattttcctgacgaaccttataaagatgggtatattcgcaatccccatacatacttgaacccaccgaatatggagacgggcatgatctatgtggtccagggtatatatggctaccaccactacatgcaggatcgaatcgatgataacgggtggggctgcgcttacagatcacttcaaactatatgtagctggtttaaacaccaggggtacactgaacgcagcattcctacacaccgagagatccagcaagccctggtggatgccggagacaagcctgctacttttgtggggagtagacagtggatcggtagcatagaggtgcagctcgtgttgaatcagttaataggcatcactagcaaaatcctgtttgtgtcccaaggaagcgagatcgcgtctcagggacgcgagttagctaaccacttccagagtgaggggacccccgtgatgattggaggcggagtgctggcccacacgatactgggagtggcctggaacgaaattacgggacagattaagtttctgattcttgatcctcactatacaggagcggaagatctccaggtcatcttggagaagggctggtgcgggtggaaaggcccagacttctggaataaggatgcctactacaatctgtgtctgccccagcgacctaatatgatctag

SEQ ID NO: 246258 - DNA, 2484 bp, synthetic construct
  misc_feature 1..2484: note = Description of Artificial Sequence: Synthetic coding sequence
  source 1..2484: mol_type = other DNA
atggtcgtccagaagccgcatgggaccatggagtatactgctggcaaccaagatacactcaacagcatagcattgaagtttaacattactcctaataaattggtggagctcaataagttattcacgcacacaattgtacccggtcaggtgctttttgtgcctgacgctaacagtccaagctcgacacttcggctgagttcatccagccctggtgcaaccgtttctccatcttctagcgacgcagaatatgataagctcccagacgcagacctagccaggaaggcccttaagccaatcgagagagtcctgtccagtacctctgaagaggacgagcccggagtggtaaagtttctcaagatgaattgtcgctatttcacagatggcaaaggcgtggttgggggagtaatgatagttacaccgaataatataatgttcgacccacacaagtcagaccccttagtaattgaaaacgggtgcgaagagtacggcctgatatgtcctatggaggaggtggtctctatcgcgctctataatgatatcagccatatgaagatcaaggatgcactcccaagccccggagagtgggaagaccttgcgtctgagaaagatattaacccattcagtaagttcaagagcatcaataaggaaaaacgtcagcagaatggagaaaaaattatgacatctgacagtagaccgatcgtgccgctcgagaaatcgacgggacacacacctaccaagccttccgggtcatccgtatccgagaagctgaaaaagctcgacagttctagagagactagccatggctctcccaccgtcacaaaactctcaaaagagccgagcgatacttcatccgcctttgagtcgactgcgaaagagaacttcctgggggaggatgatgatttcgtcgatttggaagagttgagcagccagaccggtgggggaatgcacaaaaaggatacactgaaggaatgcttgtcactcgatccagaagagcgcaagaaggcagagtcccagatcaacaactctgctgtggaaatgcaggtccaaagcgcccttgcattccttggcacagaaaatgatgttgagctgaagggcgcactggatttggaaacttgtgaaaagcaagacattatgccagaggtggacaaacagagcggatcaccagaaagcagagttgaaaacaccctgaacattcatgaggacttagacaaggttaaactcatcgagtactacctcaccaagaacaaggaaggccctcaggtgtccgaaaatctgcagaaaacagagttaagcgatgggaagtccattgagcctggaggcattgatatcacattgtcctcttcactgtcacaggctggcgatccaatcacagagggcaacaaagagccggacaagacctgggtgaagaaaggtgagcccctgcctgtcaagctcaatagctctaccgaggcaaacgttattaaagaagccctggattctagcttggagagtacgctggataactcatgccagggggctcagatggacaataagtccgaggtccagctgtggcttctgaagcggatccaggtgcccatcgaggatatcctccctagcaaagaagagaaatccaagacacccccaatgtttttatgtataaaagtcggtaagcctatgagaaagtcatttgccacccacaccgccgcaatggtgcagcagtacgggaagaggcgaaaacaaccagaatactggtttgcagtgccacgcgagagggtggatcacctttatacatttttcgtccagtggagcccagatgtctacggaaaggatgccaaagagcagggcttcgtcgtggtggagaaagaagaactaaatatgattgacaactttttctccgagcctacgaccaagtcctgggagataatcaccgtagaagaggccaagcgtagaaaaagtacatgtagctattatgaggatgaagatgaagaggtgttacccgtcctgcggcctcatagtgctctcctggagaacatgcacatagagcagctcgccaggcgactccctgctagggtacagggatacccctggcgcctggcatacagcacgctggaacatggcacgagtctaaaaaccctctacagaaaatccgcatcactggatagtccggtcctccttgtgattaaggatatggataaccagatcttcggtgcctatgcaacgcaccctttcaagttctcagaccactactacggtacaggtgagactttcctctacacatttagccctcattttaaggtgttcaagtggtctggagagaactcttactttatcaacggcgatatctcctctttggaactgggcggaggcggaggccgatttggcctctggctcgatgccgacctgtatcatgggagatcaaacagctgctctacatttaacaatgatatcttgagcaaaaaggaggacttcattgttcaggatctggaggtctgggcatttgactag

SEQ ID NO: 246259 - DNA, 735 bp, synthetic construct
  misc_feature 1..735: note = Description of Artificial Sequence: Synthetic coding sequence
  source 1..735: mol_type = other DNA
atggccgctgcagcatcacctgctttccttctgtgtttgccactgctgcatcttttgtcagggtggtccagggctggctgggtcgatacgcattgtttatgttatgactttatcatcactccaaagtccaggcccgaaccccagtggtgcgaggtgcagggactggtggatgagagacccttcctccattacgattgcgtcaaccataaagccaaggcattcgcctcactcgggaagaaagtaaacgtgactaaaacttgggaggagcaaactgagacattgcgagacgtagtggatttcctgaaaggacagctgctagacattcaggtggaaaatctgattcctatagaacctctaaccctgcaggctcggatgagttgcgagcacgaggctcatggccatggacgaggcagctggcagttcttgtttaacggccagaagttcctcctttttgacagcaataatcgcaagtggacagccctccatcccggtgctaaaaagatgacagaaaagtgggagaagaatagggacgtcacaatgtttttccaaaaaatcagccttggcgattgcaagatgtggctggaagagtttttgatgtactgggaacagatgctggatcccacaaaacctccgagcttggcacctgggaccacacaaccaaaagctatggctaccactttgtctccctggagtctcctgattatcttcctctgttttattctggcgggtaggtag

SEQ ID NO: 246260 - DNA, 741 bp, synthetic construct
  misc_feature 1..741: note = Description of Artificial Sequence: Synthetic coding sequence
  source 1..741: mol_type = other DNA
atggcagccgctgccgcaacaaagatactactatgtttgccactcctgctcctgttgagtggatggtcacgtgcaggccgtgctgatccccactccctatgctacgacattaccgtgattcccaaatttcgccctggcccacggtggtgcgctgttcagggtcaagtggacgaaaaaacattcctgcactatgattgcggtaacaagaccgtcacccctgtgtcccccctcgggaaaaagctgaacgtgacaaccgcgtggaaggcgcagaaccctgtactacgtgaggttgtggacatccttaccgaacagctccgcgacattcagctggagaattataccccgaaagaaccgttaacactccaagcccgtatgagttgcgaacagaaggccgagggccactcgtctgggtcatggcagtttagctttgacggccaaatctttctcctgttcgacagcgagaagaggatgtggactacagtgcatccaggagcaagaaaaatgaaagaaaagtgggagaacgacaaggtcgtggcaatgagcttccattatttcagcatgggagattgtatcggatggttagaagatttccttatgggaatggactctactctcgagccaagcgcgggtgcccctctggccatgtccagcggaacaacccagttgcgagcaaccgcgacaactttaatactgtgttgtctcttaattatcctgccctgctttatcctgcccggtatctag

SEQ ID NO: 246261 - DNA, 510 bp, synthetic construct
  misc_feature 1..510: note = Description of Artificial Sequence: Synthetic coding sequence
  source 1..510: mol_type = other DNA
atggcagctgcagcttcccctgcgattctgccccgtctcgctatactgccgtacctcctgtttgactggtctggaactggcagggctgatgcacactctctttggtataactttaccatcatccacctgcccagacacggtcaacagtggtgtgaggttcagtcacaggttgaccaaaaaaattttctctcttacgactgtggttcagataaggtactgtcaatgggacatctagaagagcagctttacgcgaccgacgcatgggggaaacaactggagatgctgcgggaagtgggtcagagactcagactggagctagcggataccgagctggaagattttactccaagcggccctttaaccctgcaagttcgtatgtcttgcgagtgcgaggcagatggatacatccggggatcttggcagttcagcttcgatgggaggaaatttctgctcttcgacagcaataatcggaaatggaccgtggtccacgccggtctggggactagctag

SEQ ID NO: 246262 - DNA, 735 bp, synthetic construct
  misc_feature 1..735: note = Description of Artificial Sequence: Synthetic coding sequence
  source 1..735: mol_type = other DNA
atggccgctgcagcttctcccgctatcctaccaagattagctatcttgccctacctgctgtttgactggtcagggacaggacgagccgacgcccactccttatggtataatttcaccattattcacctgccaaggcacggccagcagtggtgtgaagtgcagtcacaggtggatcaaaaaaacttcctgtcgtacgactgtgggagtgacaaagtcctgtccatgggacacctcgaggaacaattgtacgctactgatgcttgggggaaacagctggaaatgctgcgcgaggtgggtcaaagactcagactggaactcgcagacacggaactggaagacttcacacccagcggtcctctgaccctgcaagtacgtatgtcgtgtgagtgtgaagctgacgggtacattagaggctcttggcagttttccttcgacgggcgtaaatttctgctgttcgactctaacaatcggaaatggacagtggtgcacgctggggctcgacgtatgaaggagaagtgggaaaaagatagtggtctgaccacttttttcaaaatggtttcaatgagggattgtaaaagttggctccgcgacttcctcatgcacaggaaaaagcggttggaacctaccgcaccacctactatggcccctggtctcgcacagcccaaggccatcgccactaccctttcaccctggtcctttctgattatactgtgcttcatcctgcctggcatatag

SEQ ID NO: 246263 - DNA, 393 bp, synthetic construct
  misc_feature 1..393: note = Description of Artificial Sequence: Synthetic coding sequence
  source 1..393: mol_type = other DNA
atggccgctgccgcaagcccagcgatcctgcctagacttgccatcctgccctaccttctgttcgattggtctgggacaggccgtgcagaggagcagctgtacgcaacagacgcatgggggaaacaattggagatgctgagagaagtgggacagcgtctccgtttggaactggcagacaccgaattagaggacttcaccccaagtgggcctctgaccctccaggttcgcatgagctgcgaatgcgaggcagacggatatatccggggttcatggcaattttccttcgacggaaggaagttcctcctcttcgactcaaataatcgtaagtggacagtcgtgcatgcaggtgcacgccgaatgaaggagaagtgggaaaaatctcatctggagtag

SEQ ID NO: 246264 - DNA, 735 bp, synthetic construct
  misc_feature 1..735: note = Description of Artificial Sequence: Synthetic coding sequence
  source 1..735: mol_type = other DNA
atggctgctgctgcctctcctgccatcctgccccgactcgcgatactgccctacctgctgttcgactggtctggaaccggccgtgccgacgcccattcgctctggtacaatttcacaatcattcatttgcctcggcacggccagcaatggtgcgaggtacagtctcaggtggatcagaaaaactttctctcctacgattgtggctccgacaaggtgctgtccatgggacatctagaagagcaactctacgcaacagatgcatggggcaaacaactggaaatgttgcgagaggttggtcagcggctgcgcttagaactagccgacactgaactagaggactttactccaagcggtcccctgactttgcaggtacgaatgtcctgcgagtgcgaggccgacggttacatccgcggaagttggcaattttcttttgacggtcgtaaattcctgctgttcgactccaacaacagaaaatggaccgttgtgcacgccggagccagacggatgaaagaaaagtgggagaaggactctggactgacaacctttttcaagatggtgtcaatgcgagactgtaagagctggctccgtgactttttgatgcatcgaaagaagagactggagcctaccgctccacccacaatggccccaggattagcccagcctaaggcaattgccacaaccctctccccgtggagttttctgataattctgtgcttcattcttccgggaatatag

SEQ ID NO: 246265 - DNA, 663 bp, synthetic construct
  misc_feature 1..663: note = Description of Artificial Sequence: Synthetic coding sequence
  source 1..663: mol_type = other DNA
atgaaggtaaagaaagggggtgggggagctggcaccgcaacagagtcagcaccaggcccatcggggcaatctgtggcgccaattccgcagccacctgcagagtcagagtccggcagcgaaagtgaacctgatgctggacccggtcccaggcccggtccccttcagcgcaaacagcctatcggtcctgaagatgtactgggactgcaacgaatcacaggcgattatctgtgctcgccagaagaaaatatttataagatcgattttgttcggttcaaaatccgtgacatggacagcggtacggtgctgtttgagattaaaaagcctcctgtatccgagcgattacccattaaccggagggatctagatcctaacgctggtcgttttgtcagataccaattcactccagccttccttaggctgaggcaggtaggggctacagttgaatttacggtgggagataaaccagtgaacaacttccgcatgatagagcgccattattttcggaaccagctgctcaagtcatttgactttcattttggtttctgcattccatccagtaagaatacctgcgaacatatctacgatttccctccactttcagaggagctatcagccagggccggttcgtccggatctggcgaggtcggtgcttctcgggactag

SEQ ID NO: 246266 - DNA, 723 bp, synthetic construct
  misc_feature 1..723: note = Description of Artificial Sequence: Synthetic coding sequence
  source 1..723: mol_type = other DNA
atgaaggtgaaaaagggcggagggggagctggcaccgctacagagtccgcccctgggccttccggacagagcgtggccccaattccccagcctcctgcggaaagcgaatctggaagcgagagcgagccagacgctggacccggtccacggccaggccctctgcagcgcaagcagccaatcgggcctgaagatgtgttgggattacaaagaatcaccggtgattatctctgcagccctgaggagaacatctataagatcgattttgttcggtttaagattcgcgatatggacagcggaaccgttctttttgagattaagaagccacccgtatctgaaagacttcccatcaatagacgagacctggatccaaacgccggtcggtttgtcaggtatcagtttacgcctgcctttctgcggctcaggcaagtgggcgctacagtggagtttacggtaggcgacaagcctgtgaataacttccggatgatagaacggcattatttccggaatcagcttcttaagagcttcgacttccatttcgggttttgtatacctagttccaaaaatacatgcgaacatatctacgactttccccctttgtccgaagagctaatctccgaaatgattcgacacccctacgagacccagagtgattctttttactttgtcgacgaccgcctggtgatgcacaataaggctgactattcttattccggcacaccatag

SEQ ID NO: 246267 - DNA, 627 bp, synthetic construct
  misc_feature 1..627: note = Description of Artificial Sequence: Synthetic coding sequence
  source 1..627: mol_type = other DNA
atgaaggtgaagaaggggggtggcggagctggaacggctaccgaatcagcacccggaccatccggacagagcgtggcccctatccctcaacctccggctgagtccgaaagcggctccgaatctgaacctgacgccggaccaggacccaggcctggcccactgcagagaaagcagcccattgggcctgaagatgtgttggggctccagcggatcactgggggtgccaggcctctgttccctgcctggcgttttaagattcgtgacatggacagtggaacagtgcttttcgaaatcaagaagccaccagtatctgagagactgcctataaacaggcgagaccttgacccgaacgctggcagattcgtgcggtatcagttcacccccgcttttctcagactgcggcaggttggtgccacagttgagtttacagttggagataaaccggtgaacaattttaggatgatagagcgtcattacttcaggaaccagctgctgaaatcttttgacttccattttggattctgtatcccctccagcaagaatacgtgcgagcacatatacgatttcccccctctgagtgaagaactcagtgctagggccggatcaagcgggtccggcgaagtgtag

SEQ ID NO: 246268 - DNA, 5112 bp, synthetic construct
  misc_feature 1..5112: note = Description of Artificial Sequence: Synthetic coding sequence
  source 1..5112: mol_type = other DNA
cttagtctgttgtgtgtgtcattaaaaaaagctaaattcgacggcgcacaggagaaatttaatacctacgttactctgaaggttcagaacgtaaaatccacaaccatagccgtgcgcggttcccagccaagctgggagcaagattttatgtttgagatcaatcggctcgacctggggttaacagttgaagtatggaacaagggcctgatttgggatacgatggtgggaaccgtgtggatccctttacgcaccatcagacagtccaacgaggagggcccaggcgaatggctgacactagattcccaggttataatggccgacagcgagatctgcggaactaaggatccgaccttccaccgcatcctactggacacaaggtttgaactcccgctggatatcccagaagaagaggccaggtactgggctaagaaactcgagcagctcaatgctatgcgcgaccaggatgagtactcttttcaggatgagcaggacaaaccactcccagtgccgtctaatcaatgctgcaactggaattactttggctggggcgagcaacataacgacgatccggacagcgcagtggacgaccgggacagcgactacagaagcgagacatcgaactcaattccgccaccttattatacaaccagtcagccaaacgcatccgtccatcagtatagtgtccgcccacctcccctgggctcaagggagtcctactcagatagcatgcacagttatgaggaattctccgagcctcaagctctgtcacccacaggctctagccggtacgccagctctggggagctgtcccaagggtcttcccagctcagtgaggattttgatccagatgagcatagtttacaggggtctgatatggaggatgaacgagatcgggactcttatcatagctgccactcgtccgtgagttatcataaggattctcccaggtgggatcaggacgaagaggagcttgaagaagacctcgaggactttctggaagaggaagagctgcctgaagacgaggaggagcttgaggaggaagaagaggaagtgcctgacgacttaggatcctatgcacagcgagaggacgtcgccgtggccgagcccaaggacttcaagcgcatttccctaccaccggcagccccaggcaaagaggacaaggccccagttgctcctaccgaggcgccagacatggccaaagtcgctcccaagcccgcaaccccagataaggtgcccgctgcagaacagatccctgaagcagagcctcccaaagatgaggaaagcttccggcctcgggaggacgaggaggggcaggagggtcaggacagcatgagtagggctaaggcaaattggttgagggcattcaacaaggtccggatgcagctccaggaggcacgaggagagggggagatgagcaaatctctctggtttaaaggcggacccggtgggggactgatcataattgatagcatgcctgatatccggaagaggaagccgatccctctcgtcagcgacctcgctatgtctttggtgcaatcacggaaagcagggattacgtctgctctcgcctcctctactctgaacaatgaggagctaaagaatcacgtatacaagaaaactcttcaagcacttatttaccctatctcttgcaccacaccacataattttgaggtgtggacggcaacgacccccacctactgttacgagtgtgagggactgttatggggaatcgccagacagggcatgagatgcaccgagtgtggagtgaaatgccatgagaagtgccaggatctcttgaatgccgactgcctacagagggctgccgagaagtccagcaagcacggggctgaagaccgaacccagaatattatcatggtgctgaaggacaggatgaagattagggaacgaaataaacccgagatctttgagttaattcaagaaattttcgcagtcaccaagacagcccatactcaacagatgaaggctgtcaaacagagcgtcctcgatggcacgtcaaagtggagcgccaaaatatctattaccgtggtttgtgctcagggccttcaggcaaaagataagacaggctcatcggacccatacgttactgtgcaggtgggaaaaacaaaaaagcggacgaaaaccatctatggcaacctgaatcccgtctgggaggagaattttcacttcgagtgccacaattcatcggacaggatcaaggtgcgcgtgtgggatgaagacgatgacatcaaatctcgagtgaaacagcgcttcaaacgcgagagcgacgattttctcggtcagacaatcatcgaggtaaggacccttagcggcgagatggatgtgtggtataacttagataagcgcacagataaaagtgcagtgtctggcgcaatccgtttacacatctctgtggaaattaagggagaggaaaaggtggcgccataccacgtgcaatacacctgcctgcatgagaatctgttccatttcgtgaccgatgtgcagaacaacggcgtcgtgaaaattcctgacgccaagggggatgacgcttggaaagtgtactacgacgaaacagcccaggagattgtcgacgagttcgcaatgcgctacggtgttgaatccatataccaggccatgacacactttgcttgtctcagcagcaagtatatgtgcccaggggtgccagccgtgatgtctaccctgctggccaacataaacgcctactacgcccatacgactgcgtcaaccaacgtgtccgcttccgacagattcgcagctagcaattttgggaaggagagatttgtgaaactgctggatcaactgcacaactcgttacgcattgacttgtcgatgtatagaaataatttcccggctagctcccccgaaagactacaggatctgaaaagcacagtcgacctgctgacaagcatcaccttttttcggatgaaggtgcaagagcttcagagcccgccacgggcatctcaagtggtaaaagactgtgtcaaggcctgcctgaactctacatacgagtatatattcaacaactgtcatgagctgtactcccgcgaataccagaccgatcccgctaagaagggcgaagtactgcccgaggagcaggggccaagtatcaagaaccttgatttctggtcaaaactgatcacactgatagtatcgataattgaggaggacaaaaactcctatacgccctgcctgaaccaatttccgcaggaactcaacgtaggcaaaataagcgccgaagtgatgtggaacctgtttgcccaagacatgaagtacgcgatggaagagcacgacaagcacaggttatgtaaatccgccgactacatgaaccttcactttaaggttaaatggttgtataatgagtacgtcacagaactcccagctttcaaagatcgcgtccctgagtatcccgcttggttcgagcccttcgtgattcaatggctcgacgaaaatgaggaggtgagccgggatttcctacacggagccttagagcgtgacaaaaaggatgggtttcaacaaactagcgaacacgccctattcagctgttccgtggtggacgtcttttcccaactgaatcagagctttgaaataataaaaaagctggagtgccccgacccacagattgttggacattatatgcgccgtttcgctaagaccatatccaacgtgctacttcagtacgctgacattatatccaaggacttcgcatcttactgctcaaaggagaaggagaaggtcccctgcatccttatgaataacacgcagcagctgagagtgcagctggagaagatgttcgaggccatgggcggaaaggagcttgatgctgaagccagcgacatcctgaaggagctccaggtgaagcttaacaacgttcttgacgagcttagtagagtgtttgctacgtcctttcagccacacattgaagaatgcgttaaacagatgggagacattctttcgcaggtcaagggcactggcaacgtcccagcatcagcgtgttcctcagttgcccaggacgccgataatgtcctccagccaataatggatttattggattccaatctgacgctgttcgctaagatttgtgagaagactgtactgaaaagagtcctgaaggagctgtggaagctggtgatgaacactatggaaaagactattgttttgcctccactgacggaccagacattgcagggtaaccttctccggaagcacggtaaaggactcgaaaagggtagggtcaaacttccctcacattccgatggaacgcagatgatattcaatgccgctaaagaattggggcagttatccaagcttaaggatcatatggttagagaggaggctaagtcattgacccccaagcagtgtgctgtagtggaactcgctttagacacaattaagcagtatttccacgcgggaggcgtcggcctgaaaaagacctttctggagaaatcacccgacctgcagagcctgcggtatgccctgtctctttatactcaagcaaccgacctgttgattaaaacttttgtccagacacagtcggctcagggactgggggtggaggatcccgtcggggaagtgagtgtgcacgtcgaactgttcacccatcctggcaccggcgagcataaggtcacagtgaaagtggtcgcggcaaatgacctcaagtggcaaacgtcgggaattttccggccttttatagaggtgaatataatcgggccacagctgtcagacaaaaaaaggaagttcgcaaccaagtccaaaaataatagttgggccccaaaatataatgagtcatttcagttcacactcagtgcagatgctgggcctgaatgctacgagctgcaggtgtgcgtgaaagactattgtttcgccagggaggaccgcacagtcggtctggccgtgcttcagctgagagaattggcccaacgaggatccgctgcatgctggttgcctctaggacgtcggatacatatggatgacacaggcctgacagtgttgaggattcttagccagcgatccaatgatgaggtggccaaggaatttgtcaagcttaagagcgatactcgatctgcagaagaagggggtgctgcccctgcgccttar

SEQ ID NO: 246269 - DNA, 5375 bp, synthetic construct
  misc_feature 1..5375: note = Description of Artificial Sequence: Synthetic coding sequence
  source 1..5375: mol_type = other DNA
atgggtggcggtgggacgtgcactatctctgtgcaggtgagagtctgcacgggcggaaacctccttggaggcagacgaagacccctatcaccctgcaatgaggaagtgtggggcgaagcccctctgccaggcgctcgtccattcaacgctcctcccgctaggagcgctcccgcaccctccggcgtccctggccttcgccttccggcaccccaccaaagacactcccgacccggtcgcttaagaccgacttgtgagctgggagacatgtctctcctttgcgtgggcgttaaaaaagcgaaatttgatggggcacaggagaagtttaacacctacgtcacccttaaagtccagaatgtgaagtctaccaccattgccgtcaggggttcacagcccagctgggagcaggactttatgttcgagattaaccgtctggatttagggttgactgtcgaggtatggaacaaaggcctcatctgggatactatggtaggtacggtctggatccctttaagaacaataaggcaatccaatgaagaggggcctggggagtggctgacgttggacagtcaggtgatcatggctgattcagaaatttgtggtaccaaggatcctacatttcatcggattctgctcgatacacggttcgaacttcccctcgacatccctgaggaggaggcccgatactgggccaaaaaactggaacaattgaacgccatgagggaccaagatgagtacagcttccaagacgaacaggataagcctctgccagtgccaagtaatcagtgttgtaattggaactatttcggctggggcgaacaacacaatgatgatcctgactcagctgtcgacgacagagactcagattaccggtctgagacaagcaactcgattccacccccttactacactacaagccaacccaatgcaagcgtccatcaatactccgtcaggccaccgcctttgggctctcgcgaatcgtatagcgactctatgcacagctacgaagagttctctgagcctcaggctctcagtcccaccggtagctccaggtacgcctctagtggcgagctgagccagggctcctcgcagctctccgaggacttcgatcccgacgagcattcgctgcaaggctctgatatggaggacgaacgggatcgtgacagttaccactcttgccactcaagcgtctcctaccataaggattctcctcgatgggaccaagacgaagaggaactggaggaagacctggaagactttctggaagaagaagagctcccagaagatgaagaagaacttgaggaggaggaggaggaagtcccagacgatctggggagctacgctcaaagagaagatgtcgcggtagcggagcctaaggatttcaaaaggatcagcctcccccctgcggcaccgggaaaggaggacaaggcgcctgtggcacccaccgaagctcccgacatggctaaggtcgcccctaagcctgccactcccgataaagtgcccgcagcagagcagattcctgaggccgagcctcccaaggatgaggagtcattccggcctagagaagatgaagaagggcaggaaggacaggattcaatgtcccgggctaaagcgaactggctccgtgctttcaacaaggtccgcatgcagttgcaggaggctcggggagaaggagaaatgtcaaagtctctctggtttaagggcggtcccggtgggggactgataataatcgactccatgccggatatcaggaagaggaagcccattccccttgtgagtgacttggccatgagcctggtgcagagtaggaaagccggtatcacctcagcactagcgtctagcaccttaaataatgaggagcttaagaatcacgtatacaaaaagaccctacaggcattaatctatcctataagttgcacaaccccgcacaattttgaggtatggactgctaccacccccacctactgctacgaatgtgaagggctcttatggggcattgccagacagggtatgcgctgcacagagtgtggcgtgaagtgccacgaaaaatgccaggatttgctgaacgccgactgtctgcagcgggctgccgaaaaaagttcaaagcacggcgcagaggatcgaacccagaatatcattatggtgctgaaggatcggatgaaaatcagggagcggaacaagccagaaatcttcgagttgattcaagagatttttgcggtcacaaagactgcccacactcagcaaatgaaagctgttaagcagtcagtgctggatggcaccagcaaatggtctgcaaaaatctctattaccgtggtctgtgcgcagggactccaggcaaaggacaagaccggaagttccgatccatatgtaacagtgcaggtcggcaagaccaaaaagagaactaaaacaatttacggaaacctgaaccccgtttgggaggagaactttcactttgagtgtcacaatagctccgatcgtattaaagtgcgcgtgtgggacgaagacgacgacatcaagagccgcgttaaacagaggttcaagcgcgagtctgatgattttctgggtcagaccatcattgaagtacgcactctgagcggcgaaatggatgtgtggtacaatttagacaagcgcacagacaagtcagccgtgagcggagcaatccggctgcacatatcggtggaaattaagggggaagaaaaggtcgctccttatcacgtgcagtacacatgtcttcatgagaatctgttccattttgtaacagatgtacagaacaacggtgtggtcaaaattccggacgctaagggcgacgacgcctggaaagtctactacgacgaaacggcgcaggagatcgtggacgagtttgctatgagatatggcgttgaaagtatctatcaggccatgactcacttcgcctgcctgtcatccaagtacatgtgccctggggtaccggcagttatgagcacgctcctggctaatattaacgcgtattacgctcataccaccgctagcacgaatgtcagcgcctcggataggttcgctgcgtctaacttcggcaaggaaagattcgtgaaactacttgaccagcttcataattctctccgcatcgacttatccatgtatcgcaataacttccctgcctcctctcctgagcgactacaggacctgaagagtaccgtggatctgcttacatccattacattcttccggatgaaggtgcaggaactacagagtcctcccagggcttctcaggttgtgaaagactgcgttaaagcctgtctgaattctacttatgagtacatttttaacaactgccacgaactctacagtagggaataccaaactgatcccgctaagaaaggcgaagtgctccccgaagagcaaggcccatccatcaaaaacttggatttttggagtaaattgatcactttgatcgtgtccatcatcgaagaggacaagaattcctacacaccctgcctgaaccagttccctcaggaacttaatgtggggaaaatctccgcagaggtgatgtggaacctttttgcacaagatatgaagtatgccatggaggagcatgataagcacagattgtgcaaatctgcagactatatgaatcttcacttcaaggttaaatggttatacaacgagtacgttaccgagctaccagccttcaaagacagagtcccagaatacccagcttggttcgagccttttgtcattcagtggttagatgaaaacgaagaggtgtcacgcgactttttgcacggagccctggaacgggataagaaagacggcttccagcagacatctgagcacgcactcttctcctgttcagtcgtcgatgtttttagtcagctaaaccagtcttttgaaataatcaagaagttggagtgcccagatccacaaattgtcggacactacatgaggaggtttgctaagaccatttctaacgtgctgcttcagtatgccgatatcatctccaaggactttgcttcctattgctccaaagagaaggagaaggttccatgtatccttatgaacaacacgcagcaactgagggtccagctcgagaagatgttcgaggccatggggggaaaggagctagatgccgaggcgtctgacatcctaaaagagctgcaggtcaaattaaataatgttctggacgaattatctcgtgtgtttgccacctcatttcaaccccacattgaagagtgcgtcaagcaaatgggtgacatcctctcacaggtcaaaggaacgggaaacgtacccgctagcgcgtgctctagtgtggcccaagatgctgacaacgtgttgcagcctatcatggatcttctggattccaacttaacacttttcgccaaaatttgtgaaaaaaccgttctaaagcgagtccttaaagagttatggaaactcgtgatgaacacgatggaaaagactatcgttctgcctcccctgaccgatcagaccatgattgggaatttgctgcggaagcacgggaaaggattagagaaagggagggtgaaacttccttctcatagcgacggaacccaaatgatattcaatgctgcgaaggagctgggccagctctctaaactcaaggatcatatggttagggaagaggctaaatctttaacgccaaaacagtgcgcagtggtcgagcttgccctcgacacaataaaacaatatttccatgccggtggcgtcggtctgaagaagacttttctggaaaagtctccagatcttcagtcactgcgctacgctctcagcctatacacccaggcaactgacttgttaatcaagacattcgtgcagacccagagtgcccagggtttgggcgtcgaggacccagttggggaagtctctgtgcacgtggagctgttcacacatccagggaccggagaacataaggtcaccgtcaaggttgtcgcagcaaatgatctgaagtggcagaccagcggcatctttcgcccttttattgaggttaatattataggcccacaactttccgacaaaaaaagaaagtttgctactaagtcaaaaaacaattcctgggcgccaaagtataacgagtccttccaattcacactttccgccgacgcgggtccggagtgttacgagctccaggtctgtgtcaaagactactgttttgcacgagaggaccggactgtaggcctggccgtgctgcaactgcgcgagttagcacagagggggtctgccgcttgctggctgccgctcgggagacgaattcacatggatgacacaggtctcacagtcctgcgcatccttagtcagaggagtaatgatgaagtcgccaaagagtttgtcaagcttaaaagtgacacccgaagcgccgaggaaggcggtgctgcccctgccccata

SEQ ID NO: 246270 - DNA, 5111 bp, synthetic construct
  misc_feature 1..5111: note = Description of Artificial Sequence: Synthetic coding sequence
  source 1..5111: mol_type = other DNA
atgtctcttctgtgcgtgggagtgaagaaagctaagttcgacggcgctcaagaaaaattcaatacctacgtgaccttgaaagtgcagaacgtaaaatccaccacaatcgccgtgcgaggttcgcaacccagctgggagcaggacttcatgtttgagatcaatcggttggacctgggactcactgttgaggtctggaataaggggctgatctgggacactatggtggggaccgtgtggattccgctgcgcaccatccgccagtccaatgaggagggaccgggtgagtggctaaccttggatagtcaggtgatcatggctgattcagagatttgcggtactaaggatccaaccttccatcgcatcctgctggataccagattcgagctccccctggatattcccgaagaggaagcacgctactgggcgaagaagctggagcagcttaatgcgatgagagatcaggatgagtactccttccaagacgaacaggataagcctctgccagtgccatccaaccagtgctgcaactggaactatttcggttggggagagcagcataacgacgaccccgattctgccgtggacgacagagattccgactatcgcagtgaaacttccaatagtatcccaccaccatattacacaacctcccagcctaacgcgagcgttcaccagtattccgtgagaccccctcccttaggctcacgggaatcctactctgactcaatgcacagttacgaagaattctctgagcctcaggcccttagtccaactggatctagcaggtatgcaagcagtggtgaattgtcccaggggagcagtcagctgtccgaggactttgacccggatgaacatagcctgcaagggagcgatatggaggacgagagagatcgagattcctatcattcttgtcactcaagcgtatcttaccacaaggactctcccagatgggatcaggacgaagaagagcttgaggaggatttggaagattttttagaggaagaagagctccctgaggatgaggaggagttggaggaggaggaagaagaggtgcctgatgatcttggcagctatgcccagcgcgaggacgtcgcggtcgccgaacccaaagacttcaaacgtatcagcctgccccctgctgcgcctggaaaagaggataaagccccagtcgcccctaccgaagctcctgacatggcaaaagtggctccgaagcctgccactcccgacaaagtgcccgctgcagaacagattcctgaggcagagccacctaaggacgaggagtcgtttaggcctagggaagatgaggagggccaagaaggtcaggatagtatgagccgggctaaagccaactggctaagggctttcaataaagtacggatgcaactgcaggaagccagaggagaaggggagatgtccaagtctctctggttcaagggtggcccaggcggtgggctcataataattgactccatgccagacatacgcaaacggaagccaatccctcttgtaagcgatctagctatgtctctggtgcaatcccggaaggcaggtatcaccagcgccttagctagttcgacattgaataacgaggaactgaagaaccacgtttacaagaagactttgcaggccctcatctaccctattagctgcacaactccccataacttcgaagtttggactgccaccactcccacttactgctacgaatgcgaggggttactgtggggcattgcccgtcagggcatgaggtgtacggagtgtggtgtaaaatgtcacgagaaatgccaggatctcctgaacgccgattgtctgcagagagcggctgagaagtccagtaagcatggggctgaagacaggactcagaatattatcatggtgttgaaggatcgtatgaaaattcgggagaggaataagcctgaaatctttgagcttatccaggagattttcgccgtcacaaagaccgctcatacccaacagatgaaggcagtaaagcagtccgtgcttgacggcacgtccaaatggagcgctaaaatatcaatcacagtggtttgtgctcaaggcctccaggctaaggataagacaggctcctctgatccgtacgtgaccgtgcaggttgggaagaccaaaaaacgaactaaaaccatttacggcaatctcaaccccgtgtgggaagaaaattttcattttgagtgtcataatagcagtgaccggattaaagttcgggtgtgggacgaagacgacgacattaaatctcgcgtcaaacaacggttcaaacgcgaaagcgatgactttctgggccagaccatcatcgaagtccgaacactctcgggagagatggatgtttggtacaatctagataaacgaacagacaagtccgcggtgtcaggcgctattcgcctgcatatttccgtggagattaaaggggaggagaaggtagctccttatcacgtgcagtacacctgcctgcatgagaatcttttccatttcgtaacggatgttcagaataacggtgtagtgaagatcccagacgccaaaggtgatgacgcttggaaggtctactatgacgagaccgctcaagaaattgtggacgagtttgcgatgcgatacggggtggagagcatctaccaggctatgacccatttcgcttgtctatcttccaaatatatgtgccctggtgtgcctgccgtcatgtcgacactgctcgccaatatcaacgcttattacgcacacaccacagcctcaactaatgttagcgcctctgacagattcgccgcatcaaatttcggaaaggaacggttcgttaagctcttggaccagttgcataatagcttacgcatcgacttatcaatgtatcgtaacaattttcccgcttcctcgcccgagcggcttcaggacctgaagtcgacagtcgatctgctgacatctattaccttttttagaatgaaagtgcaggaactccagtccccaccacgggcttcccaagtggttaaagactgtgtaaaggcttgtttaaactctacgtacgagtatatcttcaataactgccatgagctgtatagtcgggagtaccaaactgatccagccaagaaaggcgaagtactgccggaggagcagggaccgtctataaaaaatcttgacttttggagcaagctgataaccctgatagtttccattattgaagaggataaaaactcatacacaccatgcctgaatcaatttccccaagagttgaacgtaggcaaaatcagtgccgaggtcatgtggaatctattcgcacaggacatgaaatatgctatggaggagcatgataagcacaggctatgtaagagcgccgattacatgaatcttcatttcaaagtgaagtggctgtataacgagtatgtgacagagctacctgctttcaaggacagagtgcccgaatacccagcctggttcgaaccgtttgtcatccagtggctagatgagaacgaagaagtgtctcgggattttttacatggcgctcttgaaagagacaagaaagacggattccagcagacttccgagcacgctcttttcagttgtagtgtcgttgatgttttcagccagctaaatcagagctttgagataattaagaagcttgagtgcccagacccgcaaatcgtcgggcattacatgagaagattcgccaaaactatttctaacgtcctccttcagtatgcggatattatctcaaaagatttcgcaagctattgtagcaaagaaaaagagaaggtgccttgtatcctgatgaacaatacccagcagctcagagttcaactggaaaaaatgttcgaggcaatgggtggaaaggagctggacgcagaggcctcagacattctcaaagaactgcaggtaaaactcaataacgtcctggacgagctgtctcgagtttttgccacttcttttcagccacacattgaggagtgcgttaagcagatgggggacatcctgtcacaagttaaggggacgggcaatgtccccgcttccgcttgttcatccgtcgcccaggacgcagacaacgtacttcagcccatcatggacttgctcgatagcaacctgaccctattcgccaaaatctgtgaaaagactgtcctaaagagggttctgaaagagctgtggaaactggtgatgaataccatggagaaaactatcgtcctcccacctttaaccgatcaaaccatgattggaaacctgttgaggaagcacggaaaaggactggagaaaggacgtgtgaagctgccgagtcattcagatggtacgcagatgattttcaacgccgctaaggaactaggtcagttgtcgaagttgaaagatcatatggttagggaagaggccaagtctttgacccccaagcagtgtgccgttgtggagctggctctggacactatcaaacaatacttccatgctgggggagtcgggctgaagaagacattcctagagaagagccccgatttgcagagcctgaggtatgctctctccctgtatacccaggcaactgacctgctgatcaagaccttcgtgcagacgcagtccgcccaggggctgggagtggaggatcccgtcggagaggtgtcagtccatgtggagctctttactcaccctggcaccggagagcataaggttaccgtgaaagtggtcgccgctaacgatcttaagtggcagacaagtggtatctttcggccattcatcgaggtgaacataattggcccacagctgtccgacaagaaaagaaagttcgcaacaaaatcaaagaataactcctgggcgccaaagtataacgaatcattccagttcaccctttctgccgacgcgggaccagagtgctatgaactgcaggtgtgcgttaaggactactgcttcgccagagaagatcggactgtcggattggcagtgctgcaactgcgggagttagcccagaggggctccgcggcttgttggctacccctgggtaggcgcatccatatggacgacaccggacttacggtgctgaggatcctgtcccagcgctctaacgatgaggtagctaaggagtttgtaaaattgaaatcagacacaaggtctgccgaagaaggcggagccgctcccgctccgta

SEQ ID NO: 246271 - DNA, 1293 bp, synthetic construct
  misc_feature 1..1293: note = Description of Artificial Sequence: Synthetic coding sequence
  source 1..1293: mol_type = other DNA
atggcaaccctcagtgtaaaaccatccagacgattccagctgccagattggcataccaatagctatttattgagtaccaacgctcagcttcagcgagatgcctcccaccagataaggcaggaggcaagggtgctgaggaacgagacaaacaatcaaactatctgggatgagcatgacaaccggaccagattggtggagcggatcgacaccgtgaataggtggaaagagatgttagacaagtgcttgaccgacctcgacgccgagatagatgccttaactcagatgaaggaatccgcagagcaaaacttacaggctaaaaatctaccccttgatgtagctattgagtgtctaacgttgcgggagtcccggagagacatcgacgtcgtcaaagaccccgtagaggacgagctgcacaaggaggtggaggtgatagaagccacaaagaaggctttgcagcagaaagtgtcacaagcattcgaacaactgtgtctcctgcaggaagtgcaacagcagcttaactccgaccatagggggaaaatggaaactcttgagatcgaccgcggatgtctctctcttaaccttcgctctcctaacatatctttaaaagtcgaccccactcgagttccagatggtagcacaacgttacagcaatgggacgacttctcccgattcaataaggatagggccgaagccgaaatgaaagccgcaacagaactgcgggaggccaccgcccttactattgcggaaaccaataatgagttggaggcacaaagggtggccactgagtttgcttttcgtaagagattacgtgagatggaaaaggtgtactccgagctcaagtggcaggagaaaaatactttggaagaaatcgctgagctgcaagaagatatccgacatctggaagaggatctgaggaccaagctgctgagtttaaaactctcacacacaagattagaggccaggacttatcgacctaacgtcgagctctgtagggaccaggcccagtatgggctgacggacgaagtccatcagctggaggccactatcgcggcattaaagcagaaactggcgcaggctcaggatgcactggatgccctgtgcaagcatctggccaggctgcaggctgatattgcatgtaaggcaaatagcatgctcctggatacaaagtgcatggacacacgcaggaaactgacagtgccagccgagcgatttgtccctgaggtcgatactttcacccggacgacaaattctaccctgtcacctcttaagtcctgccagctcgagctcgcgtag

SEQ ID NO: 246272 - DNA, 3429 bp, synthetic construct
  misc_feature 1..3429: note = Description of Artificial Sequence: Synthetic coding sequence
  source 1..3429: mol_type = other DNA
atggccacactcctttctcatcctcagcagcgacctccgtttctgaggcaggcgataaagattcgacggaggcgagtgagagatctgcaggatccacccccacaaatggctcctgaaattcagcccccatcacaccactttagccctgagcagcgagccctcctttacgaggacgccctgtataccgtcttacacaggctgggccaccctgaacctaaccatgtcactgaagcaagcgagctcctgcggtaccttcaagaagccttccacgttgagcccgaggaacaccagcaaaccttgcagagggtacgggaactagaaaaacccattttctgcctgaaggccactgttaaacaggcaaaagggatcctgggcaaggatgtgtcaggcttttctgatccgtattgcctccttgggattgaacagggggtgggtgttcccggaggcagccccggtagcagacacagacagaaggctgtggtgagacatactatcccagaggaggagacccatagaacccaggtgatcacccaaacattaaatccagtgtgggacgagacctttatcctcgaatttgaagacataaccaacgctagtttccacctggacatgtgggacttggataccgttgagagcgtgcgccagaaactcggggagttaacagatctgcatggattgcgacgtatctttaaggaggccagaaaggataagggccaagatgatttcctaggcaacgttgtattaagactgcaggacctgcgatgtagggaagaccagtggtatccgctggaaccacggactgagacgtacccggatcgtggccaatgccatcttcagttccaactgattcataagagaagggccaccagcgcctcacgctcgcagccgagctacactgtccacctccacctgttgcagcaattagtatctcatgaggtgacccagcatgaggctggaagcacaagctgggacggaagcctgtctcctcaggcagccaccgttctgtttctgcacgctacccagaaggatctgtcagatttccaccagagcatggcacaatggttggcctacagcagactttatcaatccctggaattcccttctagttgtctgcttcacccaatcacatccatcgagtatcagtggatccagggacgtctgaaagcagaacaacaggaagagttggccgcttctttttcatctctcttaacctacggcctctctctgatcaggcggttcaggagtgtttttcccctttctgtaagtgactctccagccagactgcaatcactgctcagagtgttggtacagatgtgtaagatgaaggcgttcggcgaactgtgccccaatactgctccactgccgcaactagttaccgaggccttacaaactggaactacagaatggttccacctgaaacaacaacatcaccaaccgatggtgcagggtatacccgaggcagggaaggcgttgcttgggctcgtgcaggacgtcattggcgacctccatcaatgtcagcgtacatgggacaaaatctttcataatactctgaagatacatctgttctctatggcgttcagggaactccagtggctggtagccaagcgcgtccaggaccatactacagttgtaggcgatgtggtctccccggagatgggggaaagcctgttccagctttacatatctctcaaagaattatgtcaactgagaatgagctcaagcgaacgcgacggcgtgttagcactcgacaatttccacaggtggttccaacccgcaatacccagttggttacaaaagacttacaatgaggctctggctagggttcagcgggcagtccagatggacgagctcgtcccactgggagagttgacgaagcatagcacaagcgctgttgatttgtccacatgcttcgcacagattagccataccgctcggcaactcgattggcctgatcctgaggaggcattcatgataactgtgaaatttgtggaggacacgtgtagactggccctagtgtattgttcactgattaaggctagagctcgggaattatcctccggccaaaaagatcagggtcaggcagctaacatgctttgtgtggtggttaacgacatggaacagttacgcctcgttataggcaagcttccagcccaactcgcctgggaggcactcgaacagagagttggcgcagtgctcgagcaaggccagctccagaatacactccacgcccagctgcagagcgccctggccggtctgggccatgaaattaggactggggtccggactctggccgaacagttagaggtcggaatcgccaagcacattcaaaaactcgtgggagtacgcgaatcagtgctcccagaggacgccatcctacccctcatgaagtttcttgaagtagagctgtgttacatgaacactaatcttgttcaagagaatttctcctctctcttgaccctgctgtggactcacactctcaccgttcttgtcgaagctgccgcttcacaaaggtcttctagcttggccagcaaccggttgaaaattgccctgcaaaatctcgaaatttgtttccatgccgagggatgcggacttccccctaaagcgctgcatacagccacttttcaggccctgcagcgcgatctggagctacaggctgcttcaagccgggagctgatccggaagtacttctgctccagaatccagcagcaagccgagactactagcgaagagctgggcgcagtgactgtgaaggctagctaccgggcaagcgagcagaagctgagagtcgagttactgtctgcctcttccctgttgccactggactcaaatggcagtagcgatccttttgtccagctcacacttgagcccaggcacgagtttccggagctcgccgctcgagaaacacaaaaacataagaaggacctgcaccctcttttcgacgagactttcgaatttctcgtccccgctgaaccttgtcgcaaggccggtgcctgcctgttgttgaccgtactggactatgatacgttgggtgcagatgatctggagggagaagcattcctgcccctgcgagaagtgccagggctgtctggaagcgaggagcccggagaagtcccacaaacgagactgcccttaacttatcctgcccctaacggcgaccctatcctgcagctgttggaaggcagaaagggcgatagggaggcgcaggtgttcgtccgacttagacgccaccgcgcaaaacagggcatcggcccttcagtgagttggccatggccaatttgcctgctcgcctttctgttccagccactgggctggggtcctgggtccctgggacccggactgcaggcccagtctctgctcgaaaaaggggaggggacattacctaagatgcggctgcagttgccctggggtgagggtggcggacattattag

SEQ ID NO: 246273 - DNA, 2835 bp, synthetic construct
  misc_feature 1..2835: note = Description of Artificial Sequence: Synthetic coding sequence
  source 1..2835: mol_type = other DNA
atggccaccctgctgagtcacccacagcagcggccacccttcctgcgacaggccattaagatacggcgtaggcgagtgagagatctacaggatccaccaccgcagatggcccctgaaattcagcccccatctcaccacttttccccagagcagcgggcactgttgtacgaggacgcattgtacacggtgttacaccggttgggtcaccccgagcccaatcatgtcacagaggccagcgaactgctgcggtacctgcaagaagccttccacgtggaacccgaggagcatcagcaaactctccagcgtgttcgagaactggagaaacccatcttttgccttaaggcaaccgtcaagcaggccaagggaatccttggaaaggacgtctctggtttttctgacccttattgtctgctaggtatcgaacagggcgtaggagtaccgggtggttctccagggtcccgtcaccgccagaaagctgtagtcagacataccatccccgaggaggaaacccaccggacccaggtgatcactcaaactttgaatccagtctgggacgaaacctttatactggagtttgaagacatcacaaatgctagctttcacctggacatgtgggatctggatactgttgagtcagtccgccaaaaacttggtgagcttaccgacctgcacggcctgcgacggatcttcaaggaagctcggaaagataagggtcaggacgattttctggggaacgtcgtgctccggctgcaagacttgcgatgccgggaagaccagtggtatccgctggagccacgcactgaaacgtatcccgacagaggtcagtgtcatctgcagttccagctcatacacaaacgaagagctacctcggctagccgctcccaaccctcttataccgtgcaccttcatctgctgcagcagttggtgtcacatgaggtgacacagcatgaagccggaagtacatcctgggacgggtcactcagcccgcaagccgctacggttctgtttctgcacgcaacacaaaaggacctgagcgattttcaccagtccatggcacagtggctggcttacagtcgactgtaccaatcactggaattcccgagtagttgtctgctccaccccataacaagtattgaatatcaatggatccagggtcggctcaaagccgagcagcaggaggagctggctgcttctttttcctcactgctcacttatggcctctctctcatccggaggtttaggtcagtttttcccctgtctgtctctgacagtccagcacgtctccaatcactcctgagggtcctggttcagatgtgcaagatgaaggctttcggagagttgtgcccaaatactgccccactgcctcagctggtgaccgaagcgttgcagacaggcaccacagaatggttccatcttaagcagcagcaccatcagcctatggtccagggaattcctgaggctggaaaggcactgctgggtctcgtgcaagacgttattggcgacctgcatcaatgtcagcgaacctgggataaaatctttcacaacacccttaagatccacttattctccatggccttcagggaactgcagtggcttgtggctaaacgtgttcaggatcacactaccgtggtgggagacgtggtgtccccggaaatgggggagagtcttttccagctttacatttcactcaaggaattgtgtcagctgcgtatgtcgtctagcgaaagagacggggtgcttgctctggacaactttcaccgttggttccagccagcgataccgtcttggctccaaaagacttacaacgaagcgctcgcacgggtgcagcgcgcagtgcaaatggatgaactggtgcccctgggtgagttgacaaaacattccacgagcgccgttgacctgagtacctgttttgctcagatttcccacactgcccgtcaacttgattggccagatcccgaggaagcgtttatgatcaccgtgaaatttgtcgaagacacctgtcggttggctctggtatactgttcattaatcaaggcacgggctcgcgagctgagcagcgggcaaaaggatcagggccaggccgctaatatgctgtgtgtggtggtcaatgacatggagcagctaaggctggtgatcggaaagttgcctgcacagctcgcctgggaggctttggaacagagggtgggcgcagtgctcgagcagggacagttacagaatactctgcatgctcagcttcagtccgctcttgcgggactgggtcatgagatccgcaccggcgtacgcacactcgctgagcagctagaagtgggcatagcaaaacatatccagaaactcgtgggtgtgagggagagtgtattgcccgaagatgccatcctgcctctcatgaagttcctggaagtcgagttatgttatatgaatacaaatctggtgcaagaaaacttttccagtcttctgactcttctctggactcatacccttacagtcctggttgaggcagccgcatcccagcgctcctctagcctggcgtctaataggttgaagattgcactgcagaacctggagatttgctttcacgccgagggctgcggccttccccctaaaactctgcctcttccggcttcacaaaagagctgctgtgggggtcagggcatcggaccatctgtgagctggccatggcctatctgtctgctcgcttttctttttcaaccactgggctggggcccaggaagcctcggtcctgggcttcaagcgcagagccttctagaaaaaggggaaggcaccctgccaaaaatgcgcttacagttaccctggggggagggtggcggtcattattag

SEQ ID NO: 246274 - DNA, 2790 bp, synthetic construct
  misc_feature 1..2790: note = Description of Artificial Sequence: Synthetic coding sequence
  source 1..2790: mol_type = other DNA
atgacagcgagctctgtcgagcaactgagaaaagaaggaaacgagctattcaagtgtggcgattatggaggtgcccttgctgcttacactcaggctcttgggctggacgccacccctcaagaccaagccgtacttcacaggaatcgtgcagcatgtcatcttaaactggaagattacgacaaagcagagaccgaagcctcaaaggcgatcgagaaggacggtggagatgtgaaagcactgtaccggagaagccaggcccttgaaaagctaggaaggttggatcaggctgtgctcgatctacaaaggtgcgttagtctggagcccaaaaacaaggtcttccaagaggctttacgtaatattgggggtcagattcaggagaaagtcaggtacatgtctagcacagacgccaaggttgagcaaatgttccagatactgttggacccagaggagaaagggacggagaaaaagcagaaagcttcacagaacctagtcgtgttggccagggaagacgctggagcagagaaaatcttccgctcaaatggtgtgcagttgcttcaaaggctgcttgatatgggcgagaccgaccttatgctggccgcactgcggacactggttggcatatgctccgaacaccagagccgtactgtagctacactgagcatccttggcacccgaagggtcgtctctatcttgggggttgagagccaggccgtctccctggccgcatgtcacttgctccaggtgatgttcgatgccctgaaagagggcgtgaagaaaggatttcgcggaaaggagggggcaattatcgtggatcctgccagagagctgaaggtcctgatctcaaatcttctagacttacttactgaagtcggagtgagcggccaaggcagggataacgctctgacactattaatcaaggccgttcccaggaagtcattaaaggaccctaacaacagcctcacactttgggttattgaccaagggcttaaaaaaatcctggaggttgggggttcccttcaggaccctccaggagagctggccgttaccgcaaattcccgcatgtccgcttcaatcttactgtccaagctctttgatgacttgaaatgtgacgcggagagagaaaactttcataggctgtgcgagaactatatcaagtcttggtttgaagggcagggcttggccggtaagttgcgcgcaatacagaccgtgtcttgtctgttgcaggggccatgcgacgcaggaaaccgggctttagagttaagtggtgtaatggagtctgtcatagccctttgcgcatccgagcaagaagaggaacaactcgtggcggtcgaagcgcttattcacgcagctggtaaggcgaagagggcctccttcatcacagctaacggggtttccctactgaaggacctctacaaatgtagtgagaaagacagtatcagaattcgcgcactcgtcgggctgtgtaagctggggtccgccggtggaaccgacttttccatgaaacaatttgcggagggtagcacactgaaattggccaagcaatgccgtaagtggctgtgcaatgatcagatcgatgcaggcacgcgtagatgggccgtggagggactcgcctacctgactttcgacgcagacgttaaagaagagttcgtcgaggacgcagccgctctgaaggctctgtttcagctttcacgactcgaagaacggagcgtcctgtttgcggttgcttcagcacttgtgaattgtacaaattcatatgactatgaggagccagatcctaagatggtggagttagctaaatatgctaagcagcatgtccccgagcagcatcctaaagacaaaccgtccttcgttcgcgcacgcgtgaagaaacttcttgctgcaggcgtggtatccgccatggtgtgcatggtgaagacggagtccccggtgctgacaagtagttgcagggaactgttatcccgggtttttctggcccttgtagaggaggtagaggatcgcggtaccgtcgtggcccagggcggtggcagagccctcattcctctggccctagaaggtaccgacgtcggacaaaccaaagctgcccaggccctggcgaagttgaccataacaagtaaccctgagatgacattccccggagaacgcatttatgaggtcgtgagaccccttgtctccctcctgcatctgaactgctcaggactccagaatttcgaggcccttatggcgcttacaaatctagccggtatcagcgagcgcctgaggcagaaaattctcaaggagaaggccgttcccatgatcgagggatacatgtttgaggaacatgaaatgattcggagggccgctaccgagtgtatgtgcaatctcgctatgtcaaaggaggtgcaggacttatttgaggctcagggcaatgatcgcctcaagttgctggtcctatatagcggtgaagacgacgagctacttcagcgagccgctgcagggggtcttgccatgctcacctctatgcgccctacactctgtagccggattcctcaggtaaccactcattggctggagatcctacaagcacttctcttaagctccaaccaggaattacagcacaggggagccgtcgttgtgctaaatatggtggaagcaagcagggagattgcatcaaccttaatggagagcgaaatgatggaaatccttagtgtgttagctaaaggggaccatagtcctgttacgcgagccgcagccgcttgccttgataaggcagtggaatatggactgatccagccaaatcaggacggagaatag

SEQ ID NO: 246275 - DNA, 2835 bp, synthetic construct
  misc_feature 1..2835: note = Description of Artificial Sequence: Synthetic coding sequence
  source 1..2835: mol_type = other DNA
atgacagtcagcgggcctggaaccccagaaccgcgacccgctacacctggagcgagctcagtcgaacagctgagaaaggagggtaacgaactcttcaagtgcggagactatggcggagccctagcagcatatacccaagcactgggcctggatgccaccccccaagatcaggctgtgcttcaccgtaatcgtgcagcttgtcatctgaagctggaggattacgacaaggccgagacagaagcttcaaaggccatcgagaaggacggaggtgatgtgaaagccctgtaccggaggtctcaggccctcgagaagttgggcaggctggatcaagcggtattagacctgcagcggtgcgtgtcactggagccaaagaacaaagtgttccaagaagctctgcggaatattggcggacagatccaggagaaggtgaggtacatgtcctccacagatgccaaggtggagcaaatgttccagatcttactggatccagaagaaaaaggcactgagaagaagcagaaagcatcacagaacctcgtggtgcttgcacgcgaggatgccggagcagagaaaatctttcgctctaatggagtgcagttattgcagcggttgctggacatgggggaaactgatctgatgctggccgcactgagaaccctggtcggtatatgttctgagcatcagagccgcacggtggctacactgtctattctggggacaaggcgggtggtaagcatactcggggtggagtcccaggctgtcagcctggccgcttgccatctgctgcaagtgatgttcgacgccctgaaagagggtgtgaaaaagggtttcagaggcaaggagggcgctattattgtggaccctgcacgggaattgaaagtgctgatttccaatctcctcgatttgctcaccgaagtgggagtctccggtcagggacgggataatgctctcacactcttgattaaagccgtgcccaggaagtccctgaaggacccgaacaattctctaacgctgtgggttatcgaccaggggctcaaaaagattctcgaggttggagggagccttcaagatcccccaggcgagttggcggtgactgctaactcccgcatgtccgccagcatcttgctctcaaaattattcgacgacctgaagtgcgacgctgaacgggagaacttccacaggctatgtgagaattacattaaatcgtggtttgaagggcagggactggccggaaaattgagagctattcagactgtgtcctgtcttctccagggaccctgtgatgccggaaacagggccctggaactctctggagttatggagagtgtgatcgctctgtgcgctagcgaacaagaagaagagcaactcgtcgcagtagaggctttgatccatgcggcaggaaaggctaagcgagccagcttcattaccgcaaacggagttagcttactaaaggacctgtacaagtgtagcgagaaagattctattcgcattagagctctggtcgggctgtgtaagctgggatccgccggaggtaccgatttttcaatgaagcaattcgctgagggttcgaccctgaaattagccaagcaatgcagaaagtggctgtgtaacgatcaaatcgacgccggaacacgaaggtgggccgtggagggtcttgcttatctaacgtttgacgccgatgtgaaggaggaattcgtagaagacgccgcagcgctgaaagctctattccagctttcacgactggaggagagatccgtgctgttcgccgtggcctctgctcttgtgaattgtaccaacagctacgattacgaggagcccgaccccaagatggtggagctggcgaagtacgccaaacagcacgtgcctgaacagcatccaaaagataagccaagttttgtccgagcaagggttaagaagctgctcgcggcaggagtcgtttctgccatggtgtgtatggtgaagacagagagccctgtgctgacatccagttgtagggagctactaagcagagtgttccttgccctcgtggaagaagtggaagatcgcggaacagtggtggcccagggtggcggtcgagctttaattcctctggccctggagggcacagacgtgggccagaccaaagccgcacaggcgcttgccaagctgacgattacttctaaccctgaaatgactttccccggagagcgaatttatgaggttgttcgtcccttagtctccctactgcatctgaactgctccgggctccagaattttgaggccctaatggcactgacaaacctcgcaggtatatccgagagattgcgtcagaaaatcctaaaagaaaaagccgtgccaatgattgagggctacatgttcgaggaacatgaaatgattagacgggctgctacggagtgcatgtgtaacttggcaatgtctaaagaggttcaagatctgttcgaggcccaggggaacgaccgccttaagcttctggtgctttattccggagaggacgatgagttgctccagagagctgcagctgggggtctggccatgttgacaagcatgcgacccacactctgtagcaggattccacaggtcacgactcactggctcgaaatactgcaggcactattgctcagtagcaatcaggagctgcagcaccgcggagctgtggtagttcttaatatggtagaggcttctcgcgaaatcgccagcactttaatggagtcagagatgatggaaattctgagtgtactggcgaaaggtgaccactcccctgtcacccgtgccgcagctgcttgcttggacaaggccgttgaatacggtctcatccagcctaaccaagacggcgagtag

SEQ ID NO: 246276 - DNA, 2409 bp, synthetic construct
  misc_feature 1..2409: note = Description of Artificial Sequence: Synthetic coding sequence
  source 1..2409: mol_type = other DNA
atggccggaacctctgagcggtctctgataagctccatttcacagccaaaggcaattgagtgctttgaggtgaagaaaaaagcatttcttacccacggacggtaccacggatcaggagccaccccccctaaaactaaggatccgaagcctgagacattttgtggccaaacaggattacctactatggaagtccgcattaacgtgagtagacaacaggtcgagaaggtattcggccttgaggaatactggtgtcagtgcgtggcttggtctagttctgggactacaaaatcacagaaagcatacatacggattgcttacctgaggaagaattttgagcaggagcccctggcaaaggaggtctctctcgaacagggtatcgtgctcccctgtcgacctccggaggggattccccctgccgaggtggagtggttaaggaacgaagacctagtggatccctccctggaccctaacgtttacattacgcgagagcactctctcgtcgtcagacaggctcggctggcagacacggctaactatacctgtgtcgctaagaatatcgtggccagaaggagaagcgcatctgctgcagtgattgtgtatgtcgacggctcctggtcaccttggtccaaatggtccgcttgcggcctcgattgtacacactggagatctagggagtgcagtgacccagcacctcggaacggaggggaggagtgccagggaacagaccttgacactagaaactgtacatccgacctgtgtgtacacacagctagcgggccagaggacgttgccctctacgtcggcctaatcgctgtggctgtatgcctggtgctcctcttactggtgctgatactggtgtactgccgaaaaaaggaaggactcgactccgacgtcgctgacagctcgattctgacttctggctttcagccggtttcaataaaaccatccaaggccgataaccctcatctgctaacaatccagccggacctgtcaactaccacgactacatatcagggatctctgtgccctaggcaggacggaccttcccccaagttccagctgacgaatgggcatctgttatcacccctgggaggaggcaggcacaccttacaccactcttcccccacttccgaggctgaagagtttgtgagccggctatccacccagaactatttcagatctttgcccaggggcactagtaatatgacctatggcacgtttaactttttaggcggtcgcctgatgattcctaatacaggtatttcactgcttattccacccgacgccatcccaaggggcaagatatatgaaatctatctgaccctgcacaaaccggaggatgttcggctgccactggccggatgtcagactctactttctccaattgtgagttgtggacccccaggggtgttactaactaggcccgttatcctggccatggaccattgcggcgagccatcccccgactcctggagcctccggctgaagaagcaatcatgtgaaggatcctgggaggatgtccttcacctgggggaggaagccccatctcatttgtattactgccagctggaggcatcagcctgctacgtgttcaccgagcagctcggtagattcgctctggtcggcgaagccctaagcgtggccgctgcaaagcgcctcaaactgctgctatttgccccagttgcatgtacctcactcgagtacaacatacgcgtttattgccttcatgacacacatgacgcgctaaaagaggtggtgcaactggaaaagcagcttggaggtcagctgatccaagagcctagggtccttcatttcaaggacagctaccataaccttcgactgtccatccatgatgtcccgtctagcctgtggaagagcaagttgttagtatcatatcaggagatcccgttttatcacatctggaatggcactcagaggtatctacactgcaccttcacattggaacgggtgtcacccagcacctctgacctggcctgcaagctgtgggtgtggcaggtagaaggtgatgggcaaagcttctcaatcaactttaatattaccaaggacacaaggtttgctgaactgttagcgctggagagcgaggctggagtcccagccctcgtgggtccgtctgcatttaaaataccctttttaattaggcagaaaattatctcctctttagaccccccatgcagacgtggtgccgactggcgcacactcgcccaaaaacttcacctagactcccacttgtcattttttgccagcaagccctctcccacagccatgattttaaatctgtgggaagccagacactttccgaacggaaatctttcccagctggctgcagctgtggctgggcttggtcaacctgatgccggtctgttcaccgttagcgaagcagaatgctag

SEQ ID NO: 246277 - DNA, 2529 bp, synthetic construct
  misc_feature 1..2529: note = Description of Artificial Sequence: Synthetic coding sequence
  source 1..2529: mol_type = other DNA
atggcagttaggcccggactgtggccagcattgctgggcatcgttcttgccgcttggttgcgaggctctggcgcacagcaaagcgccaccgttgccaatccagtccccggtgctaatcctgacctactgccgcactttcttgtggagccggaggacgtgtatattgtcaagaacaaacccgtgctgctggtgtgcaaggctgtccccgcaacccagatcttctttaaatgtaacggcgagtgggtgagacaggttgatcatgtcatcgaaaggtctacagacggttcctcaggcttacccactatggaggtccgaattaatgtatcgcggcaacaggtggagaaggtgtttggtcttgaagagtactggtgccagtgtgtcgcttggagttcttctgggaccactaaaagtcaaaaggcttatatccgaattgcttatcttcgtaagaatttcgagcaagagccactggccaaggaagtatctctggagcaagggatagtgttgccctgtaggcccccagaggggatcccacctgctgaagtcgaatggctgcggaatgaggatctggtggatccaagcctggatccgaacgtgtatattacccgagagcacagcttggtggtgcgacaggctcgccttgccgacacggcaaattacacatgcgtggccaagaacattgtggcacggaggaggtcagcttctgctgccgtcatcgtgtacgtcgacggtagctggtccccttggtcaaagtggtctgcttgcggcctggactgtacacattggcggagtagagagtgtagcgatccagccccaaggaacggtggagaagaatgccaagggaccgacctggataccagaaactgcacaagtgatctgtgcgttcatacagcatccgggcctgaggatgtggccctttacgtcgggctgatcgctgtggccgtgtgtctggtcttgttactgttggtgttaatactagtgtattgtcgaaaaaaagagggattagactccgatgtagccgacagctctattctgacctctggattccagcccgtctctattaaaccatccaaagctgacaatcctcatctcctgactattcagcccgatctgtcaactacaaccacaacttaccagggctccttgtgccctagacaggatggaccttcaccaaagtttcagctgacgaatggtcacctgctttccccacttggcggaggtaggcacacattgcaccattccagtccaacttctgaagccgaggagttcgtatcaagactaagtacacagaattacttcagatcactgcccagaggaacatctaacatgacctacggcactttcaacttcctaggtggcaggctgatgatacctaacaccgggatttcactcctcattcctcccgacgccattccgaggggcaagatttatgaaatttacctgaccctccacaaaccagaggacgttcgtttgccgttagcgggttgtcagacactgctgagtccaatcgtaagctgcggcccacccggagtgctgctcacacgcccagtaatactggccatggaccattgcggtgaaccctcacctgactcatggtccctgcgactgaaaaaacagtcatgtgaaggctcctgggaggacgtgcttcacctgggcgaagaggcaccctcccatctttactattgccagcttgaagcttccgcatgctacgtttttacagagcagcttgggagatttgcccttgtgggagaggcactgtccgtggccgctgccaagcgactaaaactgctgctatttgccccagtggcttgcacttcccttgagtataacattcgcgtgtattgcttgcacgacactcatgacgccttgaaagaagtcgtgcagttagagaaacagctgggcggacaactgattcaggaacccagagtcctgcatttcaaagattcatatcacaacctgaggctgagcattcacgatgtcccatcttcactctggaaaagcaagctgcttgtttcataccaggaaatcccgttttaccacatatggaatgggactcagcgataccttcattgtacgttcactctggagcgggtctccccgagcacctcagatctggcctgcaaactgtgggtgtggcaggtggaaggcgatgggcaatctttttctatcaattttaacattaccaaggatacacgctttgcggaactcctcgccctggagagcgaggctggggtgccagccttagtggggccatcagcctttaagataccattcttgatccgccagaagatcatcagtagcttagatcctccatgtagaagaggcgctgattggagaacactggcccagaaactgcaccttgactctcatctctccttttttgccagtaaaccatcaccgacagctatgatcctcaatctctgggaagcacggcatttccctaatggcaacctatcccagcttgccgcagcagtcgccggactggggcagcctgacgcgggtttgtttaccgtgtcagaagctgagtgctag

SEQ ID NO: 246278 - DNA, 2838 bp, synthetic construct
  misc_feature 1..2838: note = Description of Artificial Sequence: Synthetic coding sequence
  source 1..2838: mol_type = other DNA
atgggtgcaagatctggggcaagaggcgcactgctgttagcactactcttgtgttgggaccccaggcttagtcaagcaggcactgattccgggagcgaagtcttacctgacagtttcccttctgccccagccgagccgctgccatattttctacaggagccacaagacgcgtatatagtgaaaaataagccagtcgaattacggtgtcgtgctttccctgccactcagatctacttcaaatgcaacggtgaatgggtcagccaaaatgaccatgttactcaggaggggttggacgaggccaccggtctgcgggtgcgagaggtgcaaattgaggtgtcaagacagcaggttgaggaactgtttgggctggaggattattggtgccagtgcgttgcgtggtcttccgcgggaacgactaaatctagacgcgcttacgtgcgcatcgcgtacctccgcaagaacttcgaccaggagccactggggaaagaggtcccacttgatcatgaggtgctcctccaatgcaggcctccagaaggcgtcccggtggccgaggtggaatggctgaagaatgaagacgttatcgatccaacacaagacactaactttctactgaccatcgaccacaaccttataatccgacaggctcgcctgagcgacaccgccaattatacttgcgtggcaaaaaacatcgtggctaagagaaggtcaactacagcaacggtcatcgtgtacgtgaacggcggatggagttcatgggccgagtggagcccttgcagtaatcggtgtggcaggggctggcagaagaggacccgaacctgcactaatcctgcccctctcaatggtggggctttctgtgagggtcaggctttccaaaagaccgcttgcactactatctgtccggtcgatggcgcttggactgagtggagcaagtggtctgcgtgctctaccgaatgcgctcactggaggtctcgtgaatgtatggcacctccgcctcagaatggcggtcgggactgctcgggaaccctcctggactccaagaattgcacggatggcctgtgcatgcaaaataaaaagaccctctccgacccaaactctcaccttctagaggcaagcggggacgctgcactgtacgccggacttgtcgtggcaattttcgtcgtggtggcaattctcatggccgtgggtgttgtggtgtatagaagaaattgcagagactttgatactgacatcactgatagcagcgcagcacttacagggggattccatcccgtcaatttcaagacagctcgccctagtaacccacagttgctgcatccctccgtgccacctgacctaacggcctctgctgggatctaccggggaccagtctatgccctccaggactctacggacaagatcccaatgaccaatagtccactcctggacccactgccgagcctcaaggtaaaggtttattcctctagcactaccgggtcaggacctggactagccgatggcgcagatctgcttggtgtcttaccccctggcacatacccaagtgacttcgcgagggacacacatttcctgcacctcaggagcgcatcattaggatcacaacagcttctgggcctgccgcgtgaccctggtagctccgtatccggtacctttggatgcctgggtgggagattgtctatccctggaacaggagttagcctattggtccctaatggggctatacctcagggtaagttctacgagatgtatctgctcatcaacaaggccgagtcgacgctccccctgagcgagggcacccagaccgtcctctctccctctgtcacctgtggtcctactggacttctgctttgccggcctgtgatcctcacaatgccacactgcgcagaggtgtccgccagggactggatcttccagctgaagacgcaagcccatcaggggcattgggaagaagtggtcacactcgacgaagagaccctcaatacaccgtgttattgccagcttgaacctcgagcatgtcacattctcctagatcagctgggtacatacgtgttcaccggcgagtcctatagccgcagcgcagttaagcgactgcagctcgctgtcttcgctcctgcactctgtaccagcctggagtacagtctccgcgtgtattgtcttgaggatacccccgtcgccctaaaggaagtcctggaactggaaaggactctggggggatacctggtcgaagaacctaaaccgcttatgtttaaggactcctatcataacctgcggcttagcctgcacgacttgccccatgcacactggaggtcaaaactcctcgccaagtaccaagaaattccgttttatcacatttggagtgggtctcagaaagccctgcactgcacattcactctggagcgccactctctggcctcaaccgagttgacatgcaaaatatgcgtccggcaagttgaaggggaggggcagattttccagctgcacacgactctagccgagacaccagccggtagcctagatacgttgtgttctgcaccaggctctacagtaacgactcagctgggcccttacgcgttcaaaatcccactcagtatcaggcagaagatttgcaacagtcttgatgcacctaactccaggggaaatgactggcggatgctggcccaaaaactctccatggacagataccttaattactttgccactaaagcctccccaaccggtgtgattctggacctctgggaggcccttcaacaagatgacggtgatctgaactctctggctagtgcgctcgaagagatgggaaaatcagagatgcttgtggcagtggccaccgacggcgactgctag

SEQ ID NO: 246279 - DNA, 2805 bp, synthetic construct
  misc_feature 1..2805: note = Description of Artificial Sequence: Synthetic coding sequence
  source 1..2805: mol_type = other DNA
atgggagccaggagcggcgcacggggtgccctcttgttggccttgttattatgctgggatccgagattgagccaggccggaacagacagtggctcagaagtcctgcccgactcttttccatcagcaccagcagaaccactgccttactttttacaagagcctcaggacgcttacatcgtgaagaataagccggtggaactccggtgtcgtgccttccccgctacacagatctattttaagtgtaatggggaatgggtttcccagaatgaccacgtgacccaggaaggattggatgaggcaaccggtctgcgtgtgcgggaagtccagattgaggtgagtcggcagcaggttgaagaactattcgggttagaagattactggtgtcaatgcgtggcatggtcttctgccggaactacaaagtctcgtcgggcatacgtacggatcgcatacttgcggaagaatttcgatcaagagcccctgggcaaggaagttcccctggaccatgaggtcctgctccagtgtagacctcccgaaggggtgccagtggccgaggttgaatggttgaaaaatgaagacgtaatagaccctacccaggatactaattttctcctcactattgaccacaacctcatcatccgccaggctagactgagtgataccgctaattatacatgcgtcgcaaagaatattgtcgccaagagaagatcaacaaccgctacagtcattgtttacgtgaacggcggttggtctagttgggccgaatggtctccctgtagcaacagatgcggcagggggtggcagaagaggaccaggacctgcacaaatccagcccctttaaacggaggcgcattctgtgaggggcaggccttccagaaaacagcatgcacgacaatatgtcctgtggacggagcatggaccgagtggtccaaatggtccgcttgttcaacggaatgcgctcactggcggtctcgagagtgtatggcacctccgccacagaacggtggcagggattgcagcggtactcttctggatagcaagaattgtacagacggcctgtgtatgcagatgctggaagcaagcggcgacgccgcactatacgcagggctcgtggtcgcgatctttgtcgtggtggcaatccttatggccgttggtgtcgtcgtctaccggcgtaattgccgcgatttcgataccgatattacagattccagcgccgctttaactggtgggtttcatcccgtgaattttaagactgcgagaccttcaaatccacagctgctccacccatctgtcccaccagacctgacggccagcgccggaatttatagaggacccgtgtatgcattgcaggacagtaccgacaaaattccaatgaccaattcccccctcctggatccccttccctctctgaaggttaaagtttatagtagctctaccacgggaagcggaccagggctggcagacggagctgatctcttgggcgtgctgccgcctggaacctatccttcagacttcgcgagagacacacacttcttgcacctccggtctgcttctttgggcagccaacaactgctgggtctgccgagagatccaggctcatcagtgtccggtacattcggttgcctgggcggaagactctcgatccccggaacgggtgtgagcctgttggtgcccaatggggctatcccccaggggaaattttatgaaatgtacctcctcatcaataaagccgagagcaccctcccgctttcggagggcacacagacagtgctgtcaccctccgtcacgtgcggacccacgggactccttctttgccgacccgttattctaacaatgccccattgcgccgaggtcagcgctagggactggattttccaacttaagactcaagcccaccaggggcattgggaagaagtggttacactcgatgaagaaaccctgaatacaccgtgctattgtcagttagaaccaagggcctgccacattcttctggatcaactggggacctacgtgtttactggtgagagttactcccgcagtgccgttaaaaggctccagctggccgttttcgctccagccctgtgtacgtctctggaatactcactgcgggtatattgtctggaagacacccccgtggccctgaaagaggtcctggaactggaacgcacattagggggatatcttgtggaagaacccaaacccctgatgttcaaggattcctaccataatctccgcctgtctctccatgatcttccgcatgcccactggaggtctaaactgctggcaaagtaccaggaaatcccgttctaccatatatggtcggggtcccagaaagctcttcattgtacattcacattagagcgccactcattggcttctactgagctgacctgcaaaatctgcgtcagacaggtcgagggcgaaggtcaaatcttccagctgcacaccactctcgcggagactccagcaggatccctcgataccctttgcagcgcacccggaagcactgtaacgactcagttgggaccatatgcctttaaaattcctctgagcataaggcaaaaaatctgtaactccctagacgcccctaattcccgcggaaatgattggcgcatgctggctcagaagctcagcatggacaggtatctgaattatttcgccaccaaagcttcgccaactggggtcatactggacctctgggaagctctgcagcaggacgatggagacctgaatagcttagcaagtgctctcgaggagatgggcaagagtgaaatgcttgtcgccgtagctacagacggagattgctag

SEQ ID NO: 246280 - DNA, 2673 bp, synthetic construct
  misc_feature 1..2673: note = Description of Artificial Sequence: Synthetic coding sequence
  source 1..2673: mol_type = other DNA
gacgacgactttttccacgaactgcctgaaacttttccaagcgatcctccagaacccttgccgcactttctgattgaaccagaggaggcatatattgtgaaaaacaaaccagtgaatctttattgtaaagcgagtcctgcaacccagatttactttaagtgtaactccgaatgggtgcaccaaaaagaccatatcgttgacgaacgggtcgacgagacgtcgggtctcatcgtacgtgaggtgtcaattgaaatctcacgccagcaggtggaagaattgtttggccctgaagattattggtgccagtgtgttgcatggtcatcggccggaaccactaaatcccggaaggcatatgtgaggatcgcttatctgcggaaaacttttgagcaagagcctttaggcaaggaggtgagcctggagcaggaagtgttacttcagtgtaggcctccggaggggattccagtggcggaagtggagtggttgaagaacgaggacatcatcgatcccgtggaagaccggaatttctatatcaccatcgaccataacctcataattaagcaggcacggctgtctgatacagccaattacacgtgcgtcgcgaaaaacatcgtagcaaaaagaaaatcaactactgcgaccgtgatagtttacgtgaacggagggtggagtacatggactgaatggtctgtttgtaactcgaggtgcggaagaggataccagaagcgaacacggacttgtacgaatccagccccacttaatgggggtgccttctgcgaaggccagtctgttcagaagatagcatgcactacattatgccccgtagacggaaggtggactccttggtcaaaatggtccacctgtgggacagaatgcactcactggaggcggagagagtgtaccgccccagccccaaaaaatggtggaaaggactgcgatgggctggtcctgcagagcaaaaactgcactgatggattgtgcatgcagaccgctcctgacagtgatgacgtcgcactgtacgtagggatcgtcatcgctgtcatcgtgtgtctggccatctcagtagtggtcgctttgtttgtgtatcgaaaaaaccacagggactttgagtctgacatcatcgatagctcggccctgaacggaggcttccagcccgttaatattaaggctgccagacaagatctgctagctgtacccccagatttgacatccgctgccgctatgtatcgcggaccagtctacgccctgcacgacgtctccgataagattcctatgacaaactcgccgatccttgatcccctaccaaacttaaagattaaggtctacaatacttcgggcgcagttactccacaggacgatctgtctgaattcacttccaagctctccccccagatgactcaaagcctgttggagaacgaggcactgtctttgaaaaaccagtccctcgcaaggcagacggacccctcttgtacagcatttggaagcttcaacagtctgggcggtcacctaattgtgccgaattccggggtcagtcttctcattccagccggagctatcccgcaagggagagtttacgagatgtatgtgaccgtgcacagaaaggaaactatgaggccgccaatggatgattcccagacactgttaaccccagtggtttcatgcggtcctcccggtgccctgctcactaggccagtcgtcttaacaatgcaccactgtgccgatcctaatactgaagactggaaaatcctgttaaagaatcaggcggctcaagggcagtgggaggatgtggtcgtggtaggcgaagagaactttaccactccatgctatatacaacttgacgccgaagcttgtcatattctgaccgagaatctgtctacatacgccctggtcggccattccacgaccaaggcagcagctaagcgactgaagctcgccatcttcggtccactctgctgctcctctttggagtacagtatcagagtatattgcctggacgatacccaagacgccctgaaggagatactgcacctggagcgccagatgggcggtcagctgctggaagaaccaaaggcacttcattttaaaggcagtacccataacctcaggctgtctatccatgatatcgctcattctctctggaaaagcaagctgcttgctaaataccaagagatccccttttaccatgtgtggtcaggctcccagcgtaacttgcattgtacatttactctagagcgcttttcgcttaataccgtcgagttagtatgcaagctctgtgttcggcaagtggaaggagagggccagatcttccagctgaactgtacagtatctgaagagcccaccgggatcgatctcccacttctggacccagcaaacacaattacgacagtgacagggccatcagccttcagcatccccctcccgattcgccagaaattgtgttctagcctggacgctccacaaacaaggggacacgactggagaatgctcgctcacaaactaaatctggatcgctacctcaactattttgcaactaaatcatctccaacgggcgtgatcctagatctttgggaggcccagaacttccccgatggaaacttgtctatgttggccgctgtgctggaagaaatgggcagacatgagacggtggtgtccctcgccgcagaggggcagtactag

SEQ ID NO: 246281 - DNA, 2796 bp, synthetic construct
  misc_feature 1..2796: note = Description of Artificial Sequence: Synthetic coding sequence
  source 1..2796: mol_type = other DNA
atgcgtaagggtcttcgcgcaacagcggcacgatgcggcctgggattggggtatctactgcagatgctggttctccccgcactcgcgctgctctctgcaagcggaaccggttcggcagcccaggacgacgatttttttcatgagctgccagaaacattcccgagtgaccctcccgagccattgccccacttcctcattgagcctgaggaggcttacattgtcaagaacaagcctgtcaatctgtactgtaaggcttcacctgcgacacagatctattttaagtgtaacagtgagtgggtgcaccagaaagaccacattgtcgacgaacgagtggacgagacatcaggtctgatcgtaagagaggtaagtatcgaaatcagcagacaacaagtggaggaactgtttggcccagaagattactggtgccagtgcgtggcatggtcaagcgccggtactaccaaaagccggaaggcctacgttaggattgcttacttgagaaaaacatttgagcaggagccgttaggcaaggaagtctccttagagcaggaagttctgctgcaatgccgaccgcctgagggtattcctgtcgccgaagtggaatggctcaagaacgaggatatcatcgatcctgtcgaagacagaaacttctacataacgatcgaccataacctgatcataaaacaagcacgactcagcgatactgccaattacacttgtgtggcaaagaatatcgtggctaagagaaaaagcaccaccgccaccgtgatagtctacgttaatggcggttggtccacgtggaccgaatggtctgtgtgcaacagccggtgtgggaggggatatcagaaacggaccagaacgtgcactaatccagccccacttaatggcggtgccttctgcgaagggcagtctgtgcagaagatagcctgcacaaccctgtgtccagtcgacggccgatggactccatggtccaagtggtccacctgtggcactgagtgtactcactggagaagaagagaatgtaccgccccagccccaaaaaacggaggcaaggattgtgacggacttgttctgcaaagcaagaattgtactgatggtctgtgcatgcagaccgcccctgattcagatgacgttgccttgtacgttggaatagtgatcgcagtgatagtgtgtttggccatctccgtggtcgtggctctgttcgtctaccgcaaaaaccaccgtgatttcgaatccgatatcattgacagcagtgctcttaacggagggtttcagcctgttaatatcaaagctgcaagacaggacctacttgccgtcccacctgatctgactagcgccgcagcgatgtaccgcggacccgtgtacgccctccacgacgtttccgataagattccaatgactaatagccctatcctcgaccctctccctaaccttaaaataaaagtttacaacacttccggggcagtgacacctcaggatgatctgtctgagttcacctctaagctttccccacagatgacacagagcctccttgagaacgaagctctttcgttgaagaatcagtcactcgctcgtcagaccgatccctcatgcactgcatttggatccttcaactctctcggaggccatctgatagttcctaacagtggagtgtcccttctcatccctgcaggagccatcccacaaggaagggtttacgagatgtacgtgactgttcaccgaaaagaaactatgcggcctcctatggatgactcacagactctgctgacaccagtggtgagctgtgggccacctggggcactgctaacaagacccgtggtgctgaccatgcatcactgtgctgatccaaacaccgaggactggaaaattttgcttaaaaaccaggccgcacagggccagtgggaagatgtggtcgtcgttggcgaggaaaattttaccactccctgctacattcagctggatgcagaagcatgtcatattttgaccgaaaatttgagcacctatgcattggtaggccattcaaccacaaaagccgcagccaaaaggctcaagcttgctatcttcggacccttatgctgtagttcattggagtacagcattcgggtctactgccttgatgacacccaggatgcattgaaggaaatcttgcatttggagcgacaaatgggaggccaactcttagaggaacctaaggccttacacttcaaagggagcacgcacaacctgcggctgtcgatacatgacattgctcatagcctctggaaatctaaactgcttgccaaataccaagaaatccctttctatcacgtttggtctggttctcagcgtaatctgcattgtactttcacgctcgagcgattcagtctgaacactgtcgaacttgtgtgtaagctctgcgtgcgccaagttgaaggtgagggccaaatcttccaacttaattgtaccgtgagtgaagaacccactgggattgaccttcccttattggatcccgctaataccataactacagtgaccggccctagcgccttctctatccctctgcccatccgacaaaagctgtgttcttctttggatgctccccagacacggggacacgactggagaatgttggcccataagctaaatctggatagatacctcaattacttcgcaacaaaatccagtccaacgggagtgatcctggacctttgggaggcccagaactttccggacggtaacctctccatgctggccgctgtgctggaagagatgggacgacacgagacagtggtcagtcttgctgcggaaggacagtattag

SEQ ID NO: 246282 - DNA, 3153 bp, synthetic construct
  misc_feature 1..3153: note = Description of Artificial Sequence: Synthetic coding sequence
  source 1..3153: mol_type = other DNA
atggagcccggaagaggaggcactgaaacagtgggcaagttcgaattctctagaaaagatctgatcgggcacggagcgttcgcggtcgtgttcaaaggcagacaccgggagaagcatgacttggaagtcgccgtgaaatgcataaacaagaagaacctggccaagagccaaaccttgttaggcaaagaaataaaaatcctgaaggagctgaagcacgagaacatcgtcgctctatatgactttcaagaaatggctaattccgtgtacctagtgatggaatattgtaacggcggtgatctcgccgactatctccatgcgatgagaactctatccgaggacacaatccgactattcctgcaacagattgccggagcaatgcggctccttcatagcaaaggcattattcaccgagacctgaaacctcagaacatccttctgtccaatccagccggtagacgagctaaccccaacagcatacgggtgaagattgctgatttcgggttcgctcggtacttgcagtccaatatgatggccgctacgctgtgcggcagtcccatgtacatggcacctgaagtaattatgtctcagcattacgacggtaaagcggacctgtggagtattggcacgatcgtttaccaatgcctgactggaaaggcacctttccaggccagcagcccacaggatcttcgcttgttttacgagaagaacaagactttggttccgactattccacgggagacctctgcccctctgcgccaacttctcctggcactgttgcagcgtaatcacaaggaccgaatggattttgacgagttcttccaccacccctttctggatgcctcacccagcgtgagaaaatctccgcctgtccccgtcccttcatacccaagttctggctcaggttcttcgtcttcgagctcctcaacatcccatctcgccagccctcccagtctgggcgagatgcagcaactgcagaagactctggcatctcccgctgacaccgccggatttttgcacagctcacgcgattcaggaggatcaaaagactcatcttgtgatactgatgacttcgtgatggtccctgcgcagtttcccggtgatctggtggccgaagctccttcagcgaaaccccctccagactctctcatgtgtagcggctctagcctggtcgcaagcgcaggacttgaatcacacggcagaactccatctccgagtcccccttgttcttcctcacccagcccttcaggccgtgctggacctttttcctccagcagatgtggcgcttccgtgcctatccccgtgcctactcaagtgcaaaactatcaacgaatagagaggaatctccagagccctactcagtttcagacccctcgttcctccgctattcggaggagcggatctaccagccctctcgggttcgctcgggcatccccttcaccgcctgctcacgctgagcatggtggcgtgctcgcaagaaaaatgagcttgggtggtgggagaccttatactccgtcaccccaagtggggaccatcccagagcgcccagggtggtccggcacacctagcccgcaaggtgcggaaatgcgcggtggccgaagccctaggcccggttccagcgcgccagaacattctccgagaacctctgggttggggtgtaggctccatagtgctcctaacctgtccgacctgcacgtggtgcgacctaagctgccaaagccacccacggacccactcggagcagtctttagccctcctcaggcttctccaccacagccctcgcatggcctgcagtcctgccgcaacttgagagggtcccccaaacttcctgatttcctccaaagaaatcctcttccccctattctggggagcccaactaaagcagtgccttcgtttgatttccctaaaactccttccagccagaatctactggcccttttagcacggcaaggggtcgtgatgacgcccccaaggaacaggacccttcccgacctgagcgaagtaggcccatttcacggacaaccccttggcccaggcctgcgccctggcgaggaccccaagggcccattcggacggtctttcagtaccagtaggctgaccgacctgttgttgaaagccgctttcggaacacaagcccctgatccaggcagtacggagagtctgcaggagaaacccatggagatcgcacctagtgctggcttcgggggatctttacatccaggggcaagggccggtggaacctccagccccagtcccgtggtctttaccgttggcagccccccatccggatcgacaccaccacagggaccgagaacgcggatgttttctgcaggacctactggctcagcttcatcctctgcaagacatctcgtccctggcccttgctccgaggccccagctccagagctacccgcacctggacacggatgcagctttgccgaccccataaccgctaacctggagggggcagtcactttcgaagcaccagatctccctgaggagaccctcatggaacaagaacacacagagattctgcgtggcctgcgatttacgctgctcttcgtgcagcacgtgctagagatcgctgctcttaaaggaagcgcgtctgaggctgcaggcggacctgagtatcaactccaagaaagtgtggttgcagatcagatttctctgttgtctagggagtgggggttcgcagaacagctcgtgctgtatctgaaagtggctgaacttctgagttcaggcctccagtccgccattgatcagatccgcgcaggaaagctgtgtcttagtagcacggtgaagcaggttgtgcgcagacttaatgagctgtacaaagcctccgtggtatcatgtcaggggctgtccctgcggctacagcgcttttttttagacaagcagcgcctcctggacaggatacattccatcacagccgagagactgatttttagtcatgccgtgcaaatggtgcaatccgcggcactagatgagatgtttcagcaccgggagggatgtgtgccacgctaccacaaagccctgctgctgttggaggggcttcagcacatgctcagcgatcaggccgatatcgagaacgtgacaaagtgtaaactttgtattgagcgtcgactctcggcgctcttaactgggatttgtgcctag

SEQ ID NO: 246283 - DNA, 1452 bp, synthetic construct
  misc_feature 1..1452: note = Description of Artificial Sequence: Synthetic coding sequence
  source 1..1452: mol_type = other DNA
atgcagagaaatggcagcgccagccgtggactggagaagacacggcttcggctttgtcgggaagcccgtatccccgagagtgcttttctgactggcctgacccgggaaagctgggaggctcgttgttggtgtgcaaaagatactagggaggttgtagctatcaaatgcgtggccaagaaatcattgaataaggcatctgtggagaatctcctgaccgagatagaaatcttgaaggggattcgacacccacacatcgtgcagctcaaggattttcagtgggattcagacaacatatatcttatcatggagttctgcgcaggtggcgacctgagcaggttcatccacactcggcgaatccttcccgaaaaagtcgccagggtgtttatgcaacagctcgcatcagcccttcagtttttgcatgaacgcaatatcagccatctggacctgaagccccaaaacattctgctgtctagtctggaaaaaccacacctgaagctggcggattttggctttgcacagcatatgtccccctgggatgagaaacatgtgttacggggaagtcccttatacatggctcccgaaatggtgtgccagcgccaatacgatgctagagttgacctgtggtccatgggtgtgattctgtatgaagcgctgttcggtcaaccaccattcgccagtcgatcctttagtgagctcgaagagaaaatcaggagcaaccgggtcatagagctcccccttagaccactcctttctagggactgcagagaccttcttcagcgattgctggagcgggatcccagcagaagaatctcattccaagatttctttgctcatccatgggtggacctggagcatatgccgtcgggagagagcctggggagggccactgcccttgtggtccaggcggtaaagaaggatcaggaaggcgacagcgctgcagctttaagcctctattgtaaagccctggatttttttgtgcccgcactccactacgaggtcgacgcccagcggaaggaggcgattaaggctaaagtggggcagtatgttagcagggcagaggagttgaaggccattgtgtcaagctcgaatcaagcgctgttaaggcaggggacaagtgcacgggacctcctgagagagatggcaagagataaaccacgcctgttggctgccctggaggtagccagcgctgctatggccaaggaggaagcagcaggtggcgaacaagacgcattggatttgtatcagcattccctgggggagctcctcctcctgctagccgctgagccaccaggcaggcgcagagaactcctccacaccgaagttcagaacctgatggcacgtgccgaatatttgaaggaacaggtcaagatgcgcgagtccaggtgggaggcggacaccctcgacaaagagggtctctctgaatctgtccgctcttcttgcactttgcagtag

SEQ ID NO: 246284 - DNA, 1419 bp, synthetic construct
  misc_feature 1..1419: note = Description of Artificial Sequence: Synthetic coding sequence
  source 1..1419: mol_type = other DNA
atggccggtcccggatggggaccgccaagactggacggctttattctgaccgagcggctgggttccggaacctacgcgacagtttacaaagcctatgcaaagaaagatactagggaggtggtagctatcaaatgcgtggcaaaaaagtctttgaacaaagcctcggtcgagaatttgcttactgagattgagatactgaaagggattcgacacccgcacattgtccaacttaaggatttccagtgggatagtgacaatatctacttaatcatggagttctgtgctgggggtgacctctctcgcttcatacacacacgacgaatattaccagagaaggtggcacgggtatttatgcagcagctggcctcagcactacagtttctgcacgagagaaatatctctcacctcgaccttaagccacaaaacatcctcctgtcaagcttagagaagcctcatctcaagctggccgactttggcttcgctcagcatatgtctccctgggatgagaaacacgtgctccggggatcgccgttgtatatggctcccgagatggtgtgccagcggcagtacgatgcgagagtcgacctctggagcatgggagttattctctacgaggcactatttggccagcccccatttgccagccgcagctttagcgagctcgaagagaagattaggagcaatcgagtcatcgaactgccccttcggcctctgttgtcaagagattgtagagacttgttgcagcgtctgctagagagagatccatctcgacgaataagtttccaggatttcttcgctcacccatgggtcgatctggaacacatgccttccggggagagcctggggcgagctacagcactggtggttcaggctgtgaagaaggaccaggagggagattctgccgcagccctgagtctttattgcaaagccttagattttttcgtgccagctctgcattacgaagtggacgcacagcgcaaggaagccattaaagctaaggttgggcaatatgtgagccgcgcagaggaactgaaggctattgtgtcaagcagtaaccaggcactccttagacaaggtacatccgccagagatcttttgcgggaaatggcgagagataagcctcggcttctggcagcactggaggtcgcatcagccgctatggcaaaagaggaggctgcgggaggagagcaagacgcacttgacctgtaccagcatagcctcggggaactgctcctgctgttggctgctgaaccacctggcagacgccgagagctcctccatacggaagtgcagaatctcatggctagggctgaatatctcaaagaacaagtcaaaatgagggagtcaagatgggaggccgatacccttgacaaggaaggtcttagcgaatccgtgagatcttcatgtacattgcagtag

SEQ ID NO: 246285 - DNA, 9705 bp, synthetic construct
  misc_feature 1..9705: note = Description of Artificial Sequence: Synthetic coding sequence
  source 1..9705: mol_type = other DNA
atggtgaagcggaagagctccgagggacaggaacaagacgggggaaggggcatccccttgcctattcagacattcctgtggcgtcagacttctgccttcctgaggccaaaattgggaaaacagtatgaggccagctgtgtttccttcgaaagggtccttgttgaaaacaagttgcatggccttagccctgccctcagtgaggccattcagtccatatcaaggtgggagctggtccaggctgctctgccacacgtgttacactgcaccgctacactcctaagtaaccggaacaagctcggccaccaggataagcttggagtggcagagaccaaactgcttcatacgctgcattggatgctgctcgaagctccccaagactgtaacaacgagaggttcggtgggactgacagaggatcatcttgggggggtagttcatccgccttcatacaccaggttgagaaccagggcagtccagggcaaccctgtcaatccagcagcaatgacgaggaagaaaataacagaagaaaaattttccagaatagcatggcaaccgtggagttgttcgtgtttttgttcgccccacttgtgcacaggatcaaagagagcgacctgaccttcagactggcctctggcctcgtgatctggcagcctatgtgggagcaccgacaacccggtgtaagtggctttaccgcactggttaagcctatcaggaatattatcactgcaaaaaggtcatcacctatcaattcccaatcaaggacatgtgagagccctaatcaggacgctcggcaccttgaaggacttcaagttgtgtgtgagacttttcagtccgattcaattagccccaaagcaacaatcagcggctgccacagggggaactccttcgatggctccctgtccagccaaacttctcaggaacggggacctagtcatagccgcgctagtctggttattccaccctgccagcggagtcgatacgccacatactttgatgtagcggttctgcggtgtctgctgcagcctcattggagcgaagaagggacacagtggtctctcatgtactacctgcagaggctcaggcatatgctggaggagaaacccgagaagccccctgagccagacataccattgcttcctcggcctcgcagcagtagcatggtggctgcagcacccagcctggttaatacacacaagacacaggacctcacgatgaaatgcaatgaggaggaaaagtcgctttcttccgaggcattcagcaaagtcagcctgactaatctgaggcgctcggccgtcccggatttaagctcagacttgggaatgaatattttcaagaagttcaaaagccggaaagaggatcgcgagaggaaaggctccattccgtttcaccacacaggcaagcgacggcctcgaaggatgggagtacccttcttactgcatgaggaccacctggacgtgtcccccacccgctctaccttctctttcggaagtttttccgggttgggagaggaccggaggggtatcgaaaaaggtggatggcaaaccactatcttgggcaagctgacaagacgaggtagtagcgacgccgcaacagagatggagagcctcagcgccaggcactctcacagccaccacacactcgtgtcagacctgcctgatcccagcaattcccacggcgaaaataccgtaaaggaggtgagaagtcagatttcaacaatcacagtggccacattcaatacaactctcgcaagcttcaacgtgggatacgcagacttcttcaatgaacatatgaggaaattgtgtaaccaggtgcctatcccagaaatgccgcacgaaccccttgcctgtgccaatctgcctcggtcattgaccgactcttgcataaactattcttatttagaggacacagaacatatcgatggaactaataattttgtacacaagaatggaatgttagatctgagtgtggttctaaaggcagtgtatcttgtgctgaaccacgacatctccagcagaatttgcgatgtcgctctcaacattgttgaatgtcttctccagcttggcgttgtgccttgcgtagaaaagaatcgaaagaaatccgagaacaaagagaacgaaacgttagaaaaacggccttcggagggcgcattccagtttaaaggcgtttccgggagctccacttgtggcttcgggggaccagcagtaagtggtgcaggggacggaggtggggaagaagggggaggtggggacggcggaggcggagggggtgacggcggaggcggtggcggtggaggcggtggtccctatgaaaagaacgacaaaaaccaggagaaagacgagagcacacccgttagtaaccatcgcctggccttgactatgctgatcaaaattgtaaaatctttaggctgtgcatacgggtgtggagaaggccatagagggttgagcggggataggttgcggcatcaggcacaaaactgcttaaccaagctgtataagttagacaagatgcaatttaggcaaacaatgcgtgattatgtgaataaggactctctaaataacgtggttgactttctgcatgcactactgggcttttgtatggagcctgtcaccgacaacaaggccggttttggaaataactttaccactgtcgacaataaaagcactgcccagaacgtggaaggcatcattgtgagcgcaatgtttaagagtctaatcactcgttgcgccagcaccacccacgagcttcattccccggagaacctcggattatactgtgatatccgccaactagtacagtttattaaggaagctcacgggaacgtgtttagacgggtcgcactttcagctctgctggacagtgcggagaaactggctccagggaagaaggtagaagagaatgagcaggaaagtaaacctgctggaagcaaacggtccgaagcaggttccatcgtcgacaaaggtcaagtttctagcgccccagaagagtgccgctcctttatgagtggaaggccttcacaaacccccgaacacgatgagcagatgcagggagccaatcttggcaggaaagatttctggcgcaaaatgttcaagtcccagtccgctgccagtgatacctcctctcagtctgagcaggacacgtctgaatgtacgaccgcccattccggtacgacatcagaccgacgggcacggagcagatctcggcgaatatctctgcggaagaaactgaaactgcccattgggaagcgtaactggctgaaacggagcagtctgagtggactagccgacggcgtagaggatttgttggatattagctcggtggatcgactatcttttattcgccagagttctaaggtaaaatttacgtcggctgtcaaactgtctgagggcggacctggaagtggcatggaaaacggcagagacgaggaagagaacttcttcaaaagattgggctgtcactcctttgacgaccacctgtctcctaaccaggatgggggtaagagtaaaaatgtggtgaatctgggcgcaatcaggcagggcatgaagcggtttcagttcttgcttaattgttgcgagcctgggacaattcccgatgcttccatcctcgccgctgcccttgatttagaagcccctgttgttgctcgggcagctttgtttctcgagtgcgccagatttgtacacaggtgcaaccggggaaactggccagagtggatgaaggggcaccatgtcaacataacgaagaagggcctcagcaggggtcgcagtcccatagtgggaaacaagagaaaccagaagctgcagtggaatgccgctaaactgttctatcagtggggagacgcgattggggttaggctgaacgaactgtgccacggcgaaagtgagtctcccgctaatctgctcggcttgatatacgacgaggaaacaaagagacgactccgcaaggaggacgaagaagaggactttttggacgacagtacagtgaatccttcgaaatgcgggtgccccttcgcgctcaagatggccgcttgtcagctcctgctggagattacaaccttcttgagagaaaccttctcatgcctcccaaggccccgaacggagcctctcgtggatctggaaagctgccgccttcggctcgatcctgaactcgatcggcaccggtatgagagaaaaatttcgtttgctggtgttctggatgagaacgaggatagtaaggactctttacacagctcttcacacacattgaagagtgacgccggtgttgaagagaaaaaggagggttctccatggtcagctagtgaaccatctattgaacctgagggcatgagcaacgccggtgctgaagagaattaccacagaaatatgtcctggctccacgtgatgatactgctgtgcaaccaacagtcattcatatgtacccatgtggattattgtcatccccactgttatctccatcactctcgctcctgtgcgaggttagtgcgcgcaatcaaactcctatatggggactctgtggactcccttagagagtcctcgaacatttcctccgtggccctgcggggaaagaaacaaaaggagtgttctgacaagtcatgtctaagaacccccagcttgaagaaacgcgtgtccgatgcaaatttagagggcaaaaaagattcgggaatgctgaagtacatccggctgcaggttatgagcctttctcccgcacctctgtccctgctgatcaaagcagcccctattctgacggaggaaatgtatggggacattcagcccgcagcttgggaactgctgttgtctatggacgagcacatggccggagccgcagctgctatgtttctgctgtgtgccgtcaaggtgcctgaagccgtgtctgatatgttgatgtccgaattccatcaccccgaaactgttcagcggctgaacgcagttctgaaatttcacacattgtggcgctttcgatatcaggtctggcccaggatggaggaaggtgcacaacagattttcaagattccaccgcctagcattaatttcaccttaccatcccctgtgcttggaatgccgtcagtacctatgtttgatccaccttgggtcccccagtgcagcgggtccgtgcaggatccaatcaacgaagatcagtccaagtcatttagcgctagggccgtgagccggagccaccagcgtgctgaacatattcttaaaaacttgcagcaagaagaggagaagaagagactcgggagggaggccagcctgattaccgccatccccatcacacaggaagcatgctatgaaccaacatgcacaccaaactctgaacccgaagaagaggttgaagaggttacgaacctcgcttcgcgacgcttgtctgtgtccccaagttgtacatccagtacatctcatcgaaattactcgttccggcgagggagtgtatggtctgtcaggtcagccgtgagtgctgaggacgaggaacacacgacggaacacacccctaatcaccacgtcccacagccgcctcaagctgtgtttcctgcgtgcatttgcgcggctgtgttgcccatagtgcatttgatggaggacggagaggtccgagaggacggcgtggcagtgagcgccgtcgcccaacaggtgctgtggaactgcctgatcgaagatccctcaactgtgctgcggcatttcctcgagaagctgaccatttccaaccgccaggacgagctgatgtacatgttgcgcaaacttctcttgaatataggcgacttccctgcccagacatctcacatattgttcaactacttggttggcctgattatgtatttcgtgagaacaccctgcgaatggggcatggacgccataagcgccacattgacatttctgtgggaggtggtgggctacgtagaaggattgtttttcaaagatctcaaacaaacaatgaagaaggagcagtgtgaggtcaagctgctggtcaccgcatccatgccaggtactaaaaccctggtggtacacggccagaatgagtgcgatatcccgacgcagctgcccgtgcacgaagacactcaattcgaagccctcctcaaagaatgtttagagttctttaatataccagagtcccaatccacccactattttcttatggacaagcggtggaacctgatccattacaacaaaacatatgtcagagacatttacccatttaggaggtcagtcagtcctcagcttaacctggtccatatgcaccctgaaaaagggcaagagcttattcagaaacaggtcttcaccagaaaactggaggaggttgggagggtgctgttcctcatatccctgactcagaagattccgactgctcataagcaatctcatgtcagtatgctacaggaagacctgctccggctgccttcctttcctcgctcagcgatcgatgccgaattctctctcttcagcgacccacaagcaggcaaagaactgtttggccttgataccctgcagaaaagcctctggatacaactcctggaggaaatgttcctagggatgccgtccgagtttccctggggcgatgagatcatgctgtttctgaatgtgtttaacggggctttaatactgcatcctgaagacagtgccttgctcagacagtacgcagccaccgtgatcaatacagcagtgcactttaaccaccttttctcactgagtgggtaccaatggattttacccacaatgctgcaagtgtattccgattacgaatctaaccctcagttaagacaggcgatagagtttgcttgccatcaattttacattctgcaccggaaacccttcgtactgcagctttttgcttcagtggcaccattgttagagttccctgatgcagctaacaacggcccaagtaagggtgtaagcgctcagtgcctcttcgatctgctgcaaagccttgaaggagaaaccaccgatatcctggatatattggagctggtcaaggcggaaaagccactcaaaagcctagatttttgttacgggaatgaagacctgaccttcagcattagcgaagcaatcaaactctgtgtcactgtagtggcgtacgcgccagaaagcttccgctccctgcagatgctcatggtcctagaagctctggtgccatgctacctgcagaagttaaagcggcagacaagtcaggtggagacagtccccgctgctcgggaagaaattgctgccactgcggcactcgccacatctctgcaggcattgctgtactcagtggaagtgctcactcgcccaatgacagccccacagatgagtcgttgcgaccaggggcacaagggcacaacaactgcgaatcacaccatgtctagcggagtgaatacccgatatcaggagcaaggggcaaagctacattttataagagaaaatctgcaccttctggaagaggggcaaggcatacccagggaagagcttgatgagcgaattgcccgtgaagaattcagacgaccgagggagtcactccttaatatctgtaccgagttctacaagcactgtgggcctcgcctcaagatcctccagaacctagccggtgagccacgagtcatagccctggagctgctggatgttaagtctcacatgcgtctcgcagagattgcacactctcttttaaagcttgcaccctacgatacacagacaatggagagcagggggttgcggaggtacataatggaaatgctcccgattactgattggaccgcggaggcggtccgccctgcattgatcttaattcttaaacggttagaccggatgtttaataagattcacaagatgcccacgctgaggaggcaggtggagtgggaaccagcatcgaacctgatcgagggtgtctgtctgaccctgcagcggcagcctatcatatctttcctcccacacctccgatctctgatcaatgtgtgcgtcaatttggttatgggcgtcgtaggtccttcgagcgtcgctgacgggcttcccctcctgcatctgtctccctacttaagtccaccccttccgttcagcactgcagtagtacgtctggttgctctccagatccaggcactgaaggaggatttcccattgagtcatgtaatatcaccctttaccaatcaggaacggcgagagggaatgctactgaatttgctcatcccatttgtgttaacagtgggctccggatcaaaagattcaccttggctggagcaaccagaggtccagctccttctccagaccgttatcaatgtcctgttgccgcctcgcatcatatccaccagcaggtccaagaatttcatgcttgaatccagccctgcccactgtagtacccctggagacgcaggtaaagatctgcgtagggaaggtttagctgaatcaacctcacaagccgcttatttggccctcaaagtaattctggtgtgcttcgagaggcagttgggtagccagtggtactggctgtcccttcaggtgaaagaaatggcattaaggaaagttggtggcctcgccctgtgggatttcctcgatttcatcgtccgcacccgaatcccaatcttcgtattgctgaggcccttcattcagtgtaagttgctggcccagcctgctgaaaatcatgaagaactcagcgctaggcagcacattgctgaccagctcgagcgcagattcattccgaggcccttgtgtaagagttccctcattgccgaatttaatagcgaacttaaaattctgaaggaagcggtgcactccggttctgcatatcaggggaaaacctccatttcaaccgtgggcacctcaacatccgcctatcgtctgagtctcgctacgatgagccgcagcaacaccggcactggaaccgtttgggaacaggactcagagccttcacagcaggcctctcaagacaccctctctagaacagacgaggaggatgaagaaaatgactcaatatccatgccctctgttgtgtccgagcaggaagcctatttgctgagtgctattggcaggagacgcttcagctcacatgtgagctccatgagcgtgccccaggccgaggtcgggatgttaccatctcagagggttgcctccattcaatctgagccaggacaacaaaacctgctcgtgcagcagccgttagggagaaagcgcggactgagacaactcagaaggcccctcctcagcaggcaaaaaacacaaaccgagcccagaaaccgacagggtgcacgcttaagcacaaccaggcgaagtatccagcctaaaaccaaaccttcggctgatcagaaaagatctgtgacattcatcgaggctcagcctgagccggcagctgcgccaactgacgccctgcccgctactggtcagcttcaaggatgttccccagccccatcccgtaaaccagaggcaatggacgaacctgttctgacctctagccccgctattgtggtggctgatctacacagcgtgtccccaaaacagtcagagaatttccccacggaagaaggagaaaaggaagaggacacagaggcgcagggcgcaaccgcgcattccccacttagtgctcagcttagtgatcctgacgatttcactggacttgaaacctctagcctcctgcaacatggtgacacggtcttgcacatatctgaagaaaacggaatggagaaccctttactgagtagccagttcacctttactcccactgaactgggcaaaacagacgcagtccttgacgagtctcacgtgtac

SEQ ID NO: 246286 - DNA, 9777 bp, synthetic construct
  misc_feature 1..9777: note = Description of Artificial Sequence: Synthetic coding sequence
  source 1..9777: mol_type = other DNA
atggtgaaacgcaagtctagcgaaggacaggaacaagatggcggaagaggcatccctcttcctattcagacgttcctatggcgacaaacaagtgcctttctgcggcctaaattgggcaaacaatacgaggcttcctgtgtcagcttcgaacgggtgctggtagaaaataagctgcatggtttaagtcctgctctgtccgaggccattcagagtattagtcgttgggagctcgttcaggctgcattaccacatgtgctgcactgtaccgcgacactcctgagcaacagaaacaaactcggtcaccaggacaaactcggagtggccgaaacgaagctactccacacactccattggatgctgctcgaggcgccacaggattgtaacaatgaaagattcgggggaacagatagggggtcttcatggggcggaagctcttctgcattcatacaccaggtggagaaccagggaagccccggacagccttgtcagtcctccagcaacgatgaggaagaaaataaccgccgtaagatcttccagaacagtatggcgacagtggagctgtttgtctttctgttcgcacctctggtgcataggatcaaagaatctgatctgaccttccggctggccagcggactggttatatggcagccaatgtgggagcataggcagccaggggtatccggcttcaccgccctcgtcaaaccgatccggaacattattaccgctaaacgaagtagccccataaacagtcagagtcgcacttgcgagtcaccaaatcaggacgcccgtcatctcgaaggactccaggtggtttgcgaaacttttcagagcgactcgatcagtccaaaagccaccatcagtgggtgtcataggggcaacagctttgacgggtcgctgagcagtcagacttcccaggagcgaggtccttcccacagtcgggcttccctggtaattcccccttgccagcggagcaggtatgctacttattttgatgtggcagtactgcggtgtttgctccagcctcactggagtgaggaaggaactcaatggagcttaatgtattatctgcagaggctgcgtcatatgctagaagagaagcccgaaaaacccccagagcctgacattccactgctgcccaggcccaggtccagctcaatggtggccgctgctcctagcctggtgaacacccataaaacccaggacctcactatgaaatgcaatgaagaagagaagtcacttagcagtgaagccttctcaaaggtttcattgactaatctaagaaggagtgccgtgcctgatttatccagtgatttggggatgaacatcttcaagaagttcaaaagccgcaaagaagatagagagagaaagggatctattcctttccatcatacaggtaagcgacggccaagacggatgggggtaccgttcctcctgcacgaagatcacttggacgtttctccaacacgctccaccttttcctttggttcgttcagtggcctgggagaggaccggcgaggcattgagaagggcggatggcaaaccaccatcttaggcaaactgacccggaggggcagctctgatgcagcgaccgagatggagagtctgtccgcgcgacactcccactcccatcataccctcgtgtctgacctccctgatccatcaaactctcatggagagaatacagtcaaggaagtccgctcccagatctccaccatcacggtggccacatttaatacgaccttggcgagttttaatgttggttacgccgacttttttaatgagcatatgcggaagttgtgtaaccaagtaccaatcccggaaatgcctcacgaaccattagcatgcgccaacttgcccagatctctgacggattcttgtattaactactcttacctggaagatacggaacacatcgatgggaccaataatttcgttcataaaaacggaatgctagacctcagcgtcgtgctgaaggccgtctatctggtgctgaatcatgacattagctcccgaatttgtgatgtcgctctcaacatcgtggaatgcttattgcagctgggcgtagtgccttgcgtggagaaaaacagaaaaaaatcggaaaacaaggagaatgagacgctggaaaaaagaccaagcgaaggagcgtttcagttcaagggggtcagcggcagttccacctgtggcttcggaggtcccgcagtgtctggcgcaggcgacggcggaggcgaggagggaggtgggggtgacggtggtggcggagggggtgacggcggtggcggagggggtgggggtggtggcccatatgagaaaaacgacaaaaatcaggaaaaagatgagtccacccccgtttcaaatcaccgcctcgccctgacaatgctaattaagatcgtgaagtccctgggatgcgcatacggatgcggcgagggccacagaggactgagtggcgaccggctaagacatcaggtttttcgtgagaacgcacagaattgcctgactaagttatataaactcgacaaaatgcagtttaggcagaccatgcgagattatgtcaataaggattctcttaacaatgtggtggattttttgcacgccttgctcggtttttgtatggaacctgttactgataacaaggccggattcgggaacaacttcaccaccgtcgataataagtccactgcccagaacgtggagggcattatcgtgagcgctatgttcaagagccttataactcgctgtgcctcaaccacgcacgagctccacagccccgagaatcttggcctctactgtgatatacgacagctcgtccagttcatcaaagaggctcatgggaatgttttccgcagagtggctttgtctgctctgctcgactccgccgaaaaactggccccaggcaaaaaagtggaagaaaacgagcaggagtctaaacccgcaggaagtaaacgatctgaggccggttcgattgtggataagggtcaggtgagttccgcaccagaagagtgccgttctttcatgagtgggagacccagtcagactccggaacatgacgaacaaatgcagggagctaacctggggagaaaggatttctggcggaaaatgttcaaaagccagtccgcggcttccgacacatcctcccagagcgaacaagatacctcagagtgcacaactgcccactctggcactacaagcgatcggagagccagatcgaggtccaggcgcatcagtcttagaaagaaactgaaattgcctatcgggaagcgcaactggctgaaaagatcttccctgtctggcctcgcagatggtgtcgaggacctgctggacatctccagcgttgatagacttagttttatccggcagtcctcaaaggttaagttcacctccgccgtgaagctctcagaaggcggacccggtagtggaatggaaaacgggagagacgaagaggagaacttctttaagaggttgggttgccactctttcgacgaccacttgtccccgaatcaagatgggggtaagtctaaaaatgtcgtgaatctcggtgcgattcgccaaggcatgaaacgtttccagtttctgctaaactgttgtgaaccaggcaccatcccagacgcttctatcctcgcggcagccctggatttagaggcccctgtagtggcgcgtgccgcattatttctggaatgtgcacgctttgttcatcgatgtaacagagggaattggccagagtggatgaagggccaccatgttaacattacaaagaaaggcttaagcagagggcgatcgccaattgtgggcaataaaaggaatcaaaagttacagtggaatgctgccaagctcttctatcagtggggagatgccatcggcgttaggctgaacgaattatgccacggagagtccgaatccccggcaaacctgctgggcctgatatacgatgaggagacaaagaggcggctgagaaaggaggacgaggaggaagacttccttgatgattccactgtcaacccaagcaaatgcgggtgcccctttgcattaaagatggcagcctgccagctgttactggagattaccacattcctccgagaaaccttttcttgtctgccccgaccacgcacagagcctttggtcgatctggaatcttgcagacttcgtttagatccagagcttgatcggcatagatacgaaaggaagattagttttgccggagtcttagacgaaaatgaagactctaaagatagtcttcacagctcgagtcatactctgaaatcagacgctggcgtggaggaaaagaaggaaggctcaccttggagtgcatccgagccctccatcgagcctgagggtatgtctaacgcgggagccgaggagaactaccacaggaatatgtcttggctacatgtgatgatcctgctctgcaaccaacagtctttcatttgtacccacgtggactactgtcatccccactgctacctccaccattctaggtcctgtgcacggcttgtgcgcgcaatcaaactgttatacggtgattcagtagatagcttaagagagtcttcgaatatctcttccgtcgctctccggggtaagaaacaaaaggaatgctcagacaaaagttgtctgaggaccccaagtctgaaaaagagggtatctgacgccaatctagagggcaagaaggactcaggtatgctcaagtatatacgccttcaggtgatgagccttagccccgctcctctaagcctactcattaaagcggcacctatactgacagaggagatgtatggcgacatacagcccgcagcctgggaattactcctgagtatggacgagcatatggccggtgctgcagccgcaatgtttctgctgtgtgctgtcaaagtgccggaagccgtgtctgatatgttgatgagtgaattccaccatcctgagacagtacagcgtctgaatgccgtcctgaaattccacacactctggcgcttccgctatcaggtttggcctagaatggaagaaggtgcccagcaaattttcaagatccccccaccgagcataaactttactctcccatcccccgttctgggaatgccttccgtgccaatgttcgatccaccatgggtgccccaatgcagtggctctgtgcaggatccaataaacgaagaccaaagcaagagcttttctgcacgcgcagtatcgaggagccaccagagagccgaacatatcctcaaaaatctgcagcaggaagaggagaagaagcgcctcggacgcgaggcaagtctcatcacagccatccctatcacgcaggaagcttgttatgaacctacatgcacccccaattctgagccggaggaggaggtcgaagaggtgaccaacctggccagccgacggctgagtgtttctcctagttgtacctcatctacgtcgcaccggaactacagcttcagaagaggaagcgtctggagcgttcggtcagcagtgtctgctgaagacgaagagcacacgactgagcatactccgaaccaccacgtcccccagcccccacaggcggtctttcccgcttgcatttgtgctgcagtgttaccaatcgtgcatctgatggaagacggtgaggtacgggaggatggcgtggctgtgtcagccgtcgcacagcaggtcctctggaactgcctgattgaagatccttccacagtcctccgccactttctggaaaaactgaccatctccaaccggcaggacgaactgatgtatatgttaagaaagttgttgctcaatataggcgacttcccagctcagacaagccatattctctttaactatcttgtgggcctgataatgtattttgtaagaactccttgtgaatggggcatggatgcaatttctgctaccctaacctttctgtgggaggtggtcggttatgtcgaagggttatttttcaaagacttgaagcagaccatgaagaaggaacaatgtgaagtcaaactgctcgtcactgcctcaatgccgggaactaagacactggtcgtgcacgggcaaaacgagtgtgatatacctacgcagctccccgtacatgaagatactcaatttgaagccttgcttaaagagtgcctcgaattcttcaacatccccgaatcacagagtacgcattactttctgatggacaagaggtggaaccttatccattacaacaaaacctatgtgagagatatctatcccttcagaaggagcgtttcccctcagcttaacctcgtgcacatgcatcccgagaaaggacaagagctcatccagaagcaggtgtttaccagaaagcttgaggaagtcggcagagttctctttctgattagtctgactcagaaaattcccactgcacacaaacagtcccacgtcagcatgctgcaagaagatctgctccggctcccttcgtttccacggtccgcaattgatgccgaattctctctgttctccgacccgcaggccggaaaagagctctttggcctcgataccttgcagaaaagcctctggattcagctgctggaggaaatgtttctcggaatgccgagtgagttcccatggggggacgagatcatgctcttcctgaacgtgtttaatggcgcacttattttgcacccagaggactccgctctcttacgtcagtatgctgcaactgtcatcaataccgcagtgcactttaaccatctgtttagtcttagcgggtaccagtggattctgcccaccatgctgcaggtttactcggactacgaatctaacccccagctgaggcaggcaatagaattcgcttgtcaccaattctacattctgcaccggaagccatttgtgttgcagctttttgcctccgtggccccactcctggagtttccagatgctgccaacaatggtccatcaaagggtgtctccgcccagtgtttgtttgacctcctgcagagcctcgagggggagacgactgacatcctggatattctggaactggtcaaggccgagaagccactcaaaagcctagacttttgctacggaaacgaagacctgacattcagtataagcgaagctattaagctctgtgtcaccgttgtcgcctatgctccagagtctttccgatcacttcagatgttgatggtactcgaggccctggtcccttgctaccttcagaagctaaagcgtcagacttctcaagtagaaactgtgcccgcagcccgagaggaaatcgccgctaccgccgcactggccacaagtctccaagcgctcctttactctgtagaggtcttgactagacctatgaccgctccccagatgtctaggtgtgaccaaggccataaagggaccactaccgctaatcatacaatgagctctggggtgaacacacgataccaggaacagggcgctaaacttcattttattcgcgaaaaccttcacctcttagaagaaggacaaggcatcccaagagaagagctggacgagcggatcgctcgcgaggagttccggcgtccccgagagtccctgctaaatatttgtactgagttctataagcactgtggtccaagattaaaaattctgcagaaccttgctggagagccgagggtcatcgctctcgagctcctggatgtgaaaagtcacatgagattggctgaaattgctcattctttgctgaaactggcgccttacgacactcagaccatggaaagtaggggcctgcggagatacattatggagatgctgcctattaccgattggaccgctgaggccgttagaccagctcttatattgatactgaaacgcttggatagaatgttcaataagatccacaaaatgccaaccctccgcagacaagtggaatgggaacccgcaagtaacttgatagaaggtgtgtgcctgaccctgcagaggcaacctattatttctttcctcccacacttgagaagtctcattaacgtttgcgtgaatttggtcatgggcgtcgtcggaccatctagcgtggccgacggtttgcccctgctccacctgtcaccttacctgagcccaccactacccttcagcaccgccgtggttcgattggtggcattgcagatacaagcactgaaggaggattttcctctatctcatgtgatatctcccttcaccaaccaggaacgtcgcgaaggaatgctccttaacctgctgatccctttcgtgctcaccgttggcagtggtagcaaggacagtccctggctggagcaacctgaggtccagctgttgctccaaaccgtcattaacgtcttactcccgccacgtatcatcagtacctcacggagcaagaattttatgctcgaatcatcacctgctcactgttcgacacccggagatgccggtaaggacctccgtcgagaaggactggccgagagtacctcccaagccgcttatctggcccttaaagtaatactggtctgtttcgaaagacagctcggcagccaatggtactggctgtctctgcaggtgaaggagatggcactgcgcaaggtgggcggtctggccctgtgggattttctcgacttcatcgttaggacacgcatccctatctttgtgctcctgaggccattcattcagtgtaagttgttagcccagcctgctgaaaaccacgaggaactgtcagccaggcagcacattgcggaccaactggagaggaggtttattcccaggccgctgtgcaagtctagtctcattgccgagttcaatagcgaactgaagatactaaaagaggcagtgcatagtggtagcgcgtatcaaggaaaaacttcaatctcaactgttggcacttcgaccagcgcttataggctttccctagctaccatgagccggagcaatacaggaacagggacggtatgggagcaggattccgaacccagccagcaagccagccaagatactctttccaggaccgatgaagaggatgaggaaaacgattcaatatccatgccctctgtggtatcggaacaggaggcctacctgctcagtgccattgggagacgcaggttttcctctcacgtttcctcaatgtctgtacctcaggctgaagttggaatgctgccaagccaatcagaacccaatgtgctggacgattcacaaggcctcgccgctgaggggagtctgagccgtgttgcttctatacagagcgagcctggacagcagaatctccttgtgcagcaacctctcggtaggaaaaggggactgcgacagttgagacggccattgctgtctcgtcagaaaactcagacagagccacgcaaccggcaaggagccaggcttagcactacacggcgaagcatccaacccaagactaagccctcggccgaccagaaacgatctgtgaccttcatcgaggcacagcctgagccagcggctgcgccaacagatgcccttccagcaaccggtcaactgcagggatgctcccctgctcccagccgaaagcctgaggccatggacgagccggtgctcacctcctctcccgcaatcgttgttgccgatcttcatagtgtgtcacctaagcagtcagagaacttccccactgaggagggcgaaaaagaggaagacacagaggcccaaggagcaaccgcgcactcacccctgagcgcccaacttagcgatccagatgactttaccggtttggagacaagctctcttcttcagcacggagacaccgtgctgcacattagcgaggagaatggaatggaaaacccgctgctctcctcacaatttacgtttactcctacggagctcggcaagactgacgcggtattagacgaaagtcatgtctac

SEQ ID NO: 246287 - DNA, 1401 bp, synthetic construct
  misc_feature 1..1401: note = Description of Artificial Sequence: Synthetic coding sequence
  source 1..1401: mol_type = other DNA
atggagtctaggggcctgcgcagatacataatggaaatgctacccattactgactggactgcagaggcagtgagaccagctttaattctgattcttaaacgattagaccggatgtttaataagattcataagatgcctactctccgtaggcaggtggagtgggagccagccagtaatttaattgaaggtgtgtgcttaacgctccagaggcagcctatcataagctttctgccgcaccttagatcgctcatcaatgtctgtgtcaacctggtcatgggagttgttggcccttcttccgtcgcagacgggctgcctcttcttcacttgtcaccttaccttagccctcctctgcctttttccaccgccgtcgtgcgcctagtcgcccttcagatacaagctctgaaggaagacttcccactcagccacgtgatctccccttttactaatcaggaacgccgagagggtatgcttttgaatttgctcataccgttcgttcttacggtgggatccggatctaaggacagtccctggctggaacagcctgaggtgcaactgctactgcagaccgtaataaatgtcttgttaccgcctcggattatttcaacgtctcggagcaagaacttcatgctcgaatcgagccccgcacattgctcaaccccaggggatgccggaaaggacctgagaagagagggacttgccgagtccacctctcaagcagcgtacttggcactgaaggtgattctagtgtgttttgagaggcagctaggcagtcagtggtattggctctctcttcaggtgaaagaaatggcacttagaaaagtgggaggattggccctgtgggactttctggatttcatcgtgcgaactaggatccctatttttgtgctcctgcggccttttatccagtgtaaactgctggctcagcctgccgagaaccatgaagaattgagtgccaggcagcacattgcagatcagctagaacgccgattcatcccgagaccactctgcaagagttcgctgatcgccgagtttaactccgagttgaagatcctcaaggaagcagttcacagcgggtcagcctatcagggcaagacttcgattagcactgtgggaaccagcacttccgcttacaggctttcgttggctacgatgtcgagaagcaacacaggcactggcaccgtgtgggagcaggattccgagccatcccagcaggcgtcccaggacaccctgtcccgcacagacgaggaggacgaagaaaatgacagcataagcatgcccagcgtagtgagcgaacaggaagcttatcttctctcagcgatagggaggaggaggttctcatcacatgtctcatccatgagtgtgccccaggccgaagtggggatgctgccttctcagcggtag

SEQ ID NO: 246288 - DNA, 786 bp, synthetic construct
  misc_feature 1..786: note = Description of Artificial Sequence: Synthetic coding sequence
  source 1..786: mol_type = other DNA
atggcttcccaattgcaaaaccgcctgcgttctgcactggcactggtgaccggagccggaagtggcatcggacgtgctgtcagtgtgcgtctcgccggagaaggcgcaacagtcgcagcatgtgaccttgatagggccgctgctcaggagaccgtgagactgctcggcggacccggatccaaagaaggcccacccagagggaaccacgcagctttccaagccgatgtctccgaagcacgagccgctcggtgtctgctggagcaagtacaggcttgcttctcacgcccaccctcagtggtggtgtcatgtgccggaattacacaggatgagtttttgttgcacatgtcagaagacgactgggataaagtcattgctgtgaatcttaaaggaacgttcctcgtgacacaggcggctgcacaggcgctggtgtcaaatggatgccggggttctattatcaatatttcctctatcgtgggcaaggtggggaatgtgggacagacgaattacgctgcttcaaaagccggagtgatcggcctgacccagaccgccgctagagaattgggcagacatgggatcaggtgcaatagtgtgttgcctggctttattgccacccctatgacccaaaaggtgccacagaaggtggtcgataagattacggaaatgatccccatgggacacctgggcgaccccgaagatgtagctgacgttgtggcattcctggccagtgaggactccgggtacatcaccggaacgtctgtagaagtgactggcggtctctttatgtag

SEQ ID NO: 246289 - DNA, 1248 bp, synthetic construct
  misc_feature 1..1248: note = Description of Artificial Sequence: Synthetic coding sequence
  source 1..1248: mol_type = other DNA
atggatcgatccctccggaatgtgctggtcgtgtcattcggtttccttttactgtttactgcgtatgggggactgcagagcctccagtcgtccttatattcagaggaagggcttggcgtgactgcactgagcacactctatggaggcatgctcctgtcatccatgtttctgccccctctcttgatcgagaggctcggctgcaaaggtacgattatattgagcatgtgtggctatgtagcatttagcgtgggcaattttttcgcaagctggtacaccctcatccccacaagcatacttctggggctcggagctgctcccttatggagcgcccagtgcacgtacttgacgatcacaggtaatactcacgctgagaaagccggaaagcggggtaaagacatggtaaaccagtattttgggatcttcttcctcatcttccaatcatcgggcgtgtggggtaacctcataagcagcctggtatttggacaaaccccctcccagggcagtggcgtcctggcagtcctcatgatcgccgcttttctccagcctataagggacgtgcagcgggagtccgaaggcgagaaaaaatcggtgccattctggagcacactgctcagtacctttaagctgtatagagataagcgcttatgccttctcattcttttgcccctgtattctggcctgcagcagggtttcctctcctccgagtatactcgtagctatgtgacctgcacgctgggcattcaattcgttggctacgtcatgatctgcttttcagcgacggacgctctttgctctgtactctatggtaaggtgagccagtacacagggagagccgttctgtacgtgctgggagccgttactcatgtcagctgcatgatcgctcttctgttgtggaggccaagggccgaccacctggctgtattcttcgtcttttctgggctgtggggagtggctgacgctgtttggcagactcagaacaatgctctttatggagtattgttcgaaaaatccaaggaagctgctttcgctaactatcgtctgtgggaagccctgggtttcgtgattgcattcggttactccatgtttctgtgtgtgcacgtgaaattgtacatactgctcggtgtgctttccttgaccatggtagcctatggcctggttgagtgtgtggagagtaagaatcccatccggcctcacgctccaggacaggttaatcaagctgaagatgaggaaattcaaaccaagatgtag

SEQ ID NO: 246290 - DNA, 435 bp, synthetic construct
  misc_feature 1..435: note = Description of Artificial Sequence: Synthetic coding sequence
  source 1..435: mol_type = other DNA
atggaccgcagtctgcggaatgtattggtggttagcttcggatttctcctgctgttcacggcttatgggggactgcagtccctgcagtcctccctgtacagcgaggagggcctgggcgtgacagctctgagtactctgtacggcggaatgctcctctcctccatgttcttaccgccactgctcatcgagagactggggtgtaaggggaccatcatattgagtatgtgcggatacgtggctttctcagtggggaattttttcgcctcctggtacacactgatccccacgtccatactcttgggtctcggcgcagcgccactttggtccgcacagtgtacttatcttaccataactggcaacacacacgctgaaaaggcaggcaaaaggggaaaagacatggttaatcagtattttggaattttcttcctgatatag

SEQ ID NO: 246291 - DNA, 1545 bp, synthetic construct
  misc_feature 1..1545: note = Description of Artificial Sequence: Synthetic coding sequence
  source 1..1545: mol_type = other DNA
atgagtcgctggctttggccttggagtaattgcgtcaaagagagggtctgtcggtacttactgcaccactacctcggccatttctttcaggagcatctgtcattggatcagctatccctagatttatacaaaggttctgtggctttgagggacattcaccttgagatttggagtgtaaacgaagtgctggaatccatggaatcacctctggagcttgtggagggctttgtggggagcatcgaggtggccgtcccatgggcagcactcctgacagaccattgcaccgtgagggtgtccggcctacaactcactctccagcctagacggggacctgctcccggagcggcagatagccagtcatgggcttcatgcatgactacgtctctgcagcttgcgcaggaatgcctgcgggatggccttcccgagccctctgaacctcctcaacctctggagggtctggagatgtttgcccaaactatcgaaaccgtacttcgtagaatcaaggtaactttcctcgacaccgtggtccgggtggagcacagccctggtgacggagagagaggggtggccgtcgaagtccgcgtccagcgactggaatattgtgacgaagccgttagggatccgagtcaggcccctcccgtagatgttcatcagccccctgcatttctacataagctgttacagttggccggtgtgcgcttgcattatgaggagttacctgcacaggaagagcctccagaaccacctttgcagattggttcttgctctggttatatggagctcatggttaaactcaagcaaaatgaggcctttcccggtcctaagctcgaagtagccggacagctaggctcactgcacctgctgctgacccctaggcagctccagcaattacaggaacttctgtccgccgtttctttaacggaccatgaagggcttgcggataagctgaacaaaagccggccactcggcgcagaggacctgtggcttatagagcaggacctgaaccagcagctgcaggccggagccgtcgccgagcctctgagccccgaccccctcaccaacccgctgctgaacttagataacactgatttgtttttctcgatggctggtctgacttccagcgtggctagtgcgttgtccgaattgtcactgtcggatgtggaccttgcttctagtgtgcggagtgatatggccagccgtaggctatctgcccaggcaaggcccggtctcgccttgcagggcatggccaccgtgaaagatgcatttcccgcatgccctcttccaatatgttgcgagagaggggcatccttgccttgggggctgagtcccggatccgctttgttcctgcgtggcgagcgcaccttgccactgccacgccctgggccaaccctgttacctagcccacgaacagaggcttttggcccttccgatccaatacctctgagccaggtgagcttttgtgtgtggggggaggaaggcatgatctctgtgtggttcgacgtccttttcttatcctctgtctcggcttgggtgtcagtttgttag

SEQ ID NO: 246292 - DNA, 924 bp, synthetic construct
  misc_feature 1..924: note = Description of Artificial Sequence: Synthetic coding sequence
  source 1..924: mol_type = other DNA
atgggcggtctgacagcaagtgacgtccatcccactctcggcgttcagctgttctcagctggtattgctgcctgcttggccgacgtaatcacctttccactcgataccgccaaggtccgcctccaagtccagggggagtgccctacttctagcgtgatcaggtacaaaggcgttttgggtactattaccgcagtggttaaaacagagggtcgaatgaagctctattctgggcttccggctggcctccagagacagatttccagtgcatcgttacgtatcgggttatacgataccgtgcaggaatttctgaccgccggaaaagagacagcccctagtctggggagcaagatcttagcaggcctaactaccggtggcgtggcggttttcatcggacagcccaccgaggtggtgaaggtaaggctccaggcccagagccacttacatggcatcaaacctcgttacacgggtacctataacgcatatcgaatcattgcaacaactgagggactcactgggctgtggaaaggcaccaccccgaatctgatgagaagcgtgattatcaactgcaccgagttggtcacatatgacctgatgaaggaggccttcgtgaaaaacaacatcctagcagacgacgttccatgtcacttggtgagcgccctgatagccggattctgtgccactgcaatgagttcccctgtggacgtggtcaaaacacgatttatcaattctcctccaggccagtacaagtccgttccgaactgcgcaatgaaagtttttaccaacgaaggtcccacagccttcttcaaaggattagtgcctagttttttacgactcgggagctggaacgtgatcatgtttgtatgtttcgagcagcttaagcgggagcttagtaaaagccgacaaactatggactgcgcaacctag

SEQ ID NO: 246293 - DNA, 930 bp, synthetic construct
  misc_feature 1..930: note = Description of Artificial Sequence: Synthetic coding sequence
  source 1..930: mol_type = other DNA
atggtcggttttaaagctacggacgtgccccctactgccacagtgaagttcttgggcgctggaactgccgcatgcattgctgacctcatcaccttccctttagacactgccaaagtaaggctgcagattcaaggagaaagccagggacccgtgcgggctacggcttccgcccagtatcgaggagtaatggggactatcttaaccatggttagaactgaggggccacgctccttgtataacggcctggtggcagggctccaaaggcaaatgtcgtttgcatctgtgcgaattggtctctacgatagtgtgaagcagttttacacaaaaggctctgagcacgcgagcatagggtcacgtctgctggccggttccaccacaggcgcactggccgtggctgtcgcccagccgaccgacgttgttaaagtgcgttttcaggcccaggcacgcgcaggcggtggacggagatatcagagcacagtgaacgcttacaagacaattgccagggaggaggggtttcggggtctgtggaaaggaacatctccaaacgtagctagaaatgcgattgttaattgtgctgaactagtaacctatgacttaattaaagatgccttgctcaaggccaaccttatgaccgatgatctaccctgtcactttacgtctgcttttggggcaggattttgtacgacggtgatcgcaagcccggtggatgtggtgaaaacaaggtacatgaactcagcactgggccaatactcaagcgcgggacactgcgctctgaccatgttgcagaaggagggacccagggccttttataagggcttcatgccatcttttctgcggttggggtcctggaatgtggtcatgttcgtgacttatgagcagctgaagcgggctcttatggcagcctgtacttctcgggaggctcccttctag

SEQ ID NO: 246294 - DNA, 102 bp, synthetic construct
  misc_feature 1..102: note = Description of Artificial Sequence: Synthetic coding sequence
  source 1..102: mol_type = other DNA
atggtgggatttaaagctactgacgttcctccgacagcaactgtgaaatttttgggggctggcaccgcagcgtgtatagcagacttgattactttcccctag

SEQ ID NO: 246295 - DNA, 939 bp, synthetic construct
  misc_feature 1..939: note = Description of Artificial Sequence: Synthetic coding sequence
  source 1..939: mol_type = other DNA
atggttggactgaaaccctccgacgtgcctcctactatggccgtaaaattcctcggagccggaaccgccgcttgtttcgccgatctggtgactttccccctcgacactgctaaagtacgcctccagatccagggggaaaatcaagcagtgcaaacagctcgcctggtccagtacagaggcgtacttggtaccatcctgacaatggttcgcacggagggaccttgttctccatataacggactggttgctggactacagaggcaaatgtcattcgcctcaatcagaattggattgtatgatagtgtcaagcaggtgtatacgcctaagggggctgacaattcttcactgactactcggatcttggccggatgtactacaggcgctatggcggtcacatgcgcccagcctaccgacgtcgtgaaggtccggttccaggccagcattcacctgggtcctagccgtagcgaccgcaagtactctgggaccatggacgcgtacagaaccattgcccgagaggaaggggtccggggattgtggaagggaacacttcccaatataatgcgcaatgcaattgtcaactgcgctgaagttgtcacctacgatatccttaaggagaaactgctggactaccacctgcttaccgacaattttccctgtcatttcgtgagcgcttttggtgcaggtttctgcgctacggtagttgcgtcccccgtggatgttgtcaaaacaagatatatgaattcaccacctggccaatatttcagccccctcgactgcatgatcaagatggtggcccaagagggccctactgccttctacaagggatttactccctcatttctgcggttaggttcctggaacgtggtgatgtttgtcacatatgagcagttgaaaagagctctgatgaaggtgcaaatgcttagagagtcgcctttctag

SEQ ID NO: 246296 - DNA, 633 bp, synthetic construct
  misc_feature 1..633: note = Description of Artificial Sequence: Synthetic coding sequence
  source 1..633: mol_type = other DNA
atggtgggcctcaaaccaagcgacgtcccacctacgatggccgtgaagttcttaggcgcaggaaccgctgcatgctttgctgatctagttacctttcctctcgataccgctaaggtgcgactccagattcagggcgaaaatcaagctgtgcaaaccgcaagactcgtgcaataccggggagtgctgggcacaattctcaccatggtacgaacagagggcccatgctccccttataacgggctggtggccggtctccagcgacagatgtctttcgcgtctatccgaattggactgtatgattccgtaaaacaggtctacacccccaaaggagccgacaataactttccctgccactttgtaagcgctttcggggctggattttgcgctaccgtggttgcctctcccgtggatgtggtgaaaacccgttacatgaacagtcctcccggtcaatacttttccccccttgactgcatgatcaagatggttgcccaggagggacctacagcattttataagggcttcacccccagtttccttaggcttggatcctggaacgtggtcatgtttgtcacctacgaacagctgaagcgcgcactaatgaaggttcaaatgctccgggagagccccttctag

SEQ ID NO: 246297 - DNA, 828 bp, synthetic construct
  misc_feature 1..828: note = Description of Artificial Sequence: Synthetic coding sequence
  source 1..828: mol_type = other DNA
atggtcggtctaaagccgtctgatgtcccgcctacaatggctgtgaaatttctgggggctggcacagctgcctgctttgctgacctcgtaacgtttccgttagacacggctaaagtcagactgcaaattcagggggagaatcaggccgtgcaaacggctcgccttgtgcagtatcgcggtgtacttgggaccatccttaccatggttagaaccgagggtccttgttccccgtataatggcctagttgcgggtttgcagaggcagatgagcttcgcgagtatcagaatcgggctgtacgattctgttaagcaggtgtataccccaaagggggcagataattccagcctaacaaccaggatcctggcgggatgcaccaccggcgctatggccgtcacatgtgcacagcctaccgatgtagtgaaggtgcgctttcaagcctccatccatttgggacctagccggtcagaccggaagtattctgggactatggacgcctatcggacaatagctagggaggagggagttcggggtttgtggaaaggcacattgcccaacatcatgcgaaatgccattgtcaattgcgccgaggtggttacctacgacatactgaaggagaagctactggactatcatttgctgactgacaacttcccctgccatttcgtgtcagcgtttggggctgggttttgcgccaccgttgtggcaagtcccgtggacgtcgtcaagacgcgatatatgaactcccccccaggccagtatttctcacccctggattgcatgataaagatggtggcccaggaaggcccaaccgctttctataaggggtag

SEQ ID NO: 246298 - DNA, 291 bp, synthetic construct
  misc_feature 1..291: note = Description of Artificial Sequence: Synthetic coding sequence
  source 1..291: mol_type = other DNA
atggtaggattaaaaccttcagatgtgcctccaacaatggccgttaagttccttggggctggaaccgccgcatgcttcgctgacctcgtgacattccctctcgatactgccaaggtccgcctgcagatccagggagagaaccaggccgtccagaccgccaggctcgttcagtaccgcggagtcctaggcaccatcctgacaatggtacgcactgaggggccatgctctccctataacggcctggtcgccggactccagaggcagatgagcttcgcatccattcggatttag

SEQ ID NO: 246299 - DNA, 1026 bp, synthetic construct
  misc_feature 1..1026: note = Description of Artificial Sequence: Synthetic coding sequence
  source 1..1026: mol_type = other DNA
atgcttttaaggcctagacgaccaccccctttggctccacccgcacctcctagtccggcatcgcccgacccagaaccacgcacacccggagacgcccctggaaccccacctagacgccctgcgtctccatcagcgctcggggagctcggactgcccgtgtcccctggaagcgcccaacgcaccccctggagtgcaagagagaccgagctcctcttggggaccctccttcagcctgccgtgtggcgcgctctgctgttggaccgtcggcaagccttaccaacttatagaagagttagcgctgccctagcccagcagcaggtgcgacggactcctgcccagtgtcgcagacgatacaaattcctcaaagataaatttagagaggcccatggtcagcctcccggaccatttgatgagcagatcaggaaactcatgggactgctgggtgataacggaagaaagcgtcctcgaagacgcagtcctgggtctgggaggccacaacgggcaagacgcccagtgccaaatgctcatgcacccgctccctcggagcctgacgcgacaccgctccctacagctagagacagagacgccgacccaacttggacactgcggtttagcccctcacctccaaaatctgcagatgcatctcccgctcccggatccccccctgcccctgccccaaccgctctggccacttgtatccccgaggatagagctcccgttaggggcccaggtagccctccaccgccaccagccagggaagatcccgattctccacccggacgcccagaggactgtgctccaccccctgccgcacccccatccctcaacaccgcattgcttcagacccttggccatctgggggacatcgcgaatatcctgggtccactccgggatcagctcttgacactgaaccaacatgtcgagcaactgcggggtgctttcgaccaaaccgtgagcctcgcagtcggatttattcttggctctgcggcagctgagagaggagttcttagggacccgtgccagtag

SEQ ID NO: 246300 - DNA, 3357 bp, synthetic construct
  misc_feature 1..3357: note = Description of Artificial Sequence: Synthetic coding sequence
  source 1..3357: mol_type = other DNA
atgtctgtggaagcgtatggaccatcatcacagacattaactttcctggataccgaagaggctgaattgctgggcgcagatactcagggatccgagttcgaatttacagattttaccctccctagtcagacccagaccccacctggtggacctggaggacctggcggagggggagccggtggccctgggggagccggtgcaggcgctgccgctggtcagctcgatgcgcaggttggccctgaaggcattctgcagaacggtgcagtggatgatagcgtggccaaaaccagccagctgttagctgaattgaacttcgaagaggatgaagaggatacatattatactaaggatttgcctattcacgcctgttcctactgcggtatccacgacccagcgtgcgttgtttactgtaatacatccaagaaatggttttgtaatggaaggggcaacacatctggatctcacattgtaaatcatttggtgcgggctaagtgcaaggaggtcacattgcacaaggacggtcctttaggagagactgtgctggaatgctacaactgtggctgcaggaatgtgttcctactggggtttatccctgcgaaggccgattccgtggtggtgctgctttgtaggcagccctgcgcaagtcaatccagtcttaaggacatcaattgggacagcagtcagtggcagcctcttatccaggacaggtgtttcttaagttggctggtaaagatcccatccgagcaggagcagctacgggctcgccagattaccgcgcagcagataaacaagttggaggagctgtggaaagagaacccctcagccacactggaggatctggagaaacctggggtcgacgaggaaccgcagcacgtcctgctgagatacgaagatgcctaccagtaccaaaacattttcggaccccttgtgaagctggaggccgactatgacaaaaagctaaaggaatcacagacccaagataatattacggtgaggtgggacctaggattgaacaaaaaacggattgcctacttcactctgccaaaaacagatagcgatatgagactgatgcagggcgacgagatctgtttgcggtataaaggcgacctcgccccattgtggaagggcataggacacgtgatcaaagtgcccgataactacggcgacgagatcgccatcgaactaaggagttccgtaggggcaccagtggaagtgacccacaacttccaggtagatttcgtgtggaaatcgaccagcttcgatagaatgcaatcagctctgaagaccttcgccgtggacgaaacttcggtttcagggtatatttaccacaaactgctgggccatgaggtggaggatgtgattattaagtgtcagttgccgaagcggttcacggcgcagggtctaccagacctgaatcacagccaggtctacgccgtgaagaccgtacttcagaggcctctgtctctcattcagggcccacctggtaccggaaagacagtgacgtccgcgaccatcgtgtatcacctggcaagacaaggaaatggacccgtgctggtatgtgcgccatccaacatcgcggtggaccagctgacagaaaagatacatcagacaggactgaaggtcgtgcggctgtgtgccaaaagccgtgaagctattgattctcccgtttcatttctggccctccacaatcagatccgcaatatggattcgatgccagaactgcaaaaactccagcagttgaaagacgaaacaggggagctgtcatccgccgatgaaaaaagataccgggcactgaagcgcacagcagagcgggaactgctcatgaacgccgatgtcatctgctgcacatgcgtgggggctggcgatcctcgcctcgctaaaatgcagtttcggtccattctgatcgatgagtctactcaggctaccgagcccgaatgcatggtgcctgtggttcttggagccaagcagctgatactggtcggcgaccactgccagctgggacctgttgttatgtgtaaaaaggccgcaaaggccggactttcgcagagtctgtttgagagactggtcgtgctgggtatccgccctattcggcttcaggtgcagtatcgcatgcatcctgccctttccgccttcccaagtaacatcttctacgagggatcgctccagaatggcgtaactgccgctgacagagttaaaaaaggtttcgacttccagtggccacagcctgacaaacccatgttcttctacgttacacaggggcaagaagagatcgcttcctccggtaccagctacctcaaccggacagaggctgccaacgttgaaaagattaccacaaagctactgaaggccggtgccaagcctgaccagatcggcattattacaccttatgaaggacagcgcagttatctggtccagtatatgcagtttagcggatccctccacacaaaactctatcaagaggtcgaaatcgcctccgtggacgcctttcaagggcgagagaaggatttcataatactgtcctgtgtccgggctaatgagcaccaggggatcggcttcctcaacgacccgagaagactgaatgtcgcactcacgcgcgcacggtatggagttataatcgtgggaaacccgaaggcgctgagcaagcagccactttggaaccatcttcttaactactataaagagcagaaggtcttagtggagggtcctctcaacaatctgcgagaatccctcatgcaatttagcaagccacgcaaacttgtaaataccatcaatccaggcgctagatttatgaccacagctatgtatgatgctcgcgaggcaattatccccggttcagtgtacgatagatcttcccagggaaggccatcaagcatgtatttccagactcacgatcagatcggcatgatcagcgcgggtcctagccatgtcgcagcaatgaacatcccaattcccttcaacttggtcatgcccccaatgccgcctcccggatactttggacaggcaaacggccctgccgctggtagaggcacacctaagggcaaaactggcaggggcggaagacagaagaatcgattcggactccccggaccatctcagactaacctgcctaacagccaggccagtcaggatgttgctagccaacccttctctcaaggcgcattgacccaggggtacattagcatgtctcagcccagtcagatgagtcagccaggcctgtctcagcctgagctgtctcaggactcatacttgggagacgagtttaagtcccagatagacgttgccctgtctcaggatagcacgtaccagggagaacgggcatatcagcacgggggagtgactggactgtcacagtactag

SEQ ID NO: 246301 - DNA, 1740 bp, synthetic construct
  misc_feature 1..1740: note = Description of Artificial Sequence: Synthetic coding sequence
  source 1..1740: mol_type = other DNA
atgcccgctgagcgcaagaagcctgcaagtatggaggaaaaagattcgttgccaaataacaaggagaaagattgcagcgagaggcgcaccgtatcctctaaggaacgacctaaggatgatattaagctcaccgcaaagaaagaggtttccaaggcccctgaggagtccaagaaaaaggaagaagaggagaaaaagaaacaccaggaggaagagcgcaaaaaacaagaggagcaggctaaaagacagcaagaggaagaggctgcagcccagatgaaagaaaaagaggaaagtattcagttgcatcaggaagcgtgggaacgacaccatctccggaaagaactaaggtcgaaaaatcaaaacgcccctgacagccgccctgaagaaaatttcttcagccgcctcgactctagtcttaagaagaacacggcgtttgtaaagaaactcaaaaccatcaccgagcagcaacgggactccctgagccatgacttcaatgggctcaacctctccaaatacattgcggaggcagttgcctcaatcgtggaggccaaactgaaaatcagtgatgtgaactgtgcggtgcacctgtgctctctgtttcatcagaggtatgccgatttcgccccttcccttctccaggtgtggaagaaacactttgaggccagaaaggaggagaaaactcctaacataacaaagctgaggaccgacctcaggtttattgctgagcttaccatagttggtatttttaccgataaagaaggactgagcctgatctatgaacagctgaaaaacatcattaatgctgatcgcgagtctcacactcacgtgtcggtagtgatcagcttttgcagacactgtggggatgatatcgccggtctcgtgcctaggaaagtgaaatccgccgctgagaagttcaacctttctttccctccatcagagattatctctccggagaaacaacaaccttttcagaatcttctgaaggagtactttacatcccttaccaagcatctgaaaagagaccaccgagagctccagaatacggagaggcagaaccgcagaatcttgcattctaaaggtgagctgtcggaggatagacacaaacagtatgaggaattcgcgatgtcataccaaaagctcctcgccaatagccagtctttggccgacttgctcgatgaaaatatgcccgacttgccccaggacaagccaactccagaggaacacggacctggaatcgatattttcaccccaggcaagcctggagagtatgatctggaagggggaatctgggaggatgaggacgcccgaaacttttatgaaaacctcattgacctaaaggcattcgtgccagcaattctttttaaggataatgaaaagtcttgtcagaataaagagtctaacaaggacgacaccaaggaagctaaagagtctaaagagaataaggaggtctcctctccagatgacttggaattagagctcgaaaacctggaaatcaatgacgacaccctggagctcgagggtggcgatgaggctgaggacctgactaagaaactgctggatgagcaggaacaggaggatgaagaggcttcaacggggtctcatcttaaactgatcgtggacgcctttttgcagcagctgcctaattgtgtgaacagggatctgattgacaaggccgagaaagccttttgcaatgggaacctagccagggtcaatctgctcctacgtatggcggtgaagaagtag

SEQ ID NO: 246302 - DNA, 3819 bp, synthetic construct
  misc_feature 1..3819: note = Description of Artificial Sequence: Synthetic coding sequence
  source 1..3819: mol_type = other DNA
atgcctgcagagagaaaaaaaccggcatctatggaggagaaggatagcctaccaaacaataaagaaaaagattgctccgaacgcagaaccgtctcatccaaagaacgtcctaaagatgacattaaacttacagcaaaaaaagaggtatccaaagccccagaggacaaaaaaaagagattagaagacgataaaagaaagaaggaagacaaagaaagaaagaagaaggacgaagagaaggtgaaggctgaggaggagtccaagaaaaaagaagaggaagagaaaaagaaacaccaggaggaggagcgcaagaaacaagaggagcaggcaaaaagacaacaggaagaagaagctgccgctcagatgaaggaaaaggaagaatccatccagttacatcaggaagcctgggagaggcaccatttacgaaaagagctgaggtccaagaatcagaacgcccctgactcacgccctgaggaaaactttttttcacgcctggattcttccctaaagaagaacacagcttttgttaagaagctcaagactattacggaacagcagagagactccttaagccatgattttaacgggcttaacttatccaaatacatagcagaagccgtcgcttctatagtggaggcgaagttgaagatctccgacgtgaactgtgcagttcacctttgttctctcttccatcagagatatgccgattttgccccttcgttgttgcaggtgtggaagaagcacttcgaggcaaggaaagaggaaaaaaccccaaacatcacaaagttgaggaccgacctgcgatttattgcagaactgacaatcgtgggaattttcaccgataaggaaggtctgtcactgatttacgagcagctgaaaaacatcattaacgccgatcgcgaatcccatacacacgtaagtgtggttatctctttttgtaggcactgtggggacgacatagccggtttggtcccaaggaaggtgaaaagcgccgctgaaaagtttaatctcagtttccctccctctgagatcattagtcccgagaaacagcaaccttttcagaatcttctcaaagaatactttaccagcctgactaaacatctcaaacgagaccatcgggagttacagaacactgaacgccagaatcgtcgcattctgcacagtaaaggagagttgtccgaggacaggcataaacagtacgaggagttcgcgatgtcctatcagaaactgctggcaaactcccagagtctggcggacctcctcgacgaaaatatgcccgatctccctcaggataaaccgacgccagaagagcacggtccaggtatcgatatctttactccgggaaagccaggtgaatatgatctggaggggggtatttgggaggatgaggatgccaggaacttttacgagaacttgatagacttgaaagcctttgttcccgctattctgttcaaggacaatgagaagtcttgccaaaacaaagagagcaacaaagatgacactaaagaagccaaagaaagtaaggagaataaggaggtgtccagcccagacgatctcgagcttgaactggaaaaccttgagatcaatgacgataccctggagttggaaggcggagacgaagccgaggacctgacaaaaaaactgctggacgagcaagaacaagaagacgaggaggcgtcaactggttcacacctaaaactcattgtggacgcttttctccagcagctccccaactgcgttaaccgggatctgattgataaagccgctatggatttctgcatgaacatgaatacaaaggccaatcggaaaaagttggtgcgggctttgtttattgtccccaggcagcgcctggaccttttgcctttttacgcccgactcgtggccacactgcacccgtgcatgagcgatgtggcagaggacctgtgtagcatgctgcggggagacttccgcttccatgtgcgtaagaaagaccagattaatattgagactaaaaataagaccgtgaggtttattggcgaattgactaaatttaagatgttcacaaagaacgacaccctgcactgtctgaaaatgctgttgagcgacttctcacatcaccacatcgaaatggcctgcaccctgctcgagacctgcggacgctttttgtttcgaagtccagagtctcacctccgaacgagtgttctgctcgagcagatgatgcgtaaaaagcaggctatgcacttggatgcaagatacgtaaccatggtggaaaacgcatactactactgtaatcccccacctgccgagaaaacagtcaaaaagaaacgtcccccattgcaggaatacgtacgcaagcttctgtataaagatttaagcaaggtgactactgaaaaagtgttgcgccaaatgcgtaaactgccctggcaagatcaggaagtgaaagactacgttatttgctgtatgataaacatctggaacgtgaagtataattccattcattgtgtcgccaaccttcttgctggattagtgttgtaccaggaggacgtaggcattcacgtggtggatggggtgcttgaggatatcagacttggcatggaggttaatcagccaaagtttaatcaacgaaggatatcctccgctaaattcctgggggagttgtataattatagaatggtagagagcgccgtcatctttcgcacactgtattcattcacctcctttggcgtcaatcccgacggctctccgtcatctcttgaccctcctgagcacctgttccgtattcggctggtgtgtacaatcttggatacatgcggccagtattttgacagaggtagtagcaaacgcaagctggattgtttcctggtttatttccagcggtatgtgtggtggaagaaatcccttgaggtgtggaccaaagaccacccctttccaatcgatatcgactatatgatctctgacaccctcgagctgttaagaccaaagataaagctgtgtaattcattggaagaatcaatcaggcaggtgcaggacttagaacgagagtttttaatcaagcttggcctcgtgaacgataaggactctaaagattctatgacggaaggcgaaaatctggaggaagacgaggaagaggaggaggggggtgcggagacagaagagcaatctggtaacgagagcgaagtaaatgagccggaggaggaggaaggcagcgacaacgatgatgacgagggtgaggaggaggaagaggagaatactgactatctgacagattcaaataaggagaatgagaccgatgaagagaacactgaggtgatgattaaaggcggtggactaaaacacgtcccctgcgttgaggacgaggattttatacaggctttggacaaaatgatgctggagaatttacagcagcgctcaggcgaaagcgtaaaggtgcatcagctggatgtggccatccccttgcacctcaagtcacagttacgaaaaggacctccactgggtggcggtgaaggagaagccgaatcagccgacaccatgccattcgtcatgctcacgagaaagggaaacaagcaacagtttaaaattctcaacgtgccaatgagcagccagctcgctgcaaaccattggaaccagcagcaggcagagcaggaagaacgcatgaggatgaagaaattgaccctggacattaacgagcgccaggagcaggaagactaccaggaaatgcttcaatccttggcacagcgacccgcaccagcaaatacaaatagggaacgccgacccagatatcagcaccccaagggtgcgcctaacgctgacctcatcttcaagactggcggtagaagacggtag

SEQ ID NO: 246303 - DNA, 3819 bp, synthetic construct
  misc_feature 1..3819: note = Description of Artificial Sequence: Synthetic coding sequence
  source 1..3819: mol_type = other DNA
atgcctgcagaaaggaagaaacccgcatccatggaagaaaaagacagtctccccaacaataaagaaaaggactgctccgaacggagaacagtaagcagcaaggaacgaccaaaggatgatatcaagctgactgccaagaaagaggtgtcgaaggccccagaagataagaagaagagactcgaggacgacaagaggaaaaaggaggataaagaacggaaaaaaaaggacgaggaaaaagtgaaggccgaagaggagtctaagaagaaagaggaggaggaaaagaaaaagcatcaagaggaggaaagaaagaagcaggaggagcaggccaagcgacaacaagaggaggaggccgctgctcaaatgaaggagaaagaggagtctatccagttgcaccaggaagcttgggagagacaccaccttcgcaaggagctgcgaagtaaaaaccagaacgccccagactcccgccctgaggagaatttcttctctcgcctggacagtagtctgaagaagaacacggcctttgtgaagaaactgaagactatcactgagcagcaacgagactccctttcacatgatttcaatggccttaatctcagtaagtacattgccgaggccgtggcctccattgtggaagcaaagttgaagatcagcgacgtgaactgtgctgtgcatttgtgctccctcttccaccagaggtacgcggatttcgccccttccctgctccaagtgtggaaaaaacacttcgaggctcggaaggaggagaagactcccaacataacaaaactgaggactgacctgaggttcatcgcggagctgactattgtgggtattttcaccgacaaggaaggactgtccctcatctacgaacagctcaaaaacattatcaacgcagatcgcgaatctcacacccatgtttctgtggtcatctctttttgcaggcactgcggcgacgacatcgctgggcttgttcccaggaaggttaaaagcgctgcggaaaagtttaacttaagcttccctccatctgagatcatctccccggagaaacagcagccatttcagaacttgctcaaagagtatttcacctcactgacaaagcaccttaaaagagatcacagagagctccaaaacaccgaacggcaaaacagacgtatcctccactcgaagggtgaactgtctgaggacaggcataagcaatacgaggaattcgccatgagctaccaaaagctcctggcgaacagtcagagtctggccgatctactggatgaaaatatgcccgatctacctcaagacaaacccacacctgaagagcatggccctggcatcgatatttttacccctggaaagcctggcgagtacgatctggaaggcggaatatgggaagacgaggatgctcgcaacttctacgagaacttgatagacctaaaagccttcgtgcccgcaatcctgtttaaggacaatgagaaatcctgtcaaaacaaggaatcaaataaggacgataccaaggaggccaaagaaagcaaagagaacaaggaagtctccagccctgacgaccttgaattagaacttgaaaacctggaaatcaatgatgacacattggaactcgaggggggagacgaggctgaagacctgaccaaaaagctgctagacgagcaagaacaggaggacgaagaggcctccaccggcagtcatctgaagctgatcgtggacgccttcttgcaacagctgccgaactgtgtgaacagggacctaattgacaaggcagcaatggatttttgcatgaacatgaacacaaaagccaaccgcaagaagctggttcgtgctctttttattgtcccgaggcaacgtctggacctgctgcctttttacgcaagactggtggcaacgcttcacccctgcatgagcgacgttgcagaagatctctgtagtatgctgcgtggcgactttcgctttcacgttcgaaagaaggaccagatcaatatcgaaacaaaaaataagacagtgcgctttataggggagctgaccaagttcaagatgttcaccaaaaacgacacgctccactgcctgaagatgctgctcagcgatttctctcatcaccatatcgaaatggcctgcactctcttagaaacctgtggtagatttctctttcgctcaccagagagccacctgcgcacatccgtgctgctggagcagatgatgagaaaaaaacaggctatgcatctggacgcccgatatgtcaccatggtggaaaatgcctattactactgcaacccaccaccggcagaaaagaccgtaaaaaaaaagagaccgccacttcaggagtacgtgcgtaagctgctttacaaagacctctcaaaggtgaccacagagaaagtcctcagacagatgagaaaactgccttggcaagaccaggaggtgaaggattacgtgatatgttgtatgataaatatttggaacgtgaaatacaacagtatccactgtgtagctaatttacttgcaggcctggtgctgtatcaggaggacgtgggcatacacgtcgtggacggagtgttggaggatatccgcctgggaatggaggtgaatcagccgaagtttaaccaacggaggatctcgagtgccaaatttctgggggaactctacaactacagaatggtggagtccgcggtcatctttcggactttgtattcttttacttcattcggagtcaatcccgatggctcgccttccagtcttgatcccccagagcacttgtttcgcataaggctagtttgtacaattttggatacttgcggccagtacttcgatcggggtagcagcaaaaggaagttggactgtttcctggtctattttcagcggtacgtgtggtggaagaagagccttgaagtctggaccaaggaccaccccttccctatagacattgattacatgatctctgacacactggaactgctgagaccaaagatcaaactgtgtaacagcctcgaggagtcaatacgacaggtgcaggatcttgagcgcgaattcctgatcaaactaggcctggtgaatgataaagacagtaaagacagcatgacagaaggggaaaatcttgaagaggacgaggaagaagaggaaggtggggctgaaactgaagagcaatccgggaacgagtcagaagtgaatgagcccgaggaggaggaagggtctgacaacgacgacgatgaaggagaggaggaggaggaggagaatacggattacctgaccgactctaataaggagaatgagactgacgaagaaaacactgaagtcatgattaagggcggaggactgaagcacgttccctgtgtggaagacgaagatttcattcaggccctagacaaaatgatgctcgagaacctccaacagcggagtggcgagtctgttaaagtccaccaacttgacgtagcaattccattgcatttaaagagtcaattgaggaaggggcctcccctaggcggtggtgagggggaagccgaatccgctgataccatgcccttcgttatgctgacccggaaaggaaacaagcagcagtttaaaatactgaacgtccccatgtctagccagctggccgcaaaccactggaaccaacaacaggcagagcaggaggaacgaatgcggatgaagaaacttactttggacatcaacgaacgacaggaacaggaggactatcaggagatgctgcagtccctggcacagaggccagcacccgctaacacaaatagagaacgccgaccaaggtatcagcatcctaagggtgctcccaacgcagatttaatcttcaagaccggcggaagacggaggtag

SEQ ID NO: 246304 - DNA, 375 bp, synthetic construct
  misc_feature 1..375: note = Description of Artificial Sequence: Synthetic coding sequence
  source 1..375: mol_type = other DNA
atgatcaaaggaggcggtctgaaacacgtgccttgcgtcgaggatgaggacttcattcaagcactagacaaaatgatgttggaaaatctccagcagcgctccggagagagtgttaaggtccatcagctggacgtggctattcccctccacctgaaatcccaactgaggaaggggccaccccttggcggaggggagggggaggccgaatctgccgacaccatgcccttcgttatgcttacaagaaagggtaataagcagcagtttaaaatactgaatgtgccaatgagctcccagcttgccgctaaccactggaatcagcagcaagccgaacggcgtgaggacgagaacgaaaaggctcacacccggtaccagtag

SEQ ID NO: 246305 - DNA, 1740 bp, synthetic construct
  misc_feature 1..1740: note = Description of Artificial Sequence: Synthetic coding sequence
  source 1..1740: mol_type = other DNA
atgcccgcagagagaaaaaagcccgcaagcatggaggagaaggactcactgcctaacaacaaagaaaaggactgcagtgaaaggcgtacagtctcctccaaggaacgcccaaaggacgacattaaactgacagccaagaaggaggtatccaaggctcccgaagaatctaaaaagaaggaagaagaagagaagaagaaacaccaggaggaggaaagaaagaaacaagaggaacaggccaagaggcagcaggaagaggaagcggctgcccaaatgaaagaaaaagaagaatcgatacagttgcaccaggaggcttgggagaggcaccatctgaggaaagagctgcggagcaagaaccaaaatgcacccgacagcagacctgaggagaacttctttagcagacttgactccagtctcaagaagaacaccgcttttgtcaagaaactgaaaacaatcaccgagcagcagcgcgattcactgagccacgatttcaatggtctgaacctgtcgaaatatatagcagaggctgtcgcttctattgtagaagctaagcttaagatctcagacgtgaattgtgccgttcacctgtgcagtctattccaccagaggtatgccgacttcgccccatcattgctccaggtatggaaaaagcactttgaggcgagaaaagaggagaagactcccaatattaccaagttaagaacggacctgcgttttatcgctgagctcacgattgtgggaatctttactgacaaagaggggctgtcccttatatatgaacagttgaagaacattattaatgccgaccgagagtctcacacacatgtgtctgtggttatcagcttttgtaggcattgtggcgacgacatagctggccttgtccctaggaaggtcaagtcggcagcagaaaaattcaaccttagtttccccccttcagaaatcatcagccctgaaaaacagcagccttttcagaatctgctgaaagaatatttcaccagccttaccaagcatctgaagagagaccatagagagctgcagaacaccgagagacaaaataggcgtattctgcacagcaagggggaactcagtgaggacagacacaaacagtacgaagagttcgccatgtcctaccagaagctgctggccaattctcagtcccttgctgatctcctagacgagaacatgcctgacctgccacaagataagccaactcccgaagagcacggcccaggcatagacatttttacccccggaaagcctggcgagtacgacctggaagggggaatatgggaagacgaggatgccagaaacttctacgagaatctgatcgacttgaaggcattcgttccagctatcctcttcaaagacaacgagaagtcctgtcagaacaaagagagtaacaaagacgataccaaagaggctaaagagtccaaggagaataaagaggtgtccagtcctgacgatctggaacttgaattagaaaacttagagatcaatgacgacaccctcgagctggagggaggcgatgaggccgaagatctcaccaagaagctgctcgatgagcaggaacaggaagatgaggaagcctccactgggtcacatctgaagctgatcgtcgatgcctttctccaacagctgccaaattgcgtcaacagagatctaatagacaaggctgaaaaagctttctgtaacggcaacctagccagagtgaacctgcttctaaggatggccgtgaaaaaatag

SEQ ID NO: 246306 - DNA, 3819 bp, synthetic construct
  misc_feature 1..3819: note = Description of Artificial Sequence: Synthetic coding sequence
  source 1..3819: mol_type = other DNA
atgccagccgagcggaagaagccagcaagcatggaagagaaggattcgctgcctaataataaagagaaggactgctctgagcggcgtacggtttcaagtaaagaaagacctaaggacgatattaagctgacagcgaagaaggaagtgtctaaagccccagaagataagaaaaagcgacttgaagatgataagcggaaaaaggaagacaaagaaagaaagaaaaaggatgaggaaaaggtaaaagctgaggaggaatctaaaaagaaagaggaagaggaaaagaagaaacatcaagaagaagagcgaaaaaagcaggaggagcaagctaaacgccaacaagaagaggaggctgcagcccaaatgaaggaaaaagaggagagcattcagcttcatcaggaggcctgggagagacaccatctgagaaaagagctgcggtcaaagaaccagaacgcaccagatagcaggcctgaagagaactttttctcaaggcttgactcctcactgaaaaagaacacagccttcgtgaagaagctgaaaacaataactgaacaacagcgcgattctttatcacacgacttcaatggcctcaacctgtccaagtatatcgccgaagccgtggcttcgattgtggaggccaagctcaagatcagcgacgtcaattgtgccgtgcacttgtgcagtcttttccatcagcgttacgcagactttgcacctagtctgttgcaggtgtggaaaaagcactttgaggctcgtaaagaagagaagacacctaacatcacaaaactcaggacagatttacgcttcatagctgaattgacaatcgtcggtatttttactgacaaggagggattgagtttgatttacgaacagctcaaaaacattatcaatgcggatcgcgagtctcacacccatgtgtccgtcgttattagcttctgcaggcactgtggggacgatatcgccggactagtgccccgtaaggtgaagtcagcagccgaaaaatttaatctgtcatttcctcctagcgaaataatttcgccagagaagcagcagcccttccaaaatttgcttaaagaatatttcacgagcctgaccaagcacctgaagagggatcatcgcgagttgcagaataccgaacggcagaaccgacgaatcctccatagcaagggagagctctcagaggacaggcataagcagtatgaagagtttgcgatgagttatcagaaattgctcgcgaatagccagagtctcgctgacctgttggacgagaacatgccagacctacctcaggacaagcccacccctgaagagcatggcccagggattgacatcttcactcctgggaagcctggggaatacgatctggagggcggaatctgggaagatgaagatgcaagaaacttttacgagaatctaatcgatctcaaggcgttcgtgcccgctatactgtttaaagataacgagaagtcatgccagaacaaagaatcaaataaagacgacacaaaggaagcgaaagagtccaaagaaaataaggaagtctcaagcccagacgatctcgagcttgaactggagaatctggaaataaatgacgacactctggagctggagggaggagatgaagcagaggatctgacaaagaaactgctggacgagcaggaacaggaagatgaggaagcctctactgggtcccacttgaagctgatagtggatgcattcttacaacaattgcctaactgcgttaatagggatttgatcgataaagccgctatggacttctgtatgaatatgaataccaaagcaaaccgaaaaaaactcgtacgcgctctttttattgtgccacgccagagactggatctgctgccattctacgcaagattagtcgccacgctccacccgtgtatgtcagatgtcgcagaggatctatgctccatgctgaggggagatttcaggttccatgttaggaagaaggaccaaatcaatattgagacaaaaaataaaaccgtgcgctttatcggcgagctgacgaaatttaagatgttcaccaagaacgacactctacactgtttgaagatgctgctttccgatttctcacatcaccacatcgaaatggcctgcactctgctcgaaacctgcggtcggtttcttttcaggagccctgagtctcacctccgcacatctgttctgctggagcaaatgatgagaaaaaagcaagctatgcatttagatgcgagatacgttacaatggtcgagaatgcctactactattgcaatccgccaccagcggagaagaccgtgaaaaagaagcgtccacccttgcaagaatacgtgcggaaattgctgtacaaagatctctctaaggtgaccaccgagaaagtgctgaggcagatgaggaaactgccatggcaagaccaggaggtgaaagattacgttatctgctgtatgatcaacatatggaacgtgaagtacaacagtattcactgtgtggctaatctgctggccggtctggttttgtatcaggaagacgtaggtatccatgtcgtagacggcgtgttggaagatattcggctggggatggaagtgaaccaaccgaagttcaaccagcggagaatttcttctgccaagttcctcggagaactgtataattaccggatggtcgaatctgctgtaatttttagaacactatacagcttcacttcatttggagtgaatccagatggcagtccttcttccttagatccaccagagcacttgtttaggattcggctggtatgcaccatactggatacgtgcgggcagtactttgatcgaggcagctctaaacgtaagcttgactgctttcttgtgtactttcaaagatacgtctggtggaaaaaatcactggaggtctggactaaggaccaccccttcccgatcgatattgattacatgatttccgacactttggaattactgcggccaaaaatcaaactgtgtaactcgttggaagaaagcatccgccaggtacaggatcttgagcgcgaattcctcattaaattgggactggtgaacgacaaggactctaaggattccatgacagaaggcgaaaacctggaggaagacgaagaggaagaggagggtggggctgaaaccgaggagcaaagcggcaatgagtccgaggtgaatgagcccgaggaggaggagggctctgacaacgacgacgacgagggggaggaagaggaagaggagaatacagattatctgaccgactcaaataaagagaatgagactgacgaagagaatacagaggttatgataaagggcggtggtttgaagcatgtgccatgtgtggaagacgaggacttcatccaggccctagataagatgatgcttgaaaacctgcaacagaggtcaggggaaagcgtgaaggtgcatcaactggacgtggccatccccctgcacctcaagagccagctgcgaaagggcccacctttggggggaggagaaggagaagccgaatctgctgacacaatgccatttgtgatgctgacaaggaagggtaataagcagcagtttaagattctcaacgtgccaatgtcatcgcaactcgccgctaaccattggaatcaacagcaggccgaacaggaagaacgcatgcgcatgaagaagctcacccttgacatcaatgagcgacaggaacaggaggattaccaggaaatgctccagtctctggctcagagaccagcaccagcaaacacgaatagggaacgacggcctcgctatcagcatccaaagggagccccaaatgctgacctgatctttaagaccggcggaagacgccgttag

SEQ ID NO: 246307 - DNA, 1332 bp, synthetic construct
  misc_feature 1..1332: note = Description of Artificial Sequence: Synthetic coding sequence
  source 1..1332: mol_type = other DNA
atgcgcagcgagaaggagggagctggaggactcagggcggctgtggccgctaggggtccttccggacgagaaaaactcagtgctctcgaggtccagttccatagggactcccagcagcaggaagctgaaactccgccaacatcgagtagtggatgcggtggaggggctggcaaacccagagaggaaaaaagaaccgctctctctaaggttgttattagacgactccctcccggtcttaccaaggagcagctcgaagaacagctgaggcctctccctgcacatgattattttgaattcttcgcagcagatctgtcactctacccccatttgtatagcagagcgtatataaattttcgtaacccagacgacatcctcctgtttcgcgataggttcgacgggtacatctttctggattccaaagaccccgagtataagaagtttctggagacctactgtgtggaggaggagaagacctctgctaacccggaaacgctgctaggtgagatggaggcaaagactagagagctaatagcacgacgtaccactcccttgctggaatacatcaagaatcgtaagctggagaagcagaggatacgagaggaaaagcgggaagagcggaggaggcgcgagttggagaagaagaggctccgcgaggaagaaaagcgtagacgcagggaggaggagcggtgcaaaaagaaagaaaccgacaagcagaagaagatagccgagaaggaggtgagaatcaaacttctgaaaaaaccagaaaagggcgaggaaccgacgaccgaaaaaccgaaggagcgtggtgaagagattgataccggaggcggaaaacaggagtcctgtgcccctggcgcagtagtgaaggccaggcccatggagggttctctggaagagccgcaggagacctcacacagcggatctgacaaggagcatcgggatgtcgagcgctcccaagagcaagagagcgaagcacaacgttaccatgtggacgacggaagaaggcatcgggcacaccacgaaccagaaagactgtcccgcaggagtgaggatgaacagagatggggaaagggccctggacaggataggggaaagaagggttctcaggacagtggagcccctggagaggcgatggagcgactgggtcgcgctcaacgatgtgatgactctccggctccacggaaggaacggctcgcgaacaaggaccgacccgctttacagctgtacgacccgggagctagatttagagcccgtgagtgtggcggaaacaggagaatatgtaaggcagaaggctccggcactgggccagagaaacgtgaagaggctgagtag

SEQ ID NO: 246308 - DNA, 1431 bp, synthetic construct
  misc_feature 1..1431: note = Description of Artificial Sequence: Synthetic coding sequence
  source 1..1431: mol_type = other DNA
atgcggtcagagaaagagggggcaggtgggttgagagccgcagttgccgctcgaggacctagcggcagggaaaagctgtccgccctcgaggtccagtttcaccgggactctcaacagcaggaggccgagacaccacccacttcgtcttcagggtgtggcggaggcgcaggtaagcctcgcgaagaaaaaaggaccgccctttcaaaagtcgttatcagaaggttgccacctgggttgactaaggaacaacttgaagaacagctgagaccgctcccagcgcacgactattttgaattttttgccgctgacctgtccttatacccccacttatactcccgcgcatacatcaattttcggaatccagatgatattctactgtttagggataggtttgatgggtacattttcctggatagtaagggcttggaatacccggcagtagttgaattcgccccttttcaaaagattgcaaagaaaaagctgaggaagaaagatgcaaaaacgggaagtatcgaggacgaccccgaatataagaagtttctggaaacctactgtgttgaagaagagaagacttcggccaatccggagactctgctgggtgaaatggaggcgaaaacccgtgaactgatcgcacgaaggacaactccactcctggagtatattaagaacaggaaactagagaagcagagaataagggaggaaaagagagaagaacggagacgacgagagttagagaagaagaggctccgcgaggaagagaaaagacgcaggcgagaggaggaacggtgcaaaaaaaaagagaccgacaagcaaaaaaagattgcggagaaggaagtccgcatcaaattgttaaagaagcccgagaaaggagaggagcccaccaccgagaaacctaaagaacggggtgaagaaatcgacactggtgggggaaagcaagagagctgtgcgccaggtgctgtggtgaaggctcgacccatggaaggaagtctggaggaaccgcaagagacttcccactccggaagtgacaaggagcaccgtgatgtcgaacggagtcaggaacaagagtcagaggctcaacgttaccacgtcgacgacgggaggagacaccgagcgcaccacgagccagagaggctttctcgcaggtccgaggatgagcagcgctggggcaaaggtcccggacaggacaggggcaaaaagggcagtcaggatagcggtgccccaggcgaggcgatggagagactcggacgagctcagcgctgtgacgatagtcccgcaccacggaaagaaaggctggcaaacaaggaccgaccagccctacagctgtacgatcctggcgctcgtttcagagccagagagtgcgggggtaacagacgcatttgtaaagcggaaggctccggcacgggtcccgagaagcgcgaggaggcagagtag

SEQ ID NO: 246309 - DNA, 627 bp, synthetic construct
  misc_feature 1..627: note = Description of Artificial Sequence: Synthetic coding sequence
  source 1..627: mol_type = other DNA
atggaggcgaagactcgagaactgattgcgaggagaaccactccactcctggaatacattaagaaccggaaactcgaaaaacagcgtattcgagaagagaagcgagaagaaaggaggcggagggaactcgagaagaagcggctccgggaagaggagaagagacgaaggagggaagaggagagatgcaaaaaaaaagagacagataaacagaagaaaattgccgaaaaggaggttcgcattaagctcttaaagaaaccggaaaagggagaggagccgaccaccgaaaaaccaaaagaacgtggtgaggagatcgacaccggtggcggtaagcaggagagctgcgcaccaggggcagtggtgaaagcgcgtcccatggaggggtcactcgaagaaccccaggagacatcacactcaggcagcgacaaggagcaccgcgacgtagagagatctcaggaacaggaatccgaggctccaaggaaggaacgccttgccaacaaggaccgaccagcactacaactgtacgatccaggcgctaggtttcgagcacgggagtgcggcggaaatagaagaatatgcaaggctgaagggtcaggaaccggcccagaaaagagagaagaggccgagtag

SEQ ID NO: 246310 - DNA, 1452 bp, synthetic construct
  misc_feature 1..1452: note = Description of Artificial Sequence: Synthetic coding sequence
  source 1..1452: mol_type = other DNA
atgaaggaagaaaaagagcatcgccctaaggaaaagagagttactctcctgacgccagctggggctaccggatcaggtggcggaacatcaggggattcatccaaaggcgaggacaagcaagatcgaaacaaagagaaaaaagaggcgctgtccaaagtagtcattcggagattaccgccaacgcttaccaaagaacagttgcaagaacacttgcagccaatgccagagcacgactattttgagttcttcagcaacgacacatcactctaccctcacatgtatgcgcgtgcatacataaatttcaaaaatcaggaggacattatcctcttcagagaccggtttgacggatatgtattccttgataataaaggccaagaatacccagcaatcgttgaattcgctcccttccagaaagctgccaagaaaaaaaccaagaaacgagacactaaagtcggtaccatagatgatgacccagaatacaggaaattcctagagtcttacgctaccgataatgaaaaaatgacttcaactccagaaaccctgctggaagaaattgaagcgaagaaccgagaattaatcgcaaagaagacaactcctctgcttagcttcctgaaaaacaaacaacgcatgcgcgaggaaaaacgtgaggaacgtagaagacgggaaatcgaacgcaagcggcaacgggaggaggaaaggcgaaagtggaaagaggaggaaaagcgaaaacgaaaagatattgagaagctcaaaaaaatcgaccggatcccagagcgggacaagctgaaagatgagcctaagattaaggtacaccgcttcttgttacaagcagtgaatcagaagaacttactgaaaaagccggagaaaggcgatgagaaagagctcgacaagcgggagaaagcgaagaaattggacaaagaaaacttgagcgatgaaagggcctctggtcagtcctgtacactgcccaagagatctgattcagaactcaaagatgaaaaacctaagcgcccagaggacgagtccggcagagactacagagagagggagcgtgagtatgagcgtgatcaagagcgcatcctgcgggagcgagagcgactgaagcgtcaagaggaggaacggaggcgtcaaaaggaacgttacgagaaagagaagacctttaagcggaaagaggaagaaatgaaaaaggagaaggacaccctgcgagacaaaggaaagaaagcagagtccaccgagagtatcggcagttccgagaagacagagaaaaaagaggaggtggttaagagagataggatcaggaataaagaccgccctgcaatgcagctctatcagcctggcgcaaggagccgcaatcgcctgtgcccccctgacgattccacaaaatcaggcgacagcgccgctgagcgtaagcaagaaagtggaatatcccacagaaaagagggcggagaggagtag

SEQ ID NO: 246311 - DNA, 1413 bp, synthetic construct
  misc_feature 1..1413: note = Description of Artificial Sequence: Synthetic coding sequence
  source 1..1413: mol_type = other DNA
atgaaggaggaaaaagaacaccggccaaaagaaaaacgagtgacactcttgacaccggcaggagcaaccggatcaggcggaggtacatcaggcgacagctcaaagggagaggataagcaggaccgcaacaaggagaagaaagaggcactgtctaaggtcgtgatcaggagactcccccctaccctgacaaaggaacagttgcaggagcacctgcagcctatgcctgagcatgactattttgagttcttcagcaacgatacatccctgtatccccatatgtatgcccgtgcatacatcaactttaagaaccaggaggacattattttattccgggaccgctttgatggctatgtgtttcttgacaataaaggacaggagtacccggcaatcgttgaattcgccccatttcagaaggccgctaagaaaaaaacaaagaagagggacactaaggtgggaacaatcgatgacgatccagagtaccggaagttcctggagtcctacgccacagacaacgagaaaatgacaagcacacccgaaacgctgctggaagaaatcgaggccaaaaatagggaactgatcgcgaaaaaaaccacgcccttgctctcttttctgaaaaacaaacagcggatgagagaggaaaagcgagaggagcgcaggcgacgggagatcgagcgtaagaggcagcgggaggaagagcgccgaaagtggaaggaggaagagaaaaggaagcgcaaagacatcgagaagttaaaaaagattgatcgcatccccgagcgggacaagctgaaagacgaacccaaaatcaaattgctgaaaaagcctgagaagggtgatgaaaaagagcttgataagcgtgagaaagccaagaagctggacaaagagaatctgagtgatgagagagcctcaggacagagttgcactttgccaaaacgttctgattctgagctgaaagacgagaagcccaagaggcctgaggacgagagcggtcgagactatcgcgaaagggagcgtgagtatgagcgcgaccaggaaagaatcctcagagaaagagagcgcctgaagagacaagaggaggagcggaggagacagaaagaacgttatgaaaaagagaagacatttaaaagaaaggaggaggaaatgaaaaaggaaaaggataccctccgagacaaaggtaaaaaggccgagtctacagagtcaattggaagctccgaaaagacagagaaaaaggaagaagtggttaaaagagatcgcataaggaataaagatcggccagccatgcagctctaccagcctggggcaaggagcaggaatcgactctgccctcccgacgactcaactaagtccggcgactctgccgcagaacggaagcaagagtccggaataagccacaggaaggaaggaggagaggagtag

SEQ ID NO: 246312 - DNA, 657 bp, synthetic construct
  misc_feature 1..657: note = Description of Artificial Sequence: Synthetic coding sequence
  source 1..657: mol_type = other DNA
atgaaagaggaaaaggaacaccggccaaaggaaaaaagagtcacactcctgacccccgcaggcgcaactgggagcgggggaggcacatccggcgactcatccaagggcgaagacaaacaggaccggaataaagaaaagaaggaggctctgtctaaagtggtcattaggcgcctcccacccaccctgactaaagagcaactgcaagagcatctgcagcccatgccagaacacgactattttgaattcttcagcaatgataccagtctgtatccccacatgtacgccagggcgtatattaattttaagaaccaggaggacataatactgttccgtgaccgttttgacggatatgtctttttagataacaagggacaggagtatcccgctatcgtagagttcgccccttttcaaaaggccgctaaaaaaaagaccaagaaaagagatactaaggtgggcaccattgatgatgatcccgagtatcgcaaattcctcgagagctacgccacagacaacgaaaagatgacaagtacaccggagacgctgctcgaagaaatagaggcaaagaatcgagaactaatagccaaaaagacaacacccctcttaagtttcctcaaaaataaacagcgcatgagagaggaaaaacgcgaggatttctag

SEQ ID NO: 246313 - DNA, 441 bp, synthetic construct
  misc_feature 1..441: note = Description of Artificial Sequence: Synthetic coding sequence
  source 1..441: mol_type = other DNA
atgatgtggcagaaatacgccggatctaggcgttctatgccgctcggcgcaagaatcctgtttcatggggtcttctacgccggaggatttgctatcgtatactatttgattcagaagtttcactcaagagcactgtactacaagcttgcagtcgagcagctgcagtcacacccagaggcccaggaggcactgggaccaccattaaacattcattacctgaagctgattgatcgggagaatttcgttgatattgtggatgcaaagttaaaaattcccgtcagtggctcaaagtctgaggggttgctgtacgttcatagcagcagaggcggaccgtttcagcgatggcacctggacgaagtttttttggagttaaaagatggacaacagatccctgtgttcaagttgagcggggagaacggcgatgaagtgaagaaagaatag

SEQ ID NO: 246314 - DNA, 2667 bp, synthetic construct
  misc_feature 1..2667: note = Description of Artificial Sequence: Synthetic coding sequence
  source 1..2667: mol_type = other DNA
atggagggcgatgactgtgaattcaggtacggcgacgggactaatgaagcccaggacaatgatttccctactgtcgaaagaagccgactgcaggaaatgctgagccttcttgggcttgagacctaccaggtgcagaagcttagcctgcaagactctctgcagataagctttgactctatgaagaattgggcccctcaggtccctaaagatttaccatggaactttctgcgaaagctgcaggcactcaatgcggatgctaggaataccacaatggtgcttgatgttttgcccgacgccaggccagtcgaaaaagagagtcaaatggaagaggagatcatttattgggaccccgctgatgaccttgccgcagatatatatagtttctccgagctccccacacctgacacaccagtgaatccactcgatctgctgtgcgctttgctgctttccagcgactccttcctgcaacaggagattgctctgaagatggcactttgccagttcgctcttccattagtgttgcccgactccgaaaaccactaccacaccttcctgctgtgggcgatgcggggaattgtcagaacttggtggagccagcctccacggggaatgggctcatttagggaggacagcgtggtgctatcccgcgcacctgcctttgcttttgttcgaatggatgtttctagcaattccaagtcacaacttttgaacgcagtactctcccccggtcatagacagtgggactgtttctggcaccgcgacctcaatctcggaacgaacgcgagggagattagtgacggcttagttgagatttcatggttttttcccagcggacgcgaggatctggatattttcccagagcccgtggcattcctgaacttacggggagatatcgggtcacactggcttcagttcaaactcctgactgaaatctctagcgcggtcttcatactcaccgataatatttctaagaaggaatataagctactgtattctatgaaagagagcaccactaagtattactttattctaagtccttaccgaggaaagcggaatacaaatctcagatttttgaacaaactcatccctgttctgaagatcgaccacagccatgtgttagttaaggtttcctcgaccgactctgatagtttcgtgaagcgcattagagccattgtgggaaatgtgctcagagccccatgcaggcgggtgtcagttgaggatatggcccacgcagccaggaagctaggtcttaaagtggatgaagattgcgaagagtgtcaaaaggcaaaggatcgaatggagcggataactcgtaaaatcaaagactctgacgcgtacagaagggatgaattaaggttacagggagacccctggaggaaggctgcacaggtggagaaagaattctgccagcttcagtgggctgtggacccccctgagaagcatagagccgagctgaggcggaggctactggagcttaggatgcagcagaacggacatgatcccagtagcggagtgcaagaattcatcagcggtattagctcaccttctttgtccgaaaaacagtactttctgaggtggatggaatggggattggccagagttgctcaaccccgactcagacagcctcctgagacgctgctaactctccgtcctaagcatggagggacaactgatgtgggggaacctctgtggccagagcccctcggcgtggagcacttcctgagagaaatgggtcagttctacgaagctgaaagctgtctcgttgaagctgggaggttgccagcaggtcagaggagatttgcccattttcctggtctcgcctccgaactgctactgaccggactcccactggagctgatcgatggctctacattgtccatgcctgttcgctgggtgacaggtctcctcaaagaattgcatgtgaggctggagcggagatctcggctggtggtgctatccacagtgggggtgccaggtactgggaagtcaactctactgaataccatgtttggcctcagatttgccaccgggaagtcctgtggacctagaggcgctttcatgcagctgatcaccgtggcagaggggtttagtcaagacctcggttgcgatcacatcctggtgatagactctggcggtctgatcgggggagccctcacctctgcgggagaccgatttgagctcgaagcgtcgctggctaccttgttgatggggttgtcaaacgtgacagtcatcagcctggcggaaaccaaggatatccccgctgcgattttgcacgccttcctgcggctggaaaagactggccatatgcctaattaccagttcgtgtaccagaacctgcacgacgtgtccgtccccggacccagaccaagggacaagaggcagctgctggacccccctggtgatttgagccgcgcagcggcacaaatggagaaacaaggtgatggttttcgggctctggcaggtcttgccttctgcgaccctgagaagcagcatatctggcacatccctggcctatggcacggcgctccccctatggcagccgtcagcttggcgtattcagaagccatcttcgagttgaaaaggtgcctcctggagaacatcaggaacggactgtccaatcagaataaaaacatccagcagctaatcgagctggtgagacgtttatag

SEQ ID NO: 246315 - DNA, 2769 bp, synthetic construct
  misc_feature 1..2769: note = Description of Artificial Sequence: Synthetic coding sequence
  source 1..2769: mol_type = other DNA
atggcgtcaccaggacactccgatctcggtgaagtagcacctgaaattaaagcctccgagaggcgcaccgcagttgccatcgctgatctggagtggagagagatggaaggcgatgattgcgagtttaggtacggggatggcacgaacgaagcccaggacaacgatttcccgacagtcgagcgttcccgtcttcaggaaatgctgtccctgctcggactggagacctaccaagtgcagaaactctccctccaggacagtctccagatctcctttgattctatgaagaactgggccccacaggtgcccaaagacctgccttggaactttctgcggaagctgcaggccctgaatgccgacgcccgaaacactacaatggttctggacgtccttcctgatgccaggcctgtggaaaaggagtcccaaatggaagaggagatcatttattgggatcccgcagacgatctggcagctgacatctactctttctccgagcttcccacccccgatacccctgtgaaccccctagacctcctctgcgcactcctcctgtcctcagacagcttcctccagcaggaaatagcccttaaaatggcactttgtcagttcgccttgccactcgtgcttccagattccgagaatcactatcacacatttctgttatgggccatgcgcggtatagtaagaacttggtggagtcagccaccacggggtatgggaagcttccgtgaagattctgtggtgctcagcagagcaccagcattcgcgttcgtccgcatggatgtcagctccaattccaaaagtcagctcttaaatgctgttctaagtcccggacacaggcaatgggattgtttctggcatcgagacttaaatctggggaccaacgcccgtgaaatcagtgacggcctggttgagatttcgtggtttttcccatcgggcagagaagatcttgacattttccccgaacccgtagccttccttaatctgcgaggggacatcggttctcattggctccagtttaagctgctcaccgaaatctcctccgccgtttttatactgacagacaatatcagtaagaaggaatataagcttttatacagtatgaaggaaagtacgaccaagtattatttcatcttgagtccgtaccgcggaaaaagaaatactaacttgaggtttctgaataagcttattcccgtgctaaagattgatcactcccacgtccttgtgaaggtgtcctctaccgactccgatagctttgtgaagcgcatccgtgccattgtggggaacgtgctgcgcgctccatgccgtagggtctcagttgaagacatggctcatgccgctcgaaagttaggacttaaggtggacgaggactgtgaagagtgtcagaaggccaaagacaggatggaacgcattacccgaaaaattaaggatagcgacgcctatcggagggatgagttacgcctgcagggggacccgtggaggaaggccgcacaagtggagaaagagttctgtcagctccagtgggccgtcgatccccctgaaaagcatcgcgctgaattgaggcgacgacttctggagctcaggatgcagcagaacggccatgatccctcaagtggtgtacaggagttcattagcggtatcagctctccctccctttcggagaagcagtactttctgaggtggatggagtggggcctggctagggtggctcaacctagactgcggcagcctcccgagaccctcctgactctcaggcctaagcacggtggcacaacggatgtcggagaaccgctctggccggagcccctaggagtggaacactttctacgcgaaatggggcagttttacgaagcggagtcctgcctagttgaggccggacgactcccagccggacaaagacggttcgctcactttccaggtctggcttctgagctgctgctgaccggcctgcccctcgagttaatcgatgggagcactcttagtatgccagttcggtgggtcacggggctcttaaaggaactccacgtacgactggagagaagatcacgtctcgtggtgcttagtaccgtgggggtgccaggtacggggaagtctaccctgctgaacacgatgtttggattaaggttcgccactggtaagtcttgcggtcctcggggtgcctttatgcagctgattaccgtcgctgaagggttttcacaagacctagggtgtgaccacatccttgtcatcgattcaggtggactgatcggcggtgcattgaccagcgccggtgaccgttttgagctggaggccagtcttgcaacccttctgatgggcctttccaacgtgaccgtcattagtctggctgagacaaaagatatccccgctgcgatcttgcacgctttccttcggctcgagaaaacaggacatatgccgaattaccagtttgtttaccagaatcttcacgacgtgtccgttccaggtcccagaccaagagataagcggcagttgctcgacccaccaggcgacctgtcacgggcagctgcacagatggaaaagcaaggtgatgggtttcgagcactggccggtcttgcgttctgcgatcctgagaagcagcacatttggcacattccgggactgtggcatggtgcaccaccaatggccgcagtgtcactggcatactctgaggctatttttgaactcaagcgttgtttacttgagaacatccgaaacggcctgtcgaaccagaacaagaatatccagcagcttatcgaactcgtgaggagactgtag

SEQ ID NO: 246316 - DNA, 492 bp, synthetic construct
  misc_feature 1..492: note = Description of Artificial Sequence: Synthetic coding sequence
  source 1..492: mol_type = other DNA
atggagggggacgattgtgagttcaggtatggagacgggactaatgaggcccaggacaacgatttccctacggtcgagcgtagcaggctgcaggagatgcttagtctgttgggattagagacctaccaggttcagaagctgagtctccaggacagtttgcagatctcttttgactccatgaagaattgggctccccaggttcctaaagatttgccctggaacttcttgcgtaagttgcaggccctgaatgcggacgcccgaaacacaactatggtgctggacgtcctcccggatgcccgacccgtggagaaagaaagtcaaatggaggaggaaatcatttattgggatcccgctgacgacctggccgcagacatttactcatttagcgaacttcccacccccgatactcccgttaacccattggacctgctatgtgcattgctcctctcctctgattctttccttcagcaggagattgctctgaagatgtag

SEQ ID NO: 246317 - DNA, 2667 bp, synthetic construct
  misc_feature 1..2667: note = Description of Artificial Sequence: Synthetic coding sequence
  source 1..2667: mol_type = other DNA
atggagggcgatgattgcgaattccgctatggcgacggaaccaatgaagctcaagacaacgattttccaaccgtggaaagaagccgcctccaggaaatgctctccctactaggcctggagacataccaggtacagaagttgagcttacaggattccttacaaatttctttcgacagtatgaaaaactgggctccacaggtgcctaaagacctgccctggaactttttgcgcaagctgcaggccctgaacgccgacgctagaaacacaaccatggtcttggacgtgctgcctgacgccagacctgtcgaaaaagagagtcagatggaagaggagatcatctactgggaccctgctgacgacctggctgctgacatttattcttttagcgaattgcctacccctgacacccccgttaatcccctggatctcctgtgtgcactcttgctgtcgtctgattcattcctccagcaggagatcgccctaaagatggccctgtgccagttcgcactgccacttgtattgcctgattccgagaaccactaccatacttttctgctgtgggctatgaggggcatcgtgcggacgtggtggtcccagccccctagaggcatggggtccttccgagaggattctgtcgtcctgtccagagcccctgcgttcgcctttgtgcgtatggacgtctccagcaactcaaaatctcagcttctgaatgccgttctgtctccagggcaccgccagtgggattgtttctggcaccgcgatctcaatctgggtactaacgctagagagatcagcgatggactggtcgagatctcctggttttttccaagtggcagggaggatctggatatctttccagaaccggtggcctttcttaatctaagaggggatattggaagccactggttacagttcaagctactcactgagatatcttctgccgtcttcatccttacagataacatctcaaaaaaagaatacaagctcttgtacagcatgaaagagagcactaccaaatactattttatcctctccccataccgtgggaaacgaaacacaaatcttagattccttaataagctaattccagttctgaagatcgaccatagccatgtactcgtgaaagtgagctctacggacagcgattcatttgtgaaacggatcagggcaatagtcggaaatgttttgcgggctccatgccggcgagtaagtgtagaagatatggcccacgccgctcgcaagctgggcctaaaagtggacgaagattgtgaggaatgtcagaaggctaaagaccggatggagcggattaccaggaagatcaaggacagtgatgcttacaggagagatgaacttcggctgcagggtgacccttggcgcaaagcagcccaggtcgagaaggagttttgccaactccaatgggccgtggaccccccagaaaagcacagggcagagctgagaaggcgactcctggagttgcgcatgcagcagaatggacatgatcctagctccggcgtgcaggaatttattagcgggatctctagtccttctttgtctgaaaagcaatattttctccgctggatggaatggggtctggccagggttgcacagccacgcctgagacagcctccagaaacactgttaacgctccgacctaaacacggcggaacaaccgatgttggtgaaccgctttggcccgagccattgggcgtcgagcatttcctacgagagatgggccaattctacgaggccgagtcttgcctggtggaggcaggcagattgcccgcagggcagcgcaggttcgctcacttcccaggactggccagtgagctgttactgacggggctgcccctggagctgatagacgggtccacattaagcatgccagtgaggtgggtgaccggactcctcaaagagttgcacgtgaggctggagaggcggtcacgcctggtggtcctctccactgtgggagtgccaggaactggtaaatccacactgctgaacacaatgttcgggttacgctttgcaaccggaaaatcctgtggtcctcgcggagcctttatgcagctgatcacagtggctgagggcttcagccaggacctgggctgtgatcatattttagtcattgactctggcggacttattggcggagccctgacttccgctggagatcgtttcgagctggaggcatctctggctaccctgctgatgggactttccaacgttactgtgattagccttgcagaaacaaaggacattcccgctgctatactgcatgctttcctccggctggagaaaaccggtcacatgcccaattatcagttcgtgtaccaaaacctccatgacgtctctgtgccagggcctaggccgagagacaagcgccagttactggatcctccaggtgacctgagccgagccgcagcccaaatggagaagcagggcgacggcttcagagccctggccggactggctttctgcgatccagagaaacagcacatatggcacattccagggctgtggcatggagctccgccaatggccgctgtttccctcgcttactccgaggctattttcgagctcaaaaggtgtctcctggagaacatcaggaatgggctgagtaaccaaaataagaacatccagcagttgatcgaactggtgaggcgcctctag

SEQ ID NO: 246318 - DNA, 2667 bp, synthetic construct
  misc_feature 1..2667: note = Description of Artificial Sequence: Synthetic coding sequence
  source 1..2667: mol_type = other DNA
atggaaggcgatgactgcgagtttcgatatggcgatggtacgaatgaggcacaggataacgactttcccactgttgaacgaagcaggctacaggagatgcttagccttcttgggctggagacttaccaggtgcagaagctgagtttgcaggattctcttcagatctccttcgacagtatgaaaaattgggcaccacaggtacccaaggatctgccctggaattttcttcgcaagctgcaggcactgaatgcagacgctcggaacaccacaatggtgctcgatgtactgcctgacgccagaccagtcgaaaaagaatcacagatggaggaggaaatcatttactgggatcccgcagatgatctggctgctgatatctatagtttcagcgaactgcctactccagatacgcctgtgaacccacttgacctcctgtgcgccctgctcctgagctctgatagctttcttcagcaggagattgcgttgaaaatggccttgtgccaatttgcgctcccactcgttttgcctgattccgagaaccactatcacacctttctcctatgggcgatgcgagggattgtcaggacctggtggtctcaacctccaagggggatgggatctttccgcgaggatagtgtggtactctctcgggctcccgcatttgcctttgtgcgaatggacgtaagttcaaacagcaaaagccagctactcaatgcggtcctgtccccaggtcatcggcagtgggattgcttctggcatcgcgacttgaacctggggaccaacgcgcgagagattagtgatgggctagtcgaaatttcctggttctttccatccgggagggaagacctggacatcttccccgagccagtggcctttctaaatctcagaggcgatattggatcccattggctgcagtttaaactgctaactgaaatttcctcagccgtctttatcctcaccgacaatatctctaagaaggaatacaagctgttatactcaatgaaggaaagtaccaccaagtactactttattctcagcccttaccgcggtaaaaggaacaccaacttgagatttcttaataagcttatccccgtactgaagatcgatcattcccacgtcctcgtcaaggtctcatccaccgattcagattcattcgttaaacgcatcagagccattgttgggaatgtgctgagggccccttgcagacgggtttccgtggaggacatggcccatgctgctcggaagctgggtctgaaggttgatgaggattgtgaggaatgccagaaggctaaggatagaatggagcgtatcactaggaagattaaggactctgatgcataccgaagggacgagttgcgcctccagggcgatccatggcggaaagctgcccaagtggagaaggaattttgccaactgcagtgggctgttgacccgcctgaaaaacacagagctgaattgcgtcggcgtctcctggaactcaggatgcagcagaacggacatgacccttcatctggcgtgcaagagttcatatccggaatcagctccccttctctgtcagagaaacagtatttcctccggtggatggaatggggcttagccagagtcgctcaacctaggttacgtcagcccccagagacattactgactttgcgcccaaagcatggaggtaccaccgatgtcggcgaacctttatggcctgaaccattgggcgttgaacactttctgcgggaaatgggccagttctacgaggcggagtcctgcctggtagaagccggacgtttacctgcgggtcagaggagattcgcacactttccagggctggcctccgaattgctcctcacgggtctccccctggaactgatagacggctcaacgttaagcatgccggttagatgggtgacaggcttactcaaggagctgcatgtacgtctcgagagacgcagcaggctggtggttctgtcaaccgtgggcgtccccggtactgggaaaagtactttgctcaacaccatgttcggactgcgattcgccacaggcaaatcttgcggcccacgaggtgccttcatgcagctgattaccgtcgcagagggcttctctcaagacctgggatgcgaccatattttggtcattgattccggtggtctgattgggggagcactgacctcagctggcgatcgatttgagttggaggcttctcttgctaccctactgatgggcttatccaacgttaccgtcatctctttggctgagactaaggacattccggcagccatcctccatgccttcctgcggctcgaaaaaaccggtcatatgcctaactatcagtttgtgtaccagaatcttcacgatgtgtccgtgcccggtcccagaccaagagacaaacggcagctcctggaccctccaggggatctcagccgggctgccgcacagatggagaaacagggcgatggctttcgcgctctcgctgggctggccttttgtgaccccgagaagcagcacatttggcatatacccggactgtggcacggggctcctcccatggctgccgtgtctctcgcttactctgaagcaatcttcgaactgaagcggtgcttgctagagaatataaggaacggtctctctaaccaaaataaaaacatacaacagctcatagaactcgtcagaaggctttag

SEQ ID NO: 246319 - DNA, 2796 bp, synthetic construct
  misc_feature 1..2796: note = Description of Artificial Sequence: Synthetic coding sequence
  source 1..2796: mol_type = other DNA
atggcgagccccggaattgaggtggaacttttggggaagggacactccgacctgggggaggttgccccagagatcaaggctagcgaaagaagaaccgccgttgcaatcgcagatctggaatggcgagagatggagggagatgattgcgagttcagatacggcgacggaacaaatgaagctcaggacaacgacttcccaactgtggaacggtcccgcctgcaggaaatgctgtcgttgctgggcctggagacatatcaggtgcagaagctcagtctgcaggactcactccaaatatctttcgacagcatgaaaaattgggcccctcaagtccctaaggatctgccttggaatttcctccggaagctccaggccctgaacgccgatgccaggaacacaactatggttctggacgttctccctgatgctaggccagttgagaaggaaagccaaatggaggaggaaattatctactgggatcccgcagatgatttagcagctgatatatattccttttcagagctgcctacccccgacacccctgtgaaccccctagatctcttatgcgccttgttgctgagttccgattcttttttgcagcaggagattgcactcaaaatggcactttgtcagttcgcgctgcctttggtcttgccagacagtgagaaccattaccacacgttcctcctctgggcgatgcgaggcatagtcaggacctggtggtctcagccccctagggggatgggcagttttcgggaggatagtgtcgtccttagcagggcccctgccttcgcctttgtccggatggacgtatcaagcaattccaagtctcagctgctgaatgctgtcctgagcccgggtcatcgccagtgggattgtttctggcatcgcgatttgaacctcggcaccaatgcccgagagattagcgatggattagtcgagataagttggtttttccctagtgggcgagaggatctggatatttttccagaaccagtggcctttctcaatctacgcggtgatatcggttcgcactggttacaattcaaacttctcaccgaaattagcagtgccgtgtttatcttaacagataacataagcaaaaaagagtacaagctgctctactccatgaaagagtctactactaaatactatttcattctttccccatatcggggtaagcggaacaccaaccttaggtttctgaataagctcatccctgtactgaagatagaccacagtcacgtactggtgaaagtttcctcaacggatagcgactctttcgttaaaaggattagggcaattgtggggaacgtacttcgtgcaccctgcagacgggttagcgtcgaggatatggctcacgccgcacgaaagttgggactcaaggtcgacgaggattgtgaggaatgccagaaggccaaggaccgcatggagcgcattacgcgaaagattaaagattctgatgcatatagacgggatgaactgcgcctacaaggagacccctggcgaaaggctgcccaggtggaaaaagaattctgccagcttcagtgggcggtggaccccccagagaagcacagagcagagcttcgccgacggttactggaactgcggatgcagcagaatggtcatgatccgtcctctggagtgcaggagttcatttctggcatctctagtcctagcctgagcgaaaagcagtactttttaaggtggatggagtggggtctagcacgcgtcgcccagcccagactgaggcagccacctgagaccttgttaaccctgcggccaaaacacggcggtacaactgacgtgggggagccactctggccagagccactgggtgtggagcactttctaagggagatgggccagttttacgaagctgagagttgcttagttgaggccggaagactacccgctgggcagcgccgttttgcccactttcctggcctcgccagcgagctgcttctgacgggattaccccttgagttaatcgacgggtcaacgttgtccatgccagtcaggtgggtcaccggcctgctgaaagaactgcatgttcggcttgagcggcgaagtcgcttagtcgtgctgagtacagtgggcgtgcccggaacagggaaaagtaccctgctgaacacaatgtttggcctgcgattcgccaccgggaaatcctgtgggccaaggggtgcgttcatgcagctgattactgtcgccgagggtttttctcaagatctcggctgcgatcacatactggtgattgattctggaggactgatcggcggagccctgactagcgctggtgaccggtttgagctggaggcctccctggcaactctgctgatgggcctttccaatgtcacagtgatttcacttgccgaaaccaaagacattcccgcagccatcctgcacgcctttttgcgacttgaaaagactggccacatgcccaactaccagtttgtatatcagaacctgcatgatgtgagcgtccccggtcctcgccctcgcgataagcggcagcttctggatcctcccggagatctaagccgcgcagctgcacaaatggaaaagcagggagacggattcagggcattggcaggactcgcattctgcgaccctgagaaacagcacatctggcacattcccggactctggcatggcgcacccccaatggcagccgtgtcactcgcttatagtgaggctatctttgagctgaaacggtgtctcttagaaaacattagaaatggcctcagcaaccaaaataagaacatccagcagctgattgagctggttaggaggctgtag

SEQ ID NO: 246320 - DNA, 369 bp, synthetic construct
  misc_feature 1..369: note = Description of Artificial Sequence: Synthetic coding sequence
  source 1..369: mol_type = other DNA
atggaaggcgatgattgcgagttccgttatggtgacggaaccaacgaggcccaggataatgacttcccaactgtcgaacggtcacggctgcaggaaatgctcagcctgttgggcctggagacctatcaggtccaaaagctcagcctgcaggatagtctccagatctccttcgattccatgaagaactgggcaccccaggtgcctaaggacctcccatggaattttcttcgtaaactccaggcccttaacgcagatgctcgaaatactacaatggtgctggacgtcctgccagacgcaagaccagtggagaaggagagccaaatggaagaagagatcatttactgggatccagctgatgacctcgcttag

SEQ ID NO: 246321 - DNA, 1623 bp, synthetic construct
  misc_feature 1..1623: note = Description of Artificial Sequence: Synthetic coding sequence
  source 1..1623: mol_type = other DNA
atggcgtgggtgctgaagatggatgaagttatcgaaagcggacttgtccacgacttcgatgcctctttgagcggaattggtcaagaactcggcgcaggggcttactcaatgtctgatgtgctggccctgcctatctttaagcaagaggattcctctctgccactggacggagaaacagagcacccaccatttcagtatgttatgtgtgccgctacctcccctgcagtgaaactccatgatgagactctgacatatctgaaccagggccagagttatgaaattaggatgctcgacaatcggaaaatgggggatatgcctgaaattaacggtaaacttgtcaagtctatcatccgcgtggtgtttcacgatcggagactccagtacaccgagcatcagcagctcgaaggctggaagtggaaccgtcccggtgatagactgctggacctggatatacctatgtctgtgggtatcatcgacacgcggacaaacccatctcaactcaatgcggtcgagtttctttgggaccctgctaagagaacctccgcattcatacaagtgcactgcatctcaacagagttcactcccagaaaacatggaggtgagaagggcgtcccattcagaattcaagtggatacctttaagcagaatgagaacggtgaatacacagaccatttacactctgcgagctgccaaattaaagtgttcaagcccaaaggtgcagatcgcaagcagaagacagaccgtgagaagatggaaaaacggacagcccatgagaaagagaaataccaaccaagctacgacaccactatcttgacagagatgagactggagccaatcattgaagatgccgttgaacacgaacagaagaaaagttcaaagcggaccctgcctgctgactacggggacagcctggcgaaaaggggctcttgctccccgtggcctgacgctccaaccgcctatgtaaacaactcaccaagccccgctcccacatttacaagccctcagcagtccacttgttcggtgccagatagcaatagctcaagtcctaaccaccagggggatggtgcatctcagaccagtggcgagcagattcagccatctgcaactatccaagagacacagcagtggctgttgaaaaacagattctctagttacacacggttattttctaacttctctggcgctgatctgctgaagctaactaaggaggacctggtccagatctgtggcgcagccgatggcattcgtttgtataactctctcaaaagcaggtccgtgcgcccaaggcttacaatttacgtttgcagggaacagcccagttcaaccgtgctccagggccagcagcaggccgcaagcagtgcttcagagaacggcagcggagcaccttacgtgtaccacgctatttaccttgaagagatgattgccagtgaggtagctcggaagcttgccctcgtcttcaacataccactgcatcaaatcaatcaggtctatagacagggcccaacagggatccacatccttgtttcggaccagatggttcaaaattttcaagacgagagttgcttcctgttttcgaccgtgaaagctgagtcctccgatggtatccacattatcttgaaatag

SEQ ID NO: 246322 - DNA, 1623 bp, synthetic construct
  misc_feature 1..1623: note = Description of Artificial Sequence: Synthetic coding sequence
  source 1..1623: mol_type = other DNA
atggcatgggtgctcaagatggatgaggttatcgaatctggtctcgtgcatgatttcgacgcaagcctgtccgggataggtcaggagttgggagccggtgcctatagtatgagtgatgtgcttgcactccccatattcaagcaggaggatagttctctaccattggacggagagacagaacaccctccattccagtatgtgatgtgcgcagccaccagtccagcagtgaagttgcacgatgagaccctcacttatttaaatcagggccaatcctatgaaattcggatgctcgacaaccgtaagatgggcgatatgcccgaaatcaatggtaagctggtgaagagcattatacgggttgtcttccatgaccgccgattacaatataccgagcaccagcagctggaaggatggaagtggaacaggcccggtgaccgcttgctcgatctggatattcctatgtcagtggggatcatagacactaggacaaatcctagccagcttaacgctgttgaatttctgtgggaccccgctaaaagaacatccgctttcatacaggtccattgtattagcactgaatttacaccgagaaaacacggcggagaaaaaggagtcccgttcaggatacaggtcgacactttcaaacagaatgagaatggcgagtatacggatcacttgcatagtgcttcctgtcagatcaaggtgtttaagccgaagggagccgatcgcaagcaaaaaacggacagggaaaagatggagaaacgaaccgcccacgaaaaagagaaataccagcctagctacgacacgacaattcttaccgagatgagactcgaacctatcatcgaagatgcagtagagcacgagcagaaaaaaagtagcaagcgaaccctacccgctgactatggggacagccttgcaaaacgagggagttgcagcccatggcctgatgcccctaccgcatacgtgaataatagtccttcacccgctcccacctttaccagcccccagcaatctacttgcagtgtccctgacagtaatagtagctcgcctaaccaccagggggacggtgcctcccagacgtctggggagcaaattcagccatcagctacgatccaagagacacagcagtggctgctcaagaaccggttttccagctacaccagactcttctccaactttagcggagccgacctcctaaaactgacgaaagaggacctagtccagatttgcggagcggcagacggtattcgactgtacaactcccttaagtctcggagtgttcgaccgaggcttaccatatacgtgtgccgggaacagcccagcagcactgtgctccaggggcagcagcaggcagccagtagtgcaagcgagaatgggagcggcgctccctacgtctaccacgcaatatacctcgaggagatgatcgcttctgaggtcgccagaaaactcgctctagtatttaatattcccctccatcaaattaatcaggtgtaccggcagggacccaccggaatccacatcctagtctccgatcagatggtccagaatttccaggacgaatcatgctttttgttcagtaccgtgaaggctgaatctagcgatggcatccatatcattctgaaatag

SEQ ID NO: 246323 - DNA, 1515 bp, synthetic construct
  misc_feature 1..1515: note = Description of Artificial Sequence: Synthetic coding sequence
  source 1..1515: mol_type = other DNA
atggcatgggtgctgaagatggatgaggtgattgagtctggtcttgtgcatgattttgacgctagtctcagcggaattggccaggagctcggggcaggtgcatattctatgtctgacgtcttagcactgcccattttcaaacaggaagattccagtctgcctctggacggggagaccgaacacccaccttttcagtatgtaatgtgtgcagccactagtcctgcggtaaagttacatgacgagaccttgacctacctcaaccagggccagagttacgagattagaatgctcgataaccggaaaatgggcgacatgcccgagatcaatgggaagctcgtcaagtcaatcatccgtgtggtcttccacgatcgcagactgcagtacacggaacaccagcagctggaaggctggaaatggaacagaccaggagataggctcttggatctggacataccaatgtccgtgggaatcatcgatactagaactaacccatctcagcttaacgccgtcgaatttctctgggatcctgcgaaacggacttccgccttcatccaggtgcattgcatatccactgagttcactccgagaaaacacggcggagagaagggggtgccctttcggatccaagtcgatacattcaagcagaatgagaacggcgagtataccgatcacctccatagcgccagctgtcaaataaaggtcttcaagcctaagggagcagatcgaaagcagaaaaccgatcgtgaaaagatggaaaagaggactgcacatgaaaaggagaagtaccaaccctcctatgatactaccattttgaccgaatgttctccatggccggatgctcccacagcgtacgtgaacaacagcccatctcccgctccaacctttacctcaccccaacagagcacatgcagtgttcctgattcaaattctagctctccaaaccaccagggagacggtgcaagccagacctccggggaacaaatccagccatcagcaactatacaagagacgcagcaatggctgctcaagaaccgtttcagttcgtatactagactgtttagcaacttttctggggctgacctgcttaagctcaccaaggaggatcttgtccagatatgcggtgctgccgatggcatacggctctacaatagtctgaagtctcggtctgtaagacctcgcctgactatatacgtatgcagagaacaaccaagcagcacagtgctgcagggccaacagcaagccgctagcagtgctagtgaaaatggctctggtgctccttacgtgtaccacgcaatctatctcgaggaaatgattgcaagcgaggtggcacggaagttagcgctggtgtttaatatccctttgcatcaaatcaatcaggtgtatcggcagggacccaccggtattcacattttggtgtccgatcagatggtccagaacttccaggacgagtcctgctttcttttcagcactgttaaggccgaatcatccgacggcattcatattatcctgaaatag

SEQ ID NO: 246324 - DNA, 447 bp, synthetic construct
  misc_feature 1..447: note = Description of Artificial Sequence: Synthetic coding sequence
  source 1..447: mol_type = other DNA
atggcctgggtactgaagatggacgaagtgatcgagagcggtctggtgcacgactttgatgctagcctgtccgggattgggcaggaactgggtgctggggcatattcaatgagcgatgttctagctctccctatattcaagcaagaagacagctctctacctcttgacggtgaaacggaacacccaccgtttcagtacgttatgtgtgcagccacctcccccgcagtcaaactgcacgacgaaacactgacctacctgaaccagggacagagctatgaaatccgtatgctggataaccgcaagatgggggacatgccagaaattaatggcaaactcgtgaaatctatcataagggtggtcttccacgaccggagacttcagtataccgagcaccagcagcttgagggttggaagtggaatcgccctggcgatcggctattggattag

SEQ ID NO: 246325 - DNA, 2295 bp, synthetic construct
  misc_feature 1..2295: note = Description of Artificial Sequence: Synthetic coding sequence
  source 1..2295: mol_type = other DNA
atgaatggggaggccgactgtcctacggacctcgaaatggcagctcccaaaggccaggacaggtggtctcaagaggacatgctgacccttctggaatgcatgaaaaacaatcttccaagcaatgacagctcaaagttcaagaccacagagtctcacatggattgggagaaggttgcgttcaaggacttcagtggggacatgtgtaaactgaaatgggtggagatcagcaacgaagtgagaaaattccggacattgacagagctaatcctagacgcacaggaacatgtgaagaacccttacaagggaaagaaactcaaaaagcacccggatttcccgaagaagccactgactccgtatttcaggttctttatggagaagagagctaagtacgcaaaactccacccggagatgtccaacctcgacctgaccaagatcttgtccaagaaatacaaagaactgccggaaaagaagaagatgaagtacatacaggattttcagagggagaagcaagagttcgaaagaaatctcgctcgctttcgggaggatcacccggacctgatccagaacgccaagaaatcagacatacccgagaagccaaagacgccccagcaactgtggtatactcatgaaaaaaaagtgtatctcaaggtgcgccctgatgccaccacaaaggaagtgaaagatagcttgggcaaacagtggagtcaacttagtgacaaaaagagacttaagtggattcacaaggcattggaacaaagaaaggaatatgaggagattatgcgggactacatccagaaacaccccgaactgaacatctctgaagagggtattacaaagtcaacgctgacaaaagcagagcggcagctgaaagacaagttcgacggtcgcccaaccaagcctcctcctaactcctacagcctgtactgtgctgaattgatggcaaatatgaaagatgttccatccactgagcgcatggttctgtgtagtcagcaatggaaattgctgtcacagaaagagaaggacgcgtatcataaaaaatgcgatcagaagaagaaagactacgaggtggagctcttaagatttctggagtcactccctgaggaggagcaacagcgtgtgctcggcgaagagaagatgttaaacattaacaaaaagcaggcgactagtccggcatcaaagaaacctgcccaggaagggggtaaagggggaagcgagaagccaaaaagaccagttagtgccatgtttatcttcagcgaagagaagcggagacagctccaggaggagcggccagaattgtctgagtcagaacttacccgcctcctcgcacgcatgtggaacgacctgtccgaaaaaaagaaggccaaatataaggccagggaggccgcactcaaagcccagtctgaacggaagcccggtggagaaagggaggagcggggtaaactgcctgagagtcccaagagagctgaggagatctggcagcaatcagtaataggagactacctggctcgcttcaagaatgacagagtcaaagccctgaaggccatggaaatgacctggaacaatatggaaaaaaaggagaaactaatgtggatcaaaaaagccgctgaagaccagaagaggtacgaaagagaactctcagagatgcgagcaccacctgcagccaccaactcaagcaagaagatgaaatttcagggcgaacctaagaaaccccctatgaacggttatcaaaagttctctcaggaactgctttcaaacggcgagctgaatcacctgcccctgaaggagcggatggtcgagattggttctcgatggcagagaatatctcaaagtcagaaggagcattataagaagctagctgaggagcagcagaagcagtacaaggtccacctggacctgtgggtcaagtccctgagtccccaggatcgcgcagcttacaaggaatatatctcaaacaagcgtaaatctatgaccaaactgcggggtcctaacccgaagtcgtcaaggaccactcttcagtccaaaagcgaatctgaggaagacgatgaagaagacgaagatgacgaagacgaagacgaagaagaagaggacgacgaaaacggagactcttctgaggacggcggagattcctcggaatcatcgagtgaagacgagtcggaggatggggatgagaatgaagaagatgatgaggacgaggatgacgacgaggatgatgacgaggacgaggataacgagtctgaggggagctctagttcgtcctccagcagcggggattcctccgactcagacagcaattag

SEQ ID NO: 246326 - DNA, 2184 bp, synthetic construct
  misc_feature 1..2184: note = Description of Artificial Sequence: Synthetic coding sequence
  source 1..2184: mol_type = other DNA
atgaatggcgaagccgattgcccaaccgatctcgaaatggccgctcctaagggtcaggatcgatggtcacaggaggacatgctgaccctactagagtgcatgaaaaataatctaccgtctaatgatagcagcaagtttaaaaccaccgagtcacatatggactgggaaaaagtagcctttaaggatttttcgggcgatatgtgtaaactcaaatgggtggagatttctaacgaggtgcgcaaattccgaacactgactgaactcatactcgacgcacaagagcatgtcaagaacccgtacaaaggtaaaaagctgaagaagcaccctgacttccccaagaaaccgctcacaccgtattttcgattctttatggagaaaagggcaaaatatgcaaaactgcaccccgaaatgtctaacctggacctgaccaaaatattatctaagaagtataaagaactgcctgagaagaagaagatgaaatatatccaggattttcagagagagaagcaagaatttgaacgaaatctggcaaggtttcgcgaggaccatccagacctcatacagaatgccaagaaatccgacattcctgagaagccaaagacaccccagcaactgtggtacacacacgagaagaaagtgtatctgaaagtgcggccagatgaaataatgcgagactacattcagaaacatcctgaactgaatatctccgaagaggggatcacaaaatcaaccctgacaaaggcagagagacaactgaaagacaaattcgacggcagaccaaccaaacccccacccaactcttactcactctactgcgcagaacttatggctaacatgaaagacgttccctccaccgagcgaatggttctatgcagccagcagtggaagcttctaagtcaaaaagagaaggacgcgtaccataaaaaatgcgaccagaagaaaaaagattatgaggtggagttgcttcgctttctggagagcctccctgaggaggagcaacagcgggtcctgggagaggagaagatgcttaacatcaataagaagcaggcaacatcgcccgcatctaaaaaaccggctcaggaaggcggaaagggcggtagtgagaagcccaagaggcccgtgagcgctatgtttatattctctgaagagaagcgtagacaactccaggaggaacgtccagagctgtctgagtcggagctgaccagactactggcacgcatgtggaacgacttgagcgaaaaaaaaaaggcgaaatataaagcgagggaggcagccctgaaagcacagtcagaaaggaaacctggcggagaacgtgaagaaagaggcaagctgccagagagtcccaagcgcgctgaggaaatctggcagcagagcgttatcggagactaccttgcacggttcaagaacgatagagtgaaggcgctcaaggcaatggaaatgacctggaacaatatggaaaagaaagaaaagttgatgtggatcaaaaaggccgcagaagaccaaaagcgctatgaacgggaactcagcgagatgagagcccctcctgctgccactaattcttccaagaaaatgaagttccagggcgagcctaaaaagccacctatgaacggttaccagaagtttagtcaggaactgctgtccaatggcgagctgaatcacctgcccctgaaggagagaatggtggaaattgggtctcgctggcagagaatatctcaaagccagaaagagcattacaagaaactggctgaggaacagcagaagcagtataaggtgcacctggacctgtgggtgaaaagcttaagcccccaggaccgagctgcttacaaagagtatatctcgaataaacggaagtcaatgaccaaattgcggggacccaacccaaagtcctccagaaccactctccagtctaagagcgagtccgaggaagatgacgaggaagatgaggacgacgaagatgaggacgaggaggaagaagacgatgagaatggtgatagtagcgaagatggcggagactcgtccgagtcaagctccgaagatgagagtgaggacggtgacgaaaacgaagaagacgacgaagatgaggacgatgatgaggacgacgacgaggatgaagacaacgaatctgagggttcttccagttcatccagcagtagcggagattcttcggattctgacagcaactag

SEQ ID NO: 246327 - DNA, 2184 bp, synthetic construct
  misc_feature 1..2184: note = Description of Artificial Sequence: Synthetic coding sequence
  source 1..2184: mol_type = other DNA
atgaacggcgaggctgactgtccaacagatctcgaaatggcagcgcctaaaggccaagatcgctggagccaggaggacatgctgaccctgctcgagtgcatgaaaaacaatcttccctccaacgattcaagtaaattcaagacgacagaatctcacatggactgggaaaaggtggcctttaaagatttttcgggggacatgtgcaagctcaagtgggtggagatcagcaatgaggtccgaaagtttcggactttaacagagttgatcctagatgctcaagaacacgtgaaaaacccctataaaggcaagaagctcaagaaacacccggactttcccaagaagccactgaccccttattttcgattcttcatggagaaaagagctaagtacgctaaacttcatcccgaaatgtccaacctagatcttactaaaattttgtcaaagaagtacaaagaactgcctgaaaagaaaaaaatgaaatacattcaggacttccagagagagaaacaggaattcgagaggaatctggctagattcagggaggatcatcccgatctgatacagaatgccaaaaagtctgatattccagaaaagcccaagacccctcagcaactgtggtacacacacgagaaaaaggtgtatctcaaagtcaggcctgacgagataatgagggactacatccagaagcatcctgaactgaacatttctgaagaagggattactaaatctactctgaccaaggccgagcgccaattaaaagacaagttcgatgggaggcctacaaaaccgcctcctaactcttacagcctgtattgtgcggaactcatggccaatatgaaagacgttcctagcacagagagaatggtgttatgttcccagcaatggaagctgctgtcgcagaaagaaaaagatgcttatcacaaaaagtgtgatcaaaagaaaaaggactatgaggtggaactgctgcggtttctagagagcctaccggaggaggaacagcaaagagtactcggggaagagaagatgctgaatattaacaaaaaacaggccacatctccagcctccaaaaagcccgctcaggagggtggtaagggaggttctgaaaagcccaagcgccctgtttccgccatgtttattttctctgaggagaagcggaggcagctgcaggaagagcggcctgagcttagcgagtctgagctaacaaggttacttgcacggatgtggaacgacttaagtgagaagaagaaggctaaatacaaggccagggaggcagcacttaaggcccagtcggagagaaaaccaggtggtgagcgcgaagagagggggaagctccctgagagtcccaagcgggctgaggagatttggcagcaatctgtgatcggagactatctcgcacggtttaaaaatgatagggtcaaggccctgaaggcaatggaaatgacctggaataacatggaaaagaaggagaagctgatgtggattaaaaaggccgcagaggatcagaaaaggtacgaaagggaactctctgagatgcgagccccaccggcagcaacaaattcttctaagaagatgaagttccagggcgagcccaaaaagcccccaatgaatggctaccagaaattctcacaagagctcttgagtaacggagagttgaatcatctgcctcttaaagagcggatggttgagatcgggagcagatggcagcgcatttcacagtcacagaaagagcattacaagaagttagcggaagagcaacagaagcagtacaaagtccacttggacctgtgggtcaaatcactgtccccacaggaccgtgctgcttataaagagtacatctccaataaacggaaaagcatgacgaaattgcgcggacccaaccccaaatcgagtcggacaacactgcaaagcaagtctgaaagcgaggaagatgacgaagaggacgaggatgatgaggatgaggatgaagaggaagaagatgacgaaaatggcgactctagcgaggatggtggtgacagcagcgagagctcaagtgaagacgagtctgaagatggcgatgagaacgaggaagacgacgaagacgaagacgatgacgaggatgatgatgaggacgaggataatgagtcagaaggcagtagcagctcatcaagtagtagtggggattcttccgactctgatagcaactag

SEQ ID NO: 246328 - DNA, 2295 bp, synthetic construct
  misc_feature 1..2295: note = Description of Artificial Sequence: Synthetic coding sequence
  source 1..2295: mol_type = other DNA
atgaatggggaggccgattgcccgacagacctggagatggccgcaccaaaagggcaagaccgctggagccaggaggacatgctgacactgctggagtgtatgaaaaacaacctgccatctaacgattcaagcaagttcaaaacgaccgagtctcacatggattgggagaaggtggcttttaaagactttagtggcgacatgtgcaagctgaagtgggtggagattagcaacgaggttcggaaattccggacgctgactgagctgatactagacgcgcaggagcatgtgaagaatccctataaggggaagaaactcaagaagcatcccgacttcccgaagaaaccacttactccgtattttcgctttttcatggagaagcgggctaaatatgccaaactacatcctgaaatgagcaacctagatttgacaaagattctttccaagaagtacaaggagttgccggagaaaaaaaagatgaaatacatacaggatttccagcgggagaaacaggaatttgagcggaacctcgccagattcagggaggaccatcccgatctgatccaaaacgcgaagaagagtgatatacccgaaaagcccaaaaccccccagcagctctggtacacacatgaaaaaaaagtttatctaaaggtgagacccgacgccactaccaaagaggtgaaagattcactgggaaaacagtggagccagctctctgacaaaaagcggctcaagtggatccacaaagctttggagcagagaaaggaatatgaggagattatgcgcgactatatccaaaaacatccagaactcaatatatccgaggaggggattaccaagtcaaccctgactaaagcagagagacaactaaaggacaagtttgacggtagacctacaaaacccccaccaaatagttatagtctgtattgcgctgaactcatggcaaatatgaaggatgttcctagcaccgaacgcatggtgctgtgctcacaacaatggaagctcctgtcgcaaaaggaaaaggacgcctaccataaaaagtgcgatcagaaaaagaaggattacgaagtcgagttgcttcgtttccttgagtctctgccagaggaagagcaacagcgggtgctcggtgaggaaaagatgttaaacatcaataaaaagcaggctaccagtcccgcatccaaaaaaccagcacaagaaggtggcaaggggggttctgagaagcccaaacggccagtgtccgccatgttcatctttagcgaagaaaagcgaaggcagctgcaggaagagcgtcctgagctgagcgagagtgagcttacaagactcctggctagaatgtggaacgacctctcagaaaagaaaaaggcaaaatacaaggcgagagaagccgcactcaaagcccagtctgagcgcaaacctggtggggagcgcgaggaacgaggcaagctgcccgagtcaccaaaacgggctgaggaaatctggcaacaaagcgtgatcggggattatctcgcgagatttaagaatgatcgggtcaaagctctgaaagctatggagatgacctggaataatatggagaaaaaagagaagcttatgtggatcaaaaaagctgctgaggaccagaaaaggtacgaacgtgagctttctgaaatgcgcgcacctcccgctgccaccaacagttccaaaaagatgaaatttcagggcgaacctaagaagccccctatgaatggctatcagaagttttcccaggaacttctgagtaacggcgagctgaatcatctgccccttaaagagcggatggttgagatcggatctcgctggcagcgcatttcccagagccagaaggagcattataagaagttagctgaggagcagcagaagcagtacaaagtgcatctggatctctgggtgaaaagtctttcgcctcaggacagagctgcttacaaggagtacatttcaaacaaaaggaaaagcatgactaaacttagggggcctaaccctaagagcagtcggacaacactccaatcaaagtccgagagcgaggaggatgacgaggaagacgaggatgacgaggacgaagatgaagaagaagaggatgacgaaaacggcgactctagtgaggatggtggtgattccagcgagtcgtccagtgaggatgaatcggaggacggtgacgagaacgaggaggacgacgaggacgaggacgacgacgaagacgatgatgaagacgaagataacgagtctgagggttcttcctcctcaagctctagtagcggtgactcgtctgacagtgacagcaactag

SEQ ID NO: 246329 - DNA, 2184 bp, synthetic construct
  misc_feature 1..2184: note = Description of Artificial Sequence: Synthetic coding sequence
  source 1..2184: mol_type = other DNA
atgaatggcgaagccgattgcccgacagatttggagatggctgcacccaaaggacaggatcgatggtcccaagaagatatgctcactttactggaatgtatgaaaaacaatttaccttcgaatgattcctcaaaatttaaaaccacggagtctcacatggattgggagaaggtagcattcaaggatttttcaggggatatgtgtaagctgaaatgggtggaaattagtaatgaagtgaggaagttccgaacgctgactgagttaatactggatgcccaggagcacgtcaagaacccttataaaggcaagaaactgaaaaagcacccggacttccccaaaaaacccctgactccctatttccgattctttatggagaagagggcgaagtatgccaagctacatcccgagatgtccaatctcgacttgaccaagatcctgagcaagaaatataaggaacttccagaaaagaagaagatgaaatacatccaggattttcaacgcgagaaacaggaatttgaaagaaacctggctcgttttagggaagaccatcccgatctgatccagaatgctaaaaagtctgacatcccagagaaacctaaaaccccccaacaattatggtacactcatgagaagaaggtgtacctgaaagtgcgcccagatgaaattatgcgcgactacattcaaaagcatcctgagttgaatatctccgaagaaggcatcaccaagagcactctgacgaaggctgaaagacagttgaaggacaaatttgatggccgacccacaaagccccctccgaatagctactccttgtactgtgcagaactgatggccaatatgaaggatgtgcctagcaccgaacggatggttctttgcagccagcagtggaagctgctttcccagaaggagaaggacgcataccataaaaagtgcgatcagaagaagaaggactatgaagtggaactgttacggtttctcgaatcgctgcctgaagaggagcagcaacgggtgctgggagaggaaaaaatgcttaatattaataaaaagcaggccacatcgcccgcttccaagaagccagcccaggagggaggcaaaggcggttcagagaagccaaagcggcctgttagcgctatgtttattttcagtgaagaaaaacggcgacagctgcaggaagaaaggccagaattaagcgagagcgaacttactcggctgctggccaggatgtggaacgatctgtccgaaaagaagaaggctaagtacaaggctagggaagccgcattaaaggctcagtctgaacgcaagcccggtggtgaacgcgaggaaagaggtaaacttcctgagagcccaaaaagggcagaggagatctggcagcaaagcgtcataggtgactatctggctagattcaaaaatgatcgagtgaaggctcttaaggccatggaaatgacgtggaacaacatggaaaaaaaagagaagctgatgtggatcaagaaggctgctgaggatcaaaagcggtatgagcgtgagctgtccgagatgagagccccacccgcagccaccaattcgagtaaaaagatgaaattccagggagaacccaagaagcccccaatgaatggatatcagaagttttcccaggagctactgtcaaatggggaactcaatcacctacccctcaaagaacgcatggtcgagatcggaagtcggtggcagcgtattagtcagagtcagaaagagcattataagaagctcgccgaggaacagcagaagcagtataaagtgcacctggacctctgggttaaaagtctctctcctcaggaccgtgccgcatataaagaatacatctctaacaagcgtaaatctatgacaaagctgaggggaccgaatccaaaatccagccgcacaactctgcagtccaagtcggagagcgaggaggacgacgaagaggacgaagacgacgaggacgaagacgaagaagaagaagatgacgagaacggagattcctcagaggatggtggagattcttccgaaagcagttctgaagacgaatcagaggatggtgacgagaatgaggaggacgacgaggatgaggacgatgacgaagacgacgacgaagacgaagacaacgagagtgaggggagttctagcagtagtagttcatcaggtgacagtagcgattctgatagcaactag

SEQ ID NO: 246330 - DNA, 2295 bp, synthetic construct
  misc_feature 1..2295: note = Description of Artificial Sequence: Synthetic coding sequence
  source 1..2295: mol_type = other DNA
atgaacggggaggcggattgtcctaccgacctggaaatggccgctcctaagggccaggacagatggtctcaggaggacatgcttacccttcttgaatgtatgaagaacaatctacctagcaatgatagttctaagtttaagacaaccgaatcacacatggattgggagaaggtggcctttaaggatttcagtggagatatgtgcaagttaaaatgggtggagattagtaatgaagtcaggaaatttagaactttgactgaactcatcctcgatgcccaagagcatgttaaaaatccgtacaagggcaaaaagcttaagaaacacccagatttccctaagaagcccttgactccttattttcgtttcttcatggagaagcgcgcaaagtacgcgaagctccaccccgagatgagtaatttggatttgacaaaaatcctctccaagaagtataaggaactgccggagaagaagaagatgaaatacattcaggacttccagcgggagaaacaggagttcgaaagaaatctggccaggttcagagaggaccatccagacctcatccaaaatgctaaaaaatccgatatccctgagaagcctaagactccacagcaactgtggtacacccacgagaagaaggtgtaccttaaagtgcggcctgatgcaactactaaagaggtgaaagatagcctcggcaaacagtggtctcagctgtctgacaagaagcgccttaagtggatccataaggctttagagcaacgcaaagagtatgaggaaataatgcgcgactatatccagaagcacccagagctaaacatcagcgaagagggcattacgaagagcacgctcaccaaggccgagcgtcagctcaaggataaatttgatgggcgtcccacaaagcccccacctaactcttattcactgtactgtgccgagctgatggccaatatgaaagatgtgcccagcaccgagagaatggtgctgtgttctcagcaatggaagctgctctcacagaaagaaaaggacgcctaccacaaaaagtgtgatcagaagaagaaagactatgaggtcgagttgctgcgctttttggaaagcctccccgaggaagagcaacagagagtgttaggagaggaaaagatgcttaacattaacaagaagcaagccacctcccctgcatctaaaaagccagctcaggagggcggaaagggaggttctgaaaaaccaaaacgaccagtgtctgccatgttcatttttagcgaagaaaagcgccgtcagctccaggaagaacgtccagaactcagcgaatccgaattgaccaggctacttgccaggatgtggaacgacttgagtgaaaagaagaaggctaaatacaaagcaagggaggctgctctgaaggcccagagtgagagaaagcccggaggtgaacgtgaagagcggggaaagctgcccgagagtcccaaacgcgctgaggaaatttggcagcagagcgtgatcggcgattatcttgcaagatttaagaacgatcgggtgaaagccttgaaggctatggaaatgacttggaacaacatggagaaaaaagaaaagctgatgtggataaaaaaggccgcagaagatcaaaaaaggtatgaaagagaactgtccgaaatgcgagctcctccagcagctacaaacagttcaaagaaaatgaagttccagggagaacccaagaagcctcccatgaacgggtaccagaaattctcccaagaacttctgtctaatggagagctgaaccacctgccactgaaggagagaatggtggagatcggttccaggtggcaacgcattagtcagagtcagaaggagcactacaagaaactcgccgaagaacagcagaagcagtataaggtgcacctggacctttgggtgaagagcctgtcgcctcaagatagagccgcatataaggaatacatttccaacaagcgtaagagcatgactaaactccgaggacctaaccctaaatcttctcggactactctccagagcaagtctgaatcggaggaggacgatgaagaggatgaggatgatgaggatgaggatgaagaagaagaagatgacgagaacggggactctagtgaggacggaggcgacagctctgagtccagctccgaggacgaatcagaggacggggacgagaacgaggaggacgacgaggacgaagacgacgacgaagatgacgatgaggacgaagataatgaatcagaaggctccagtagctcttccagtagttccggagactccagcgactccgatagtaactag

SEQ ID NO: 246331 - DNA, 2184 bp, synthetic construct
  misc_feature 1..2184: note = Description of Artificial Sequence: Synthetic coding sequence
  source 1..2184: mol_type = other DNA
atgaacggtgaagccgattgccccaccgaccttgagatggctgcgccaaaaggccaggaccgatggtctcaggaggacatgctgacactcctggagtgcatgaagaacaacctgccctccaatgactcatctaaattcaagacgaccgagtcccacatggattgggagaaggttgcatttaaagacttcagcggagatatgtgcaagctcaagtgggtagagatctccaacgaggtcagaaaattccggacactcactgaacttattctggatgcacaggagcatgtcaaaaacccatataaaggtaagaagctcaaaaaacacccagatttccctaagaagccgttaaccccatacttcaggttcttcatggagaagcgagcgaaatatgccaagctgcaccccgagatgagcaatctggacctcacaaaaatactgagcaagaagtataaagagcttccagaaaagaaaaagatgaaatatattcaggattttcaacgggagaagcaagagttcgagaggaatctggccaggtttcgtgaggatcatccagacctcatccagaatgccaagaaaagtgacatccctgagaaacctaagacacctcagcagctatggtacactcacgaaaagaaggtttacctgaaagttaggccggacgagataatgagggactatatccagaagcaccctgagctcaatatttcagaggagggtattacaaagtccaccctgactaaagctgagaggcaacttaaggacaagttcgatgggcgacctacaaagcctcctcccaattcatatagcctttactgcgcagagctcatggccaatatgaaagatgtcccttccactgaaaggatggtgttgtgcagtcagcaatggaagctgctgtctcagaaggaaaaagatgcttatcacaagaaatgtgatcagaagaaaaaggattacgaagtcgaactcctcaggttcctagagagcctgccagaggaagaacagcaacgggtgctgggggaggagaagatgctaaacatcaataaaaaacaggcaacaagccccgcttccaagaaacccgctcaggagggtgggaaaggcggatcagagaagccaaagagaccagtgtctgccatgttcatctttagcgaagaaaaacgacgtcagctccaagaggaaaggcccgaacttagtgaatctgaactgactagactcctggctagaatgtggaacgacctgtctgagaagaaaaaagctaagtacaaagccagagaggccgcactaaaggcccaaagcgaaagaaagcccggtggagaaagagaggaaagaggaaagctgcccgagtcaccaaaacgggctgaggagatctggcagcagagtgtcattggagactatctagcacgatttaaaaatgaccgggtgaaagctctaaaagctatggaaatgacctggaataacatggaaaagaaggaaaaactgatgtggatcaaaaaagcggcagaagaccaaaaaagatacgagcgggagctgtcagaaatgcgggctccaccagctgccaccaactcatctaagaagatgaagtttcaaggagagcccaagaagcctcccatgaatggttatcagaagttttctcaggagctgctgagcaatggcgaactaaaccacttgccacttaaggagagaatggtcgagatcggctccagatggcagcgaataagccagtctcagaaggaacactataaaaagttagcagaagagcagcagaagcagtacaaagtccatttggatctctgggtgaaatccctgtcgccacaggatcgagcggcttacaaagagtacatctccaacaagcgaaagagcatgacgaaactgcgaggaccaaaccccaagagctctagaaccactcttcagtccaagtcggagtcagaggaggacgatgaagaggatgaagatgacgaggacgaggacgaagaagaggaagatgatgagaacggcgattcttctgaggatggcggagatagtagcgaatcaagctctgaggacgagtcagaagacggcgatgaaaatgaggaggatgacgaagacgaggatgacgacgaggacgacgacgaagatgaagataatgagtctgaggggagctcatcttcctcatctagctcaggggattcctctgattctgactcaaattag

SEQ ID NO: 246332 - DNA, 849 bp, synthetic construct
  misc_feature 1..849: note = Description of Artificial Sequence: Synthetic coding sequence
  source 1..849: mol_type = other DNA
atgaagggacagcagaagaccgctgaaacggaggagggcacggtccaaattcaggagggtgcggttgctaccggggaggatcccacatcagtagccattgcaagcatacagtctgcagctacttttcccgatcccaacgtgaaatacgtttttagaactgagaacggtggacaagtgatgtacagggtgattcaggtgagcgagggccaattggacggccagaccgagggcactggggctatctcaggatatcctgccactcagtcgatgacccaagccgttattcagggagcatttacatccgatgatgccgtggacactgaagggaccgcagccgagacacactacacctacttcccgtcgactgctgtcggggacggcgcagggggtcagttttttgtgatgatgtccccccaagaagtccttcagggagggagtcagaggagtatcgctccccgtactcacccctactctcctaagtccgaggcccctcgtaccaccagagatgagaagcgcagagctcaacacaacgaggttgaacggaggagacgagacaagataaacaactggattgtgcagctttctaaaatcattccagattgctccatggagtccaccaaatccggccagtcgaaaggcggtattctgagtaaggcgtgtgattacattcaggagctgaggcagtccaaccataggctctcagaggagttacaggggctagaccagctccaattggacaacgacgtgttacggcaacaggtcgaggaccttaaaaacaagaaccttctgctgcgcgctcagcttcggcaccatgggttggaagtggtcatcaagaacgattccaactag

SEQ ID NO: 246333 - DNA, 933 bp, synthetic construct
  misc_feature 1..933: note = Description of Artificial Sequence: Synthetic coding sequence
  source 1..933: mol_type = other DNA
atgaaagggcagcaaaagacagcagagaccgaagaagggactgtccagatacaggaaggggctgtggccacaggcgaggacccaaccagtgtagctattgcaagcatccagtctgccgcaaccttccccgatccaaacgtgaagtacgtcttccgcacagagaatggtggacaagtcatgtaccgggtgattcaggtcagtgagggccagctcgacggacaaacggaaggtactggagccatctcaggttatcccgcaacccagagcatgactcaggccgtgatccagggtgcatttaccagcgatgatgccgtggacactgaaggcacagctgcggagactcactatacttatttcccttccactgctgtcggtgacggcgctggaggaacaacctccgggtctacagcggcagtcgtgacaactcagggcagcgaggccttattaggccaggctaccccacccggaacaggacagttttttgtgatgatgtcacctcaggaggtgttacaagggggaagccagcgcagcattgctccacgtacccatccttatagccctaaatcggaagccccacgtacaactcgggacgaaaagaggcgcgctcagcacaacgaggtggaaaggagacgcagggataaaatcaataactggatcgtgcagctttccaagatcattcccgactgctcaatggagtcaaccaagagcggacagtcaaagggaggcattctgtccaaggcatgcgactacattcaggagctccggcaaagcaatcacagattgagtgaagaacttcaagggctggaccagcttcagctggacaatgacgtgcttcgtcagcaggtcgaggatctgaaaaataagaatcttctgttgcgcgctcagttgcggcatcatgggctggaggttgtgatcaaaaacgactcaaattag

SEQ ID NO: 246334 - DNA, 933 bp, synthetic construct
  misc_feature 1..933: note = Description of Artificial Sequence: Synthetic coding sequence
  source 1..933: mol_type = other DNA
atgaaaggccagcagaagaccgccgagaccgaggaaggaaccgttcagatccaggagggcgcagtggcaactggggaggatccaacaagtgttgcaatcgcttccattcagtccgccgctacctttccagacccaaatgttaagtacgtcttcaggaccgaaaacggcggacaggttatgtatcgcgtcatccaggtgtctgaaggtcagctcgacgggcagactgaggggacaggcgcaattagcggctaccctgccacccagagcatgacacaggctgtcattcaaggggcattcacatctgacgacgcagtcgatacagaaggtacagccgctgaaacccactacacttatttccccagtacagccgtgggagacggcgcaggcggaacaactagtggatcgacggccgcagttgtgacaacccagggcagcgaggccttgctgggtcaggctacccctcccggaaccggccagttcttcgtcatgatgagcccccaggaggtgcttcaagggggttctcagaggtccatcgcacctcggactcatccttactctccaaagagtgaagcccctaggacaacccgggacgagaaacggagagctcagcataatgaggttgagcgtagaagacgcgacaaaattaataattggatcgtgcagctgagcaaaatcatccctgactgtagtatggagagtactaaaagcggtcagtctaaagggggaatcctgtcaaaggcttgtgattacatccaagaactcagacagtccaaccaccggctgtccgaagaactacagggcctcgatcagcttcagctagataatgatgttctgcggcagcaagtggaggatctcaagaacaaaaatctcctcctgcgcgctcagctgaggcaccacggactggaggtggtgataaaaaacgacagtaactag

SEQ ID NO: 246335 - DNA, 756 bp, synthetic construct
  misc_feature 1..756: note = Description of Artificial Sequence: Synthetic coding sequence
  source 1..756: mol_type = other DNA
atgtatagagtgatccaggtgtcggagggtcagctcgatggtcaaacagaggggacaggagccatctccggctaccccgcaacacagagcatgacccaggcagtcatccagggcgcttttacttcagacgatgccgttgataccgaagggactgcggcagagacacattatacatattttccctctaccgcagttggggacggtgcaggtggcactacttctggctcaactgccgctgtggttaccactcagggctcagaggcactcctcggacaggcaactccccctggcactggacaattctttgtaatgatgtcacctcaggaagttctgcaaggaggtagccaacgatcaatagcccctcggacacatccctattctcctaagtctgaagcccctagaaccacaagagatgaaaagcggagagcccagcataacgaggtggagagaaggagaagagacaagatcaacaactggatcgtgcagctgtcaaagatcattccagactgttctatggaatcgacaaaaagcgggcagtcaaaggggggtatactgtcgaaggcgtgcgactacatccaggagctgcgtcagtccaaccaccggttatccgaagagctgcaaggcctggatcaactccagctggataacgacgtcctgagacagcaagtcgaagatctcaagaacaagaaccttctgctgagagctcaactgcgccaccacggactggaagtggtcattaagaatgactccaattag

SEQ ID NO: 246336 - DNA, 1155 bp, synthetic construct
  misc_feature 1..1155: note = Description of Artificial Sequence: Synthetic coding sequence
  source 1..1155: mol_type = other DNA
atggctggcgctgaatggaagagcttagaggagtgtctcgagaagcacctgcctctgccggatctacaggaggtgaaaagagtgttgtatgggaaagaattgagaaaattggaccttccccgagaggcatttgaggccgcaagtagagaagactttgagctgcaggggtacgcatttgaagctgctgaagaacagcttcgacgacctcgaatcgttcacgtgggcctggtgcagaaccgcataccactgcctgcaaatgcccctgtggccgaacaggtctccgccttgcatagaagaattaaagccatcgtcgaagtagccgcaatgtgcggggtcaatatcatttgtttccaggaggcatggaccatgccatttgctttttgcacgcgggagaaactgccctggaccgagttcgccgagtccgcggaggatgggcctacaacacgcttctgtcagaagcttgccaaaaatcatgacatggttgtcgtatccccgattctcgagcgcgattcggaacacggagacgttctgtggaacactgctgtggtgatctccaattcaggagccgtgctggggaagacacgcaagaaccacattccacgggtaggagattttaatgagtcaacttactacatggaggggaacctcgggcatcccgtgttccagacacagttcggccgtattgcagtcaacatatgttatggccgacaccatcctcttaattggctcatgtatagcataaacggcgctgagattattttcaatccctcagcgactataggcgcattgtctgaatccttgtggccgattgaggccaggaatgcagccatagctaatcattgcttcacctgtgccataaaccgcgttggtaccgaacatttcccgaatgaattcactagcggcgatggcaagaaagcacatcaagactttggttatttctatggatcctcttacgtggccgcaccagacagttcacggactccaggcctgagccggtcaagagacggtctccttgtggccaaactggacttgaatctgtgtcagcaagttaacgacgtctggaatttcaagatgaccgggcgatacgagatgtatgcccgtgaactggccgaagccgtgaagtccaattattccccaactattgttaaggaatag

SEQ ID NO: 246337 - DNA, 951 bp, synthetic construct
  misc_feature 1..951: note = Description of Artificial Sequence: Synthetic coding sequence
  source 1..951: mol_type = other DNA
atgcttggagaggctccagctgcacctcgcttagcaggcagtgaggccaggtcgctgtggcaaggcacacaggtatccgcgcttcaccgccgtattaaagctatcgtcgaggtagcagctatgtgcggtgtgaatataatttgttttcaggaggcctggacaatgccctttgccttctgtacccgcgagaaactgccatggaccgagtttgctgagagtgccgaggacggcccaactaccagattctgccagaagttagccaaaaatcacgacatggttgttgtgagcccaattctggaacgggacagcgaacatggagatgtgctgtggaacacggctgttgttatttccaactcaggggcagtgctcggtaaaacccgaaaaaatcacatacctagagtcggggatttcaacgagagcacctattacatggagggaaatctaggacatccggtgttccaaacccagtttggccgaatcgcagttaacatttgttatggccgacaccatccacttaactggttaatgtatagtattaatggcgctgagatcatctttaacccatccgctaccatcggagctttgtcagaaagcttgtggccaatcgaagcccgaaacgctgcaatcgctaaccactgttttacatgcgctataaatcgcgtgggcacagaacacttccctaacgaatttactagcggtgatggaaagaaagctcaccaggactttggttatttctatggctcgagctacgtcgccgcacctgactcatcgcgcactccagggctgtcccggtcacgcgacggccttttggtcgcaaagctggatctgaatctgtgtcagcaagttaatgacgtctggaatttcaagatgacaggcagatatgagatgtatgctagggagctggccgaggccgtgaagtccaattatagccctacaatcgtaaaagaatag

SEQ ID NO: 246338 - DNA, 561 bp, synthetic construct
  misc_feature 1..561: note = Description of Artificial Sequence: Synthetic coding sequence
  source 1..561: mol_type = other DNA
atggctggtgcggagtggaagtccttggaagaatgcctggagaagcatctgccactccccgatctgcaggaggtcaaaagggtgctctatggaaaggaattaaggaagctggatctaccccgagaagcttttgaggcggctagtcgtgaagatttcgaactgcagggctacgcgttcgaagcagccgaagagcagcttcgacgaccccgtatagtacatgtgggccttgtccagaataggattcctttgcccgcaaatgccccagtggcggagcaggtcagtgccttgcatcgtcgcataaaggccattgtcgaggttgccgcaatgtgtggagtcaacatcatttgcttccaggaggcctggattctgcggcctcatcatcaggagccgcgacccccttgttgctacgcccctagttgctgcttgattcccagcgtctttccccatcggagtgagagcatccgcagctctccttcactgtaccatcatttggtccaggcacccggatctagtcctctggcctttgtaatccctagttcatggtcccctgtgccaagttag

SEQ ID NO: 246339 - DNA, 2955 bp, synthetic construct
  misc_feature 1..2955: note = Description of Artificial Sequence: Synthetic coding sequence
  source 1..2955: mol_type = other DNA
atggatgacagatatcctgccctgcagagggctcagctgcgtctcgacttcattcatgcaaatagcaccacgcacagcttcctgttcggagcattggccgaactgctggacaatgcgagagacgccggtgccgaacgtctagatgtgttctccgtagacaacgaaaaactgcagggtggattcatgctgtgtttccttgatgatggctgcgggatgtcacccgaagaggcatctgacataatttattttgggaggtccaaaaagaggttaagcaccctaaaattcattggacagtatggtaacgggctgaaatccggaagcatgcgaatcggaaaagacttcatactcttcactaagaaagaggaaacaatgacttgcgtgttttttagtcagactttttgcgaagaagaatccttgagtgaggtggtggtgcccatgcctagctggctgatccgcacccgagaaagcgtgaccgatgatccgcagaaattcgcaatggaactgagcatcatttacaaatattccccttttaagacggaagcagaactgatgcagcagtttgacgtcatttacgggaagtgtggcacactgctcgtaatctataacctgaagcttcttttaaacggagagccagaattggacgtgaagaccgataaagaggacatcttgatggcaggggctttagaggatttcccagcacggtggagcttccgggcttatacttctgttctgtatttcaatccttggatgcgaatctttattcaagctaaacgagtgaagacgaagcatctgtgttattgcctgtacagacccagaaaatacctgtatgtgacatcatcctttaagggcgctttcaaagacgaggtgaagaaggcggaggaggccgtaaaaatagcggaatctattctcaaagaggctcagatcaaagtaaatcaatgtgaccggacaagcttgagctccgccaaggacgtgctgcagcgagccctagaggacgtagaggcgaaacagaagaacctcaaggagaaacagagggagctgaagactgctaggactctgtctctgttctacggcgtgaatgtggaaaaccggagccaggctgggatgttcatttactccaataacaggctcatcaaaatgcacgaaaaagtgggaagtcaattgaagttaaaaagccttctgggagccggagtggtgggaattgttaatattccacttgaggtgatggaacctagtcataataagcaggagtttcttaacgtccaggaatacaaccacctattgaaagtcatgggtcagtatttggtgcagtattgcaaagatactggcattaataacaggaatctcacgctgttctgtaacgaatttggatatcagaatgatatagatgtggagaagccgcttaattctttccagtatcagagacgccaggcgatgggcataccatttatcatccagtgtgacctttgtctcaagtggagagttctcccatcatctaccaactatcaagagaaagagttttttgacatctggatttgtgccaataaccctaaccggctggagaactcttgtcatcaagttgaatgtcttccaagtattcccctggggacaatgtccacaatttctccaagtaagaatgagaaggagaagcaactgcgggaatcagtgatcaagtaccagaatcgcctcgcagaacaacaaccccagccccagtttatccccgtggatgagatcaccgtgacatccacatgtcttactagtgcacacaaggagaatactaagacccagaaaatcagactcctaggtgacgacctaaaacacgagtcattgagttctttcgaactcagcgcatccagacgcggtcagaaacgcaacatcgaagagactgattcagatgtggagtacatctccgagaccaagatcatgaagaaaagcatggaggagaagatgaactcacaacaacaaaggataccggtcgctctccccgagaacgtaaaacttgcggaaaggtcccaacggagccagattgccaatatcactactgtctggagggcacaacccacagagggatgtctgaaaaatgcgcaggcggcttcatgggaaatgaagaggaagcagagtttgaatttcgttgaggaatgtaaggtcctcactgaggatgaaaatacgagcgactcagatatcatccttgtgagcgacaaatcgaatacagacgtgagcctcaaacaggagaaaaaagagatcccattgctgaaccaagagaaacaggaattatgcaatgatgtgctggccatgaagagaagtagctccctccctagctggaaatctctcctcaacgtgccaatggaagatgtcaacttgtccagcgggcacatcgctcgggtgtcggtctccggctcatgtaaagtagcatcttcacctgcctcttcacagtctactccagtgaaagagactgtacgcaagttgaagtcgaagctcagggagattctactctacttttttccagagcatcagctcccatctgagttggaggaacccgctctctcgtgcgaactcgaacagtgcccagagcagatgaataagaagctcaagatgtgcttcaaccaaattcaaaacacctatatggtccaatacgagaagaagatcaaaagaaaacttcaatccattatttacgacagtaacactcgcggtatccacaacgaaatttctctcggccagtgtgagaacaagaggaagatatctgaggataaactgaaaaacctgagaatcaaactggccctcctgctccaaaaactccagcttgggggaccggagggtgaccttgagcagaccgatacgtacctagaagccctgctcaaagaggataacctgttattccagaacaatctcaataaagttactatagacgcacggcaccggctgcccctggagaagaacgagaagacttccgaaaattag

SEQ ID NO: 246340 - DNA, 618 bp, synthetic construct
  misc_feature 1..618: note = Description of Artificial Sequence: Synthetic coding sequence
  source 1..618: mol_type = other DNA
atgctcgagatactggaacagcaaaagaaggtggacgctgaaactgtgggtagggtgaaaagattcatccaggaaaacgttttcgtggctgctaatcacaacgggtcaccactgtccatcaaagaggcccctaaagaattaagcttcggagcaagggctgagttgccgcgtatccaccctgtggcctcaaaattgctgagattgatgcaaaagaaagaaaccaatctgtgcctctcagccgatgtaagcctggctcgggagcttctccagctagccgacgccttgggtcctagcatctgtatgcttaagactcatgtagacatactgaacgatttcacactggacgtgatgaaagaacttataaccctggcaaaatgtcatgagtttttgatatttgaagaccgtaaattcgccgacattggcaataccgtcaaaaagcagtacgagggcgacaatctgggacagcaatataactcgccccaggaggtcataggcaagcgcggtagtgacatcattatcgtgggcagggggattatctcagctgcagatcgtctggaagctgctgaaatgtatcgaaaggccgcttgggaggcttacctttctaggctcggtgtttag

SEQ ID NO: 246341 - DNA, 1167 bp, synthetic construct
  misc_feature 1..1167: note = Description of Artificial Sequence: Synthetic coding sequence
  source 1..1167: mol_type = other DNA
atgctgattcgaagaaaggagacgaaggactatgggacaaaaagacttgtagagggcacgataaatcccggtgagacatgcctgattattgaagacgtcgtgacctcaggctcttcggttctggagacagtggaggtgctgcagaaagagggcctaaaagtgaccgacgcgattgtgctgttggacagggagcagggaggcaaggacaagttacaggcacatggaattcgattacactcagtctgtactctcagcaagatgctggaaatacttgaacagcaaaagaaagtggatgctgagaccgtggggagagtgaagagattcatccaggagaatgtctttgtagcggcaaaccacaacggcagccctttatctatcaaagaggcacctaaggaactgagtttcggcgctcgggctgagctgccacgtattcaccccgttgcaagtaagctgctccgcttgatgcagaagaaagaaactaacctatgcctgtcagcagacgtaagcctggccagggaattgttgcaactagccgatgctctggggccttcgatttgcatgctcaaaacacacgtggacattctgaacgatttcacactggacgtgatgaaagaacttataaccctcgctaagtgtcatgagttcctgatatttgaggatcggaagttcgctgatatagggaatactgtcaaaaaacagtacgaaggtggcatcttcaagatagcctcatgggccgacctggtaaacgctcatgtggtccccggaagcggcgtggtcaaagggctgcaggaagtcgggctccctctgcatagaggctgccttctcatcgcggagatgtcctcgactggctcacttgcaaccggagattacacccgcgcagccgtaagaatggccgaggaacattcggagttcgtggtgggttttattagcggttctagagtctctatgaaacccgagtttttgcacctgacaccgggtgtgcagctggaggctggcggtgacaacctgggccagcagtacaattcgccacaggaagtcataggaaaacgcggaagcgacatcatcatcgtgggcagaggaataatttccgcagcggaccgcttagaggctgccgagatgtaccgcaaggccgcttgggaggcctacctgtctcgactgggagtctag

SEQ ID NO: 246342 - DNA, 909 bp, synthetic construct
  misc_feature 1..909: note = Description of Artificial Sequence: Synthetic coding sequence
  source 1..909: mol_type = other DNA
atgctcgaaattctcgagcagcagaaaaaggtggacgcagaaactgttggaagagtgaaacgctttatccaggagaatgtgtttgtggccgctaaccataatggcagccctctatccattaaggaagcccctaaggagctgagctttggagcacgggctgagctgcctcgaattcatcccgtggcttcaaagctgctgcgactgatgcaaaagaaggagacaaatctctgcctcagcgctgatgtttcacttgcacgggaactactgcagctcgccgatgccttagggccaagcatctgtatgctgaagacgcatgtcgatatcctgaatgatttcacccttgacgtgatgaaagaactgataacactagctaagtgccacgagttcctcatctttgaggacaggaaattcgccgatattggaaatacagttaaaaagcagtatgagggtggaattttcaaaattgcctcctgggctgatctggtgaacgcccacgttgtaccagggtccggcgtcgtgaaaggactgcaagaggttggattacccctgcataggggctgcctgttgatcgcagagatgtcttcaaccggcagcctggcaacaggcgattatactcgagcagccgtaagaatggccgaggaacacagcgagttcgtcgtcggattcatctcaggttcacgtgtgagcatgaagcccgagttccttcacctcactcctggagtgcagctggaagccggaggcgacaacctcgggcagcaatataactctccccaggaggtaatcggcaaacgaggttcggacattatcatagtgggccgagggatcatcagcgcagccgatagactcgaggcggcagagatgtaccggaaggcagcttgggaagcctacctgtcgcgcctgggagtgtag

SEQ ID NO: 246343 - DNA, 933 bp, synthetic construct
  misc_feature 1..933: note = Description of Artificial Sequence: Synthetic coding sequence
  source 1..933: mol_type = other DNA
atggctgccaccggcgcaaacgctgagaaagccgagtctcataacgactgcccagtccgtctgcttaacccgaatatcgcaaaaatgaaggaagatattctttatcacttcaacctgacaactagtagacataacttccccgctctgttcggtgacgtgaagtttgtctgtgtcggcggttcccccagccggatgaaagcttttatcagatgcgtgggcgctgaacttgggctggactgtcccggacgggactacccgaatatatgcgccggtacggataggtacgcgatgtataaggtgggcccagtgctgagcgtgtctcatggcatgggcatcccctctattagcataatgctgcatgagttgattaaactgctgtattacgctcgatgttcaaatgttaccataattcgcatcggaacttccggtggcattggcctcgaacctggcacggttgtcattaccgaacaggccgtagatacttgcttcaaagccgaattcgaacagatcgtgctggggaaacgcgtgatacgcaagaccgatctgaacaaaaaacttgtacaagagctactgctatgcagtgccgagttatctgaatttaccacagtggttggtaacacaatgtgcactttagacttttacgagggccaggggcgtttagacggcgcactctgtagttacacagagaaggacaagcaagcatacttggaggccgcatatgctgctggtgtccgtaacattgagatggagtctagcgtgtttgccgcaatgtgttctgcttgtggtctgcaggctgctgtggtctgcgtgaccctacttaatcgcctagagggggatcaaatttcttcacctcgcaacgtcttgagcgagtatcagcagagaccacagagactggtgtcctactttatcaagaaaaagttgtcaaaggcatag

SEQ ID NO: 246344 - DNA, 933 bp, synthetic construct
  misc_feature 1..933: note = Description of Artificial Sequence: Synthetic coding sequence
  source 1..933: mol_type = other DNA
atggccgcaacaggggctaatgccgaaaaagctgagtctcacaacgactgccctgttcgcctcctgaacccaaatatagcaaagatgaaagaggacattctataccacttcaatctgaccacctccagacataactttcctgcgttgtttggagatgtcaagtttgtgtgcgttgggggaagcccaagccggatgaaggctttcatccgatgtgtcggggctgaactgggcctggattgtccaggacgcgactatcccaacatttgtgctggcaccgaccggtatgccatgtacaaggtcggcccagtccttagcgtctcacacggcatgggtattccatctatcagtattatgctgcacgaactcatcaagctcctgtattacgcaaggtgctccaacgtgacaatcatcaggattggcaccagtgggggaattggcctggagcccggaacggtcgtgattacagagcaggccgtggatacctgttttaaggcggagtttgagcagattgtgctcgggaagagagtcattagaaaaacagacctgaacaaaaagttggtccaggaactgttactctgtagtgccgagctgtccgagttcacaaccgtcgtgggcaacacaatgtgtacgttggacttctatgaaggccagggacgcctggacggcgcactgtgttcgtataccgagaaagataagcaggcctacttagaagccgcttacgccgcaggagttcgcaacattgagatggagtctagcgtattcgctgcaatgtgttcagcatgtgggttgcaagcagcggttgtgtgtgttacactgctgaacaggttagagggcgaccagattagttcacccagaaacgtcctgtctgagtaccagcagcgtccacagaggctggtttcgtatttcattaagaagaagctgtccaaggcgtag

SEQ ID NO: 246345 - DNA, 933 bp, synthetic construct
  misc_feature 1..933: note = Description of Artificial Sequence: Synthetic coding sequence
  source 1..933: mol_type = other DNA
atggctgctactggggctaacgctgaaaaggcagaatctcacaacgactgccccgtccgcctgctgaatccaaacatcgccaagatgaaagaggatattttataccacttcaaccttaccacctcaagacacaatttcccagcacttttcggtgacgtcaagtttgtatgcgttggcggatcaccaagcaggatgaaggccttcattagatgtgttggcgcagagctcggactggattgtcccggacgtgattatcccaacatttgtgctgggacagaccgatatgcaatgtataaggtcggcccagtcttaagcgtttctcatggaatggggattccctctatttcgatcatgctgcatgagcttatcaagctactgtactatgccagatgttcaaatgttacaataataagaattggtacgtctggagggatcggattggagcctgggactgtcgtgatcaccgagcaggccgtggatacctgtttcaaagctgaattcgagcagatcgtcctgggaaagagagtaatacggaagactgacctcaataagaaacttgttcaggaactgttactctgcagcgcggagctttccgagttcacaactgtcgtcggcaacacaatgtgcactctggatttctacgaagggcaaggcagactggacggggctttatgttcatacaccgaaaaggacaagcaggcatatctggaggccgcatatgccgctggggtcagaaacattgaaatggagtcttctgtattcgctgctatgtgctcagcatgcggtcttcaagcagctgtggtatgtgttaccctgctgaatcggctggagggcgatcagatttcatcgcccaggaacgtgctgtccgagtaccagcaacgccctcagcgccttgtgtcctatttcattaaaaagaagctgagcaaggcctag

SEQ ID NO: 246346 - DNA, 435 bp, synthetic construct
  misc_feature 1..435: note = Description of Artificial Sequence: Synthetic coding sequence
  source 1..435: mol_type = other DNA
atggcagcaacgggcgcaaacgcagaaaaggctgaatcccacaatgattgtcccgttaggctcctgaaccctaacatagccaagatgaaggaagatattctatatcactttaacctaaccaccagccggcacaactttccggctttatttggagatgtgaaatttgtatgtgtagggggttccccatcaagaatgaaagccttcatccgctgcgtcggtgcagaattgggtctggattgcccgggtagggactatccaaatatttgcgctgggaccgatcgctacgctatgtataaggtgggaccagtgctttctgtgtctcatgggatgggtatcccgtcaatttcgattatgttgcacgaattgatcaagctgctctactatgccagatgttccaacgtgaccatcatccgcattgggacatccggaggatag

SEQ ID NO: 246347 - DNA, 516 bp, synthetic construct
  misc_feature 1..516: note = Description of Artificial Sequence: Synthetic coding sequence
  source 1..516: mol_type = other DNA
atggccgcaaccggggctaacgcggagaaagcggagtctcacaacgactgcccagtaaggcttcttaatccaaacatcgctaagatgaaggaggatatactgtaccatttcaatttaaccaccagcaggcacaatttccccgctctgttcggtgatgtgaaattcgtctgcgttggagggtccccttctagaatgaaggccttcatccggtgtgtgggagccgaactaggactagactgtcccggacgcgactacccaaatatttgcgccggtacggatagatatgccatgtataaggtagggccagtgctgagcgtgagccatggaatgggaatcccctccatctctatcatgttgcacgaactcatcaaactgctgtactatgcacggtgttcaaatgtcaccattataaggatcggcactagcggcggtattggcatcctcaagcacttgcggaggaaggacacaggtaaaagcaagggaggaagagagagacggtcgacaaaactgcgttag

SEQ ID NO: 246348 - DNA, 522 bp, synthetic construct
  misc_feature 1..522: note = Description of Artificial Sequence: Synthetic coding sequence
  source 1..522: mol_type = other DNA
atgcagcgcaagctgaaggtgacctctcttgagcctgggactgttgtcattactgaacaagccgtagatacctgcttcaaagcagaattcgagcagatagtgctgggcaaaagggtgattcgcaagaccgacctgaacaagaagctggtccaagaattactgttgtgcagcgctgaactgtcggagtttacaaccgtagtcggcaatacaatgtgcactctcgatttttatgagggccagggacggctcgatggtgcgttgtgtagttacaccgaaaaagacaagcaggcctacctggaggctgcctatgcggcaggggtgcgaaacattgaaatggaatcatcagtgttcgcggctatgtgttcagcatgtggacttcaggccgctgtggtttgcgtcacccttcttaaccgcttggaaggggatcagatctcatctccaaggaatgtccttagcgagtaccagcagaggccgcagaggttggtgagctatttcattaagaagaaactgtccaaagcctag

SEQ ID NO: 246349 - DNA, 90 bp, synthetic construct
  misc_feature 1..90: note = Description of Artificial Sequence: Synthetic coding sequence
  source 1..90: mol_type = other DNA
atggcggctacaggagctaacgcggagaaagctgagtcccacaatgactgtcccgtgagactcctcaatccgaacattgccaagatgtag

SEQ ID NO: 246350 - DNA, 441 bp, synthetic construct
  misc_feature 1..441: note = Description of Artificial Sequence: Synthetic coding sequence
  source 1..441: mol_type = other DNA
atggccgctaccggggctaacgcggagaaggcggaatcacataatgactgccccgttaggcttctaaaccctaacatcgccaaaatgaaggaggatatactgtaccacttcaacctaaccacttcccgccacaacttcccagccctcttcggagatgtaaaattcgtttgcgttggaggcagtcccagcaggatgaaggccttcattaggtgtgtcggcgctgaactcgggctcgattgtccaggtcgcgattacccaaacatatgtgcagggaccgaccggtacgctatgtacaaggtggggcctgttttatctgtctcacatgggatgggcatcccctccattagcatcatgttacatgaacttattaaactcttgtattatgccaggtgtagtaacgtaacaatcatacgtatcgggacaagtggcggtatcgggtag

SEQ ID NO: 246351 - DNA, 606 bp, synthetic construct
  misc_feature 1..606: note = Description of Artificial Sequence: Synthetic coding sequence
  source 1..606: mol_type = other DNA
atggcttctgccggaggcgaggactgtgaatctcccgctcccgaggcggaccgccctcaccagcgtccattccttatcggcgtgtcaggaggcaccgcgtctggcaagtctacggtgtgtgaaaaaattatggaactcctgggccagaatgaggttgaacagcgccagcgcaaggtggtaatactaagccaggaccggttctataaggtactgacagccgagcaaaaagctaaagcccttaaagggcagtacaacttcgatcaccctgatgcgtttgataatgatttgatgcacaggacactcaaaaatatcgtcgaagggaagaccgtcgaagtgcctacatatgacttcgtaacccattccaggcttcctgaaactacagtcgtgtacccagctgacgtggtgctcttcgaaggaattctagtgttctatagccaggagatcagagacatgtttcacctacggctctttgttgacactgactcggacgtacgcctttcacgacgcgacaaggaagtttgccgttgcgaccatccagccagatccggccagtatgggtgccatcagcctgatcgtgctgcccacccaggtcacagcgagtggtag

SEQ ID NO: 246352 - DNA, 807 bp, synthetic construct
  misc_feature 1..807: note = Description of Artificial Sequence: Synthetic coding sequence
  source 1..807: mol_type = other DNA
atggcatccgcgggaggggaggactgcgagagccccgctccagaagcagaccggccacaccagcggccatttctcattggctccaccgtctgtgagaagatcatggagttgctgggtcagaatgaagtcgaacaacggcagaggaaggtggtcattctgtcgcaggatcgcttctataaagtcctaaccgcggagcagaaagctaaggccctgaagggacagtacaattttgaccacccagacgcatttgataatgatcttatgcacaggacactcaaaaatattgttgaaggtaagaccgtggaggtgcctacatacgactttgtgacccactctagactgcctgagacaacggtggtctaccccgcagacgtagtgctctttgaaggtatcctggtgttctactctcaggagattcgggatatgtttcatctgagactgttcgtggacacagattcagatgttcgcttaagcaggcgtgtgcttcgggacgtcaggcggggtagagacctcgaacagattcttactcagtacacaacatttgtgaagcccgcttttgaagaattctgtctcccgacaaagaagtacgcagacgtaattattccaaggggcgttgacaatatggtggccattaaccttattgttcagcacattcaggacatcctgaatggtgacatttgcaagtggcatagaggtggaagcaacggcagatcctacaaaaggacctttagcgagcctggcgatcatcccggaatgctcaccagtggaaagaggagtcacttggagtccagcagtcggcctcactag

SEQ ID NO: 246353 - DNA, 849 bp, synthetic construct
  misc_feature 1..849: note = Description of Artificial Sequence: Synthetic coding sequence
  source 1..849: mol_type = other DNA
atggctagcgcgggtggtgaagattgcgagagccccgcacccgaggccgatcgcccacaccagcgcccatttctgatcggtgacgagcggttccaagccggtatacctctgttgtgccttcagtcgactgtatgtgagaaaattatggaattgcttggccagaacgaggtggaacagcgccagcgcaaggttgtcatactgagtcaggacaggttctacaaggtgctcacggccgaacagaaggctaaagctctcaaaggccaatataacttcgatcatcccgatgcatttgataatgatctgatgcacaggacactcaagaacatcgtcgaaggcaagacggtggaggttcctacatacgattttgtcacccactctaggctgcccgaaaccacagtggtgtacccagcggatgttgtgctgttcgaaggaattctggttttctatagtcaggagatcagagacatgttccatctcagactgttcgtggacactgatagcgatgttcggctgagcaggcgcgtgctccgggacgtgcggaggggaagagacctggaacaaattctgactcaatataccacattcgttaaacctgcgtttgaggagttttgcttgcccacaaaaaagtacgctgacgtgatcattccacgtggcgttgataatatggtcgcgattaacctgatcgttcagcatattcaggacatccttaatggagacatctgtaagtggcacagggggggtagcaatggccgttcttacaaacgcaccttcagcgagcccggtgaccatccgggtatgcttaccagcgggaagaggtcacacctggaatcatctagtcgaccacactag

SEQ ID NO: 246354 - DNA, 834 bp, synthetic construct
  misc_feature 1..834: note = Description of Artificial Sequence: Synthetic coding sequence
  source 1..834: mol_type = other DNA
atggcaagcgccggaggggaggactgcgagtctccagcacctgaagccgatcgccctcatcagcggccattcttgataggcgtgtctgggggaactgcctctgggaaaagcacagtgtgtgagaagattatggagttgctgggccagaacgaagttgaacagcggcagaggaaagtcgttattctctctcaggacagattttacaaagttctgacagctgaacagaaagccaaagctctgaagggccagtacaacttcgaccaccccgacgcctttgataatgatcttatgcataggacactcaagaacattgtcgagggcaagaccgtggaagtccccacttatgatttcgtgacgcattctagactccccgagacaacggtcgtgtatccagctgatgtggtcctgtttgagggcattctggtattctatagtcaggagatccgtgacatgtttcaccttcggctttttgtggatacagacagtgacgtaagactgtcaaggcgggtccttagggatgtccgacgcggacgggatcttgagcagattttgacccaatacacaacatttgtgaaacctgccttcgaagagttctgcctccccacaaagaagtacgccgacgttataattccacgaggagtggataacatggtggccattaacctgattgtgcagcatattcaagatatcttgaatggggatatctgtaaatggcacagggggggatccaacggaagaagctacaaacgcacgttttcggagccgggtgatcaccccggtatgctgaccagcggtaagcgatcgcacctggagtccagttcacgtcctcactag

SEQ ID NO: 246355 - DNA, 1647 bp, synthetic construct
  misc_feature 1..1647: note = Description of Artificial Sequence: Synthetic coding sequence
  source 1..1647: mol_type = other DNA
atggccgctccgcctgcgagggcagatgcggacccgtcgcccacctccccccctacagctcgggataccccaggacgtcaggcagagaaaagcgaaaccgcatgtgaagaccgcagtaatgcagagagtttggacagactgttgcccccagtgggaactggacggagccccagaaagcgaactacgtcccagtgtaagtccgaacctcccctcctgcggacaagcaagaggacaatctacacagccggtcgccctccatggtataatgagcacggcactcaatctaaggaggcatttgctatcggactggggggaggttccgcaagcggtaagactacagtcgctagaatgatcattgaggctctggacgtgccttgggtggttttactgtctatggactctttttataaggtactgactgaacagcagcaggaacaggccgctcacaacaatttcaatttcgaccaccccgatgcttttgacttcgatttgattatctccacattgaaaaagttaaagcagggtaagagtgtgaaagtgcccatttatgatttcacaacgcatagtaggaagaaggactggaagacactttacggcgctaatgtgattatcttcgaaggcattatggcgtttgcagataaaacactgttagaactgctagacatgaagatctttgttgataccgattccgacatacgcttagtgagacgcctgcgaagagatattagtgaacgcggtcgggacatcgagggggtcatcaagcaatataacaagttcgtcaagccttcatttgatcagtacattcagccaacaatgcgtctggccgacatagtagtgccaagggggagcggcaacacggtcgccattgacctgatcgtgcagcatgtccattctcaactagaggagcgagaactgtctgttcgagccgcacttgcctctgcccatcagtgtcatccactgcctagaacattgagtgtactgaagtctacccctcaagttagggggatgcatactatcatccgtgacaaggaaacatctcgtgacgagtttatcttctactctaagcgcttgatgcgtcttctgatcgagcacgctctgtcgtttcttccatttcaagactgtgtagtgcagactccgcaggggcaagactacgctgggaagtgttatgctggaaagcagatcaccggggtttctatactcagggccggtgaaaccatggaacctgccctccgggctgtctgcaaggacgttcgtataggcactattctcatccagaccaaccagctgaccggcgagccggagcttcattacctcagactgcccaaggacatcagtgatgaccacgttatactgatggattgcacagtgagtacgggggcagcagctatgatggctgtgcgcgttctattagaccacgatgtgccagaggacaaaattttcctcctatctctgctcatggctgaaatgggtgtccactccgtagcctacgctttccccagagttcgaatcataaccaccgcagtggataagagggtgaatgatctgttccgcatcatacccggtataggcaatttcggcgaccggtactttggaacagacgccgtgcccgatgggtccgatgaagaggaggtggcatacaccgggtag

SEQ ID NO: 246356 - DNA, 1260 bp, synthetic construct
  misc_feature 1..1260: note = Description of Artificial Sequence: Synthetic coding sequence
  source 1..1260: mol_type = other DNA
atggccgcacctcctgcccgagctgacgccgatccctcccctaccagccctcccacggctcgcgatacccccggacgtcaggctgaaaaatccgagacagcttgcgaggataggtccaacgcagagtcccttgatcggctgctgccccctgttggaaccgggagatcccctcgcaagcggacgacttcccagtgcaaatcggaacctccacttctgcggacctccaagagaacaatctataccgctggcagacccccttggtacaacgaacatgggacgcagagtaaggaggcatttgctattgggctgggaggtggatcagcatccggcaaaaccaccgtggcacgtatgattatcgaggctctggatgtgccttgggtggtgctgctttcaatggattcgttttacaaagtgctcactgaacaacagcaggagcaggcggctcacaacaatttcaattttgatcaccctgatgcttttgatttcgatctcattatctctaccctaaagaagctcaaacagggaaagtccgtgaaagtccccatttatgatttcacaacacattcaaggaaaaaggattggaagacactctacggcgcaaatgtaatcatttttgaaggcataatggcctttgccgacaaaacactcctcgaattgttggacatgaagatcttcgtcgacactgactccgatatccgattggtgaggcgtctcagacgagatattagcgaacgcggacgtgacatcgagggggtaatcaagcagtataacaagtttgttaagccgtcctttgaccagtacatccagcctacgatgagacttgcagacattgtggttccccgaggtagcggcaacactgtagctatcgacctcattgtgcagcatgtgcactcgcaactagaagaagggtgtgccggactgggaactccagttcctcctgctgctcctgatgccgagaggccagaggaacacgctgccggaacaggccatgcacatcaccatcaggttagggcccatctgggcacgggacgccctcgggctcgggctcccgcacagctgctcgcacctcagggccagggagaccagagccgcagagtacacctcctgcttcaggaaaccgatgcagccgctcatcgggctcgggctttgttgcccgctctgtccggcctaaggagaactgatccagccggagccggattatgcggacaggtgttatgtggggaggctgatcatcgatgcgtgcactcagctaggaggtag

SEQ ID NO: 246357 - DNA, 1647 bp, synthetic construct
  misc_feature 1..1647: note = Description of Artificial Sequence: Synthetic coding sequence
  source 1..1647: mol_type = other DNA
atggctgccccacctgccagggcagatgccgaccccagtcctacatctcctcctaccgccagagatactcccggtcggcaggccgagaagtcagagactgcctgtgaagataggagtaacgcagaaagcctggacaggctattgcctccggtgggcacaggacggagtcccaggaagcgtacgacaagccagtgcaagagcgagcctccactacttcgcacatcaaaacggaccatctatactgccggtcgtcccccatggtataacgaacatgggacccaatctaaagaggcattcgccataggactgggaggaggctctgcatccgggaaaacaactgtggcccgtatgataatcgaggccctagacgtcccttgggtggtgttactctctatggattcattctacaaagttttaacagaacagcaacaagaacaagccgctcacaacaatttcaatttcgaccatcccgatgcctttgacttcgatctaatcatctcaaccctgaaaaagctgaagcaaggtaagagtgtgaaggttcccatctacgactttactacacactcccgtaagaaagattggaagacactgtatggcgcaaacgtgattatattcgagggcattatggcctttgcagacaagactctgcttgagctcctcgacatgaagattttcgtcgataccgactccgatattagattagtccggcgtctccgacgcgacatctccgagaggggtagggacatagagggagtgattaaacagtataacaagtttgtcaagccaagctttgaccagtacatacagcccaccatgcggctggccgatattgtggtacccagaggatcaggaaatactgtcgctattgacctcatcgtacaacacgtgcactctcagcttgaggagctgcggttcgttccccgagcagccctggcctcagcccaccagtgtcaccctctcccaagaacactctccgttctgaagtcaacgccacaggtgcgaggcatgcacactatcatccgagataaggaaacctccagggatgagtttatcttttacagcaagaggctgatgcggctgcttatcgagcatgccctgagcttcttaccattccaggactgtgtggtacagaccccccaggggcaagattatgcaggaaagtgctatgctggcaagcagatcaccggggtgagtattctccgcgcaggtgagactatggagccagcactgagggctgtttgcaaagatgtcagaataggcactatccttatacaaaccaaccagttaaccggcgaacccgagctccattaccttagattacctaaggacattagcgacgaccacgtgatactgatggactgtactgtgagcaccggagcagctgctatgatggctgtgagagtcctgctcgatcacgatgtgccggaggataagatcttcctgctcagtctcctgatggccgaaatgggcgtccatagtgtggcttacgcgtttcctcgggtgcgaattataactactgcagtggacaaaagagtgaatgatctttttagaatcatccccggaatcggaaattttggagaccggtatttcggaacggacgcagtgccagatggttctgacgaggaggaggtggcatataccggatag

SEQ ID NO: 246358 - DNA, 1602 bp, synthetic construct
  misc_feature 1..1602: note = Description of Artificial Sequence: Synthetic coding sequence
  source 1..1602: mol_type = other DNA
atgtcctcccccccagcatatcctggtatcaggatctccggctgcagggcactcggcgctgagggaagctctaatgccgaatctctggacaggctgctcccaccagttggtacgggtcgtagccccaggaagaggactacttcacagtgcaagtctgaaccccctctcctgagaacttctaagcgcacaatttatactgctggccgacctccttggtataacgagcacgggactcagtccaaggaagctttcgccatcggactgggagggggatctgcttcaggaaagaccaccgtggccagaatgatcattgaggctctggacgttccgtgggtggtactcctgagcatggactccttttataaagtgctgacggagcagcagcaggaacaagcagcgcacaataacttcaactttgaccacccagacgcatttgattttgatctgattatcagtacattaaagaagttgaagcagggaaaatccgtcaaagtgcccatctacgatttcacaactcatagtcggaagaaagactggaaaactttatatggggcaaacgtgatcatcttcgagggcattatggcctttgcggacaagactctgctggagctgctggatatgaaaattttcgttgacaccgacagtgacattagactggtgaggcgcctcagaagggatatttcggagagaggacgggacatcgaaggggtgatcaaacagtataataagttcgtcaagccatctttcgatcagtacatccagcctaccatgagactcgcagatattgtggttcccagggggtctgggaatacagttgccatcgacctgatcgtgcagcatgtgcacagtcaactggaggagagagaactgagcgtgagagctgcattggccagcgcgcaccaatgccaccccctgcctagaacgcttagcgtgcttaaaagtacgccccaggtgcggggtatgcacacaattatccgagacaaagagacatctcgtgacgagttcatattctattccaaacgattgatgaggctgctgattgaacacgctctcagcttcctgccatttcaagattgtgttgtgcagacccctcaagggcaggattatgcagggaagtgctatgctggcaaacagatcacaggtgtgtccatcctgcgagccggagagactatggaacccgcattacgggctgtgtgcaaggatgtgcgcatcggtacaatcttaatacagactaatcaattgactggagagcctgagcttcattacctaaggctgcccaaagatatttcggacgaccacgtcatccttatggattgtacagtctcaacaggagccgctgcaatgatggcagtgagagtgctgctcgatcacgacgtgcctgaggacaaaatatttctgcttagcctcctgatggccgaaatgggcgtccactctgttgcctacgcctttcccagagtacgcatcataaccactgcagttgataagcgcgtcaacgacctattccgtatcattcctggaattggaaattttggtgacagatactttggtaccgacgccgtccccgatggaagcgatgaggaggaggtcgcttacactggttag

SEQ ID NO: 246359 - DNA, 261 bp, synthetic construct
  misc_feature 1..261: note = Description of Artificial Sequence: Synthetic coding sequence
  source 1..261: mol_type = other DNA
atgtcatccccacccgcatatcccggtattagaatctccggctgtagggcccttggcgctgaaggatcttccaacgctgagagtctggatagactgttgcccccagtgggaacaggacgctcccccagaaagaggacaacctcgcaatgtaagagtgagcctcccctacttaggacaagcaaaagaacaatctacaccgccggtagacccccatggtataacgaacacggaacgcagagcaaagaggcatttgctatttag

SEQ ID NO: 246360 - DNA, 408 bp, synthetic construct
  misc_feature 1..408: note = Description of Artificial Sequence: Synthetic coding sequence
  source 1..408: mol_type = other DNA
atgcataccattatccgggacaaagagaccagtcgagacgagtttattttttattctaaacgactaatgaggttgctcattgagcacgctttgagtttcctgcccttccaggactgtgtggtccagaccccacagggacaagactatgcgggtaaatgttatgccggaaaacagattacgggggtcagtattctgcgcgctggcgagactatggagcctgcgctcagggccgtttgtaaggatgttcggatcgggaccatattgatccagaccaaccaactgaccggggagccagagcttcattatctgcggttgccaaaggatatctccgacgaccatgtgatattaatggactgtactgtgtctacaggtgccgcagctatgatggcagtgcgggtgctcttgtag

SEQ ID NO: 246361 - DNA, 786 bp, synthetic construct
  misc_feature 1..786: note = Description of Artificial Sequence: Synthetic coding sequence
  source 1..786: mol_type = other DNA
atggcgggtgatagcgagcagactttacagaaccaccaacaacctaatggcggagagccctttctgatcggggtttccggtggaaccgctagtggcaaaagctcagtctgcgcaaaaatagtacagcttctgggccagaacgaggttgactataggcagaagcaagtcgtcatactgtcccaagactcattttatcgagtgctgacaagcgaacagaaggccaaagccctgaagggccagttcaattttgaccatcccgatgcatttgataacgagctgatcctgaaaaccttgaaagaaattacagaagggaagacagtacagatccctgtgtacgattttgttagccattcaagaaaggaggaaacagtgactgtctatccagccgatgtggtcctgttcgaggggatcttggctttctatagccaggaggtccgggacctgttccagatgaagcttttcgttgacacagacgccgacaccaggctcagtcggcgtgtcctgagagatatctccgaacggggaagagatctggagcagatactcagtcagtacattacctttgtgaagccggctttcgaagaattttgtctgccaacaaaaaagtatgccgacgtgataatccccaggggggctgataaccttgttgctattaatcttatcgttcaacacatccaggacatcttgaatgggggacctagtaagaggcagacaaatggctgcttgaacggctacacgccatccagaaagcgacaagcctccgagtccagttccaggcctcattag

SEQ ID NO: 246362 - DNA, 393 bp, synthetic construct
  misc_feature 1..393: note = Description of Artificial Sequence: Synthetic coding sequence
  source 1..393: mol_type = other DNA
atggctggcgatagtgaacaaactttgcagaaccatcagcagccaaacgggggtgagcccttcctgatcggcgtttccggagggacggccagcggcaagtcatctgtgtgtgctaagattgttcagctgcttggacagaatgaggtggattaccgccagaaacaggtcgtcattttgagtcaggactcgttctaccgcgtcctgacatccgaacaaaaagccaaggcgctgaaaggccagttcaactttgatcaccccgatgcctttgacaacgagctgatcctcaaaaccctgaaggagattaccgaaggtaagacagtgcagattcctgtctacgatttcgtgagccacagcaggattaagggccaccagcgcgagcgtcaaggaagttag

SEQ ID NO: 246363 - DNA, 2031 bp, synthetic construct
  misc_feature 1..2031: note = Description of Artificial Sequence: Synthetic coding sequence
  source 1..2031: mol_type = other DNA
atgtccagtctccaggctctatgttcgggtctgccacttcgccctcttcccgagaatagagggaggcaggctggggtaccccacgctccagtgcggacgccttctctctcccccgttgagaaacagctagccctccgcaatgcactgaggtactttcccccagacgtgcaagaattactggctcctgaattcgctcaagagctgcagttgtacggtcacatatacatgtataggttttgtccggacatagagatgcgagcatatccaatcgagcagtacccgtgccaaactaaagtcgccgcagcaatcatgcacatgattatgaataatttagaccccgcagttgcccagtttccgcaggaactcgtcacctacggcggtaacggacaggtgttttcaaattgggctcagttctggttgaccatgttttacctgagtaagatgacagaggagcaaaccctggttatgtatagcggacaccccttgggcctctttccttccagtaggagcgcacctaggcttgtgataaccaatgggatggttatccctaactactcgtcccgcacagagtacgagaagctgttcgctctgggcgtgacaatgtacggtcagatgacagcgggttcctattgctatattggacctcagggcattgtccatggcaccgttctgaccgtactgaatgcagcaaggcgctacctgggtattgaagatctggccggtaaggtgttcgtgacctccggactcggagggatgtcaggggcacaggctaaagcagcagtcattgtcgggtgcattggagttattgcagaggttgacaaagctgcactggaaaaacgacaccgacagggatggttaatggaggttaccgattctcttgatcgctgtattcagcgtcttcgggaagcacgcaaaaagaaggaggtgctgtctttaggttatcacggcaacgtggtggcattgtgggagcggctggtacacgagttagataccaccggcgaatgcctggttgacttagggagcgatcagaccagctgccacaacccttttaatggcggatattaccccgtgcagttgagctttacagaagcacagtctctgatggcctccaaccctgctgtctttaaggacctggtgcaggaaagtctgagaagacaggtgtcagcaatcaatcgccttgccgaggaaaagttctttttctgggactacggtaatgctttccttttagaggcacagcgggcaggcgcagatgtagaaaagaagggcgcagggagaactgagttccgatatccttcctacgtccagcatatcatgggtgatattttttcccaaggcttcggtccctttaggtgggtttgcacatccggagaccctcaggatctcgccgttacggatgaacttgctaccagcgtgttggaggaagctatcgccgacggagtcaaagtttccgtcaaactccagtacatggacaacatcaggtggattcgagaagccgctcgtcatagattggtggtcggttcacaagccaggatcctctattcagatcagaaggggagagtggccatcgctgttgccatcaaccaagctattgcttgtagaaggattaaggctccggtggtccttagtagggatcaccatgacgtctctggaactgatagcccttttcgggaaacctccaatatctacgatggctccgcattttgtgccgatatggccgttcagaactttgtgggtgatgcgtgtcgcggagcgacctgggtggctctgcataacggtggaggagtgggctggggcgaggttattaatggaggtttcggactggtgctcgatgggactccagaggcagagggaagagcccgtctcatgctgagctgggacgtatcaaacggtgtggcaagaaggtgttggagcggcaatcagaaggcttatgaaatcatatgtcagaccatgcaagagaatagcactctcgtggtgaccctgccccacaaagtggaggatgaacgagttctgcaacaggctttgcagctgtag

SEQ ID NO: 246364 - DNA, 2211 bp, synthetic construct
  misc_feature 1..2211: note = Description of Artificial Sequence: Synthetic coding sequence
  source 1..2211: mol_type = other DNA
atgtcctctctgcaggcactttgtagcggcctccccctgagacccctgcccgaaaataggggtcgccaggccggagtgccccatgcaccagtacgaactccaagtctctcccctgtcgagaagcagctggctttacgcaacgctctgcgatacttccccccagatgtccaggaactcctggccccagagttcgcacaagaactgcagctgtatgggcatatttatatgtacagattctgtccggacattgagatgagagcctacccaattgagcaatacccttgccaaacaaaggtggctgcggctatcatgcatatgataatgaacaatctggatcctgccgtggcccagttcccacaggagctggttacgtatggcggtaacggccaggtcttttctaactgggctcaattctggttgactatgttctacctttctaagatgacagaagagcagacattggtgatgtattctggccatccccttgggctgttcccctcatctaggtcagccccacggctggtgatcactaatgggatggtgatacccaactatagttcccgcaccgaatacgaaaaactctttgcccttggtgtcaccatgtacggccaaatgacagccggaagttactgttacataggacctcaaggaattgtgcacggcaccgtgctcacggttttaaacgcagcgagacgctatcttggcatcgaagacctggccggaaaggtttttgttacatctggtctggggggaatgagcggcgcacaggctaaagcagctgtgatcgtgggctgcattggcgtgatcgctgaggtcgacaaagcagccctcgagaagcgtcaccgacagggatggttaatggaagttacggatagtcttgatcggtgcatacagcgattaagagttttgcagctcgggctgcaacaggcgcttgggtgggcgggacttcccgctgccttaggcctttgtgtcctttcctgcttcgttaatttggcccctttgggtgaggggaggtgcctcgcgccatctggattttcccgtcctttattgggtgcacctgtgttgctcctctgtccctcaagggaggcccgtaaaaaaaaagaggtgctgtccctggggtatcatgggaacgtagttgctttgtgggaaaggctggtccacgaattggacaccacaggagagtgtctcgtcgacctcggctccgaccagacttcatgccacaaccctttcaatgggggatattaccccgttcaactttctttcacggaggcacagagtctgatggcctcaaaccctgccgtgtttaaagatttggttcaggagtccttgcgccgacaggtgtcagcaatcaatcggctggcagaagagaaatttttcttttgggattatggtaatgctttcttactggaagcacaaagagctggggctgacgtggaaaagaagggagccggacggactgagttccgctacccatcgtatgtccaacatataatgggcgatatcttcagtcaggggtttggccctttcaggtgggtatgcaccagtggcgacccacaggacctcgcagtaacagacgagctggctacttctgttctggaggaggccatcgccgatggagtcaaagttagtgtaaagttgcaatacatggacaacattagatggatacgcgaggctgccagacatcgattagtggttggcagccaagcgaggatcttgtattcagatcagaagggcagagttgctatagcagtggcaattaaccaggccattgcctgccgccgaatcaaggctcccgtggtgcttagcagagatcaccatgatgtgtcaggcactgactcacctttcagagagacttcaaacatatatgacggatcggccttttgcgccgatatggctgtgcaaaactttgtcggagatgcttgcaggggcgcaacctgggttgccctgcataacggcggaggcgtgggctggggggaggttataaatggaggtttcggactggtcctggatggaactcctgaggccgaaggcagagcgaggctcatgctctcttgggacgtgagtaacggtgtggcccgaaggtgttggtccgggaaccaaaaggcatacgagattatttgtcagacaatgcaagagaatagtaccttggttgtcaccctcccacataaggtggaggacgaacgcgttctgcaacaggccctccagttgtag

SEQ ID NO: 246365 - DNA, 375 bp, synthetic construct
  misc_feature 1..375: note = Description of Artificial Sequence: Synthetic coding sequence
  source 1..375: mol_type = other DNA
atgcggcaggccggaagagcagcactcttggcggctcttctgctgctcgtccaactgtgcccagggtcttcccagcgctcccccgaggcagccggagttcaggaccctagcctgcgctggtctccgggagctaggaatcagggaggcggtgctagggccttacttctgctgctggccgaacgctttcctaggcgagcaggtcccggacgcctcggcctggggaccgcaggtgaacgcccacgaagggataacccatctctgagtattgacttgacattccaccttctacgaaccctcttggagctcgcacgaactcagtcccagagggagcgcgctgagcagaaccggattatcttcgattctgtggggaagtag

SEQ ID NO: 246366 - DNA, 339 bp, synthetic construct
  misc_feature 1..339: note = Description of Artificial Sequence: Synthetic coding sequence
  source 1..339: mol_type = other DNA
atgactcgctgcgccctgcttctactgatggtgttaatgttgggaagggtgctggtagtgccagtaacccccattcctacatttcagttgcgacctcagaacagtccccaaacaacacccaggccggctgccagtgagtctccttctgcggctccaacgtggccctgggcagctcagagccattgctcccccacaagacatccagggagtcgcatcgtgctgagtctcgatgtaccaatagggctcctgcaaatacttttagagcaggcacgcgctcgggcagcccgtgagcaggctacaactaatgctcgcatcctagcccgagtgggccactgttag

SEQ ID NO: 246367 - DNA, 1923 bp, synthetic construct
  misc_feature 1..1923: note = Description of Artificial Sequence: Synthetic coding sequence
  source 1..1923: mol_type = other DNA
atgggccagccctctctcacttggatgctaatggttgttgttgcatcctggtttatcaccacagcagccacagatacttccgaagcccgatggtgtagtgaatgtcactcaaacgccacctgcacagaggacgaggccgtaaccacttgtacatgtcaggaagggtttacaggggatggcctcacgtgcgtcgacctcgatgagtgtgccattccaggagcccacaactgcagtgcaaactccagctgtgtgaacacccccggaagtttctcctgtgtgtgccccgagggattcaggctgtcccctggtctcggatgtactgacgttgacgaatgtgccgaacctggactctcccattgtcatgcactggccacctgtgtaaacgttgtgggaagctacttgtgtgtctgcccagcaggatacaggggcgacggatggcactgcgagtgctcccccggttcttgtggaccgggactggattgtgtgcccgagggcgacgcactggtttgcgccgacccatgccaggcacataggactctggacgagtactggcgatccacagagtatggcgaggggtacgcctgtgatacagacctcagaggctggtaccggttcgtggggcagggcggagccagaatggctgagacctgtgtgccggtcctgaggtgtaataccgctgccccaatgtggctcaatggcacccaccctagtagtgatgagggtatcgtctcccgcaaagcatgtgctcactggagcggtcactgttgcctgtgggatgcatccgtgcaggtgaaggcgtgcgcgggaggatactatgtctataacctcaccgcccctccagagtgccatctggcctactgtaccgaccccagcagtgtcgagggcacatgcgaagaatgtagcatcgacgaggactgtaagtctaacaacggcagatggcattgtcagtgcaaacaggactttaacatcactgacatctcactcctggaacaccgtctagagtgcggggcaaatgatatgaaggtcagtttaggcaagtgccagctaaaaagtctgggattcgataaagtgttcatgtacctgagcgactcaaggtgttcaggattcaatgaccgggacaatcgtgactgggtctcagttgtgaccccagcacgcgacggaccatgtggcaccgtcctgacccggaatgagactcacgctacttactctaatactctctatctggctgacgagattattatccgggatcttaatatcaaaatcaactttgcatgctcttacccattagacatgaaggtgtccctcaagacggcccttcaacccatggtgagtgctctgaacattcgcgtcggcggaaccggtatgttcaccgtacgaatggcattgtttcagaccccctcctacactcagccatatcaggggagctctgtgaccttgagcaccgaagccttcctctatgtggggaccatgttggatggcggagacctctcccggtttgccctgttaatgacaaactgctacgccacaccttcttccaatgcaactgatccacttaagtactttattatccaggaccgatgcccccacactcgggattcaacgatccaagtggtggaaaatggtgaaagctcccagggacgcttcagcgtgcagatgttccgattcgccggaaactatgacttggtctacttgcattgcgaagtgtacctgtgtgacacgatgaatgagaagtgtaagcctacctgtagcggaactaggtttcggtcaggaagcgtgatcgaccagagcagagtactgaatctcggaccgataactcgcaagggggtccaggctacagttagtagagccttctcttctttgggcctgttaaaggtctggttacctctgcttctgtctgcgacactgacgctgactttccagtag

SEQ ID NO: 246368 - DNA, 2022 bp, synthetic construct
  misc_feature 1..2022: note = Description of Artificial Sequence: Synthetic coding sequence
  source 1..2022: mol_type = other DNA
atggggcagccctcactcacttggatgctgatggtagtggtggcctcctggtttattacaacagccgcaactgatactagtgaagcaagaaccaagtacaattgtcctgctaggtggtcctggcgtacaccacagcgaggaggggacaccgaacagggcccagatgaagactttacgtcccagggcagatggtgtagcgaatgtcactcaaacgcgacatgcacagaagacgaagcagtcaccacctgcacttgccaggagggattcaccggcgacggccttacttgcgtggacctggacgagtgcgctattccaggtgcacacaattgttcggccaattcttcatgtgtgaatacccccggatccttcagttgtgtttgccccgagggcttccgcctgagccctggattgggttgcacagacgtagacgaatgtgctgaacccggactgtcgcactgccatgcactggccacctgcgttaacgtcgttggatcttacctgtgtgtatgccccgctggctatagaggcgacgggtggcattgtgaatgctcaccaggaagctgcggccctggtcttgactgcgtgcccgagggagatgctctggtgtgcgctgacccatgccaagctcacagaacactcgatgaatattggcggtctactgagtatggagaaggctacgcatgtgataccgatttgcggggatggtaccggtttgtcggtcagggcggagcgaggatggctgaaacctgcgttccagttctgagatgcaacacagcagcaccaatgtggttgaacggtactcaccctagctctgatgagggcattgtgagcagaaaagcttgcgcacactggagtggacactgctgtctgtgggatgcaagcgtgcaggtcaaagcatgtgcaggtgggtactacgtgtacaatctgactgctccaccagaatgtcatctggcatactgtactgaccctagttcggttgaagggacttgtgaggagtgcagtattgacgaggattgcaaaagcaacaacggtcgctggcattgccagtgcaaacaagacttcaatatcacagacatctccttactggagcatcgactggaatgtggagccaatgacatgaaggtttctttgggaaagtgccaactaaagtctctcggatttgataaagtcttcatgtatctctcggatagcagatgttcaggcttcaatgaccgagacaatagggactgggtcagcgtcgtcacccctgcgagggatgggccttgcgggacagtactcacgaggaatgagacgcacgcgacctattctaacacactgtacctggcagacgagattattatccgtgacctgaatatcaagattaactttgcatgcagctaccccctcgatatgaaggttagtctcaagactgccctgcagccaatggtaagtgccctcaacatccgcgtcggaggcactgggatgttcaccgtccgaatggcattattccagacaccaagctacacgcagccttaccagggcagctccgtaactctgagtacagaggcatttctgtacgtgggcacaatgttggatggcggagacctgagtaggtttgctctgctgatgacaaattgttacgcgaccccatcctctaacgcaacggacccactaaagtacttcatcattcaggataggtgtcctcatactcgcgatagcacgatccaggtggtagagaatggcgagtcctctcagggacgtttctctgtccaaatgttcaggttcgccggaaattatgatcttgtttacctccactgtgaggtctacctttgtgacacaatgaacgagaaatgtaaacccacctgcagcgggacacggtttagaagcgggagcgtaatcgaccaatctagagtgttaaacctaggccctataacgaggaaaggggttcaggcaaccgtgtcccgtgccttctctagtctcgggcttcttaaggtctggcttcctctgctattgagtgccacgttgacgctgactttccaatag

SEQ ID NO: 246369 - DNA, 1923 bp, synthetic construct
  misc_feature 1..1923: note = Description of Artificial Sequence: Synthetic coding sequence
  source 1..1923: mol_type = other DNA
atgggacagccgagtttgacatggatgcttatggtcgtggtcgcctcttggttcatcacaaccgcggcaactgatactagtgaagctaggtggtgcagcgagtgccacagcaacgccacctgcactgaagacgaagccgtcaccacctgtacttgccaagagggatttacgggcgacggactgacttgcgtggatctcgacgaatgcgctatccccggtgcgcacaactgctcggcaaattcgtcctgcgttaacacaccagggtcattttcatgcgtttgccccgagggattcagactaagcccagggctcggttgtactgacgtagatgagtgcgcagagccaggtctctctcactgccacgccctggcaacttgcgtgaacgttgttggttcgtacctgtgcgtgtgccccgctggctaccgcggagacggttggcattgtgaatgtagccctggcagttgtggccctggactggattgcgttcctgaaggtgatgctcttgtgtgcgccgacccatgtcaggcgcaccgaacactggacgagtattggagatcaaccgaatacggcgaggggtatgcttgcgacaccgacctaagaggatggtaccgctttgtagggcagggcggtgccaggatggctgaaacgtgcgtaccagtactgaggtgcaatactgcggctccaatgtggctgaatgggacacatccaagctccgacgagggtatcgtctctcggaaggcatgtgcccactggtccggacactgctgcctgtgggacgcctctgtacaggtgaaggcttgtgctggcggatattacgtctataatttaaccgctcctcctgagtgccacttggcatactgtaccgatccctcctcagtagagggaacatgcgaagagtgtagcattgacgaggactgcaaatcaaataatggcagatggcactgccagtgtaaacaggatttcaatataactgacatcagtctccttgagcaccggctagaatgcggggctaacgacatgaaagtgagcctggggaaatgtcagcttaagtcacttggctttgataaggtgtttatgtatttatccgatagccgatgttctggatttaatgacagagacaaccgggactgggtctctgtagtgaccccggcacgcgacgggccttgtggtacagtccttacacgtaacgagacacacgcaacttattcaaatacgctatacctcgctgacgagatcataatccgcgatctgaacattaaaattaactttgcctgttcctatcccctggacatgaaggtgagtctcaagaccgctcttcagccaatggtcagtgccctaaacattagggtgggcggtaccggtatgttcacagtgcgcatggcgttatttcaaactccctcttacacgcagccttaccagggttcttcagtgacacttagcacagaagcctttctctacgttggcacaatgctggatggcggagatctgagccgctttgctcttctgatgacaaactgctacgccactccttctagtaacgccactgacccactcaaatattttataattcaagacagatgtccccacacaagggatagtaccatccaggtggtggagaatggggagagcagccaaggcagatttagcgtgcagatgttccgctttgctggaaactatgacttagtgtatcttcactgtgaggtctatctgtgtgacacaatgaacgaaaaatgcaagccgacatgtagtgggaccaggtttagatctggttctgtgatcgaccaatctagggtattgaacctggggcctatcaccaggaaaggggtacaggctaccgtgagtagagcgttttccagtctaggtctccttaaggtctggcttcctctcttgctgtctgccactctgaccctgaccttccagtag

SEQ ID NO: 246370 - DNA, 1923 bp, synthetic construct
  misc_feature 1..1923: note = Description of Artificial Sequence: Synthetic coding sequence
  source 1..1923: mol_type = other DNA
atggggcagccaagtctgacttggatgctaatggtggtggtcgcttcttggtttattactacggcagccacagacacatcggaagctcgctggtgcagcgagtgccatagcaatgccacatgtactgaagacgaagcagtcaccacatgtacatgtcaagagggatttacgggcgacggactgacctgtgtcgaccttgacgaatgtgccattcccggagcgcacaactgttctgccaattcctcatgcgtgaataccccagggtctttttcttgtgtctgcccagagggtttcagactgagccccggtctcggttgcacagacgtggatgaatgtgccgagcccggactttctcattgccatgcattggctacatgtgtcaacgtggtaggttcgtacctgtgcgtgtgcccagctggttatcggggagacgggtggcactgtgaatgttcaccaggatcatgtggccctggactggattgcgtgcccgaaggggacgccttagtgtgcgctgatccctgtcaggcacaccgaaccttagatgagtattggagatcaaccgaatacggggagggatacgcctgtgatactgatttacggggatggtataggtttgtcgggcaaggcggtgcacgcatggccgaaacttgtgtgccagttctgagatgtaataccgcagcacccatgtggctcaatggcacacacccttcgtctgacgagggcattgtttctcgtaaggcctgcgcccattggtctggccattgttgcctgtgggacgcctctgtccaggttaaggcctgtgccggagggtattatgtatacaatctcacggcaccccctgagtgccacctggcatactgcacggatccatcctcggtggagggcacttgtgaagaatgttcaattgatgaggactgcaaatccaacaatggaaggtggcactgtcagtgcaagcaagatttcaacatcacagacatttctctgctggagcaccgcttggaatgtggggcaaatgacatgaaggtttccctagggaagtgccagttaaaatccttaggtttcgataaagtttttatgtacttatcggactcacgctgctccggattcaatgatcgtgacaatagggattgggtttcggtggtgacaccagctcgagacgggccatgcggaaccgtgttgaccagaaatgaaacgcacgccacctacagcaacaccctttatcttgctgacgaaataatcatcagagatctgaatatcaaaattaacttcgcctgcagctatccactggacatgaaggtctccctaaaaactgctcttcagcccatggttagtgccctgaatatccgagtggggggaacggggatgtttaccgtacgaatggcgttgttccaaaccccgtcctacacacagccgtatcagggttcttctgtcacactctccaccgaggccttcctatacgtgggtaccatgctcgacggcggagatctgtctaggtttgccttgcttatgacgaattgttacgcaacacccagtagtaacgctacagatcctctgaagtatttcattattcaggatcgctgccctcacactagagatagtaccatccaggtggtagagaacggcgagagcagccagggtagattttcggtccagatgttcagatttgccggaaattacgatctagtctaccttcattgtgaagtgtatctttgtgatacaatgaacgagaaatgtaaaccaacctgctctggcacccgctttcgatccgggtctgtgatagaccagagtcgcgtgctgaatctgggacctattactcgcaagggtgtgcaggccactgtctctagggctttctcttctctgggcctgcttaaggtgtggttaccgttgcttttgtccgctactctcactctgaccttccagtag

SEQ ID NO: 246371 - DNA, 2022 bp, synthetic construct
  misc_feature 1..2022: note = Description of Artificial Sequence: Synthetic coding sequence
  source 1..2022: mol_type = other DNA
atggggcagccaagtctaacatggatgctcatggttgtggtcgcatcctggttcatcaccacggctgccacggataccagtgaggcacggacaaaatacaattgtcctgctagatggagttggcggaccccacagagggggggagacacagagcagggcccagatgaagatttcacctcccaaggtagatggtgctctgagtgtcattctaatgccacttgcaccgaggacgaggcagtcacaacttgcacttgtcaagaggggttcaccggggatgggcttacctgcgtcgatcttgatgagtgcgctatccctggagctcataactgctcagcaaactcaagctgtgtgaatacacccggaagtttttcgtgcgtgtgccccgagggcttcaggctatctccaggcttgggctgtactgatgtcgatgagtgcgctgagcccggactgtcccactgtcatgccttggctacctgcgtgaatgttgttggatcctacctttgcgtgtgtcccgcaggctacagaggcgacggctggcattgcgagtgctctcccggttcttgtggacctggactcgattgtgtgcctgagggagatgccctggtctgcgccgatccttgtcaggctcaccgcaccctggacgagtattggcggtccaccgagtatggcgaaggctatgcctgcgataccgatctgagaggatggtataggtttgtggggcagggcggagcgagaatggcagagacgtgtgtgcctgtcttgaggtgcaacacggctgcccctatgtggctgaacgggactcacccctctagcgatgagggtatcgtttcgcgaaaagcctgtgcccactggtctggccattgctgcctgtgggatgcttccgtgcaagttaaagcgtgcgccggaggctattacgtctacaatttaaccgcccctccggagtgccaccttgcctattgtacggatccctcctctgtcgagggcacgtgtgaggagtgcagcatcgacgaagactgtaagtccaataacgggcgatggcattgccagtgcaaacaggactttaatatcacggacatttcactcttagaacaccggttagaatgcggagccaacgatatgaaggtgtctttgggaaaatgccaactcaagtctcttggattcgacaaggtctttatgtacctaagcgattcccggtgtagtggatttaacgatcgtgataatcgcgattgggttagtgttgtgacaccagctcgagatgggccatgcggaacagtgcttaccaggaatgagactcatgccacttactccaatactctgtacctggcagatgaaatcattatccgggatctgaacattaagattaacttcgcctgttcttacccgctcgacatgaaggtctccctcaagaccgcattacagcccatggtttcagcgctgaatatccgcgtgggtggaactggcatgtttactgtgaggatggcgttgtttcaaacgccgagttacactcagccgtatcagggaagctcagtcaccttgtccaccgaggctttcttgtacgtcggaactatgttagacggcggtgacctgagtcgatttgcactgctgatgactaactgctacgctactccatcttcaaatgcaaccgatcccctgaagtactttattatccaggaccggtgtcctcacactagagacagcacaatccaggtggtggaaaacggtgagtcttcgcaagggagattctccgttcagatgtttcggtttgccggaaattatgatcttgtgtacctgcactgcgaggtctacctgtgtgacaccatgaacgagaagtgtaaacctacctgctctggaactagattccggtccgggagtgttatcgaccagagtagggtgttaaacctcgggcctatcacccggaagggcgtgcaagccaccgtgagcagggccttcagctctttggggcttctgaaggtctggttgcccctcctgttaagcgccacactgactctaacttttcaatag

SEQ ID NO: 246372 - DNA, 1857 bp, synthetic construct
  misc_feature 1..1857: note = Description of Artificial Sequence: Synthetic coding sequence
  source 1..1857: mol_type = other DNA
atggggcagccctctctcacatggatgcttatggtcgtggtggccagttggtttattactaccgccgcaaccgacacttcggaagcccgttggtgttccgaatgtcactcaaacgcaacatgcactgaagacgaagccgtcaccacgtgcacatgccaggagggctttactggtgacggtctcacctgtgtggatctggacgaatgtgccatacctggcgcacataattgtagcgcaaatagctcttgtgttaatacacctgggtccttcagctgtgtctgtcccgaggggtttcgactgtctcccggactcggatgtactgacgtggacgagtgtgccgagcccggtctgtcgcattgccacgctctggccacttgcgtgaacgtggtgggatcctgcgggccaggccttgactgcgtccctgagggcgacgcgcttgtatgcgcagatccatgtcaggcgcatcgaacccttgacgaatactggagatcaaccgaatatggagaagggtatgcttgcgacacagacctgcgcggatggtaccggtttgtgggtcagggcggtgcgaggatggcagagacctgcgtgccagtgctccgatgtaatacagctgccccaatgtggctgaatggcacacaccccagttccgacgaggggatcgtgagcagaaaagcctgcgcgcattggtccggtcactgttgcctctgggacgcctccgtgcaggtaaaagcctgcgcgggagggtactatgtctataatctcaccgctcctcccgagtgccaccttgcatactgtaccgacccgtcatccgtggaaggcacttgtgaagaatgctctattgatgaggattgtaaatcaaacaacgggaggtggcattgtcagtgtaagcaggacttcaatattactgatatctccttgctggagcatcggctcgagtgcggcgctaatgatatgaaggtatctctcggaaaatgccagctgaagtccctggggttcgataaagtcttcatgtacctttcagatagcagatgctcaggatttaatgaccgggacaacagggactgggtaagtgttgtgacgcctgcacgggacgggccatgtgggaccgtcttgacaaggaatgagacccacgcaacttactccaacacactctacctggctgatgagattatcatccgggacctgaatattaaaatcaacttcgcttgttcttatccactggacatgaaagtgtccctgaagactgcgctgcagccaatggtcagcgcactgaacatcagggtcggtgggaccggcatgttcacagtgaggatggccctatttcaaacccctagctatacccagccttaccaagggtccagcgtgaccctgtccacagaggcctttctgtacgtgggtaccatgctggatggcggagacttatctagatttgccctccttatgacaaactgttacgcaacccccagctcaaacgccaccgaccccctgaaatatttcataattcaggaccgctgcccgcacacaagggattccacaatccaggttgttgaaaacggagagtcctctcaaggcagattctctgtgcagatgtttaggttcgccggtaattacgatctcgtgtatttgcattgtgaagtttatctttgtgacactatgaatgagaagtgcaaacccacctgctcaggaacgagattcagatctggttcagttatagatcagagcagagtcttgaacctcggtccaatcacgcgaaagggcgtacaggccaccgtgagcagggcatttagtagcctcggattgctgaaggtgtggctgcctctgttattaagcgccaccctcaccttgaccttccagtag

SEQ ID NO: 246373 - DNA, 759 bp, synthetic construct
  misc_feature 1..759: note = Description of Artificial Sequence: Synthetic coding sequence
  source 1..759: mol_type = other DNA
atggcccctgctcctcaggcgcctgaacgggatcctgtcggcagttggtacaatgtgacgattttggtgaaaatggacttcaaggaactgcagcaggtcgatcctcgtctgttaaatcacatgagactcttgcacagtttagtgaccagcgccctccagccaatggccagcacagtgcaccacctgcacagtgcccctggcaatgcctcaaccactgtgtctcgtctgctgcttggcctgcccaggccactacctgtagccgatgttagcaccttgcttggcgacatagccaagcgagtatacgaggttatatctgtccaggttcaggacgtgaacgaatgtttctatgaggaactcaatgcctgcagcgggcgagagctctgcgccaatctagaagggtcttactggtgtgtttgtcaccaggaggctccagctactagtccacggaaacttaacctcgagtgggaggattgccctccggtgagtgactacgtcgtgctgaatgtcacctctgactccttccaggtctcctggcgcttgaactccacgcagaatcacacatttcatgtgcgagtgtaccggggtatggaactgctccggagcgcacgcacccagtcacaggccctagctgtggctgggctggaggcaggcgtgctctatagagtcaagaccagttatcagggatgtggtgctgacgtgagcaccacactgacgattaagactaaatacgtgctggagaagttggactttcagtcatag

SEQ ID NO: 246374 - DNA, 555 bp, synthetic construct
  misc_feature 1..555: note = Description of Artificial Sequence: Synthetic coding sequence
  source 1..555: mol_type = other DNA
atggcccctgcccctcaggctcctgagagagatcccgtgggctcctggtataatgttacaattttggtaaagatggacttcaaggagctccaacaagtggacccgaggctgcttaatcacatgagactgctgcactcgctagtaacatcagcgctccaaccgatggcttccaccgtccatcaccttcactccgcgccaggaaacgccagtaccactgttagccgactgctcctggggttacctaggcccctgcctgttgccgatgtttccacgctgctgggtgacatagcaaaacgagtgtacgaagtcatcagcgtgcaggtacaggatgtaaatgaatgtttctatgaggaactcaacgcctgtagcgggagagaactgtgcgctaacttggagggctcctattggtgcgtgtgccaccaagaggctccggcaacctcacctcgtaaattaaacctagagtgggaggccaggggactggaaattcatcttgaactgcgtgcaacttccactagccatggtacccccctgtcctctgcagagaactgtctatag

SEQ ID NO: 246375 - DNA, 3741 bp, synthetic construct
  misc_feature 1..3741: note = Description of Artificial Sequence: Synthetic coding sequence
  source 1..3741: mol_type = other DNA
atggtatatcgaacccagtatcttgtcgtggaagtcccagaatcacgcaatgttaccgattgttgcgagggctacgaacagctaggcctgtattgtgtgctaccactgaatcagagcggccagtttacaagccgccctggggcatgtcccgctgaggggccagaacctagtacttctccctgtagcctggatattgactgtccaggattggagaaatgttgcccatggtctggtggtcgatactgcatggcacccgcaccgcaggccccagaaagggacccggtaggtagttggtacaacgttactatcctggtaaagatggattttaaggagcttcagcaggtcgacccacgactgctgaaccatatgagactcctgcactccctcgtgacgtctgctctccagcccatggcttctaccgttcaccacctgcacagcgcacccggtaacgctagcactacagttagtcgactgcttctcggcctcccacgccctctgccggtggccgacgtatcaactctcctgggagacatagcaaagagggtctatgaagtcatcagcgtgcaggttcaggatgttaacgagtgtttctacgaagagctgaatgcctgctctgggagggaactttgcgccaaccttgagggctcatactggtgtgtctgtcaccaggaggcccctgcaacatctcccaggaagctgaatttggaatgggaggactgcccgcctgtgagtgactacgtagtgcttaacgtgacatctgacagtttccaggtcagttggcgcttaaactccactcagaatcacacctttcatgtcagggtatatagaggaatggagctactgagatccgctaggacccagtcccaagcattggctgtggcaggcctagaagcaggcgtgctgtaccgcgtgaaaacgagctaccagggttgcggagccgatgtgtccactacactgaccattaagacaaacgctcaggtctttgaggtgactattaagatcgttaaccataaccttaccgaaaagctgctcaatcggagctctgtcgagtatcaggacttttcacggcaattgctgcacgaggtagaaagctctttccctcctgtagtatctgacttgtaccggtccggtaagctgcgcatgcagatcgtgtccctgcaggctggctctgttgtggttcggctgaaacttacagtccaggatcctgggtttccgatgggtatcagcacccttgctccgattctacagccacttttggcctcaaccgtgttccaaatcgatcgtcaggggacgcgcgttcaagattgggatgagtgcgtggactcagccgaacatgactgttctcctgcagcctggtgtattaacctggaaggaagttacacttgtcagtgtcgtacaaccagagacgctacacccagtcgtgcagggagggcctgcgaaggtgatctggtctctccgatgggcggagggctctctgctgcaacaggcgtgaccgtgcccggtctcggcaccggaacggccgcactgggcttggagaatttcaccctctctccttcccctggatacccccaaggcacacctgccgcaggtcaggcctggaccccagagcccagtcctagacgcggtgggtccaatgtcgtgggatatgaccgtaataacactgggaaaggagtggagcaggaattacaggggaactctatcatggagcccccttcttggcctagccctacagaagatccaacgggccatttcctgtggcacgcaacacggagcaccagagagacactcttgaaccctacctggctgcggaatgaggacagcggaccgtctggcagcgtggaccttccacttacaagcactctgactgccttaaagacaccggcatgtgtccctgtttccattggcaggattatggtcagcaatgtgacatctaccggtttccaccttgcatgggaagcagatctagccatggattccacattccaactgactttgactagtatgtggagccccgctgtggttctggaaacttggaacacaagcgtgaccctgagcggcctggaacccggagtgttacaccttgtcgagatcatggccaaggcctgcggcaaagagggggctagagctcatctcaaagtgcgtacagccgctcggaaactgattggaaaagttagaatcaagaatgtgcggtattctgagagcttccgtaacgcctctagccaggagtatcgagactttctggagctcttcttcaggatggtaaggggttctctgcccgctacaatgtgccagcacatggatgctgggggagttcgtatggaggtggtgtccgtaactaatggatctattgtggtcgagtttcatttgctgatcatcgcagatgtggatgttcaggaggtgagtgcagcgttcctcacagcctttcagaccgtgccacttttagaggtaatcaggggagacacctttatccaggactatgacgagtgcgagaggaaggaggacgattgtgtaccaggtacgtcttgcaggaataccttggggtcctttacatgcagctgcgaaggcggagcccctgactttcctgtcgagtactcagaacggccatgtgagggtgattctccaggtaacgaaacctgggctactagcccagaaagaccacttacaaccgccggaactaaggcagcatttgtccagggcacatctcccaccccccagggactgccccagagactgaacctgactggggctgtccgagtgctatgtgaaattgaaaaggtggttgtcgctattcagaaaagattcctccagcaagagtccatccctgagagctctctgtacctttctcaccctagttgtaacgtatcccatagtaatggcacacatgtgttgttagaagccggatggtccgagtgtgggacactgatgcagtctaatatgaccaatacagtggtgcggacgactctgcggaacgatctcagccaggaaggcatcatacaccacctgaaaatattgtctccaatctactgtgcttttcagaacgacctcttaacatctagcggatttaccctggagtggggcgtatatacaatcatcgaagaccttcacggcgcaggtaacttcgtaaccgagatgcagttattcatcggtgattcccctatcccacagaattattccgtcagtgcctccgacgacgtccgcattgaggttggcctgtaccggcagaagagtaatcttaaggtagtgctcacagagtgctgggccacaccttcctccaatgcacgggaccccataaccttttcatttatcaacaactcctgcccggttcctaacacatacacaaacgtgattgaaaatggcaattccaacaaggcacagtttaaactcagaatcttcagtttcatcaacgacagcattgtctacctgcactgtaagctgcgggtatgtatggagtcacctggcgcaacctgtaaaataaattgtaataatttcagattgttgcaaaattctgagacatccgcaacccatcaaatgagttggggcccactgatccggtctgagggggaaccccctcatgctgaggcaggcctcggcgctgggtacgtggtgctgattgtcgtagccatattcgttctggtcgcagggacggctaccctgttgatcgttagataccagaggatgaacggtcgctacaacttcaaaatccaatccaataacttctcttaccaggtattctatgaatag

SEQ ID NO: 246376 - DNA, 4125 bp, synthetic construct
  misc_feature 1..4125: note = Description of Artificial Sequence: Synthetic coding sequence
  source 1..4125: mol_type = other DNA
atggtgtataggacccagtatctggtggtggaggtacctgagtctagaaacgtgacagactgttgtgagggatacgagcaactaggactgtattgcgtgctgcccttgaaccagtcaggtcagtttacgtcgcggcctggggcatgccccgcagagggacctgaaccttcgacctctccctgttccctggatatcgactgtcctggtttggagaaatgttgcccctggtctggaggccgatattgcatggctccagcaccgcaggcacccgagcgggaccctgttggatcctggtataacgtgaccattctggtgaaaatggactttaaggagctgcagcaggtggacccaagactgctgaatcatatgaggttgcttcacagtctcgtgacctcagccctacaaccaatggcaagcacagtgcaccatctgcactcagctcccggaaatgcctctactacggtgtcccgcttactgttggggctgccacgcccactaccggtggccgacgtctccactttactgggcgacattgccaaaagggtgtacgaggtaatatctgtccaggtgcaggacgttaacgagtgcttctacgaggaactgaatgcgtgctcagggcgagagctctgtgccaatctcgaggggtcttattggtgtgtttgccatcaggaagcgccagctactagcccccgtaagctgaatctcgagtgggaagactgtccacctgtgtccgattacgttgtcctgaacgtcaccagcgacagcttccaggtgtcatggaggctgaactctacccaaaatcacacctttcacgtgcgtgtctacagggggatggagctactgagaagtgcaagaacacagtcacaggcacttgctgttgcaggactggaggccggtgtcctgtacagagtgaagacctcttaccagggatgcggtgctgatgtttccacaaccctgactattaaaacaaatgctcaggtgttcgaagtaacaatcaaaatcgttaaccacaacctcactgaaaagctcctcaaccggtcttcagtggagtatcaggacttttctcggcagctgctgcatgaagtggagagttcatttccaccagtcgtgtcagatctctacagatccggaaagctgaggatgcagattgtgtctttgcaagctggctcggtcgtcgtcagactcaagttgacagtgcaggaccccggtttcccaatgggtatcagtacactggcacccatcctgcaaccactgctggctagcactgtgtttcagattgatagacaggggacacgggttcaagactgggatgagtgcgtggactcagcagagcacgattgctcacctgccgcatggtgtatcaacctggagggaagctatacctgccagtgtagaactactcgcgacgctactcccagcagagccggacgcgcatgcgaaggagatttagtcagccctatgggagggggtctgagcgccgcaaccggagtgaccgtgccagggcttggtacggggaccgcagccctgggattggaaaacttcactctcagtccatcaccaggatacccccagggtacaccggcagcaggacaggcatggaccccggagccaagccccaggcgtggcggatctaatgtggttggatacgatcggaataacaccggaaaaggcgtcgagcaagaggtgccctccaccgcacctggccttgggatggatcagggaagtccaagccaggttaacccttcccagggctcgccaagtcaggggagtctgaggcaggagagcaccagtcaggcctcaccgagccagcgctctacgtcacaagggtctcccagccaggtgaatccaagccaacggtccactagccatgccaatagcagccagggatcacctagccaggggtcgccaagccaagaatctccaagccagggatctacatcccaggcatcacctagccaccgaaatactattggagtgattggcaccaccagtagtcctaaagccaccggttccacccatagctttccgccaggcgctactgatggtcctttggctctgcccggacagctgcaaggcaattctataatggagcccccaagttggcctagccccactgaagatccgacgggccacttcctgtggcacgcaacacgtagcacgagagaaaccctcctcaatccaacatggctgagaaacgaggactctggtccatctggcagtgttgatttacctctgacctctactctgacagctctcaaaacacctgcctgcgtcccagtcagtattgggaggattatggtgtccaatgtcacctctaccggctttcacctggcgtgggaggctgacctcgccatggacagtacttttcagctaaccctcacttctatgtggagccccgctgtggtcctggaaacatggaacacgtcagtgaccctcagtggactggagcccggtgtgctccatctggtcgaaataatggccaaagcttgtgggaaagagggggcaagagcccacttaaaggtaagaactgcagctagaaagttaataggcaaggtgaggatcaagaatgtgagatacagcgaatctttcaggaacgcaagcagccaggagtatcgtgattttttggaactttttttcaggatggtgcgagggtcgcttcctgctaccatgtgccaacatatggacgccggaggggtgaggatggaggtggtctctgtgaccaacggctctatagtggtggaatttcacctgctcatcatcgccgacgttgatgtacaagaggtctctgccgcatttctgaccgccttccagaccgtccctctgctcgaggttatacgcggtgacacattcatacaggattacgacgaatgcgagcggaaggaagatgattgtgtaccaggaaccagttgcagaaatacattaggtagcttcacctgtagctgcgagggaggtgcgccagatttccctgtagagtactccgagcgaccttgtgaaggggattctcccggaaacgagacgtgggctacgtctccagagagaccacttacaacggctggtactaaagcggcttttgtgcagggcacatctcccaccccgcaggggctgccccagcggcttaatttaactggtgccgtccgcgtgttatgcgagattgagaaggtggtcgttgcgatccagaaaagattcctgcaacaggaatccatccctgaatcatccctttatctcagccaccctagctgtaatgtgtctcattcaaacggcactcacgtactcctggaggctgggtggagcgagtgtggaaccctgatgcagagtaatatgacaaacactgtggtcagaacaaccctacgaaatgacctctcccaagaaggcatcattcatcatctaaagattttgtcacccatatattgcgctttccagaatgacctcctgacttcgagcggattcaccctcgagtggggcgtgtatacaatcatcgaggatctccatggcgctggcaactttgttactgagatgcagctctttatcggcgactcacccatccctcagaattatagcgttagcgcctctgatgacgtaagaatcgaggttggtctctaccggcagaaatctaacctcaaagtggtacttacagaatgctgggcgacacccagcagcaatgcacgggaccctatcaccttttcgttcatcaacaattcctgtccggttccgaacacatacaccaatgttatcgagaacggcaatagcaacaaggctcaattcaagctccgtattttcagttttatcaacgattcaatagtatatctacattgcaagctgcgggtatgcatggagtcacccggagcaacctgtaagattaattgtaacaacttccggttactccagaactctgagacgtcggctacgcatcaaatgagctgggggccactgatccgttccgaaggagaacccccacacgccgaggcaggactgggcgctggctatgtcgttctgatagttgtggctatttttgtgttagtagccggaacagctacattactgattgtcaggtaccagaggatgaatggaagatacaactttaaaattcagagcaataacttcagctaccaagtcttttacgaatag

SEQ ID NO: 246377 - DNA, 3957 bp, synthetic construct
  misc_feature 1..3957: note = Description of Artificial Sequence: Synthetic coding sequence
  source 1..3957: mol_type = other DNA
atgcttcggacctcaggactcgccctgcttgccctcgtatctgccgtgggacctagccaggcaagcggattcactgagaaaggcctttccctgctggggtatcagctgtgctcccatagagtcacccacaccgtgcagaaagtagaagcagtgcagacgtcctacacatcttatgtgtcttgtggagggtggatcccgtggagacgatgtcccaagatggtatatagaactcaatatttggtggttgaggtccccgaatcccggaatgtcaccgattgctgcgaaggttacgagcagctaggcctctattgtgtgctccctctgaaccagtctggccaattcacctccaggcctggcgcttgtcctgctgagggccctgaacctagcacatcaccatgctccctagacatagattgtccaggactggagaagtgttgcccttggtccggtggacgctactgtatggccccagcgcctcaagccccagagagagaccctgtcggaagctggtataacgttaccattttagtaaagatggactttaaggagttacagcaggtggaccctaggcttttgaatcacatgaggctgctgcatagcttggtgacctccgctttgcagccaatggcctccacagtgcaccatctccatagcgccccaggcaacgcaagcacaacggtttctagactcctgttgggactacctagaccattgccagtagcggacgttagcactttactgggcgacattgcaaagagggtttatgaagtcatttccgttcaggtccaggacgtcaatgaatgcttttacgaggagttgaacgcttgttctggtagggagctgtgcgccaatctggagggaagttattggtgcgtttgtcaccaggaggctcccgctacaagtcctcgcaaactcaaccttgagtgggaagactgtccaccagtcagcgactacgtcgtgttaaacgtgacatccgatagttttcaggtcagctggcgcttgaacagtacccagaatcatacattccacgtgagggtatatagaggcatggagctcctcagaagtgctaggactcaaagccaggctctggccgtagcgggtttggaagcgggagtgctttaccgcgtgaagacttcttatcagggctgcggagcagacgttagcaccacactgacaattaagaccaatgcccaggtgttcgaggtaactataaagatcgttaatcacaatctaacagagaagcttctgaatcgcagtagcgtagaataccaagacttttcccgtcaactcctgcatgaggtggagtcatcctttccaccagtcgtttccgatctctataggagtgggaaactccggatgcagatcgtgagcctgcaagccggttcagttgttgtccgcctaaaactcacggtgcaggaccccggttttccaatgggcatatctacacttgcaccaatcctgcagccactactggccagtactgtgtttcagatagaccggcaaggaaccagagtccaggattgggacgagtgcgttgattccgccgagcacgattgtagtcctgccgcatggtgcatcaatctagagggtagttatacatgccagtgccgcactacccgagacgccacaccctcacgcgctggcagagcttgcgagggcgacctggtgagccctatgggagggggattaagcgccgcaactggcgtcaccgtgccgggactaggcacaggaaccgcagccttggggctggaaaacttcacgctgagcccatctcccggatatccccaggggacccctgcagcgggtcaagcctggactccggaaccctccccacggcgaggcggatctaacgtggtgggttacgataggaacaacaccggaaaaggcgttgaacaagagctgcagggcaattcgataatggagcccccttcatggccgagccccaccgaagacccgactggtcactttctgtggcatgccacaaggtctacgagagaaaccctgctgaaccccacatggctcagaaacgaggactctggtccttcaggctcagtcgatttgccactgactagcactttgaccgcactgaagactcctgcgtgtgtgcccgtgtccataggccgaataatggtctcaaatgtgacctcaaccggctttcatctggcctgggaggctgacctagctatggattcaacttttcagctcactttaacttcaatgtggtcacccgctgttgtcctagagacgtggaacacttcagtcaccttgtccggacttgagccaggcgttttgcaccttgtggaaatcatggccaaagcttgtggcaaggaaggggcaagagcgcatctaaaagtaagaaccgcggctaggaagctcattggtaaagtgcgcatcaagaacgtgcggtactcagagtctttccggaatgcttcctctcaagaatatagagacttcctcgagttgttctttcggatggtgcgtggctctctacccgcaactatgtgccaacacatggatgctggcggtgtgaggatggaagtagtttcggttaccaatggttctatcgtggtggagtttcatctgctgattattgccgatgtggatgtccaggaggtgtctgctgctttcctcaccgcatttcagacggtccctctgctggaagttatacggggagacaccttcattcaagactacgacgagtgcgaacggaaagaggatgactgcgtgcccggaaccagttgcagaaatacattgggctcattcacctgttcctgcgaggggggagccccagattttcctgtggaatattccgagcgcccttgtgaaggggatagcccgggtaatgaaacttgggctacctcccctgagcgaccactcaccactgccggaactaaggccgctttcgtgcaggggacatcccccaccccccagggtcttccccagcggttgaacttgactggtgccgtgcgtgtgctgtgcgagatcgaaaaggtggtggtggctatccagaagaggtttctgcagcaggagtcgataccagagtcatccttgtacctcagccatccgtcatgcaatgtgtcacacagcaatggaacacatgttcttctggaagcagggtggagtgaatgcgggacccttatgcagagcaatatgactaacactgtggtgcgtactactcttcggaacgatctgagccaggagggcataatacatcatctgaaaattctgagtccaatctattgcgcgtttcagaatgacttacttacatctagtggcttcaccctggaatggggcgtgtacacaatcattgaggatctccacggcgcagggaattttgttacagagatgcaactattcataggtgattcacccatacctcagaattatagcgtttcagcttcagacgatgtgcgcatcgaggtaggattatatagacagaaatccaacctgaaggtggtgctaaccgagtgctgggcaacaccctcttcgaacgccagggatccaattaccttcagctttataaacaacagctgtcccgtcccaaacacctacacgaacgttatagagaacggcaactccaacaaggcacagtttaagctcaggatctttagcttcataaatgattcgattgtctatctgcactgcaaactgcgagtgtgcatggagagcccaggtgcgacgtgtaaaattaactgtaacaacttccgcttgctacagaacagcgagacctctgctactcaccaaatgagttggggacccctgattcgctcagaaggtgagccccctcatgcagaagccggactcggagccggatacgtcgtgcttatagttgttgctattttcgtcctggttgctggtacagctacattgctgattgtccggtatcagcggatgaatggtcggtataatttcaagattcagagcaacaacttttcttaccaggtattttacgagtag

SEQ ID NO: 246378 - DNA, 4341 bp, synthetic construct
  misc_feature 1..4341: note = Description of Artificial Sequence: Synthetic coding sequence
  source 1..4341: mol_type = other DNA
atgctccggaccagcggcctggcactgctcgcgttagtgagcgccgtcggcccttcccaggcatctggcttcacggagaaaggcctgagtcttctggggtatcagttatgctcacaccgagtaacccatacagtccaaaaggttgaggcagtgcagacctcatacacctcatatgtatcttgcggagggtggataccttggaggcggtgtcccaagatggtgtataggacccaatacctggtggtagaggttccagaatcgcggaatgtgacagattgttgtgagggatatgaacagctcggactctattgcgtcctgcccctcaatcagagtggccagttcacatcaagacctggcgcttgccccgcagaggggccagagccgagcacaagcccatgctcgctagatatcgactgccctggtctcgagaagtgctgtccgtggtctggaggaaggtattgcatggcacctgcccctcaggcccctgagcgcgatccagtcgggagctggtataacgttacgattctggtaaagatggacttcaaagagctacaacaagtagacccaagattattgaaccatatgcgtttgctccactctctagtgacctccgcactgcagccaatggcctcaacagtgcatcatttacactctgctcccggtaacgctagtacaaccgtgtcccgcttattacttggcctgcctcgccctctgcccgtggctgacgtcagcactctgcttggggatatcgccaagagagtgtacgaagtgatcagcgtccaggtgcaggatgtaaatgagtgcttttacgaggagcttaacgcctgtagtggcagagaactatgcgctaacctagaaggcagctactggtgtgtctgccatcaggaagcccctgctacttctccacgcaagctgaacctggaatgggaggattgcccacctgtctctgattacgtcgtgttaaacgttactagcgactcttttcaggtcagctggaggctcaatagcacacagaaccacacttttcatgttagagtatatagaggcatggagcttcttcggtctgctcgaacccaaagtcaggcactggcagtggcaggattagaggctggtgtcctttaccgggtcaaaacctcttatcagggatgcggagctgatgtttctacaaccctgaccattaaaaccaatgcccaggtcttcgaggtaactatcaaaatcgttaatcacaatctgaccgagaagctactgaacaggtcctcagttgaataccaggacttcagccgacagctcctgcacgaggtcgagtcctctttcccacccgtggtctctgacctgtatcgcagcggaaaacttcgaatgcagattgtgtcactgcaagccggatcagtggtggtgcgattgaaactgaccgtccaggaccctgggttcccaatgggtatcagcacgcttgcgccaattctgcagcccctcctcgcaagcactgtgtttcaaatcgaccggcaggggactcgggtccaagattgggacgagtgcgtcgactctgctgagcatgattgtagtccggcagcatggtgcattaatctcgaagggtcttacacctgtcagtgtagaacaacacgggacgccactccaagcagagctgggagagcatgcgaaggcgatcttgtatcaccaatgggaggcggtctgtctgccgcaacaggcgtcacagtacctgggctcggcacagggactgcagcattgggcctggagaacttcacgttgtctccaagccctggttatccccaggggacgccggcagccggtcaggcgtggacacccgaaccttcaccacgcagggggggtagtaacgtggtaggttacgatcgcaataacactggaaaaggagtcgagcaggaggtcccatctactgctcccggattgggtatggaccagggatccccatcacaagttaatccctctcagggatcgccttcacaaggatctctaagacaggaatccacgtcccaggctagcccatcccagaggagcaccagtcagggatcgcccagccaagtgaatccgtctcagcgctctacttctcacgcaaactcttcgcagggatccccaagccaaggatcaccatctcaggaaagcccatctcagggcagcacgtcacaggccagcccctctcatcgcaatacgattggcgtgatagggacgactagcagccctaaagcgactgggtcaacacatagcttccctccaggcgctaccgacggccctctggcattacccggacagctacagggcaactctataatggagcctccatcatggccgagccctacagaagatccaaccggtcacttcctctggcacgccacacgttctacgagagagacccttctaaaccctacttggttgcgaaacgaagacagtggacccagcgggagcgtggacctgccgcttaccagcacgctcacagctctgaagacacctgcgtgtgtcccagtgtctattgggagaattatggtgtcaaatgtgacaagcacaggatttcacctagcatgggaggctgatctcgctatggatagtacatttcagctgacactgaccagcatgtggagccccgctgtagtcctcgagacctggaatacttctgtgaccctgtcaggtctggaaccgggtgtgctacacctcgtggagatcatggctaaagcatgtggcaaagagggcgcaagggcccacttgaaagtgagaactgccgcaaggaagctgatcggcaaggttaggatcaagaacgtccgctactccgaatcgttcagaaatgccagctcacaggaatatcgcgatttcctggagctgtttttcagaatggtgcgaggcagcttgccagcgaccatgtgccaacacatggatgccggaggtgtgcgtatggaagtagtttccgtaaccaacggctctatagttgtggagtttcatttactgatcatcgccgacgtggatgtccaggaagtctccgctgcgtttctgactgcatttcagaccgtcccattattggaggtcatcaggggcgacacgttcatccaggactacgatgaatgtgagcgcaaagaggacgactgcgttcctggcacttcatgtagaaacaccctcgggagctttacctgctcctgcgagggcggtgcaccggacttccccgtcgagtactcagagcggccttgtgaaggggactcgccgggaaatgagacatgggcgacatctcctgaacgcccactcacgaccgctggaacaaaggccgcatttgtgcaaggtaccagccctactccgcagggcctgcctcagcggcttaacctaacgggagcagtgagggttctatgcgagatcgaaaaggtggtcgtcgcgatacagaaaagatttttgcagcaggagtccataccagaatcttcactgtacctgagtcatccttcatgcaatgtgtcacattcaaacggtacccacgtgctcttggaggctggctggtcagagtgtggaacacttatgcagtcaaatatgacgaatacagtagtgaggacaacccttcggaatgacctgagccaggagggcataatccaccatctcaaaatcttaagccccatttattgcgcattccagaacgacctgctaacatctagtgggtttaccctcgagtggggggtgtatactattattgaggacttgcatggagccggaaactttgtgactgagatgcagctcttcattggagattcgcccattcctcagaactactcagtgagcgcctccgatgacgtcagaatagaagttggactataccggcagaaaagcaacctcaaggtggtgctgaccgaatgttgggccaccccatcgtctaacgccagggatcccatcacgttcagcttcataaataattcctgtcccgtgcccaatacctacaccaacgtcattgagaacggaaactccaataaggcacagttcaagctaaggattttctccttcattaacgatagtatcgtctacctacattgcaagctgcgcgtgtgtatggagagtcctggggctacctgtaaaatcaattgtaataactttaggctcttgcaaaacagcgaaacctctgcaactcatcaaatgtcctggggtcctcttatcaggtccgagggggagccaccccacgctgaagccggtcttggagccggatacgtcgtgctcatcgtggtagccatatttgtgcttgtggcaggcactgcgacactgctgatcgtgaggtaccagagaatgaatggtaggtataacttcaaaatccaatcaaataatttctcgtaccaggtgttctacgaatag

SEQ ID NO: 246379 - DNA, 234 bp, synthetic construct
  misc_feature 1..234: note = Description of Artificial Sequence: Synthetic coding sequence
  source 1..234: mol_type = other DNA
cctgtcggatcctggtataatgtgacaatcctagttaaaatggacttcaaggagctgcagcaggttgacccaagactgctcaaccacatgaggctgctccattcactgatgagtatgagcgtttccatgcgctccagcatgcccgctctcgaggggaactgcgcacagacctggagggcccgaacaggcgcatcagttactcgcaaacttcagccacgtctccacggctcctag

SEQ ID NO: 246380 - DNA, 411 bp, synthetic construct
  misc_feature 1..411: note = Description of Artificial Sequence: Synthetic coding sequence
  source 1..411: mol_type = other DNA
atgcagttgttcattggtgattcccccatacctcaaaactattcagtgtccgcttccgatgacgttagaattgaggtgggtttatacaggcagaaaagtaatctgaaggtcgtcctgactgagtgctgggcgactccttcatcgaacgctcgcgaccctatcaccttttcgttcatcaacaactcctgccccgtccctaatacttatacaaatgtgatcgaaaatggaaattccaataaagcccagttcaagctgcggatcttcagctttatcaacgattcaattgtctatttacactgtaagctccgcgtgtgcatggaaagccctggtgccacatgtaagatcgcagccttgggtcgccgtacccatgtggactggtgggcctttccgatctcacagtggttgtcatag

SEQ ID NO: 246381 - DNA, 1221 bp, synthetic construct
  misc_feature 1..1221: note = Description of Artificial Sequence: Synthetic coding sequence
  source 1..1221: mol_type = other DNA
atgaaaaaaaagcaacagcaccctggaggcggagctgatccttggccacatggggcacccatgggaggcgcaccccctggcctgggcagttggaagaggcgtgtccccttattacctttcctgcggttcagcctccgggactatggcttctgcatggccaccctactcgtgttctgtctcggcagcctgctttaccagctgtctgggggaccacccaggtttctcctcgacctcaggcagtacctgggaaactctacttatctcgacgaccatggcccacctccatcaaaagtcctgccatttcctagccaggtggtctacaacagggttggtaagtgtggctcgcgcacagtggtcctgctcttgagaattttgtctgaaaagcatgggttcaacctagtaacctctgacatccacaataagacccggctcacgaagaacgaacagatggagctgatcaagaacatttccaccgctgagcagccatatctgtttacgaggcacgttcatttcttaaatttttctaggtttggtggcgaccagcccgtttacatcaacatcatacgggatcccgtgaatcgattcctaagcaattattttttccgcagatttggtgattggaggggcgagcagaaccatatgattcgcactcctagtatgcgccaagaagaaaggtacctggacatcaatgagtgtattctggagaactaccccgaatgttccaatccgagattattttacatcatcccctatttttgcggtcagcaccccaggtgcagggagcccggtgaatgggctctggagcgggcaaaactgaatgtcaatgaaaatttcttactggtagggattctggaggaactggaagatgtcctcttgttgcttgagcggttccttcctcattatttcaagggtgtactctcaatctacaaagaccctgagcatcgcaagctgggaaatatgactgtaactgttaaaaaaacagtgccaagccccgaagcagtgcagatcttgtaccagcggatgcgatatgagtatgaattctaccattacgtgaaggagcaatttcacctgctaaaaagaaagttcggtctgaagagtcatgtttctaaaccacctctgagaccccactttttcatccccacaccactggagactgaggagccaattgatgacgaggaacaggacgatgagaaatggcttgaagatatctataagaggtag

SEQ ID NO: 246382 - DNA, 2274 bp, synthetic construct
  misc_feature 1..2274: note = Description of Artificial Sequence: Synthetic coding sequence
  source 1..2274: mol_type = other DNA
atggtgcccgatacggcttgcgtgctcctactgaccctggcggcactgggcgcttccggtcagggtcagtccccactcgggagtgacctcgggccacagatgctgcgagaactccaggagactaatgccgctcttcaagacgtgagggagctccttcgccagcaggttcgcgagattacattccttaagaatacagtaatggagtgcgatgcctgcggcatgcagcagtccgtgaggaccggcctccccagtgtgcggccactgttgcactgtgcgcctggattttgtttccccggagtggcgtgcattcagacggagtcgggcgctcggtgtggtccctgcccagcagggtttacaggcaatgggagtcactgtacagacgtaaacgagtgcaacgcccatccgtgtttccctagggtgcggtgcatcaacacttcaccgggtttccgctgtgaagcatgtccaccagggtattctgggcctacccatcagggggtgggcttagcgtttgccaaagcaaataaacaggtgtgcacagatataaacgagtgcgaaactgggcaacacaattgcgtgcctaactctgtgtgtataaacacaagaggttccttccagtgtgggccttgccagcctgggtttgtgggggatcaggcctcaggctgccagcgacgcgcacagaggttttgtcctgatggctcgcctagtgaatgccacgaacacgcagattgcgtcctggaacgggacggaagccgttcctgtgtgtgcgccgttgggtgggccggaaatggaatcctgtgcggcagggacaccgacctggatggatttccagatgagaaattacgctgccccgaacgacagtgcaggaaggataactgcgtgacggttcccaactctggtcaggaagatgtcgatcgggacggcatcggcgacgcgtgtgatccagacgccgatggagacggcgttccgaatgagaaggacaactgccctctggttcgcaatcctgaccaaaggaatacagatgaagataagtggggcgacgcctgcgataactgtcgctcccagaagaatgacgatcaaaaagacactgaccaagatggcaggggggatgcctgcgacgatgatattgatggcgatcgtattaggaatcaggctgacaactgcccaagggtgcccaattccgatcagaaagattctgacggtgacgggattggcgacgcttgcgataattgtccacagaagtctaacccagaccaggcggacgtagaccacgattttgtgggggatgcatgtgattcggatcaagatcaggatggcgatggccaccaagattctcgggacaattgcccaaccgtcccaaatagcgcccaggaggatagtgaccacgacgggcagggtgacgcgtgcgacgatgatgacgataatgacggcgtgcccgacagccgcgacaattgcagattggtccctaatcctggacaggaggatgccgatcgggatggggtaggggatgtgtgccaggacgactttgacgcagacaaggtcgttgataaaattgacgtgtgtcccgagaacgcagaagttaccctgacagactttcgggcttttcaaaccgtggtgcttgaccccgaaggcgacgcccagatagaccccaactgggttgtcctgaatcagggcagggaaatcgtccagactatgaatagcgatccaggtttggctgttggatatacagcctttaacggtgtagattttgagggcaccttccacgtgaatactgtgactgatgacgactacgctggctttattttcgggtaccaggactcgagtagcttctacgtcgtgatgtggaagcagatggagcagacttactggcaagccaaccctttcagggctgtcgcagagcccggtattcagttgaaggccgtcaagtcttccactggcccaggcgaacagttaaggaatgctttgtggcatacgggtgacacagaatcgcaagtgaggctgttgtggaaggaccctagaaatgtgggatggaaagacaaaaaatcatatcgttggtttttgcagcaccggcctcaggtgggatatataagggtgcggttctatgaaggtcctgagctcgtcgcggactcaaacgtagttttagataccacgatgaggggcggacgtctgggggtgttctgcttcagccaggaaaacatcatctgggcgaatctccggtaccgctgcaacgatactatcccggaagactatgaaacccatcaacttagacaggcctag

SEQ ID NO: 246383 - DNA, 822 bp, synthetic construct
  misc_feature 1..822: note = Description of Artificial Sequence: Synthetic coding sequence
  source 1..822: mol_type = other DNA
atggcgtccgctgcagccgcagaagccgaaaaggggtcacccgtggtggtgggactattggtggttgggaatattataatcttactcagtggcctaagcctttttgctgagaccatctgggtgactgctgatcagtaccgggtgtacccactcatgggcgtgtctggcaaagatgatgtcttcgccggagcctggatcgctattttttgcggattctcattcttcatggttgcctctttcggtgtgggcgctgcactttgtcgccgtcgctccatggtccttacttatctggttcttatgctgattgtctatattttcgagtgtgcaagctgcatcacgtcctacacccatcgggattatatggtgagcaacccctctttaatcaccaagcagatgctcacattctattctgcggacaccgatcaaggacaagagctgacccgtctctgggaccgagtcatgatagaacaagagtgctgcgggacgagcggcccaatggactgggtgaatttcacctcggcattccgtgctgccacccctgaagtggtgtttccatggccccctctgtgttgccgccgtactgggaactttattcccttaaacgaagagggatgccggttaggacatatggactacttgttcaccaaagcaggagtgcaatggcacaacttaagttcattgcagcggcttcccccaggcttcaagggattttcacatctctctttccaatccagctgggactatagggctgccagcaacactagcgctaccccatcgacagcaacccgaggagtttcacggggactgggtctcccaagctag

SEQ ID NO: 246384 - DNA, 783 bp, synthetic construct
  misc_feature 1..783: note = Description of Artificial Sequence: Synthetic coding sequence
  source 1..783: mol_type = other DNA
atggcaaaggataacagtactgtgcgctgctttcagggacttcttattttcgggaacgtaatcattggctgctgtggaattgctcttacagccgaatgcatcttcttcgtttccgatcagcactctctgtacccccttctcgaggcgaccgataacgatgatatctacggcgctgcctggattggcatcttcgtcgggatctgtttattctgtctgtcagtgctgggtatcgtaggtatcatgaagtcttctcgcaagatcctcttagcttactttattctcatgtttatcgtgtacgccttcgaagtcgcctcctgtatcacggccgctactcagcaggatttctttacaccaaacctttttctgaagcagatgctggagaggtaccaaaacaactccccccctaacaacgatgaccagtggaaaaataacggcgtgaccaagacatgggaccgcctgatgttacaggataattgctgtggtgtgaatggcccttccgactggcaaaagtacactagcgcttttaggaccgagaacaatgacgccgattacccatggccaaggcagtgctgcgtgatgaataatttaaaggagcccctgaacctcgaagcttgcaagttgggagtccccggtttttatcataaccaggggtgctatgagttgatttcaggtcctatgaacaggcatgcgtggggtgtggcatggtttggattcgccatcctctgctggactttttgggtcctgttgggaacaatgttttactggagcagaatcgagtattag

SEQ ID NO: 246385 - DNA, 510 bp, synthetic construct
  misc_feature 1..510: note = Description of Artificial Sequence: Synthetic coding sequence
  source 1..510: mol_type = other DNA
atggctaaggataattccactgtgcggtgttttcagggtcttcttatctttgggaatgtgataatcggctgctgtgggatcgctctgaccgccgaatgcatatttttcgtgtcagatcagcattctctttaccctctgctcgaggccaccgataacgatgatatatacggggcagcttggatcggcatctttgtaggaatatgtcttttctgtttgtcggtgcttgggatcgtcggaattatgaagtcgagcagaaagatccttctggcttatttcattctaatgttcatcgtttacgcatttgaggtcgcttcttgcattacagcagcaacccaacaggacttttttactcctaatctcttcctcaaacagatgctggagaggtatcagaacaattctcctccgaataacgacgaccaatggaaaaacaacggtgtaacgaagacctgggaccgcctgatgttgcaggacaactgctgtggggtcaacggcccttccgattggcaatag

SEQ ID NO: 246386 - DNA, 570 bp, synthetic construct
  misc_feature 1..570: note = Description of Artificial Sequence: Synthetic coding sequence
  source 1..570: mol_type = other DNA
atggcgaaggacaactcaactgtgcggtgtttccaaggactgttaatttttggaaatgtgattattgggtgctgtggaatagctcttacagccgagtgcatattctttgtaagtgaccaacatagtctgtatccccttcttgaagcaaccgacaacgacgacatctatggagccgcttggattggcatcttcgtagggatctgcctcttctgcctgtcagtcctgggaatcgtggggatcatgaaaagctcccggaaaatcctgctcgcctacttcattctgatgttcatcgtgtacgctttcgaggttgccagctgcatcacagcagctacccaacaggacttctttacacctaacctgtttttaaagcagatgcttgagcgctaccaaaacaactcacctcctaacaacgatgatcagtggaaaaataatggcgtgaccaagacctgggaccgactcatgctgcaggataattgctgcggggttaacggcccatccgattggcagaagtacacctccgcttttcgcaccgagaataacgacgccgactacccttggccccgtcagtag

SEQ ID NO: 246387 - DNA, 555 bp, synthetic construct
  misc_feature 1..555: note = Description of Artificial Sequence: Synthetic coding sequence
  source 1..555: mol_type = other DNA
atggctcctttgctgcccataaggaccttgcctctaatcttgatcctgctcgccctgctctcacctggcgctgcagacttcaacattagttcattgagtgggcttttgtcacctgctttgacagagagcctgctggttgcacttcccccatgccaccttaccggagggaatgctacactgatggtgagacgagctaacgacagcaaggtcgtcactagttcattcgtggtgccaccctgccggggacgcagggagttagtgtccgtagtagattcaggggctggttttacagtgacaagactgtctgcctatcaagttaccaatctcgtccctggaacaaagttttatatctcgtatctggttaaaaagggcacagcaacagagagcagtagggagattcctatgtctaccctccctagacgtaacatggagtctataggtttggggatggcgcgaactgggggtatggtcgtgattactgtgcttcttagtgtcgctatgttcctcctggtgctaggcttcatcatcgccctcgccctgggatctcgaaagtag

SEQ ID NO: 246388 - DNA, 333 bp, synthetic construct
  misc_feature 1..333: note = Description of Artificial Sequence: Synthetic coding sequence
  source 1..333: mol_type = other DNA
atgagcatgaccgatctgctgaacgccgaggatataaagaaggctgtgggggctttttcagctacggactcattcgaccataaaaagttctttcagatggtgggtctgaagaagaagtccgcagatgacgtgaagaaagtctttcatatgttggataaagacaagtccggctttattgaagaggacgaattgggcttcatcctcaaaggcttttcgcccgatgcacgagacctgagtgctaaggaaacaaaaatgttaatggccgctggagacaaagatggcgacggcaagattggcgtggacgagttcagcacactagtggcggaatcgtag

SEQ ID NO: 246389 - DNA, 501 bp, synthetic construct
  misc_feature 1..501: note = Description of Artificial Sequence: Synthetic coding sequence
  source 1..501: mol_type = other DNA
atgcctccactgtgggctctcctcgccctgggttgcctgcgctttggcagcgctgtgaatttgcagccgcagctagccagtgtcaccttcgctacaaataaccctactctgacgacagtggcactcgaaaagccattatgtatgttcgatagtaaggaggccctgactggcacgcatgaggtgtacctgtacgtgttagtggattctgttactccctattctaccatcgacacctggcccggtagaaggtccggcggtatgatcgtaataaccagcatactaggatcactccctttcttcttgctggtggggtttgccggtgccattgcactgtctttggtggacatgggcagttctgatggtgagaccacccatgactcccaaatcactcaggaggccgtgcccaagtctctcggggcaagcgaatctagttacactagcgtgaacaggggcccaccattagatagagccgaggtgtactcaagcaagctgcaggactag

SEQ ID NO: 246390 - DNA, 963 bp, synthetic construct
  misc_feature 1..963: note = Description of Artificial Sequence: Synthetic coding sequence
  source 1..963: mol_type = other DNA
atggggctgccttgggggcagccccatcttgggttacagatgctgctcctggcgctcaattgtctgcgacccagcttgagcctcggcgaatggggctcttggatggacgcttcttctcagactcagggtgcaggaggacctgcaggagttatcggaccatgggctcccgcacccctgaggctgggggaggccgcacctgggactccgactccggtgtccgtcgctcatctgctgtcgcccgtggctaccgaattagtgccctacacgccacaaatcacggcctgggacttggaaggcaaagtgacagctaccactttctccctagagcagcccagatgcgttttcgacggactggccagtgcctctgacacagtatggttagttgtcgcattttctaatgcctcccgtggcttccagaatccagagacgttggcggacatcccagccagcccacaactactcactgatggacattatatgacccttcccctatcaccagaccaactgccatgtggagacccaatggctgggtcaggtggagctccagtacttcgggtgggacatgaccatggctgtcatcagcaacctttctgcaacgctcccctccccggtcctggcccatatagagaagaccctaggatccatcgccatctagctcgggcagccaagtggcagcacgacagacactacctgcatcccctgttcagtggacggccacccaccctaggcctgctgggctcactctatcacgcccttctgcagccagtggtggctgggggaggtcctggcgctgccgcagaccgtctgctgcacggccaggccctccatgatccgcctcaccctactcagcgcggtcgtcacaccgctgggggtctccaagcatggccgggaccacccccacagcctcagccccttgcatggcccctgtgcatgggcctgggtgagatgggacgctgggagtag

SEQ ID NO: 246391 - DNA, 831 bp, synthetic construct
  misc_feature 1..831: note = Description of Artificial Sequence: Synthetic coding sequence
  source 1..831: mol_type = other DNA
atggggttaccatgggggcaaccacacctgggtctacagatgttgctactggcactgaactgcttgcgcccaagcctgtccctggagctggtcccttacacgccgcagattaccgcatgggatctggagggaaaggtcacagcaacgacattcagtctggagcaacctagatgcgtgtttgacggtctggcctctgcgagtgacacagtgtggctcgtggtcgcttttagcaacgcctcaaggggctttcagaaccccgaaacactcgccgacattcctgcttctcctcagctacttactgatggacactatatgactctaccactgtcccccgaccagttgccatgcggggacccaatggccggatcaggcggtgctcctgttttgcgggtgggacacgaccacggctgtcatcagcaaccattttgcaatgctcctttacctggccctggcccataccgcgttaaatttctccttatggatacccgtgggagcccccgtgccgaaacaaagtggtctgaccccattactctacatcagggcaagacacccggaagcatagatacctggcccggaaggcgctctggctccatgattgttatcaccagcattctcagtagtctggccggattgttgctcttggcctttttagccgcttctactatgcgcttctccagcctgtggtggcccgaggaagcgcctgagcaacttcgtataggttctttcatgggtaagagatatatgacccaccacattcctccccgtgaagctgccacactgcctgtgggatgtaagccgggtctggatcctctaccttccttgtccccttag

SEQ ID NO: 246392 - DNA, 963 bp, synthetic construct
  misc_feature 1..963: note = Description of Artificial Sequence: Synthetic coding sequence
  source 1..963: mol_type = other DNA
atgggtttgccgtggggacagccacatctcgggttgcaaatgctgctgctggcattgaattgcctccgaccatcactgagcctgggcgaatgggggagttggatggacgccagctctcagacccagggggctggtggacctgcgggtgtgataggcccttgggcacctgccccactccggttgggcgaggccgctcccggaacccctaccccagtgtctgtggcacacctgctctcccccgttgcaaccgaactagtgccctacacgccccagataactgcgtgggacttggaggggaaagtgaccgcaaccacgtttagccttgagcagccccgatgcgtttttgacggattagccagtgccagcgacactgtgtggcttgtcgttgctttttcaaatgcctcccgaggattccagaatccagagaccttggccgacatccctgctagccctcagctactgacggatggacattacatgaccttgccactgtcccccgaccagttgccttgtggagatcctatggctgggtcaggcggagcccctgttctaagagtgggacacgaccatgggtgtcaccagcaaccgttttgtaatgcaccactcccaggcccaggtccttacagagaagatccgagaattcaccgacacctggctagagcggctaaatggcagcatgaccgtcattatttgcacccgctattctccggacgtccacccactctggggctgttgggatcactgtaccacgccctactgcagccagtcgtggctgggggtggcccaggagccgctgcagataggctcctccacggacaagctctgcacgacccccctcaccccactcaaagaggtaggcataccgccggaggcctccaagcctggccaggacctcctccacagccccaacctttagcctggccactctgcatggggctcggcgagatgggtagatgggaatag

SEQ ID NO: 246393 - DNA, 831 bp, synthetic construct
  misc_feature 1..831: note = Description of Artificial Sequence: Synthetic coding sequence
  source 1..831: mol_type = other DNA
atggggctgccctggggacagccacacttagggttacagatgcttttgctcgcactgaactgcctgcggccttcattaagtttggaactggtaccgtacactccccaaattacggcgtgggacttagagggcaaggtcaccgctacgacctttagcctcgagcagccacggtgcgtatttgacggcctggcaagtgcctccgacactgtgtggttggtcgttgctttctctaatgcatctcgaggatttcagaatcccgaaaccctggctgacatccctgcatctccccaactgctgaccgatgggcattatatgacccttcccctgtccccagaccagctgccctgtggggatccaatggcgggaagcggtggcgcaccagtgctgcgggtgggacacgaccacggatgtcatcagcaacctttttgtaatgcccctctgcccggtccaggaccctatagggtcaagttccttctgatggatactagagggagcccaagagctgagactaaatggtcagacccaatcactctgcatcagggtaaaactcccggaagcattgatacatggccgggtcgtcgcagcggcagtatgatcgttatcacatcaatactgtccagcctggctggtctacttctcctggcctttctggctgcatcgaccatgcgtttctcgtcactgtggtggcccgaagaggctccagaacagctgcgtattggttctttcatgggaaaaagatatatgacacaccacataccccctcgagaagcagcaactctcccagtgggctgtaagccgggtctggaccctctgcctagtctttcaccctag

SEQ ID NO: 246394 - DNA, 963 bp, synthetic construct
  misc_feature 1..963: note = Description of Artificial Sequence: Synthetic coding sequence
  source 1..963: mol_type = other DNA
atgggacttccctgggggcagccgcacttaggactgcaaatgttgttgctggccttgaattgcctgaggcctagcctcagcctgggagagtggggatcttggatggacgctagcagtcagacacagggtgcaggcggtccggcaggggttatcgggccatgggctcccgcacctctgaggctcggggaagctgcacctgggacacccactcccgtaagcgtggcccacctgctgtcccccgtggctaccgagttggtcccctacaccccccagataacagcgtgggacctggagggcaaggtcaccgcgactacctttagcttagagcagccgcgttgtgtttttgacggcctggcaagcgctagcgataccgtttggctggtggtcgcattctctaacgcatctcggggattccagaatcctgagacactcgccgacattcccgctagcccccaactgctaacagatggtcactatatgaccttaccactgtctcccgatcaactgccatgtggcgaccctatggcaggtagcgggggagctccagtgttgagagttggccacgatcacggttgtcatcagcagccattctgcaacgctccgctgccagggccaggcccttatcgcgaggaccctagaattcaccgacatctggccagagccgctaaatggcagcacgatagacactacctgcacccattgttcagcggcaggcccccaactctgggactccttgggtccctttaccacgctctattgcagcccgtggttgcaggcggtggtccaggcgctgcagccgacaggctcctgcatgggcaggcactgcacgacccaccacaccccacgcagcggggtcgacataccgccggtggacttcaagcttggcctggtcctcccccacagccccagccgctggcctggcccctttgcatgggactgggcgagatgggacgctgggagtag

SEQ ID NO: 246395 - DNA, 1104 bp, synthetic construct
  misc_feature 1..1104: note = Description of Artificial Sequence: Synthetic coding sequence
  source 1..1104: mol_type = other DNA
atggaagcaaacggactcggaccacagggatttcctgaactcaagaacgacaccttcctgagagcagcttggggcgaagagaccgactacacccctgtgtggtgtatgcgccaggctgggaggtacctcccagaatttcgggagacacgcgcagcccaggacttcttctccacttgtagaagcccggaagcatgctgtgaactgaccctgcagcccttgcgaaggttcccactggacgccgcaattatctttagtgatatcctagtggtgcctcaggctttaggtatggaggtaaccatggtccccggaaaaggacccagttttccagagccgcttagggaagagcaagacctcgagagattaagggatcccgaagttgtggcaagcgagctcgggtacgtgtttcaggccattacattaacccgccagaggctcgctgggagagtgcctctcatcggcttcgcgggtgctccctggactctgatgacttacatggtcgaaggaggaggttcttctacaatggcccaagccaaacgttggctctaccagagacctcaagcttcccatcagctcctgcggatcctgacggacgccttggttccatacctcgtaggacaggtggtggcgggagcccaggccctgcagctgtttgagtcccacgccggacacctcggtccgcagttgttcaacaagtttgccctcccctatatccgagacgtggcaaaacaggtgaaggcccgtttaagggaagctggcctcgctcccgtgcccatgattatctttgcaaaggacggtcattttgccctggaagaactcgcccaggcaggttatgaggtagtaggattggactggactgttgctccaaaaaaggcccgagagtgcgtcggtaaaaccgtgactttacagggtaacctcgatccatgcgccctttacgcaagtgaggaggagataggccagctggtgaagcaaatgctggacgacttcggaccccatagatacatcgctaaccttgggcacgggctgtacccagacatggatcccgagcacgtgggggcatttgtcgatgctgtgcacaagcatagtcgcttgctgcgtcagaattag

SEQ ID NO: 246396 - DNA, 582 bp, synthetic construct
  misc_feature 1..582: note = Description of Artificial Sequence: Synthetic coding sequence
  source 1..582: mol_type = other DNA
atggaggcaaatggacttgggcctcagggattccctgaactgaaaaacgatacttttctgcgcgcagcttggggagaagagacagactacactcccgtgtggtgcatgcgtcaggccggaaggtacctacccgagttccgggaaactagagcagcccaagatttcttttctacctgtaggtcacccgaagcctgttgcgagctgactctgcaggctttggggatggaggtgactatggtgccaggtaagggaccatccttcccggagcctctacgggaagaacaggatctcgagaggttacgggaccctgaggttgtggcttctgaactggggtacgttttccaggcaatcactcttaccagacagcggctggctggacgtgtgcccctgattggctttgctggagcaccctggaccctgatgacatatatggttgaaggcggaggcagctctactatggcacaagccaaaaggtggttgtaccaaagacctcaggcatcacaccagctcttgaggattcttacagatgccttggtcccatacctggttgggcaggtggtggctggcgctcaggctctgtag

SEQ ID NO: 246397 - DNA, 684 bp, synthetic construct
  misc_feature 1..684: note = Description of Artificial Sequence: Synthetic coding sequence
  source 1..684: mol_type = other DNA
cctcaaggcttccctgaactgaagaacgacacgtttctgagggccgcttggggcgaggagaccgactacactcctgtgtggtgcatgcgccaggccggacggtatctcccagagtttagagaaacccgggcagctcaggattttttttctacatgcagatcccccgaggcgtgttgcgagctaacattacagccattaagaaggtttcccctggacgccgcaattattttcagcgatattctcgtcgtgccccaagctttgggcatggaagtgacaatggtccccggtaaagggccttcctttccggagccgttgcgggaggaacaggatctcgaaaggctgagggatcccgaagtggtcgcgagcgaactcggatacgtcttccaggccattaccttaacacgacaacgcctggccggtcgggtcccccttattgggttcgcgggagcgccagccttgcagctgttcgagtctcatgccggacacctcggaccccaattatttaataaattcgctctgccttatattcgggatgtcgctaagcaggtcaaagccaggttgcgagaagccggtttggccccagttcccatgattatttttgcgaaagatgggcactttgcgctggaagagttggcccaggccggatatgaagtagtgggactggattggactgtagccccttag

SEQ ID NO: 246398 - DNA, 687 bp, synthetic construct
  misc_feature 1..687: note = Description of Artificial Sequence: Synthetic coding sequence
  source 1..687: mol_type = other DNA
taaccacagggtttcccggaactgaaaaacgatacattcctccgggctgcttggggggaagagaccgattacactcccgtttggtgtatgcgacaggccggaagatatctgccagaatttcgtgagacccgtgctgcccaggacttcttttccacctgtagaagcccagaagcttgttgtgagctgacactccagccattacgcagattcccattagatgccgcaatcatcttttcagacatcctcgtggtcccacaagcgttaggcatggaggtcacgatggtgcctggcaaaggcccatcttttcccgagccgctgcgggaggagcaagacctggagaggttaagagatcccgaagtcgtggcttccgagctcggatacgtcttccaggccattacactgactagacaacgcctggctgggagagttcccctcatcgggttcgccggagctcccgcactccagttatttgaaagtcatgctggccacttaggtcctcaactatttaataaattcgcgctgccatatatccgagatgtagcgaagcaggtgaaagctcgactccgcgaagccggtctggcccctgtacccatgatcatatttgctaaggatggccacttcgccctggaagagctcgctcaggcaggatacgaagtggtgggcctggactggacagtggccccttag

SEQ ID NO: 246399 - DNA, 582 bp, synthetic construct
  misc_feature 1..582: note = Description of Artificial Sequence: Synthetic coding sequence
  source 1..582: mol_type = other DNA
atggaggccaacggattgggccctcaagggtttccggagcttaaaaatgatacattcctgagagctgcctggggggaagaaacagattacacacccgtgtggtgtatgaggcaggccggtagatacctgcccgagttcagggagacccgcgctgcgcaagacttcttctccacttgccgttcacctgaggcctgctgtgagttaaccttgcaggctcttggaatggaagttaccatggtgccaggtaaaggtccaagctttcctgagcctctgcgcgaggagcaggacctcgaacgcctgcgcgaccctgaagttgtggcttcagaactgggctacgttttccaggccatcactctcactaggcagcgcctggctgggagagtgccactgatcggcttcgcgggagctccttggacccttatgacctacatggtcgaaggagggggaagttctactatggcccaggccaagcgatggttataccagcggcctcaagcatctcatcagttgctgcgcatactaaccgacgccctggtaccttacctggtgggacaggtggtcgcgggagcgcaggcactgtag

SEQ ID NO: 246400 - DNA, 402 bp, synthetic construct
  misc_feature 1..402: note = Description of Artificial Sequence: Synthetic coding sequence
  source 1..402: mol_type = other DNA
atgaaggtcctgctgcttaaggacgcaaaggaggatgactgtggacaagacccttacatccgtgaactggggctgtacggactcgaggcaaccctgattccagtgctgagctttgagtttctgtccctgccgagcttctctgagaagttgagccacccagaggattacggaggactaatcttcacaagcccgcgagctgtggaagccgcagagctgtgcttggagcaaaacaataagacagaggtctgggagcggtctcttaaagagaaatggaacgccaaaagtgtttacgtggttggcaatgctacagctagtttggtatccaaaataggtctggacactgagggagaaacctgcggcaatgctgagaagctggcagagtatatttgctcatcaaaatag

SEQ ID NO: 246401 - DNA, 420 bp, synthetic construct
  misc_feature 1..420: note = Description of Artificial Sequence: Synthetic coding sequence
  source 1..420: mol_type = other DNA
atgaaagttctgcttctcaaagatgccaaggaggacgattgtgggcaagacccttacattagggaacttgggctgtacggactcgaagctactctcatcccggtgctctcatttgagttcctctctcttccttctttctcagagaagttgagtcaccccgaagattatggaggactgattttcacgtctcctagggcagtcgaggccgcagagctctgtctggagcagaataacaagacagaggtttgggaacgaagcctgaaagagaagtggaatgctaagagcgtttacgttgtcggcaatgccacagcctcgcttgtatccaagattggcctggacaccgagggtgaaacgtgcggcaatgccgagaagctcgcagagtacatttgcagttccgaagaagtcaaaggtatcttctag

SEQ ID NO: 246402 - DNA, 798 bp, synthetic construct
  misc_feature 1..798: note = Description of Artificial Sequence: Synthetic coding sequence
  source 1..798: mol_type = other DNA
atgaaggtgctcctcctcaaggatgctaaagaagatgactgtggccaggacccctacatacgggagcttggactctacggcttggaggccactctcatacctgtgcttagtttcgaattcctttcactccctagcttcagtgagaaattatcgcacccagaagattatggcggactgattttcacttccccgcgagccgtggaggcagctgagttgtgtctggagcagaataacaagaccgaggtctgggagcgatcccttaaagagaagtggaacgctaagagcgtttatgtggtcggtaacgctaccgcttcattggtatccaaaataggccttgatacggaaggggagacatgcgggaatgcggagaagctggctgagtacatttgcagccgggagagttcagcactcccactgctttttccatgcggaaatttgaagcgagagatcctgccgaaagccttgaaggataagggcatcgctatggaatccatcaccgtgtatcagacagtggcccatcccggtattcaagggaacctcaactcatactatagtcaacagggcgtcccagctagcattacatttttctcgccctcgggactgacctacagcctgaagcatattcaagagctgtccggggacaatatcgaccagattaaattcgccgctatcggacccacaaccgcacgggcactggctgcccaggggttacctgtgtcttgcaccgctgagtcgccaaccccgcaagctttagctactggcattcgaaaggcgcttcagccgcatggttgttgttag

SEQ ID NO: 246403 - DNA, 798 bp, synthetic construct
  misc_feature 1..798: note = Description of Artificial Sequence: Synthetic coding sequence
  source 1..798: mol_type = other DNA
atgaaggtcctcctgctgaaggatgctaaggaggatgactgcggccaggacccatacatccgtgagctgggcctttacgggttagaggcaaccctgatccctgtactgagctttgagtttctgtcattgccgtcattctcagagaaactgagccacccggaggactacggagggctcatttttactagccccagagcagtggaagcggcagagctctgcctagaacagaacaataaaaccgaagtgtgggaacgttccctgaaggagaaatggaacgctaagagcgtctatgtggtggggaatgccactgccagcttggtatccaagatcgggctggatactgaaggtgaaacctgcggtaatgctgagaagctcgcagaatacatttgttcacgggaatcttcagccctacccctcctgttcccttgtgggaacctcaagagagagatccttccaaaggctctgaaagataagggtattgctatggagagcattactgtgtatcagaccgttgctcatccaggaatacagggtaacctgaacagctattattctcaacagggggtgccagcaagcattacctttttctctccatccggactcacctactcactgaagcacatacaggagctaagcggagacaacatagatcagatcaaattcgcggcaataggacccaccaccgccagggcactcgcagctcaaggtctgcccgtttcttgtaccgctgagagccctacacctcaggcactggccaccgggatccgtaaagccctgcagccacacgggtgttgttag

SEQ ID NO: 246404 - DNA, 558 bp, synthetic construct
  misc_feature 1..558: note = Description of Artificial Sequence: Synthetic coding sequence
  source 1..558: mol_type = other DNA
atgaaagtgctcctcctaaaggacgcaaaggaggacgattgcgggcaggatccttatatccgtctcagtcaccccgaagactacgggggtctgatctttacatcaccgagagctgtcgaggccgcagaattgtgcctggagcaaaacaacaaaactgaggtttgggagagatccttgaaagagaaatggaacgcgaaatctgtgtatgtcgtgggaaacgccacagccagtctggtctctaagatcggcctcgacaccgaaggggagacctgcggcaacgctgaaaagcttgccgaatatatatgctctcgcgagtcatccgctctcccccttttgtttccatgcggaaatctaaagagggaaatactccccaaggccttaaaagataaaggcatcgcaatggagtcaatcacggtctaccagaccgttgctcaccccggaatccagggcaaccttaactcctactatagccaacaaggggtgcccgcaagcattacattcttctcgccgagcggtttaacttattccctgaaacacattcaagagcttagcggctag

SEQ ID NO: 246405 - DNA, 2700 bp, synthetic construct
  misc_feature 1..2700: note = Description of Artificial Sequence: Synthetic coding sequence
  source 1..2700: mol_type = other DNA
atggaccgaaaagttgcccgagagttcagacacaaagtggacttcctcattgagaacgatgccgaaaaggactacctctacgacgtgctgcgcatgtaccatcagacaatggacgtggccgtgctggtgggtgacttgaagttagttatcaatgaaccctcccggctgccactgttcgacgcgataagacctctaattccactgaagcatcaagttgaatacgatcagctcactcccaggcggtccagaaaactcaaagaggttaggttggacagactacaccccgagggactcggacttagtgtccgcggaggactggagttcgggtgcgggctgtttataagtcacctgatcaagggcggacaagccgatagcgtggggctgcaggtgggcgatgagatcgtgagaatcaacgggtactccatcagttcctgcacccacgaagaggtgatcaacctgataaggacaaaaaagaccgtatcaatcaaggttcgtcacattggccttatccccgtaaagtcttctcctgacgaaccccttacgtggcagtacgtggatcagttcgtctccgagagtggtggtgtccgaggctccctggggagtcctgggaaccgtgaaaataaggagaagaaggtgtttatctccctggtaggatcccggggtctaggctgctctatctcttctggccctattcagaagcctgggattttcatttcgcacgtgaagccgggttcccttagcgctgaagtgggcctggaaattggggatcagattgtcgaggtgaatggcgtagattttagcaatcttgaccacaaagaggccgtgaatgtgctgaagagctcacgatctctgaccatatctattgtggcggctgccggacgtgagctgttcatgactgatcgagagcgcctggccgaggcccgtcagcgtgagcttcagcgccaggaattgcttatgcagaagagactggcaatggaatcaaacaaaatcttacaggaacaacaggaaatggagagacaacggagaaaagagatcgcccaaaaagcggcagaggaaaacgagagataccggaaagagatggaacagattgtggaagaggaggagaaatttaagaagcaatgggaggaggactggggttccaaggagcagctgctcctgccgaaaaccattacagcagaggtgcaccccgtccccctaagaaagccaaagtctttcggttggttttatagatatgatggaaaatttccgacaattcggaagaaaggcaaagacaagaaaaaggccaagtacggctcactgcaggatctacgtaaaaataaaaaggagctcgagtttgagcagaaactctacaaggagaaagaggagatgctggagaaggagaaacaactcaagattaacagactagcgcaggaagtgtccgaaacggagcgcgaggaccttgaagaatccgagaaaattcaatattgggtagagcgcctgtgccagacccgactcgagcagatcagttctgccgataatgagatcagcgagatgacaaccggcccacccccaccaccacctagcgtgagtccactggcgcctccgctgagacgctttgccggtggtcttcatttacacactacagacctcgacgacatccccttagatatgttctactatccgcctaaaaccccctcagccttgcccgtgatgccccatcctccccctagtaaccctccccataaggttcctgccccaccggttctgcctctgtccggtcacgtatccgcctccagctccccctgggttcagcgtacccctccacccatccccatcccccctcctcctagcgtacccactcaggatctcacccctactcggcctctgccctccgcgctggaagaggccctgagcaatcacccctttcggacaggtgacactgggaaccccgtagaggactgggaagccaaaaaccacagcggcaaaccaaccaattcgccagtacctgagcagtccttccctcctacacctaaaaccttctgcccaagcccccagccaccaagggggccaggcgtctctacaatttcgaaacccgtgatggtgcatcaggagccaaattttatctaccgcccagccgtgaagtccgaagtgctgccccaggagatgctaaaacgcatggtcgtatatcagaccgcttttcgtcaagactttaggaagtatgaagaagggttcgacccctactccatgttcacacccgaacaaataatggggaaggatgtacgactgctgaggattaaaaaagaagggagtttggatttggccttggagggaggggtcgatagcccaatcgggaaagtagtggtgtcagccgtttatgaacgtggcgcagcagagcggcacggagggatcgtaaagggcgacgagatcatggctattaacggaaagatcgtgacggactatacactcgctgaggccgaagccgcactccaaaaagcttggaaccagggaggcgactggattgatcttgtggtggcagtgtgtccaccaaaggaatacgacgatgagttggctagcttgcccagcagtgtggccgagagccctcagcctgtgcggaagctgctggaggacagagccgctgtacatagacacggttttttgctccagcttgaaccaaccgacctgcttcttaagtccaaacgaggaaaccagatccatagatag

SEQ ID NO: 246406 - DNA, 1659 bp, synthetic construct
  misc_feature 1..1659: note = Description of Artificial Sequence: Synthetic coding sequence
  source 1..1659: mol_type = other DNA
atggaccggaaggttgcaagagaatttaggcataaggttgatttcctcatcgagaatgatgcagagaaggactacctgtatgacgttcttaggatgtatcaccaaacaatggatgtcgccgtcctggttggtgacctgaaactagtcatcaatgaaccttctcgtctcccgttgtttgacgccattagaccgctcatcccactgaaacaccaggttgagtatgaccagctgaccccacggcgtagtaggaaactgaaagaggtcaggttggatagactccaccccgaggggctgggactgtctgttaggggcggactggagtttggatgcgggctttttatttctcatctgattaaagggggacaggcggattccgtcggcttgcaggtaggagacgagatcgtccggattaacggttacagcattagcagctgcacccatgaggaagtcataaaccttataagaacgaagaaaacggtgtccatcaaagtccggcatattggtctcatccctgtgaaaagttcacctgatgaaccactgacctggcagtacgtcgatcaatttgtgagtgaaagtggaggagtcagaggttctctgggcagcccaggcaaccgggagaataaagagaagaaggtattcatctctctcgtggggagtcgcggactcggatgctccataagcagcggccctatccaaaagccaggaatctttatctctcacgtcaagcctggatctttgtccgccgaggtgggactggaaatcggtgaccaaatcgtggaagtaaatggggtggacttcagtaacctcgatcataaagaggctgtaaacgtcttgaagtcaagtcgttccctgacaataagtatagtggcggctgcgggacgggaactatttatgacggatagggaacgcctggccgaggccagacagcgggaattgcaaagacaggagctgcttatgcagaagcggttggccatggagtctaataaaatactccaggagcagcaagagatggaaagacaaaggcgaaaagaaatagctcaaaaggccgctgaggagaacgagcgttatagaaaggagatggagcagattgttgaagaagaggaaaaattcaagaagcaatgggaggaggattggggatccaaggaacagctcctgctcccaaagaccattaccgccgaggtgcatcctgtgcctctgagaaagccgaaatatgatcaaggagttgagcctgaacttgaacccgcagacgaccttgatggcggaaccgaggagcaaggggaacaagacttcaggaaatacgaggaggggttcgacccctactctatgtttacgcccgaacaaattatgggaaaggatgtgaggttgctccggattaagaaggagggaagtctggatctggctctggaaggtggggtggattcgccgatcggcaaggttgtggtgagtgcagtatatgaaaggggtgccgcagaacgtcacggcggaattgtcaaaggcgacgagatcatggcaattaacggtaaaatcgtcaccgattatactcttgccgaggccgaagcggcattgcagaaagcctggaaccaaggcggagattggatcgatcttgtggttgcggtttgcccaccgaaagagtacgatgacgagcttactttcttctag

SEQ ID NO: 246407 - DNA, 1602 bp, synthetic construct
  misc_feature 1..1602: note = Description of Artificial Sequence: Synthetic coding sequence
  source 1..1602: mol_type = other DNA
atggatcgaaaggtggccagggagttcagacacaaggttgactttctgatagaaaacgatgctgagaaagattatctttacgacgtcctgaggatgtatcaccagacaatggatgttgcagtcttggtaggggatttaaagttggtcatcaacgaaccctcacgtctccccctctttgatgccatacgacccctcattccactgaagcaccaggtggagtacgaccagctgactccgcgacggtcccgaaagctcaaagaagtcaggttggatcggttgcatcccgaaggccttggactcagcgtacgtgggggacttgagttcggatgtgggctgtttatctcccacctcatcaagggcggacaggcagattctgtgggacttcaggtaggcgatgagatcgtccggatcaatgggtactctattagctcgtgcactcacgaggaggtaattaatctgatacgaaccaaaaagaccgtgtccatcaaagttcgccatataggcctcattcccgtgaagtctagtccagacgagcccctgacatggcaatatgtagatcagtttgtgtctgaatccggcggtgtgagaggatccctcgggagcccgggtaacagggaaaataaggagaagaaagtctttatcagcctcgtgggctcccgcggactcggttgttcaatcagttccggccctatccagaagcccggtatctttatctcccatgttaaacctggctccttatctgccgaggtagggcttgaaattggtgaccagattgtggaggtcaatggagtcgacttcagtaacctggatcataaagaaggccgtgaactgttcatgaccgatagggagcggttggcggaggcacgccaacgggaactgcagcgacaggagttattaatgcagaaaagattggccatggaatccaacaagattcttcaggagcagcaggagatggaacggcagaggcgcaaagaaatagcacagaaagccgcagaggagaatgaaagataccgcaaagagatggaacagatagtggaagaggaagagaagttcaagaaacagtgggaggaggattggggctcgaaagaacagttgctgttgcccaagacaataaccgcagaggtgcatccagtacccctacgcaaaccaaaatacgatcagggtgttgagcccgaactggaacccgctgacgacctcgacggcggaaccgaggaacagggagagcaggattttcggaaatatgaagaaggctttgatccttactctatgtttacacctgaacaaatcatgggcaaggacgttagactgctgcggattaagaaagagggctccctggaccttgctctggagggcggagtcgatagcccaattggtaaagtggtcgtgtctgccgtgtacgaacggggagcagccgagcgtcatggaggcattgtgaagggcgacgagatcatggccatcaacggaaagatcgtcacagactacacacttgcagaggctgaggctgccttacagaaggcctggaatcaaggcggtgattggattgacctggttgtggccgtgtgtccacccaaagagtatgatgatgaacttacattcttttag

SEQ ID NO: 246408 - DNA, 1566 bp, synthetic construct
  misc_feature 1..1566: note = Description of Artificial Sequence: Synthetic coding sequence
  source 1..1566: mol_type = other DNA
atgtaccaccaaactatggacgtcgcagttttggtaggtgacctcaaactggtgattaacgagccgagccggctgcctctgtttgatgccatccggcctctaatcccgcttaagcatcaagtggagtacgaccagctgactccacggagaagccgcaagttaaaagaagtgagactcgaccggctgcatccggagggactgggtctgtccgtacgaggtggcctggaattcggttgcggactctttatttctcacttaatcaagggcggtcaagctgattctgtaggccttcaagtgggagatgagatagtgcggatcaacggctactccatcagcagctgtactcacgaagaagtaatcaatctcatccgaacaaagaagactgtgtccattaaagtgcgccatattgggctgattcccgttaagagttctcctgatgagcccttaacgtggcagtacgtagaccagtttgtgtccgaatccgggggagtgcgaggaagccttggaagtccaggtaaccgtgagaacaaggagaaaaaagttttcatatccctggtcggctccaggggactgggatgcagtatttcttcaggcccaattcagaaaccaggtattttcatcagtcacgtcaaacccggtagcctcagcgcagaagtcggtttggagatcggagatcagattgtggaagtgaacggtgtagatttcagcaatcttgaccacaaagaggctgttaatgtcctaaaatcttctagatcacttacgattagcatcgtggcagccgctggaagagaacttttcatgacagacagagagcgactggccgaggctagacagcgcgaactgcaacgccaggaactgcttatgcagaaaagactggcaatggagtccaacaagattctgcaggagcagcaggagatggaaaggcagcgaagaaaagagattgcccaaaaagccgctgaggagaacgaaagataccgaaaagagatggagcaaatagtggaagaggaggagaaatttaagaaacaatgggaggaagactggggaagcaaggagcagttactgcttcctaagaccatcaccgctgaggtgcatccagttccactgagaaagcccaaatatgaccagggcgtagaacctgaactggaacccgcagacgaccttgacgggggtaccgaggagcagggagaacaagattttcgcaaatatgaggagggttttgatccatacagcatgtttactcctgagcagattatgggcaaggatgtccgcctgttacgcataaagaaagagggcagtctggacctggcacttgaaggcggtgtggattcaccaatcggcaaagtggttgttagcgctgtttacgagagaggagccgctgagcggcacggtgggatcgttaaaggtgacgaaatcatggccataaatggcaagatagtcactgattatacactcgcagaggcagaggctgctctgcaaaaggcgtggaaccaaggcggtgactggatagatctggtcgtggctgtatgtccgccaaaggagtacgacgacgagctcaccttcttctag

SEQ ID NO: 246409 - DNA, 2112 bp, synthetic construct
  misc_feature 1..2112: note = Description of Artificial Sequence: Synthetic coding sequence
  source 1..2112: mol_type = other DNA
atgtccgctagagccacccgacccaggagcagacgcggtagacatgcccctcctggggaattagatcccgtggcagaaagcagcgaggaggttgaagctgcctctgggtccagcaagccaagcttcgctcctccaccagtaagctccgggctggagcagttaggccctatggaggaagttagtggacaaggcctaggcagccgcaccgacaaaaaaatggatggcggttccggaagagagctcgcttccgccccagaagtaccccacaaacccgctgtggaggctcaccaggccccagaggccgctctccagtacaaggaaactgtgccacctgggaacggcgctccagacgtgtttcaaacactccagcacacactgtcatccttagaggccgcagccgcagcctggcgtcaccagccgccttcacactctggccctatggagttcgaggggacttcagaaggaggcgctggctccttaggcaagcaggaaggtgccggatcttgccaaagagaggccgctcggcttgcagagcgaaacgcttggctgcgcctggccctgtccagccgggaggatgagttagtgcggacccaggcatcccttgaagccatccgggctgagaaggaaacactgcaaaaggaagttcaagagctgcaggactcactcctgaggctggaaccgtgtccacatctcagtcacaaccaggccggtggttcgggatccggatctagcagctcagaagccgatcgggaaccatgggagactcaggatagtttttcactggcgcaccccctgctgcgacgtctgcgaagccatagtagtacccagatactcgggagtctccccaaccaacccctctcccctgaaatgcacattatggaagcccaaatggagcagctgcggggttctatagagaagttaaagtgctttaataggctcctgagtgccgtgctgcagggatacaagggtcgctgcgaggggctgtcaatgcagctggggcagcgcgaagccgaggctaccgctcttcacctcgccctccaatattcagagcattgtgaagaggcctatcgcgtgctcctcgcgctccgggaggcagattctggcgctggagatgaggcaccaatgtcagacttacaggccgctgaaaaggaggcttggagactcttggcccaggaggaggccgcaatggatgccggagcccaacagaatccccagccgagtccagagggttcttccgtagacaaaccgacaccacaagaggtcgcctttcagctgcgcagctacgttcaacgccttcaggaacgacggtccctcatgaaaatcctcagtgaacccggacccactttagcacctatgcccactgtccccagggccgaggcgatggtacaggcaatcctgggaactcaggctgggcctgccctgcctaggctggaaaaaacccaaatccaacaagaccttgtcgctgcgagggaggccctagctgatctcatgctcagactccagctggtgcgacgagagaagcggggactggagctgcgagaagctgcattacgagcacttggaccagcacacgttctgctcctggaacagttgcgctgggaacgggctgaacttcaagccggtggggctaattcaagcggcggacacagctcagggggagggtcctcaggagatgaagaagagtggtaccagggccttcctgctgtgccaggcggaacctcaggtattgatggcggtcaagtcggcagagcttgggatcctgagaagcttgcccaggagctcgccgcatctttgaccaggaccctagatctgcaggaacagctgcaaagtctgcgtcgcgagttagaacaggtggcacagaaggggagggctcggaggagtcaatccgctgaactgaatcgcgacctttgtaaagctcatagtgccctggtgttggctttccggggagcccatcggaaacaagaggagcagagacgcaagttggaacagcagatggcactgatggaagcgcagcaagccgaggaggttgcagttctcgaagctaccgcccgagctctcggaaaacctaggcctccacttcctccacctcagctcggagatactttcctctag

SEQ ID NO: 246410 - DNA, 1152 bp, synthetic construct
  misc_feature 1..1152: note = Description of Artificial Sequence: Synthetic coding sequence
  source 1..1152: mol_type = other DNA
atgtctgcgcgtgctacacggccaagatcccggcgtggaaggcatgcccctccaggcgaactggatccggtggcggaatcctccgaggaggtcgaggcggcatcaggctctagcaagccctctttcgccccaccgcctgtctcttccggacttgagcagctgggacccatggaagaggtgtccggtcaaggactaggctctcggactgacaagaaaatggacggtgggtccggccgtgagcttgcttctgcaccggaggttcctcataagcccgcagtggaagcacaccaggctccagaagccgctctgcaatacaaggaaactgtcccaccaggcaacggagcacctgacgtgtttcagaccttgcagcatacactcagctcactcgaagctgccgcagccgcatggcgccaccagcccccttcgcactccggcccaatggagtttgagggcaccagcgagggaggcgctggctctctgggaaagcaggagggcgcaggctcctgccaaagggaagcagcacgactggctgaacggaacgcatggctgagactcgctctgagcagcagggaggatgagttggtgagaactcaggcaagcctggaagccatccgcgcagagaaagagaccctgcagaaagaggtgcaagaactgcaggattcgttactgcggcttgagccttgtccccatttgagccacaatcaggccggtggcagcgggagcggctcctcttcctcagaggctgatcgcgagccatgggagacccaggacagtttcagtctggcccacccgttgctgagacgtcttaggtctcactcatctacccaaatactcggaagcctccccaaccagccactttccccagaaatgcacattatggaggcacaaatggaacagcttagaggcagcattgaaaaattaaagtgtttcaatcggctgttaagcgccgtgttgcagggctataagggtcggtgcgagggactgtctatgcaacttggacagcgcgaggctgaagcaaccgcacttcacctggcactccagtacagagtattgctctgtcatcccggttggtccgcagtggtgccgtcctggttaacagccacctctgcatctcccgtgcaagttattcttctcccccagccacccgagtag

SEQ ID NO: 246411 - DNA, 1920 bp, synthetic construct
  misc_feature 1..1920: note = Description of Artificial Sequence: Synthetic coding sequence
  source 1..1920: mol_type = other DNA
atgttacatcccaccgataaaaagatggatggtgggtctggtcgagaacttgctagcgcacccgaggtgccgcacaaaccagccgtcgaagcacatcaagccccagaggctgctctccagtacaaggagacggttccaccaggaaacggcgctccagacgtgtttcagaccctacaacacaccctgtcatccctggaggctgcagcagctgcttggcgacatcagcccccttcccattccggccctatggagtttgagggtacatctgaggggggagcgggatcgcttgggaagcaggagggcgctggctcttgccagagagaggcagcccgactggccgagagaaacgcttggctcaggctggccctgagctcccgcgaggacgaactggttcggacccaggcatccctggaggctatcagagcagaaaaagaaacactgcagaaagaagtgcaagagttacaggactctctgttgcggctggagccatgcccacacctgagccataatcaggccggtggaagcggttcgggttcatcaagttcagaggctgacagagagccttgggagacccaggactctttttcccttgctcacccacttctccggaggttaaggtctcatagttccacacagatactgggatctctccctaatcaacctctgtcccctgagatgcacatcatggaggcccaaatggagcagctgcgtggctcaatcgagaaactcaaatgtttcaatagactgctttcagcggttctgcagggatacaagggtaggtgcgaggggttatcaatgcagcttggacaaagggaggcggaggccacagccctccatctggccttgcaatacagcgaacactgtgaggaggcctatagggttctcttagccctacgcgaggcagactccggagcaggggacgaggcgccaatgtctgacctccaggctgccgagaaggaggcttggcggctcctggcccaggaagaggctgccatggatgctggtgcccagcagaacccacagccgagtcctgagggatcttcagtggataaacctacacctcaggaggtagccttccagctgaggagttatgtccagcgcttgcaggagaggaggtcactgatgaagattctatccgagcctggtcccactctcgcccctatgccgactgtgccccgtgccgaagctatggttcaggcgattctcggaacccaagccggtcctgctctgccgagactggagaaaacacagattcaacaggatctggtagcggcacgtgaggcccttgcagacttgatgctccgactccagttagtccggcgagagaaaaggggcctggagctgcgagaggccgctctcagggctctggggcctgcccatgtcctgctgctggagcagttgaggtgggaacgcgcagagttacaggcagggggagcgaacagttcaggcggacacagtagcggtggcggatcatccggggatgaggaggagtggtaccaaggtctccccgcagttcctggcggtacatctggcatcgatgggggacaggtgggaagagcctgggatcccgagaagttggcccaggagctggcagcttcgctgaccagaaccctggatctgcaggagcagctgcagtcacttcgacgtgaactggagcaggtagcacagaaagggagggcccgacgatcccagtcggctgaattaaatcgtgatttatgtaaggcccattcggctctggtcctggcctttaggggagcgcatcggaaacaagaagagcagcgtcgaaagcttgagcagcagatggcattgatggaggcccagcaggccgaagaggtagccgtcttggaagctacagccagggctctgggtaaacctagacccccacttcctcccccacaactaggcgacacttttctgtag

SEQ ID NO: 246412 - DNA, 1386 bp, synthetic construct
  misc_feature 1..1386: note = Description of Artificial Sequence: Synthetic coding sequence
  source 1..1386: mol_type = other DNA
atgaatgatcaataccaccgcgcagctagagatggttatctggagttgttaaaggaggctactcggaaggagctcaatgccccagacgaggacggaatgacaccgactttgtgggccgcttatcatggtaacttggagtctcttagactcatcgtgtctcgagggggtgaccctgataaatgcgatatctgggggaatactcctctccacctggcagcctccaatggacatttacactgcctctccttccttgtgtcgttcggggctaatatttggtgtctggacaatgattatcacacccctttggacatggcagccatgaaaggacacatggagtgtgtgcgttatcttgattctatagcagcaaaacaatcctcacttaacccaaaactggtaggaaaacttaaggacaaggcatttagagaggccgagcgaagaattagagaatgtgcaaagctgcaacggcgacaccatgagaggatggagcgccgttatcgtcgagagctagcagaaaggagcgatacgttgtcttttagctctctgacttcatccactctttcgcggagattgcagcaccttgctctgggatcccatcttccatactctcaggcgaccctgcacggtactgctcgcggaaaaaccaagatgcagaaaaaactggaacgaagaaaacaaggcggtgagggaacctttaaagttagcgaagacggtaggaagtctgcacggtctctcagcgggctgcagctaggcagcgacgtcatgttcgtgcggcagggcacatatgcgaatcccaaggagtgggggcgtgctcctctgcgggatatgttcctgtcagacgaagactccgtttcgcgggcaacactggcggctgagcctgcgcactccgaagtgtccacagactccggccatgactcactgtttacgcggcctggtttggggactatggtatttcgcagaaactacctgagcagcgggctgcatggactggggagagaagatgggggtttggacggggtgggggcacccagggggaggctccagtcctcgccctctctggatgatgactccctgggttccgccaacagcctgcaggatcgaagttgcggggaagagctcccctgggatgagttggatcttggcctagatgaggacctggaaccggaaacgtcgcctttggagactttcctcgcatctctccatatggaagacttcgccgctctccttaggcaagagaagattgacttggaagctctgatgttgtgttccgatttggacttgcggtctatttcagttcctctgggacccaggaaaaagatccttggagctgtgagacggaggcgacaggccatggagagaccacctgccctggaagataccgaattatag

SEQ ID NO: 246413 - DNA, 15609 bp, synthetic construct
  misc_feature 1..15609: note = Description of Artificial Sequence: Synthetic coding sequence
  source 1..15609: mol_type = other DNA
atgaactgtccagtcctgagtctgggctcgggttttctttttcaggttatcgaaatgctgatattcgcttactttgccagtatttctctgacggagtccaggggactcttcccgaggctggagaacgtgggggcttttaaaaaggtaagcatcgttcctacgcaggcggtgtgtggcttgcctgataggagcactttttgtcacagttctgccgcagccgaaagtatacaattttgcacacagcggttctgtattcaggactgcccataccggtcctcacatcccacctacaccgctttgttctctgcagggttatcgagctgcatcacacccgacaaaaatgatctccaccctaatgcccactctaattcagctagctttatcttcgggaaccacaagagctgctttagttcccctccctcccctaagctcatggcttctttcacgctggccgtgtggctgaagcccgaacagcaaggagtgatgtgcgtgatcgagaaaacagtcgatggtcaaattgtttttaagttgaccatctcagaaaaggagactatgttctattacaggaccgtaaatgggctccaacctccgataaaggttatgaccctgggcagaattctagtgaagaagtggattcatctaagtgtacaggtgcaccagactaagattagtttcttcatcaacggggtggagaaggaccacaccccattcaatgccaggacgctgtccggttctattacagactttgcatcagggacagtgcagattgggcagtcactcaatggtctggaacagtttgtgggtcgaatgcaggacttccgactgtaccaggtggctctcactaatagagagatcctcgaggtcttctctggcgacctgcttaggctccatgcgcagtcgcactgccggtgtcccggtagtcatcctagggtgcatcctctggcccagcggtattgcattcctaatgacgcaggggataccgcggataaccgagttagccgcctgaaccccgaggctcaccctctatctttcgtcaacgataatgacgttggaacctcttgggtgtccaatgtgttcaccaacataacccagctcaatcagggtgtgaccataagtgtggaccttgaaaatggacagtatcaagttttctacataatcatccagttcttttctccccagcctaccgaaatcagaattcagcggaaaaaagagaattccctagattgggaggactggcagtattttgctagaaattgtggtgctttcggaatgaagaataatggggacctcgagaagccggattccgtgaattgtcttcaactgtcgaactttacaccttacagcagaggcaatgtaacattcagtatacttacccccggacccaactacaggcctgggtacaacaacttctataacacaccctctctgcaggagttcgttaaagcaacccaaataagatttcacttccacggccagtattacactacagagacagccgtgaacttgcgccatcggtactacgctgttgatgagataaccatctccggaagatgtcagtgccacggacatgcggataactgtgacacaacctcacagccttatcgctgcctttgttcccaggaatcttttactgaaggcctgcactgcgaccggtgtctgccactgtacaatgacaagccattcagacaaggggaccaagtgtacgcatttaactgcaagccgtgccaatgcaacagtcacagcaagtcctgccactataacatctccgtcgatccttttccattcgaacactttcggggagggggaggcgtctgcgatgactgtgagcacaatactactgggagaaactgtgagctctgcaaggattacttcttccgtcaggtgggcgctgacccctctgctatcgatgtgtgtaagccttgtgactgcgacacggtcggaacacgaaatggaagtatcctatgtgatcaaataggagggcagtgcaactgcaagcgtcatgtatctggacgacaatgcaaccagtgtcaaaatggtttctacaacctgcaggagctcgacccagacggttgctcaccttgcaattgtaacacaagtggtacagtggacggcgacattacttgccatcagaactccgggcaatgtaagtgtaaggcaaacgtaatcggtttacgctgcgaccattgtaatttcggcttcaagttcctgagatcatttaacgacgtgggctgcgaaccttgtcagtgcaatctacacggctcagtaaacaagttttgcaatccccacagtggccagtgtgagtgtaagaaagaggcaaaagggttgcaatgcgacacttgcagagaaaatttttatggccttgacgtgacaaactgtaaagcgtgcgactgtgacactgcgggttccttgccgggaactgtctgcaatgccaaaactgggcaatgtatttgcaagcctaacgttgagggcaggcaatgcaataaatgcctggaggggaacttctatctaaggcagaataacagctttttgtgccttccttgcaactgcgataaaacaggaaccatcaacggcagcctcctttgtaataagtcaaccgggcaatgtccatgtaagttgggggtcacgggactgagatgcaaccagtgcgagccccaccgatataatctcaccatcgacaatttccagcactgccaaatgtgcgagtgtgatagcctggggacactgccaggaacaatttgcgatcccatctccggccagtgcctgtgtgtgcccaaccgacaaggtcgcaggtgtaaccagtgccagcccggattttatataagccccggaaacgcaaccggttgcctaccatgttcatgccacaccacgggcgcagtcaaccacatatgcaacagtttgacaggccagtgtgtgtgccaggacgcctccatcgcaggacagagatgtgaccagtgtaaggatcattacttcggattcgatcctcaaactggacggtgtcaaccatgtaactgtcaccttagtggcgctttgaatgagacatgccaccttgtcactggccagtgcttttgtaagcagttcgtgacaggaagcaaatgtgacgcctgtgtgccgtcagcctcccatctcgatgtaaataacctgctgggatgtagcaagacccccttccaacaacccccaccccgtggccaggtgcagtcttcttccgcaataaatctatcctggtcgccccctgattcacctaatgcccactggctgacttatagcctgcttcgggatggattcgagatatacactactgaagatcaatacccgtattcgattcagtatttcctggatactgatttactgccatataccaagtacagctactacattgagacaaccaatgttcacggtagtacacgttctgtggcagtcacttacaaaaccaagccaggagtgcccgaagggaatctgacgttaagctacataattccaatcggcagtgattccgtgactctcacatggactacactgtccaatcagtccggacccattgagaaatacattctgagctgcgctcctctcgccggaggtcagccctgtgtgagttacgaggggcatgaaacttcggccactatctggaatctggtaccctttgccaagtacgactttagcgtgcaagcatgtacctcaggcggatgtctccactccctgcccatcactgttaccaccgcccaggctccacctcagaggttgtccccacctaaaatgcaaaagattagctctaccgagctgcacgtggaatggtccccacctgccgagctgaacggcataataatccggtacgagctgtacatgaggcggctgcgaagtaccaaggaaactactagtgaagagagcagggtcttccagtcctctgggtggctgtcgcctcacagctttgtggagagcgctaatgagaacgctttgaaacctccgcagacaatgactacgatcaccggcctcgaaccctacacaaaatacgagtttcgagttttggccgtcaatatggccggaagtgtgtccagtgcttgggtatccgagaggacaggcgaaagtgcaccagtgttcatgatcccaccctcggttttcccactcagcagctatagcttgaatataagttgggaaaaacccgctgataacgtgacccgaggcaaggtcgttggctatgacatcaacatgttatccgagcaatctccacagcagtcaatccctatggcattctctcagctactgcacacagccaagagtcaggaactgtcctacacagtggaaggactgaaaccttaccggatttacgagttcactataaccctatgtaactccgtcgggtgcgtcacgagcgcctccggggcaggacagaccctcgccgcagccccagctcagttacggccacctctagtgaaaggtatcaactcgaccacaatccatctgagatggttcccgcctgaggagctaaatggtcccagtccaatttatcagttggagcggagagagtccagccttccggcactcatgaccacgatgatgaaagggatacgttttatagggaacggctactgtaaatttccttccagcacgcaccctgtgaataccgacttcacagggattaaggcttccttccggaccaaagtacccgaaggattgatcgtgttcgccgcttcgcctggcaaccaagaagagtacttcgccctccagctcaaaaaggggagactctacttcttgttcgatccccaaggtagccccgtggaggtaaccacgactaacgatcacggaaagcagtacagcgacggcaagtggcacgaaatcatagccattaggcaccaggccttcgggcaaattacactggacggcatttacactggttcctccgcaatcctgaatggttcaaccgtaattggcgataatactggggtgtttcttggagggctccctagatcgtataccattctgaggaaggatccggagatcattcaaaagggatttgtcggatgcctcaaggatgtccactttatgaaaaattataacccatctgccatctgggagcccctagactggcagtcttccgaagaacaaataaatgtgtataacagctgggagggttgccccgctagcctaaacgagggggctcagtttctgggagcaggttttctcgaactgcacccgtatatgttccatggcggtatgaacttcgagatctcatttaaattccggaccgaccagcttaacgggcttctgttgtttgtatacaacaaagacggcccagatttcctcgccatggaactgaaaagcggtatcctcacgttcagacttaatacttccctggccttcacacaggttgatcttttactggggttgtcttattgtaacgggaaatggaacaaggtcataataaagaaggaggggtccttcatctctgccagtgtgaatggcttaatgaaacatgcctccgagtctggtgaccagcctttggtggtgaactccccagtctatgtcggcggaataccacaagaactcctgaacagttatcagcatctctgcctggagcagggcttcggagggtgcatgaaggacgttaaattcacccgaggcgctgtggttaaccttgcatcagtgtcaagcggagcagtccgcgtgaacttggacggttgcttaagcacagactccgctgttaattgccggggaaacgacagtattcttgtctatcagggcaaagagcagtcagtttacgaaggcggtcttcagcccttcaccgaatatctgtatcgtgtaatagcctcacatgagggtggcagtgtgtatagcgattggtctcggggtcgtactactggcgctgctccacagtccgtaccgacgccttcaagagtccgctctttgaatggatacagcattgaggttacttgggacgaacctgttgtgcggggagtcattgagaagtacattttaaaggcctatagcgaagactcaactaggccgcctcggatgccaagtgcctcagctgaatttgtgaacacttccaatctgactggaatcctcaccgggctgctcccatttaagaactacgccgtgacactcaccgcctgcacacttgctgggtgtacagagagctctcacgcgctaaatatttcaaccccccaagaagccccacaggaggtgcagccaccggtggccaaatctctgccatcttccctcttactttcatggaatcctccaaagaaggcaaacggcatcattacacagtactgtctctacatggacggcaggctcatctattccgggtcagaagaaaactatatcgtcactgaccttgcagtgtttactccccaccagttccttcttagtgcctgcacccacgtggggtgtacgaattcctcctgggtgctgttatatacagcccaactgccaccggaacacgttgactccccagtgctcacagttttagacagccgaaccattcatattcagtggaaacagcccagaaagatctctggtatcctggagaggtatgtgctgtacatgagtaaccatacacatgattttacgatttggagtgtgatttataacagcacagagctgttccaggaccacatgctgcagtacgtcctcccaggaaataaatacttgatcaagttaggtgcgtgcacggggggaggttgtacagtgtccgaagcaagcgaggctttaaccgatgaagatatccctgagggagttccagcgcctaaagcacattcttatagccccgattcctttaacgtaagctggacagaaccagagtaccccaacggggtcattacttcctatggcctttatcttgatggcatcctgatacataacagcagtgagttgagttacagggcctatggctttgcaccctggagtctgcacagttttcgggtccaagcatgcaccgccaaagggtgtgcgcttggacctctcgtagaaaaccgtaccctggaggctccacctgaggggacagtgaacgtttttgtaaagacccagggctcccggaaggcccacgtgcgatgggaggccccattcaggcccaatggcctgctcacccactccgttctattcaccggaatcttttatgtggacccagttggaaacaattacactctcctaaacgtgaccaaggtgatgtatagcggtgaggagacaaatctatgggtgctgatcgacggactggttcctttcaccaactatacagtccaggtaaacatcagcaatagccaaggtagtctgattactgatccaataaccatcgccatgccgcctggagcacctgacggtgtgcttcctcctcgcttatccagtgccacgcctaccagtctgcaggtcgtttggagcactcctgcccgtaacaacgctccagggtctcctaggtaccagctgcagatgcggagtggcgacagcacccacgggtttctagagcttttcagtaatccatcagcgtctctttcttatgaggtgtcagacttgcagccatatacagaatacatgtttaggctcgtcgcctcgaacggatttggtagtgcccactctagctggattccttttatgacagccgaagataaacccggacctgttgtgcccccaatcctgctggacgtgaagtccagaatgatgctagtcacgtggcaacatcccaggaagtcaaatggcgtcattacacattacaacatctacctgcacggcagactgtacttgaggacaccaggaaatgtcacaaattgtaccgtgatgcacctgcacccttatacggcgtataagttccaagtagaggcatgtacctcgaagggctgctccctgtcgcctgaatctcagactgtgtggactttgcccggagccccagaagggatcccttcacctgagctgtttagcgacacacctacatctgtgataatatcatggcagccaccaacccacccaaatgggctagtagagaattttacaatcgagcggcgtgtgaaaggaaaggaggaggtcaccacgctggtcacactgcccaggtcccattccatgcggttcatcgataagacctcggccctcagcccttggaccaagtacgaataccgagtcttaatgagcaccctgcacgggggtacgaactcatcagcttgggtggaggtgaccacgcgccctagtcgaccagctggagtgcaacctccagtcgtgactgtgttagagcctgatgctgttcaggtgacgtggaaacctcccctgattcagaatggtgatatcctttcttatgagatacatatgccagacccccatatcacattaaccaatgtaaccagtgctgtgctttctcagaaagtgactcacctgataccctttacaaactattctgtcacaatagttgcctgttccggcggaaatggctatctcggaggatgcacagaatcactccctacatatgttaccactcatcccactgtcccccagaacgtaggccctttgtccgtcatccctttgtcggaaagttatgtagtgatcagttggcaaccgcctagcaagccaaacggacccaacctcaggtatgagctcctccggcgaaaaattcagcagcccctcgcctcgaatccgcctgaagatctgaacaggtggcacaacatttactctggaacacaatggctgtatgaagacaagggactctctaggttcacaacttatgagtatatgctgttcgtacacaatagcgtgggctttactccatcccgtgaggtaactgtgaccactctggccggtttaccggaacgtggtgccaacctaacagcgagtgtgcttaaccacaccgccatagacgtgagatgggccaagccaaccgttcaggatctgcagggcgaagtcgaatattataccctattttggtctagcgctacatctaatgattcactgaagattctgccagacgtcaattcacacgtcattggccatctgaaacccaacaccgaatattggatttttattagcgtgttcaatggggtgcactctatcaacagcgccggactgcacgctactacatgtgacggagagccacaaggaatgttacctccagaagttgtcatcattaatagtaccgctgtgagagtgatatggacctcaccaagcaacccaaatggagtagttactgagtatagtatttacgtgaacaacaagctttataagactggaatgaatgttcccggaagctttattctcagggatctgtcaccattcactatctatgacatacaggtggaagtgtgcacaatatatgcctgtgtgaaatctaatggcacccagattactaccgtggaagacacaccatcagacatcccgacaccaactatccgaggcataacatcacggagcctccagatcgattgggtgtcccctcgcaagccaaacggcatcattcttggatacgacctgctctggaagacctggtacccctgtgctaaaacccagaagctggtacaggatcaatccgacgaactgtgcaaggcagtcaggtgtcagaaacccgaaagtatctgcggtcacatatgctattcatctgaggccaaagtgtgctgcaatggtgtactgtacaacccaaagccaggacatcgatgctgcgaagagaagtacatacctttcgtgttgaatagtacaggcgtatgctgcggtggaagaatacaggaagcccaacccaatcaccagtgctgctcggggtactatgctcggatcctccctggtgaagtctgctgtcctgacgaacagcacaatagggtgtccgtaggtataggcgactcttgctgcgggaggatgccctattcaacatcaggaaatcaaatttgttgtgctggcagacttcacgatgggcatggacagaaatgttgtgggagacaaatcgtctcgaatgacctagagtgttgtggcggagaagagggggtggtgtacaaccgtcttcctggaatgttttgttgcggccaggactacgtgaacatgtccgatacaatctgttgttctgcttcctcaggcgaaagcaaagcgcatatcaagaaaaacgaccctgtgccagttaaatgctgcgaaaccgagctgattccaaagtctcagaaatgctgcaacggggtggggtataaccctctgaagtacgtgtgtagcgacaaaatttcaactggaatgatgatgaaggaaacaaaggagtgccggatcctgtgtcccgcaagcatggaagctacagagcactgtggtagatgtgacttcaacttcacatcccacatttgcacagtgataagggggtctcacaactctacaggaaaagcttcaatcgaggaaatgtgttccagcgcggaggagacaatccacaccggctctgtgaacacatatagttatacagacgtgaatctgaagccttatatgacttatgaatacaggatctccgcctggaatagttacggcagagggctgtccaaggcagtccgcgctcgaaccaaggaggatgtgccccagggcgtaagcccacccacatggaccaagattgacaatctggaggacacaattgtcctgaattggcgaaagcccattcagagcaacggtcccataatctattatatccttctgcgaaacgggatcgaacgctttcgcggaacatcactcagtttttccgataaagaagggattcagccctttcaggagtatagttatcaactgaaggcttgtaccgtcgccggatgcgcaacttccagcaaagtggtggccgcaactacgcaaggcgtcccagaaagcatacttccgccaagtattaccgctctgtccgctgtggcactgcacctctcttggtccgtgccagagaaatcgaacggtgtcattaaggagtaccaaatcaggcaggttggcaagggactgattcacacagacacaaccgataggaggcagcacacagtcaccggcctccagccctatactaactactctttcaccctcacagcctgtacctccgccggatgtacatcctcagagcctttcctgggtcaaaccctccaggccgctcccgagggcgtgtgggtcacccccaggcatattataatcaattcaacgactgtggaactatattggtctttgccagaaaagcctaacgggctcgtatctcagtaccagctgagccggaacggcaatctcctatttctcggtggatcagaggagcagaactttacggataaaaacctcgaacctaactccaggtacacatacaagcttgaggtcaaaacaggcggtggctcttcagcctccgatgattacattgtccaaacccctatgtcaacacccgaggagatataccccccttacaacattaccgtcattggcccttattcaatcttcgtggcttggataccccctggaatattgatccctgaaatccccgtggagtataatgtcctcctcaacgatggaagcgtaacaccacttgcattcagtgtgggacaccaccaatccacactgttggaaaacctgacaccttttacccaatacgagatcaggatacaagcctgccaaaacggttcctgcggagtctcaagccggatgtttgtgaagacgcctgaggcagcacctatggacctcaacagtcctgtgctgaaagccctgggatccgcatgtattgagataaagtggatgcccccagagaaaccgaatggcatcatcataaattattttatatatcggcgaccagcaggtatagaagaagagagtgtgctgttcgtatggtccgagggcgctctggaatttatggacgagggcgatacactgcgtcctttcaccttgtatgagtaccgcgtgcgggcatgtaattccaaagggagcgttgagtctctgtggtccttaacacaaaccctcgaggcccctcctcaagactttccagccccatgggctcaggctacttctgctcacagtgtgctgctgaattggaccaagccagagagccccaatgggataattagccactatagagtcgtgtaccaagagcggcctgatgacccgacctttaattctccaaccgtacacgcatttaccgtgaagggcaccagtcaccaggcacacctgtacgggttagagcccttcacaacctataggatcggtgtggtggctgcaaaccacgccggagagattctctctccttggacactgatccaaacactggaaagctccccctctgggctgagaaacttcatcgtggaacaaaaggaaaatggacgtgccttgctcctgcagtggagcgagcccatgagaactaacggagttatcaaaacatacaacattttctccgacggcttcttagaatactcggggttgaatagacagttcctgttcaggagactggacccatttacgctttacacgctcaccttagaggcttgcactcgcgcaggctgtgcgcattctgcccctcaaccactgtggactgatgaagcccctcccgattcacagctggccccaacagtgcatagtgtgaagtcaacctccgtggagctgtcctggagtgaacccgtgaacccgaacggcaagatcattaggtacgaagtgatccgtaggtgctttgaaggtaaggcatggggaaaccaaaccattcaggcggacgaaaagatcgtcttcacggagtacaacacagaaagaaacactttcatgtacaatgatacaggactccaaccttggacacagtgtgagtataagatttatacatggaatagtgctgggcacacctgctcctcatggaatgtggttaggacgcttcaggcccctcctgaggggctcagtccaccagtgatctcatacgtctctatgaatccacaaaagctattgatctcctggatcccccctgagcagagcaatgggatcatccagtcctatcgcttacagcgaaacgagatgctatacccgtttagctttgatccagtaacgtttaattatacagatgaagagctgttgccttttagtacatattcctacgcccttcaggcatgcacatctggtggctgttccacctctaaaccaacttccatcaccacgctggaagctgcaccatcggaggtgtcacctcctgatctgtgggccgtttcagctacacagatgaacgtgtgctggagtccaccgactgtgcagaatggtaaaatcaccaagtacctcgttaggtacgacaacaaggagtcgctcgccggacaaggactgtgtcttctggtgagccatctgcagccctactcacagtataacttttctctcgtggcttgcaccaatggtgggtgcaccgcaagtgtgagcaagagtgcatggacgatggaagctctaccggaaaatatggattcccccactctgcaggtgactgggagcgaatcaatcgaaatcacttggaaaccacctagaaaccccaatggccaaatccgctcgtatgagcttaggagggacgggaccatcgtttacacgggcttggagacgcgttacagggactttactctaaccccaggagtggagtacagctacacagtcactgcctccaattcccagggtggaattctgtccccactggttaaagaccgcaccagcccgtcagcccctagcggaatggagccaccaaaattgcaagcgcgaggccctcaggagatcctggtgaactgggatcccccagtgaggaccaacggtgatataatcaactacacgctatttattagggagcttttcgagagagagactaagatcatacatatcaataccacacacaattctttcggcatgcaaagttatatagttaaccagttgaagccattccacaggtacgagattcgtatccaagcctgcaccaccctaggctgtgcatcttccgattggactttcatccagacccctgagatcgcacctctgatgcagcccccaccacacctggaagttcagatggctccgggaggctttcagccaaccgtctcgctactgtggaccggccctctccagccaaacggcaaagtattgtactacgagctttatagacggcagattgcaacgcaaccgcgaaaatcaaaccccgtcctgatctacaatggtagcagcacctcttttattgattccgagctgctgcccttcaccgaatacgagtaccaggtgtgggccgtcaacagcgctgggaaagcgcctagctcatggacttggtgcagaacaggtcctgcccctcctgaaggcctcagggcaccaacatttcatgtaatttcgagcacccaggccgtggtgaatatcagcgcccctggaaagcccaacggcattgtttcattgtatcgtctcttttcttcttcagcccacggagcagagaccgtgctgtctgagggcatggccactcagcagacactgcacggtctgcaggcattcacaaactattctatcggagtggaagcatgcacatgttttaactgctgtagtaaaggcccaactgcggagctgaggactcatccagctccaccttctggtctcagttctccgcagataggtacccttgcctcacggaccgccagttttagatggtccccacccatgttccccaacggagtaatccactcatatgaattgcagtttcatgtcgcttgtccaccagacagcgcactcccctgtacaccatctcagatcgagacgaaatatacagggctcgggcagaaggccagcctcgggggactgcagccctatactacatacaaactgagagttgtggcccacaacgaggtgggctctactgcctccgagtggatcagctttacgacccaaaaggagctgcctcagtacagggccccattttctgtggattccaatttgagcgtagtgtgcgtgaactggtcagatacttttctgctgaatggccaactgaaggagtatgtgctcacagatgggggtcgcagggtatattctggccttgacacaaccctatatatcccgaggacagcagataagacatttttctttcaagttatatgcactaccgatgagggttcagtcaagacacccctgattcagtatgacaccagcacaggactggggctggttttaaccaccccagggaagaagaaaggctcgcggtcaaaaagtacggagttttacagcgaattgtggttcattgttcttatggctatgctcggcttaattttgctggccatctttctgtccctgatcttgcaaaggaagatccacaaggagccctacattcgggagcgcccacctttggtgcccctgcagaagagaatgagccctcttaatgtgtaccccccaggcgaaaaccacatgggcctggccgataccaagatccccaggagcggcacgcctgttagtatccgaagcaaccgaagcgcttgtgtgctgagaatcccttctcagaaccagaccagccttacatactcccagggctcgttgcataggtctgtctctcaattgatggacatccaggacaagaaggtactgatggacaatagtttatgggaagcaatcatgggccacaactctggcttgtacgtggacgaagaagatctgatgaacgctataaaggatttctcttcagttacaaaagagagaaccactttcaccgatacacacctctac

SEQ ID NO: 246414 - DNA, 4641 bp, synthetic construct
  misc_feature 1..4641: note = Description of Artificial Sequence: Synthetic coding sequence
  source 1..4641: mol_type = other DNA
atgaattgtcctgtgttgtctctcggcagcgggtttcttttccaggtgatagagatgctgattttcgcctattttgccagtatctctctgaccgaatcccggggactttttccacgcttagaaaacgtgggtgctttcaaaaaagtaagcattgtccctacgcaggccgtctgtgggctgcccgatcgaagtacattctgtcattccagcgctgccgcagaaagcatccagttctgtacacagcgtttctgtatccaagattgtccatatagatctagtcatcccacgtatactgctctcttcagcgctggactatccagttgcattacacctgataagaatgacctccaccccaatgctcattcaaacagtgcttcgtttatctttggaaatcacaagtcatgcttctctagccccccaagccctaagctcatggccagctttacactggccgtgtggctcaagccagagcagcagggagttatgtgcgtcatcgaaaaaacagttgatggacagatcgtgtttaaattgaccatatctgaaaaggagacaatgttttactaccgtactgtgaacggactgcagcccccaattaaagtgatgacattgggtaggatcttggtgaaaaaatggatccacctcagtgttcaagtccaccagaccaaaatctcattcttcatcaatggcgtggagaaagaccacacacccttcaatgctcgtaccctctccggaagtatcaccgactttgcttctggcaccgtacagataggccagtcgttaaacggtttggagcagtttgtggggcgaatgcaggattttcggctataccaagttgcgttaacaaatcgggagatcctggaagtcttctcaggggacttactccggctgcatgcacagtcgcattgcaggtgtccgggaagccatcccagagtgcatccacttgctcaacgctattgtatccccaacgacgcgggtgacaccgctgacaatagggtaagcaggctgaaccccgaggcccacccactctctttcgtgaacgacaatgacgtggggaccagctgggtgagcaacgtcttcaccaacatcactcaactgaatcagggagtcacaatctctgtggatctcgaaaatggtcaatatcaggtgttctacattattattcagttcttttctccacaaccaactgagatccgcattcagcgtaagaaagaaaattcactggattgggaagactggcagtatttcgctagaaattgcggagccttcggcatgaagaataacggcgacttggaaaagcctgatagtgttaactgtctccagctgtccaatttcacaccttactctcgtgggaacgtcacattttcaatcctgactcctgggcctaattataggcccggttacaataatttttataacactcccagtctacaagagttcgttaaagccacgcagatccgcttccattttcacggtcagtattacacgacggagacagcagttaatttgagacatagatattatgccgtggatgagatcacaatcagcggacggtgccaatgtcatggccacgctgataactgcgacactacttcccaaccgtatagatgtctttgttcgcaggagagcttcactgaaggcctgcactgcgaccggtgcctgcctctatataatgataagccctttcgccaaggtgaccaggtgtatgcttttaactgtaagccctgccagtgtaattctcattctaagagctgtcactacaatatctccgtcgatccatttccgtttgagcactttagaggcggtgggggagtttgtgatgactgcgaacacaatacaacaggccgaaattgcgaactgtgcaaggactatttctttaggcaggttggtgcagaccctagtgctattgacgtgtgtaaaccttgtgattgcgatacggtggggacaaggaatggaagcatcctttgtgatcagatcgggggacaatgcaattgcaaaaggcatgtgtccggccgacagtgtaaccagtgtcagaacgggttttataatctgcaagaattagacccggatggatgcagtccttgtaactgcaacacttcagggactgttgatggcgacataacttgccaccaaaattccggacagtgcaagtgtaaggccaatgtgattgggttgagatgcgatcactgcaactttggattcaaattcttgcggtcattcaatgacgtgggatgtgagccttgtcagtgtaacctccatgggagtgttaataagttctgtaatccccatagtggccagtgcgagtgcaagaaggaagcaaaaggactgcagtgcgacacctgtcgagaaaacttttatggattggatgtaactaattgtaaagcttgtgactgcgacactgcaggaagcttgcctgggacagtctgtaacgcaaaaactgggcagtgtatctgcaaaccaaacgttgaaggtcggcagtgcaacaagtgcctcgagggcaatttctacctgcgacagaacaattcttttctgtgcctgccatgtaattgtgataaaactggtaccatcaacggcagcctgttgtgcaacaagtctacaggccagtgcccttgtaagctcggggttacaggactgcgctgcaatcagtgtgaaccacatagatacaacctcacgattgataattttcagcattgtcagatgtgtgaatgtgacagcctgggaacactcccgggaacaatttgcgaccctattagcgggcaatgtctctgtgtgcccaatcgtcaaggtcgacgctgtaaccagtgccagcccggtttctatatcagccccggaaatgctaccgggtgtctcccctgctcttgccacacaactggcgctgtgaatcacatttgtaattctctcacaggtcagtgtgtctgccaagatgccagcattgctggccagcgttgtgaccaatgtaaggaccactacttcggatttgatccacaaactgggagatgccagccctgtaactgccacctcagtggggcattaaacgaaacatgtcacctcgtgacaggtcagtgcttctgtaaacagtttgtgaccggatctaagtgcgacgcatgtgtgccaagcgcttctcatctcgatgtgaacaatcttctgggttgttccaagacgccctttcagcagccaccacctcggggacaggtccagtcaagtagtgcaatcaatctgtcatggagccctccagacagccctaacgcccactggttaacctatagtttgctccgtgacgggttcgaaatatatacaacagaggatcagtacccctatagcatccagtactttcttgacacagacctgttgccttacacaaaatactcctattatatcgagaccacaaatgtacacggctccaccaggtcagtggctgtcacctataagacgaagcccggagtcccggaaggcaacttaaccctttcttatatcattcccatcggctccgatagcgtgaccctgacttggacgaccctcagtaaccagtccggccctatcgagaaatatatcctttcatgcgctcctctagccggaggacaaccctgcgtgtcctacgaggggcacgagactagcgccaccatctggaacctggtgcccttcgcaaagtacgacttctctgttcaggcctgcaccagcggaggatgcctgcactccctgccaatcactgtgaccaccgcacaggctcccccacagcggttgtcacccccaaagatgcaaaagatctcttctaccgaacttcacgtcgagtggtcgcctccggctgaattgaatgggatcattataaggtatgaactttatatgcgacgtctgcgtagcacaaaagagaccacatctgaagaatcacgtgtgttccaaagctccgggtggctgagccctcatagcttcgtggagtcagcaaacgagaatgcccttaagcctcctcaaaccatgaccacaattacggggctcgagccctatacaaagtacgaattccgcgtgctggctgtgaacatggccggtagcgtctcctcagcctgggtctctgaacggacaggcgaaagcgctccagtgttcatgattccaccctctgtctttcccctttcttcttattcattgaatatttcgtgggagaagcccgcagataatgtgacgagaggcaaagtggtcgggtatgacattaatatgctatccgagcagagtcctcagcagtccattcccatggcattctcccaactgttacacacagccaaatctcaggaattgtcatatacagtcgaggggctcaagccttacaggatatatgagtttaccatcacactctgcaatagtgttggctgtgtgacttctgccagtggagccggacagacgctggccgctgcaccggctcaattaaggcctccccttgtgaaaggcatcaactccaccaccatccacctgcggtggttccctcctgaagagctgaatggcccatcccccatctaccagttggagcggcgagagtcaagtctgcccgcactgatgactaccatgatgaaagggatacgattcatagggaacggctactgtaagtttcccagttctacccatccagtgaacaccgatttcaccggtaagtgcgtatag

SEQ ID NO: 246415 - DNA, 15681 bp, synthetic construct
  misc_feature 1..15681: note = Description of Artificial Sequence: Synthetic coding sequence
  source 1..15681: mol_type = other DNA
atgaactgccctgtgctcagcctggggagcggctttctattccaggtaattgagatgctgattttcgcctatttcgccagcattagcctgacagaatcaagaggcttatttcccaggttggagaacgtcggtgctttcaaaaaggtgtctattgtacctacccaggcggtttgcgggttgcctgaccggagcacattctgccactcatccgctgccgcagaaagtattcagttttgcacccagcggttttgtattcaggattgcccctaccgatcaagccaccccacatatacggccttattttcagcaggtctatcctcatgtatcacccccgataagaacgatctccatcctaacgctcacagtaactccgcctcctttattttcggaaaccataagtcttgtttctcatcacctcccagtcctaaattaatggctagttttactctggcagtgtggctgaagcccgaacaacagggcgttatgtgcgtcattgagaagaccgtggacggccagatagtgtttaagcttaccatttccgagaaagagactatgttttattatagaactgtgaacggcctccagcccccaattaaggtgatgacactgggtaggattctggttaaaaaatggattcatctgtccgtgcaagtacatcagaccaaaatatcctttttcataaatggtgtggaaaaggatcataccccatttaatgccagaacactatcaggtagtatcacggatttcgcgagcggaaccgttcaaatcggccagtcattaaacgggcttgaacagttcgttggtcgcatgcaggattttaggttgtatcaagtcgcgctgaccaatcgagagatccttgaagtgttctcaggtgaccttctaagactccacgcacagagtcactgtagatgtcctgggtcacatcctagggtgcatccactcgcacagcggtattgtattcccaatgatgccggtgatacagccgataacagggtctcacggctcaaccctgaagctcatccactgtcattcgtcaatgataacgacgtgggaaccagttgggtaagtaacgtcttcacgaacatcacccagttaaatcagggagtcactatcagcgtagacttagaaaacgggcagtatcaggttttttacattatcatacagtttttctccccacagcctactgagatacgaattcagcggaaaaaggagaacagtctggactgggaggattggcaatacttcgcacgtaactgtggtgcctttggtatgaaaaataacggcgatctcgagaaacctgattcagtgaactgtcttcaattatccaattttactccatattcccggggaaacgtgactttctctatcctgacccctggccctaactaccggcctgggtacaataatttttataatacccccagcttgcaggaatttgtgaaagctacccagattagatttcacttccacggccagtactatacaaccgaaacggcagtgaacctgcgtcacagatattatgcagttgatgaaattaccatttctggcagatgccagtgtcacggacacgccgacaattgtgatactacgtctcagccatatcgatgcctctgctctcaggaaagcttcactgagggactccactgtgatcgttgcttgcccctctacaatgacaaaccttttagacaaggcgatcaagtctacgcgtttaactgcaagccttgtcagtgtaactcccactcaaaatcatgtcactacaacatatctgtggatccattccccttcgagcattttagagggggagggggtgtctgtgatgactgcgaacacaacaccacaggacgaaattgcgagctctgtaaggactatttttttcgccaagttggcgcagacccaagcgcaatcgatgtgtgtaagccctgcgattgtgatactgtaggaaccagaaatggtagcatcctttgtgatcaaatcggcggacagtgcaattgcaaacgccatgtgagtggtagacaatgtaaccaatgccagaatggtttctataatctgcaggaactggaccctgacggctgttcaccatgtaactgtaacacctccggaaccgttgacggagacattacatgtcatcagaattcaggacagtgtaagtgcaaagctaatgttataggtctccgctgtgaccattgcaactttggatttaagtttctaagaagttttaatgacgtagggtgcgaaccgtgtcaatgtaatcttcacggctccgtgaataaattctgcaacccccactccggacagtgcgagtgtaaaaaggaggcgaagggccttcagtgcgacacgtgccgggaaaatttctacgggttggatgtgacaaattgcaaggcctgtgactgcgacactgccggatccctgccgggaacagtttgcaatgcaaaaacgggccagtgcatttgcaaacctaatgtcgagggacgacagtgcaacaaatgtttggaaggcaacttctacctgcggcagaataacagctttctttgtctgccttgtaactgcgataaaacaggcaccattaatgggagccttctttgtaataaatccactggccagtgcccatgtaaactcggagtgactggcctgaggtgcaaccaatgtgagcctcaccgatataacctgaccatcgataatttccaacactgccagatgtgtgagtgcgattctcttggaacactgcctggcaccatctgtgatccaatatccgggcagtgtctctgtgtgcctaacagacaggggagacgatgtaaccagtgccaaccgggtttttatatatcccctggcaacgccaccggctgtctcccctgctcctgccataccaccggggctgtgaatcatatctgcaattccttaactggacagtgtgtatgccaggacgcctcaatcgccggacagcgctgcgatcagtgcaaagatcactatttcgggtttgatcctcagactggacggtgtcagccatgtaattgccacctgtccggtgccttaaacgagacatgtcatctggtcacagggcagtgcttctgtaagcaattcgttactgggtccaagtgcgatgcttgtgttccatccgcatcacatttagacgtgaacaatctgctgggttgcagcaaaaccccattccagcagcctcctcctcgtggtcaggtccaatcatcctctgccattaacctgtcttggagtccacctgattcccccaatgcccattggctaacatacagcctgctgcgcgatgggttcgagatttatactaccgaggatcagtatccatattctattcaatacttcttggacacagacttgttgccttatacaaagtacagttattacatcgagacaaccaatgtacacggttctacacgaagtgtcgctgtgacatataaaactaagcctggtgttcctgaaggcaacctcactctgtcatacattataccgattggtagcgattctgtcaccctgacttggacaaccctgtccaatcaatccggacctattgaaaaatacattcttagctgtgctccgctggctggtggccagccttgtgtgtcatacgaaggacacgagactagtgcaacaatttggaacctcgttcctttcgccaaatatgactttagcgtgcaggcttgcaccagtgggggatgcctgcattctctccccataactgtcaccactgctcaggctccccctcagagactgagcccaccaaaaatgcaaaaaatctcttccactgaactccatgttgagtggtcacctcctgctgagttaaatggcattatcatccggtacgaactttacatgagaagactaagatccaccaaagagacgaccagcgaagaaagccgagttttccagagcagcggatggctgtccccgcactcctttgtcgaatcagctaacgaaaatgctttaaagcctccccaaaccatgacaactatcactggactggaaccttacacaaagtacgagtttcgcgtcctggccgtgaacatggcgggatcggtctcttctgcctgggtctcagaacgtaccggggaatctgctcctgtgtttatgatccctcctagcgtgttccctctgagcagctatagcctgaacatcagctgggagaaaccagccgataacgtgacgagagggaaggttgtgggttacgacataaatatgctgagtgaacaaagtcctcagcaaagtataccaatggctttttctcagctgcttcatacagcgaagtcacaggaactaagctacaccgttgaggggctaaaaccgtatcggatctacgagtttacaattactctgtgcaattctgtcggttgcgtgacatcggctagtggcgcaggacaaaccctcgccgcagcccctgcccagcttagacctccactggtaaaggggatcaattccacaaccatccatctccgatggttcccgcctgaggaactgaacgggccaagccctatttatcagctcgagcgtcgtgagtcttcccttccggctcttatgaccacaatgatgaaagggatcaggttcatcggaaacggatactgcaagtttccatcatccacacaccctgtaaatacagattttacaggaattaaggctagtttccggacgaaggtgcctgaggggctgattgttttcgccgcttcgcccggaaaccaggaagagtacttcgcgttgcaactgaaaaaggggagactgtacttcctgttcgatccacaaggctcgcccgtggaagtgacaactacgaatgaccatggcaagcagtactccgatggaaaatggcacgaaatcatcgctataagacatcaggcctttggacagatcactctggatggaatatatacgggctccagtgccattctcaacggatcaacagtaattggggataatacaggtgtgtttctgggtggactccccaggagctatacaattctacggaaggaccccgaaattattcagaaagggtttgttggttgcttaaaggatgtacactttatgaaaaactataatccatcagctatttgggaaccactagactggcagtctagtgaggaacaaataaacgtgtacaacagctgggaggggtgtcctgccagtttgaacgaaggggctcaattcctaggggcaggctttctggagttacatccctatatgttccacggaggcatgaattttgaaatctcttttaaatttaggacggatcagctgaatggtctgcttctcttcgtgtacaacaaggacgggccagacttcctggctatggagttgaagagtggcattctgactttcaggctgaacaccagtctcgcatttactcaggtggatctgctgctgggactgtcctattgcaatggtaaatggaataaggtgataattaagaaggagggctctttcatttcagcatcagtgaatggcttgatgaaacacgcatccgagagtggcgatcagccactggtcgtaaatagcccagtgtatgtgggaggaatcccccaggaacttctcaactcataccagcatctgtgcctggagcagggtttcgggggttgcatgaaagacgtgaagtttacaaggggagccgtggtaaatctggcgagcgtatcttctggggctgtccgggtcaatttggatggctgcttatcaaccgactcggcagtaaactgtcgaggcaacgacagcattctcgtctaccaggggaaagaacagtctgtgtacgaaggagggctgcagccttttaccgagtacttgtacagggttattgcgtcacatgaaggcggaagcgtgtatagtgactggtcacgaggtcgcaccacaggcgctgctccacaatccgtgcccactccctcaagggttcgctccctcaacgggtattccatcgaagtgacttgggatgaaccagtcgtgagaggcgtgattgaaaaatacattctgaaggcctattccgaggactcaacccggcctcctcgaatgccctcagcaagcgctgagttcgtgaatacatccaatctgaccgggatcctgactgggctactgccctttaagaattacgccgttacactgactgcatgtaccttagcgggttgcacagagagctctcacgctctgaacatcagtactccccaagaggcccctcaagaggttcaaccacccgtcgctaaatcattgcctagcagtcttcttctgagctggaaccctcccaagaaagcaaacggcatcataacacaatactgtttatatatggacgggagactgatttactcaggtagtgaagagaactacatcgtcaccgacctcgccgtgttcactccacaccagtttctgctatctgcttgcacccatgttgggtgcactaactcttcctgggtactgctttataccgcacagttacctcctgaacacgtggattcgccggtgttgactgtactcgactcgagaacgatccacattcaatggaaacagccccgtaagatcagtggcattctggagcgctatgtactttacatgtctaaccacactcacgacttcacaatctggtcagtgatatataactctaccgagctgttccaagatcatatgcttcaatacgtcctccccggtaataaatacttgatcaaactgggcgcttgtacgggaggcggttgcacagttagtgaggcgagtgaggcactgactgacgaggatattccagaaggagtacccgcacctaaagcgcattcctattcgccggattcttttaacgtatcctggacggagcctgaatatcccaatggagtaattaccagttacggcttgtacctcgatggcatcctgatacacaattcatcagagctgagctaccgggcttatggttttgcaccttggtcattgcatagctttcgagtacaagcctgtaccgccaagggttgcgctttgggccctctcgttgagaatcgtacacttgaggccccaccagagggtacggttaatgtcttcgtgaagactcagggaagccgcaaggctcacgtgagatgggaggccccattccgtccaaacggactcctgacccactcagttctctttaccggtattttctatgtagaccccgtcggtaacaattacacgctgctgaatgtgactaaagtcatgtattctggggaggagaccaatctgtgggtactgatagacgggctggttccctttacaaactacacagtgcaggttaacatctccaacagccagggcagtctgattacagatcccatcaccatcgctatgccccctggcgctccagatggagttctgccccctcgtctttcttcagccacacccacttctttacaggtcgtgtggtctactccagcacggaacaacgcgccaggctctccaagatatcagctgcagatgcgcagtggggatagcacgcacggattcctcgaactatttagcaacccctctgcatcactgagttacgaagtttcagacctgcaaccttataccgagtacatgttccgcttggttgcttccaatggatttgggtctgcacactccagttggatcccatttatgactgccgaggataagcccggacctgtcgtcccccctatcctgctggatgtgaaaagccgaatgatgctcgtcacctggcagcacccacggaagagtaacggagttataacacactataacatatatctccacggacgactttatctccggacccccggaaatgttaccaattgtaccgtcatgcacctgcacccgtatactgcgtataagtttcaggttgaagcgtgtacttcaaaaggctgtagcttgagcccggagagccagactgtttggacattaccaggggcacccgagggcatcccttcaccggagctgttcagcgataccccgacttccgtgattatctcatggcagccccctacacatcctaacggactggtggagaatttcacaatcgaacgcagggtaaagggtaaggaggaggtgactacgcttgttactctcccgagaagtcactccatgagatttatcgataagacctcagccctgtctccgtggaccaagtatgagtatagggtcctgatgagcacccttcacggcggaactaactcctctgcttgggtggaagtaacgacccgccctagcaggcctgcgggagtgcaacctcctgtcgtcacagtgttagaaccagatgctgtgcaggttacttggaagccccctctgatccagaacggagacattttaagttatgagatccatatgcctgatccccatatcactcttacaaacgtcacatctgccgtcctctctcaaaaggtgacccacctcattccctttaccaattatagcgtaactatcgtggcttgttccggtggaaatgggtacctggggggatgcacagaaagcctgcccacatacgtcacaacccatcccaccgtgccacagaatgttggtcccctgtctgttatccccctttccgaatcctacgtggttatctcctggcaacccccatcaaagcctaacggcccaaacctccgctatgagctgctgaggcgcaagattcaacagcccctcgcttctaatccacccgaagatctgaaccggtggcacaacatttattcgggcacacaatggttgtatgaggacaagggtttatcgcgattcacaacctatgagtatatgttattcgtccataactcagtggggttcacaccaagccgggaggtgactgtgaccacactggccggactccccgaacgcggagcgaacctgacagcatctgtgcttaaccacaccgcaatcgatgtcaggtgggccaagcccacagtccaggacctgcagggcgaagtcgaatactatactctcttttggtcatctgccacctctaatgactcactcaagattctgccagacgtgaacagtcacgtcatcgggcatctgaagcccaatactgaatactggattttcatttccgtcttcaatggtgttcatagcatcaactctgccggactgcatgcaaccacctgtgatggggaaccccagggcatgctcccccctgaggtcgtgattatcaatagcaccgccgtccgggtgatctggacttcacccagtaatccgaacggagttgtcacggagtactctatatatgtaaataataagttgtacaaaacagggatgaacgtaccaggctcgttcatcctcagggatttatccccttttacaatctatgatatccaggtggaggtttgcaccatatacgcatgtgtgaaatcgaatggcactcagatcaccaccgtggaagacacccccagtgacattccaacaccgaccataagaggcatcacgtcaaggtcccttcagatagactgggtttctccccgaaagccaaatggaatcattcttgggtatgacctactctggaaaacatggtacccctgcgccaagacccagaagctggtgcaggaccagtctgatgaactctgtaaggccgttaggtgccagaaaccggagagcatctgcggccacatatgttatagctccgaggcaaaagtctgctgcaacggcgtgctttacaatcctaaacccggacataggtgttgcgaggaaaagtacatcccattcgtgttgaactcaactggagtttgttgcggcggtaggattcaggaggcacagccaaaccatcaatgttgttcaggttactatgccagaattttgcctggagaagtctgttgcccggatgagcagcataacagagtttcagttggtatcggggactcctgttgtgggagaatgccttattctacctctggtaaccagatttgttgcgctgggaggctacacgatggccatggccaaaagtgctgtggacgacagatagtgtccaatgacctggagtgttgtggcggagaagaaggtgttgtgtataacagactaccaggcatgttctgctgcggccaggattacgttaatatgagcgatacgatttgttgcagcgcttcctctggggagagcaaggcccatatcaagaagaacgaccctgtgccggtgaagtgttgcgaaaccgaactcataccaaagagccagaagtgttgcaacggagtgggctacaaccctctgaaatatgtctgcagcgataaaatcagcacagggatgatgatgaaagaaacgaaagagtgtcggatcctatgccctgcctctatggaggctaccgaacattgtgggcgatgcgactttaactttaccagtcatatctgtaccgtgattcggggtagccataattcaacgggcaaagcctctatcgaagagatgtgttcatccgcagaggagacaatccacaccggatcagtaaatacctattcctatacagatgtgaacctgaagccatatatgacttatgaataccgaatatccgcctggaatagttatgggaggggccttagcaaagctgtccgtgctagaacaaaggaggacgtgccgcagggtgtcagccctcccacctggacaaagatcgataacctggaagacaccattgtgctgaattggcgcaagccaattcagtctaatggaccaataatctattatatccttcttaggaacggcatagaaagattccgcggtacttctctcagcttcagtgacaaggagggcatccaaccttttcaagagtactcgtatcagctgaaggcttgtaccgtggcaggatgtgctactagttccaaagttgtagctgcaaccacccagggggtacccgaatccatcctccccccttcaattactgctttgagtgctgtggccctacacctctcctggtcagtcccggagaagtccaacggggtgatcaaagagtaccagatcaggcaggttgggaaaggcctgatccataccgataccactgaccgaagacagcatacagtgactggccttcagccctacaccaattacagcttcactcttaccgcctgcacgtccgcgggttgtacatcctccgaaccattccttggtcagacattgcaggctgcccctgagggcgtgtgggtgactcctcgccatatcataatcaacagcacaacggtggagctatactggagtttgccagagaagcccaacggtctggtgtctcagtaccagctatcaagaaatggcaatctgttattcttagggggaagtgaggagcaaaattttaccgataagaacctggagccgaacagccggtacacttataagctcgaggttaagaccgggggaggttcctccgcgtcggatgattacatagtgcagaccccaatgtctacgcctgaggagatttaccccccatataacatcactgtgataggcccttatagcatctttgttgcgtggatcccgccaggcatactcataccagagattcccgtagaatataacgtcctgctgaacgatggttccgtgacaccgctggcttttagtgtaggacaccaccagtccacactcctggagaacctcaccccgtttacacagtacgaaattcggatccaggcttgtcagaacgggtcgtgcggggtctcaagtcggatgtttgttaaaaccccagaggccgctcccatggatttaaattcccctgtcctgaaagcgctcggcagcgcctgtatcgagatcaagtggatgcctccagagaaacctaatggcataatcatcaactacttcatctaccgaagacctgcaggtatcgaggaagagtctgtgctcttcgtatggagtgagggagccctcgagtttatggatgagggcgataccctccgaccctttactctgtacgagtatagagtcagggcatgcaattcgaaaggatccgtggaaagcctgtggtccttgacgcagactttggaagctcctccgcaggattttccagcgccttgggcgcaggctacatcagcccactccgtgttgctgaattggacgaagcccgaatccccaaatggaatcatcagtcattacagagtggtgtaccaagagaggcccgacgaccccacgtttaactctccaacagtccatgcttttacagtgaagggaactagtcatcaggcacatctgtacgggctagagccatttactacctaccgcataggagtggtggccgcaaaccatgctggagagatcctcagtccctggacattgatccagacgctggaatcttctcccagtggcctgcggaactttatcgtggagcagaaagagaacggcagggcccttctcctgcagtggtcagagccaatgcgcacaaacggagtgatcaaaacttataatatcttcagcgatggctttctggagtactcaggtctaaatcggcagttcttgtttcggcgactcgacccttttaccctatacactctgactcttgaagcttgcacccgggcagggtgtgcacatagcgcaccgcaacccttgtggactgacgaagccccacctgactcacaattggccccaacagtgcactccgtcaaatctactagtgtggagctctcatggtcggagcctgtgaaccctaacggcaagattattcggtacgaggtgatcaggcgctgtttcgaaggcaaggcatggggaaatcaaacgatacaggcagacgaaaaaatcgtcttcacagagtataacacagagcgtaacacattcatgtataatgatacgggattgcaaccatggacacaatgcgaatataagatatatacctggaactccgcaggccacacgtgttcctcatggaacgtcgtcaggactctgcaggccccacccgaagggctgtcaccccctgtgattagttacgtgagcatgaatccccaaaaactgttaatttcttggatccctcccgaacaatcaaacggcattatccaatcctacagactgcagcgcaacgaaatgctgtaccccttctccttcgaccccgtgacctttaactacacagacgaggagctgctgccattttcaacatacagctatgccctgcaggcgtgtacatctggcggttgctctacatcaaagcccacaagcatcacgacactggaggccgcacctagcgaggtatctccacccgatctgtgggcagtcagcgcaacacagatgaatgtctgctggagtccaccaacagtacaaaatggcaaaattaccaaatacctcgtgagatatgataacaaagagagcctggctggccagggcctctgcctcttagtgtcacatcttcaaccgtattcccagtataacttttcactcgtggcttgtaccaatggtggctgtaccgcttccgtctctaagtctgcctggaccatggaggctctccctgaaaatatggactcgcccactcttcaggtcaccggcagcgagagtatcgagatcacatggaagccccctcgtaatcccaacggacagattagatcttacgagcttagaagggacggtactattgtatacaccgggctcgagacccggtacagagactttactcttacacctggggtggagtactcttacacagtgacagcatcaaattctcagggcggaatactcagccccttggttaaagatcgtacaagccctagcgccccaagtggaatggagccccctaaactgcaagccagagggcctcaggagatcctcgtgaattgggaccctccggttagaactaatggggacattattaactacaccctctttatcagagagctgttcgagcgggaaactaaaataatccatattaataccacccacaactcgttcggcatgcagtcctacatcgtgaatcaactgaaacctttccacaggtatgaaattagaattcaggcctgcactaccttagggtgtgcttccagcgattggaccttcatccaaacccccgagatcgccccactgatgcagcccccaccccatttagaggtgcaaatggcgccaggcggattccaacctacagtcagtctgctgtggactggacccctacaacctaatgggaaggtgctgtattatgagctgtataggcggcaaatagcgacgcaaccaaggaagagcaatccagtactgatttataatgggagttcaacatccttcatagattctgagctcctgccgttcacggaatacgagtatcaagtgtgggctgtaaactctgcagggaaagctccaagtagctggacatggtgcaggactggtccggctccaccggagggcctccgtgcaccaacttttcatgtgatctccagcacgcaagctgtggtgaacatttccgcccctggtaaaccaaatggaatcgtgagtttatatcggctcttttcttcctctgcacacggagcagagacagtcttaagtgaaggtatggctactcagcagacactccacgggttgcaggcctttacaaattactctattggcgtcgaggcgtgcacttgtttcaactgttgctcaaagggccctaccgccgagctgcggacccaccccgcacctccttccggactgtcatcaccgcaaatcggcacacttgcctcccgcaccgcctcatttaggtggagccccccaatgttccctaatggtgtgattcacagttatgaactgcagttccatgtggcctgccccccagactccgccttgccatgtacgcctagccagatagagacaaagtatacaggcctggggcaaaaggcctctttgggtggtttgcagccatacacaacctacaaactgagggtcgttgcccacaatgaggtagggtcaaccgcgtcagagtggatttcttttactacacagaaagagctcccgcaatatagagctccttttagcgtagacagcaatttgtcagtggtctgtgttaattggtctgatactttccttctaaacggccagttgaaggagtacgtgttgaccgatggcggacggagggtttactccgggttggatacaactttgtatattcctagaacagccgacaagaccttcttcttccaggtgatctgcaccacagacgaaggatctgttaagacccctctgatccagtacgacacaagcactgggctcggcctggtgctcaccactcccggaaaaaaaaaggggtcccggtccaagagtaccgaattctattcagaactgtggttcatcgtcctcatggctatgttgggactaatcctgctcgcaatttttctgagtctcattctgcagagaaagatccacaaggaaccctacatacgggaacgacccccactggtaccactccagaaacggatgtcaccgctcaatgtgtatcccccaggcgagaatcacatgttcgattccgtagcagacatctctgacgtgagtagcaacgttaccctgaaatcctacacgatgcattttgaagggttagcagacactaagatacccagatctggcacacccgtttctatccgtagcaatcggtccgcgtgtgtactgcgcattccctctcaaaaccaaacttcgttgacttactcacaggggtccctgcatcggagcgtgtctcaacttatggatatccaggacaaaaaagtcctgatggacaattctctgtgggaagccatcatggggcacaactcaggtctgtatgtggatgaggaggatctaatgaacgccattaaggatttttcgtcagtgaccaaggaacggactacgttcaccgatactcacctgtaa

SEQ ID NO: 246416 - DNA, 2538 bp, synthetic construct
  misc_feature 1..2538: note = Description of Artificial Sequence: Synthetic coding sequence
  source 1..2538: mol_type = other DNA
atgcggaccgaggccgtggtaaacagtcagggccaaacggattacttaacgaaggattctgatcaggacgtggccctcaaactggcacaggaacgcgctgagatcgttgcgaaatatgaccgtgggcgagaaggggcagagatcgagccatgggaagacgccgattacttggtgtacaaggtgacagacagatttggctttctccacgaggaagagctgcctgaccataatgtggcagtcgaaaggcagaagcacctggaaattgagaggactacaaagtggctgaaaatgctcaaaggttgggagaagtataagaacaccgagaaattccatcggaggatctataaggggatacctctgcagctgaggggagaagtatgggctctactgcttgaaatcccgaaaatgaaagaggagaccagagatctgtattctaaattaaagcaccgggctcgcggttgtagccctgacattaggcagattgatctagacgtcaaccggaccttcagggaccatatcatgttcagggaccggtacggcgtgaaacagcagtctctttttcacgtgctagccgcatactcaatttataatacagaggtgggctattgccaaggcatgtctcagatcacagctctcctcctcatgtacatgaacgaggaagatgcattctgggctctggtcaagctctttagtggcccaaaacatgcaatgcacggctttttcgtgcaaggatttcctaaattgctacgatttcaggagcatcacgagaaaatactcaataagtttctatccaagttgaagcagcaccttgactcccaagagatttacaccagcttctatacaatgaagtggtttttccagtgcttcctggatagaacccccttcaccttgaatctaaggatctgggatatttatatcttcgaaggcgaaagggtgttgactgccatgtcctacactatattaaagctccacaagaaacaccttatgaagttatctatggaggagctggtggagttcttccaagagactcttgccaaagacttctttttcgaggacgacttcgtcattgagcagctgcagatctcgatgaccgagctcaagcgcgcaaagctggacttacccgaaccaggaaaggaggatgagtacccgaagaagcccctgggccagttgccacctgagctccagagttggggcgtgcatcatttatctaacggccagcggtctgtggggcgtccatcccccttggcctcggggaggagagaatcaggcgctccacacagacgccacgagcacagtcctcaccctcagagccggactggtaccccagagcgagcccagcccccaaggcggaagtctgtggaagaagagagcaagaagctcaaggatgaggccgattttcagcggaagctcccctccggcccacaggatagctcccggcagtataatcatgcagctgccaaccagaattctaacgcaacgagtaacatccggaaggagttcgtgcccaagtggaataagccgagtgacgtgagcgcaactgagcggaccgctaagtacacaatggagggtaagggcagggccgcacatcccgctctggctgtaactgtccccggtcccgctgaagtacgcgtgtccaacgtgcgacccaagatgaaagcactggatgctgaggacggtaagaggggaagtacggcatcacagtacgataacgtgccaggtccagaactcgactcaggcgcatccgtcgaggaggcactggagcgggcatacagccaatccccacgacacgccctgtatcctcccagtcccaggaagcatgctgagcccagttctagcccctctaaggtcagcaataaattcacgtttaaagtacagccgccaagccacgctcgctacccctcccagttggatggtgaagccaggggtcttgcccaccccccttcctattctaacccgccagtatatcacggaaattctcccaagcacttccctactgcaaactcttccttcgcatccccacagttctcccctggcacccagttgaacccatcacgacgaccacatggatccacattatccgtctcagcctccccagaaaaatcttactctcgaccaagcccacttgtgctcccgagttccagaatcgaggtgttacccgtggatacaggtgccggaggttatagtggtaatagcgggtcgccaaagaacgggaagttaattattccgccagttgattacctgcctgacaatcggacatggtctgaggtttcttacacttaccgcccagagacacaaggacagtcgtggacacgcgacgcgagccgcggaaacctgcctaagtatagcgcatttcaattagcaccattccaagaccacggtctgcccgcagtgtccgtggatagtcccgttaggtacaaagcttctcccgctgccgaggatgcctctccctcaggttacccttactcgggtcctccccctccagcgtaccattatcgcaatcgcgacggactgagcattcaggaaagcgtcctgctgtag

SEQ ID NO: 246417 - DNA, 2487 bp, synthetic construct
  misc_feature 1..2487: note = Description of Artificial Sequence: Synthetic coding sequence
  source 1..2487: mol_type = other DNA
atgaattcggatcaagatgtcgcactcaaattggcccaggaaagggctgagatcgtagctaagtacgatcgcggtcgcgagggggctgagatagaaccttgggaagacgccgattatttagtgtacaaagtgactgaccggtttggcttcctgcacgaggaggagctgcctgaccacaatgtcgccgtggaacgtcaaaagcatctcgagatcgaaagaactaccaagtggctgaagatgcttaaggggtgggagaagtacaagaatactgagaagtttcacagacgcatctacaagggcattcccctgcagttaaggggggaagtctgggctctgcttctggaaatacccaaaatgaaagaagaaacgcgggacctctacagcaaactaaaacaccgtgcccgtgggtgttcacctgacattcgccagatcgatctggacgtcaaccggacgttccgggatcacatcatgtttcgcgaccgatacggcgtaaagcagcagtccctgttccacgttctggccgcatacagcatttataacacggaagttgggtactgtcagggcatgagccagataaccgctcttctacttatgtacatgaacgaggaggatgccttctgggccctcgtaaagttgtttagtgggcctaaacacgctatgcatgggttctttgtgcaggggttccccaagcttctgaggtttcaagagcatcacgaaaaaatcttgaataaattcctgtcgaaactgaagcagcatctcgattctcaggagatctacacctctttctacacaatgaaatggttttttcagtgtttcctggacagaactccattcacattgaatctgcgaatctgggatatatatatcttcgaaggggaaagagtgctcaccgccatgtcctataccattctgaaattacacaaaaaacatctcatgaagctgtctatggaggagcttgtggagttcttccaagaaacccttgccaaggatttcttcttcgaggatgacttcgtgatcgagcaactccaaattagtatgactgaactcaaacgggcaaaacttgacttacctgagcctgggaaggaagacgagtacccaaagaaaccgctgggccagctgcccccagaattgcagtcctggggagtgcaccacctgtccaacgggcagagatcagtgggcaggccctcgcccctggcctctggacgcagagagtcaggggctccacataggaggcacgaacacagcccgcatccacagtcccgcactggcacccctgagagggcacagcctcctaggcggaaatcagtggaggaggaaagcaagaaactcaaggatgaggcagatttccagcgcaaactgccatctggcccacaggactcgagcaggcagtataatcacgctgcagctaatcagaacagcaacgcgacctcaaacatacgcaaggagttcgtcccaaaatggaacaaaccatccgatgtcagtgcgaccgagaggacggcaaagtacaccatggagggcaaaggaagggcggcacacccagcactcgccgtgactgtgcccggacccgctgaggtgagggtaagcaacgtgcgcccaaaaatgaaggctctggatgccgaagacggtaaaagaggtagtactgcttcgcagtatgacaatgtccccggaccagagcttgattccggggctagcgtcgaagaagccctggaaagggcctactcccagtcccctagacacgcactgtatccaccgagcccaaggaaacacgcggagcctagcagctccccgtcaaaagtatctaataaatttacattcaaggtccagcctccgtcccacgctagatacccttcacagctggacggagaggctcggggtctggcccatcccccatcttatagcaatccacccgtttatcacgggaactctccaaaacactttcccacagctaatagcagttttgccagcccccaattctcccccggtacacagctgaatcctagccgcagacctcacggctcgactttgtctgtatccgcctcaccagagaaatcctatagcaggccgtctcctctggtactgccttcttctcgaatagaagtcctgccagttgacaccggtgccggaggctattcaggcaattccggctcccccaaaaacggcaagctgattatcccgccagtggactacttaccagacaatcgcacttggtcagaggtctcgtacacttatcgtccggagacacaggggcagtcatggacacgcgacgcatccagaggcaaccttcctaaatactcagccttccagcttgctccatttcaggatcatggtctccccgctgtgtccgtggattctccagtccgttataaagcatctccggctgcggaggacgcttcgcctagtggctatccatactcaggaccccctccacctgcttaccactatcgtaatcgagacggcctgtctattcaggagtcggtgctgctgtag

SEQ ID NO: 246418 - DNA, 2487 bp, synthetic construct
  misc_feature 1..2487: note = Description of Artificial Sequence: Synthetic coding sequence
  source 1..2487: mol_type = other DNA
atgaatagtgatcaggacgttgccctgaagctggcgcaggaacgggctgagatcgtggccaagtacgacagggggagagagggagctgagatcgaaccatgggaggacgcagattacctggtgtacaaagtgactgaccgctttggctttctccacgaggaagagcttcccgaccacaacgtagctgtggagaggcagaagcatttagaaattgagagaaccacgaagtggctgaaaatgctgaaaggctgggaaaagtataaaaacaccgaaaaatttcatcggagaatatataaagggatccccctgcagcttaggggcgaggtgtgggcactgcttctcgagatccctaagatgaaggaagaaactagagacctatacagtaaactcaaacatagagccagaggctgctcaccagacatccggcaaattgacttggacgtcaatagaaccttccgggatcacataatgtttcgcgataggtatggggtgaaacaacaatccctgtttcacgtcctggcggcatattctatctataatactgaggttggctattgtcaagggatgtcacagattaccgctcttttgctgatgtacatgaacgaagaagatgctttctgggccctggtgaagctcttttccggccctaaacacgctatgcacgggttcttcgtgcaaggatttcctaaattactcaggttccaggaacaccatgaaaagattttaaataagttcttgtcaaaactgaagcaacatctggattctcaggagatttatacctctttttataccatgaagtggttcttccagtgcttcctcgaccgaactccttttaccctgaatttgcggatctgggacatttacatcttcgagggcgagagggtgctgacagctatgtcctacacaattttgaagctgcacaaaaaacatctgatgaagttgagcatggaagagttagtcgagtttttccaggagaccctggctaaggattttttcttcgaggatgactttgtgattgaacagttgcaaatcagcatgaccgagctcaagcgagctaaactggacctgcccgagcccggaaaagaggacgaatatccgaagaagcccctggggcagcttccccctgaacttcaatcctggggggtacatcatctctccaacggccagaggagtgttgggagacctagcccgctggcctccggcagacgtgaaagcggtgcaccacatagaagacatgagcactcgccacaccctcaatctcgcaccggcactccagaacgtgcacagcctcctaggcgaaaatccgttgaggaggagagcaaaaaactgaaggacgaggccgacttccagaggaagctgccaagcggccctcaggactcatcaaggcaatataaccacgccgctgcgaaccaaaatagtaatgccactagcaacattagaaaagagttcgtaccaaagtggaataagccatccgatgtctcagccactgaacgaactgccaaatacaccatggaaggcaagggtagagccgcacaccctgcactcgctgtgaccgtgcccggacctgccgaggttcgcgtatcaaacgtaaggccaaaaatgaaagcactcgacgctgaggacgggaaacggggatcgaccgcctcccagtatgataacgtacccggacctgaactggattccggggcttccgtagaagaggccttggagagggcctattcacagtccccaagacacgccctgtatcctccatctcccaggaaacatgcagagcctagctcctcgccctctaaagtatctaacaagtttaccttcaaggtgcagccgccatcgcacgcaaggtatccaagccagctggacggagaagctagggggttagcccatccacccagctactccaatcccccagtttaccacggcaacagccccaaacattttcctacagcaaactcctctttcgccagccctcagtttagtcccggaacacagttaaacccaagtcgccgtccacatgggagcacgctttctgtgagtgcatcccctgagaagtcttatagcaggccctcccccctggtgcttccaagctccagaatagaggtccttcccgtcgacaccggcgctggtggatactccgggaactctggctcacctaaaaatggaaaattgataattcctcccgtggactatcttcctgataatagaacttggtccgaagtttcttacacctaccgccctgagacgcaggggcaatcatggaccagggacgcatccagaggcaaccttcccaaatacagcgcctttcagctggccccatttcaggatcacggactacctgcggtgtccgtggattcgcccgtcaggtataaagcaagtccggctgccgaagatgcttctccaagtgggtatccctactccggaccaccccctccagcgtaccactatcggaaccgggacggcctgagcatccaggaatcggttctcctttag

SEQ ID NO: 246419 - DNA, 762 bp, synthetic construct
  misc_feature 1..762: note = Description of Artificial Sequence: Synthetic coding sequence
  source 1..762: mol_type = other DNA
atggccgctgccttccgcaaagcagccaagagccgccagagagaacaccgcgaacggtcacagcctggatttcgaaaacacctgggccttctggaaaagaaaaaggattacaaacttcgggcagacgactacaggaaaaagcaggagtacctgaaggctctcaggaagaaagccctggagaagaatcctgatgagttctattacaaaatgacaagagtcaagttgcaggacggagtccacatcatcaaggaaacgaaagaagaggtaaccccagagcaactgaaattgatgcgtacacaggacgttaagtacatcgagatgaagagagtggcggaagcgaagaaaattgaacgtctaaaaagcgaactacacctcttggacttccagggcaagcagcaaaacaaacacgtgtttttctttgacaccaagaaggaagtggagcagttcgacgtggccactcatctacagactgctccagaactcgtggatagagtattcaacagaccgcgaattgaaaccctgcaaaaggaaaaagtgaaaggggtgaccaaccagacaggtctgaaacggatcgctaaagagcgtcagaagcaatataattgcctgacccagcgaatcgagagggagaaaaaactctttgttattgcccaaaagattcagacacgcaaagatctaatggacaaaactcagaaggtgaaggtgaagaaagaaactgtgaacagccctgcaatatacaaattccagagccggagaaagaggtag

SEQ ID NO: 246420 - DNA, 447 bp, synthetic construct
  misc_feature 1..447: note = Description of Artificial Sequence: Synthetic coding sequence
  source 1..447: mol_type = other DNA
atggcagccgcatttcggaaggcagccaagagtaggcagagggaacatcgggaacgatcccagcccggtttccggaaacatctcgggctcctcgagaagaaaaaggactacaagctgcgtgctgacgattacagaaaaaagcaagagtacctcaaggccctccgaaagaaagccctggagaagaatcctgacgaattctactataagatgactagagtaaagctgcaggatggggtacatattataaaggagacaaaggaagaagtgacccccgagcagctaaagctgatgaggacacaggacgtaaaatacatagaaatgaaaagagtcgcggaagccaagaaaattgaacgtttgaagtctgagctgcacctgctggacttccagggtaagcagcaaaacaaacatgtcttcttcttcgatactaagaaagaagctaactcatag

SEQ ID NO: 246421 - DNA, 2124 bp, synthetic construct
  misc_feature 1..2124: note = Description of Artificial Sequence: Synthetic coding sequence
  source 1..2124: mol_type = other DNA
atgccagaagaggcaggctttccccctgctaaaaggtttcgcccaggatcgggacccccaagccgtgcgggatcattcccccctggccgacaggtggtcatgttactcactgctgggagcggcggtaggggcggtggcggaggcaggagacagcagccacctctcgcccagccatccgcctccccctatcctgaggccgttgagctccaacggcgaagcctgcccatttttcaagctcggggtcagctcctggcgcagttacgaaatctcgataacgctgtgttgatcggtgaaacaggttctgggaagaccacccagattccacagtacctgtacgaaggcggtatcagtagacagggcattatagcagtgacccagcctaggcgggtagctgcgatctcgctagcgacccgcgtgagtgatgagaagagaacagaattgggcaaacttgtaggatacaccgtgcgctttgacgacgtgaccagtgaagacacaaggatcaaattcctcaccgacggcatgctgttgcgcgaagccatctccgacagcctgctgcgaaagtattcctgtgttattctggatgaggctcatgaaagaacaatccacactgatgtcctgtttggagtggtcaaagcggcacagaaacgcaggaaggagcttggtaaactgcctcttaaggttatcgtcatgtccgcaacaatggatgtggacctcttctctcagtatttcaatggcgctcctgtcctgtatctagagggccgtcagcacccaatccaggttttctataccaagcagccccagaacgattatttacacgccgctctagtgagtgtttttcagattcaccaggaagccccaagctcacaggacattctggttttcttaaccggccaggaagagatagaggctatgtcaaagacctgccgtgacattgccaagcatctcccggacggatgtcccgctatgctcgtcctgccattgtacgcgagtctcccctatgcccagcagttacgtgttttccaaggcgcacccaagggctacagaaaagtgataatctccactaacattgccgagaccagcatcaccatcaccggtatcaagtacgtggtggacaccggaatggtgaaagctaagaagtacaatcccgattctggcctagaggtgctcgccgtacagcgagtctcaaaaacgcaggcgtggcagaggaccggccgagctggcagggaagactctggtatctgttacaggctgtataccgaggatgagttcgagaagttcgataaaatgaccgttccagagatccagcgctgcaacctggcctcagttatgcttcaactcctggcgatgaaggtgcctaacgtgctcaccttcgattttatgagcaagccatcacccgatcacattcaggcagccattgctcagctcgatttgttgggtgctctggagcacaaagatgatcagctgacactgacccccatgggtaggaaaatggccgcttttccactcgaaccaaagttcgccaagactatccttatgtcaccaaaattccattgtacggaggagatcctgaccatagtgtcactactctcagttgatagcgtgctgcataatcccccttcacggcgtgaagaggtgcagggtgtgcgcaaaaaattcatttcgtccgagggggatcacatgacgctgttaaacatttaccggactttcaagaatcttggagggaacaaagactggtgcaaagagaacttcgtgaacagcaaaaatatgaccctggtcgccgaggtgagagcgcaattgagagacatctgtctcaaaatgagcatgcctattgcatccagccggggagacgtcgagtctgtgagaaggtgtttggcacacagtttgttcatgtctacggccgagctgcaacccgatggaacttacgctacaacagatacacaccagcctgtggctatacacccgagctcagtgctgtttcattgcaagcccgcttgtgtggtttataccgagctgttgtacaccaacaagtgctacatgagagacctgtgcgtgattgacgctcagtggctgtatgaggccgcacctgagtactttcggcgaaagctacgcacggcacgcaactag

SEQ ID NO: 246422 - DNA, 1566 bp, synthetic construct
  misc_feature 1..1566: note = Description of Artificial Sequence: Synthetic coding sequence
  source 1..1566: mol_type = other DNA
atgcgaccagactggaaagccggagccggtcctggcggtccccctcagaagcccgcacctagttctcaacggaaacctcccgcacgaccttccgcagcagccgcagccattgccgtggcagccgcagaagaagagcggcgattgcggcaacgtaaccgattgagactggaggaagacaagccagccgtggaaaggtgcttagaagagcttgtcttcggcgacgtcgagaacgacgaggacgccctgttacgtcgcttgcggggacctcgtgtgcaggaacacgaggactcgggagactcagaggtagagaacgaggccaaggggaacttcccccctcagaaaaaacctgtatgggtggatgaggaggacgaagacgaagagatggttgatatgatgaataacagatttcgcaaagatatgatgaaaaacgcgagtgagtcaaagctctccaaagataatctgaaaaaaagattgaaggaagaatttcaacatgcaatgggcggagttcccgcatgggcggagactaccaagagaaagacaagctccgatgatgagtctgaagaggatgaggatgacttgctccagagaaccggaaatttcatttctacctcgaccagtttgcccaggggcattttgaagatgaaaaattgtcagcatgcgaacgctgaaagacctactgttgcaaggatctcctctgtacagtttcaccctggggcacagatcgtgatggtggccggtttggacaacgcagtgtctctgttccaagtggatgggaagaccaacccaaaaatccaatccatctatcttgagcggttcccaatcttcaaggcctgttttagcgccaatggtgaagaggtgcttgcaacttccacacacagtaaagttttatatgtgtatgacatgctcgctgggaaactcattccagtccaccaggttcgcggactcaaggagaagatcgtgagatcattcgaagtatccccagacggaagcttcttactgattaacgggatcgccggatatctgcatcttttagccatgaagacaaaggagctaattggctctatgaagatcaacgggcgtgtagcggcttctacattttccagcgattctaaaaaggtgtatgcctccagtggggacggtgaggtctacgtgtgggacgtgaacagtcgcaaatgcttgaaccggttcgtggatgaaggaagcctgtatggactgagtattgccacgtctcgcaatgggcagtatgttgcgtgcggcagtaactgtggggtggtgaacatttataatcaggactcctgtctgcaggaaacaaatcctaaacccatcaaggccattatgaacctcgtgactggagtaacgtctctcaccttcaacccgaccaccgagatactggctatcgcgtcagagaagatgaaggaggccgtgcggttggtccacctgccatcctgcacagtcttcagcaacttcccagtgatcaagaacaagaacattagtcacgtccacacaatggacttcagccctaggtccggctattttgctctgggaaatgagaaggcgcgtccctag

SEQ ID NO: 246423 - DNA, 8358 bp, synthetic construct
  misc_feature 1..8358: note = Description of Artificial Sequence: Synthetic coding sequence
  source 1..8358: mol_type = other DNA
atgaagacaaagcccgtgagtcacaagacggagaatacttatagatttctgacattcgcagaacgcctgggcaatgtgaatattgatattatccatagaatagaccgtaccgcatcttatgaggaagaggttgaaacctatttcttcgagggcctgctgaaatggcgcgagttaaatctgactgagcatttcggcaaattctacaaggaagtgatcgataaatgccagagttttaaccagcttgtctaccaccagaacgaaatcgtgcagagcctcaagacccacctgcaggtgaaaaattccttcgcctaccaacctctcctggacctggtggtgcagctcgctcgcgacctccaaatggatttctatccacacttcccggagttttttttgaccattacctctatactcgagacccaggatacagagcttctggaatgggcgttcaccagtctttcttacctctacaagtacctgtggcggctcatggtaaaggacatgagttccatctatagcatgtacagcaccttgttagcccacaaaaagctacatatacgcaacttcgccgctgagtcctttacattcttaatgcgaaaggtgtccgacaagaatgcactcttcaatctcatgttcttggacctcgataaacaccctgaaaaagtggagggagtcggccagctcctcttcgagatgtgtaaaggggtgaggaacatgttccacagctgcaccgggcaggccgtaaaacttatactacggaaactgggtccggttacagaaaccgagacacagctgccatggatgctaattggagagacactgaagaatatggtgaaaagcacagtgtcctatatttccaaggagcatttcgggacattcttcgagtgcctacaagagtcattgttggatctgcacaccaaagtgaccaaaactaactgctgcgaaagctccgaacagatcaagagactgttagagacctatctgatcctggtgaagcacggttctggcaccaagattcccacccccgcagacgtgtgtaaagtactgtctcagacgctccaggttgcgagcttgtccacttcatgctgggaaactttattggacgtaattagtgccctaatcctaggcgaaaatgtgtccctgccagagacactgataaaggagacgatagagaaaatcttcgagtctagatttgaaaagcgcctcatcttttcgttctcagaggtgatgtttgccatgaaacagttcgaacagttgttcctgcccagctttctgtcctacattgtcaactgtttcctgattgatgacgctgtggtgaaagacgaggccttggcaatcctcgccaagcttattctcaacaaagccgcaccgccaactgcaggctcaatggcaatcgaaaagtacccactggtgttttcaccccagatggtgggcttctatataaaacaaaagaaaacccgcagcaagggaagaaatgagcaatttccagtgctcgaccatcttctgagcatcatcaaattacccccaaacaaggataccacctacttgtcgcagtcatgggctgcgctggttgttcttccgcatattaggccattggaaaaggaaaaagtgattccgctagttaccggcttcatagaggcgttgttcatgacagttgataaaggctccttcgggaaaggaaatctgttcgttctttgccaggccgtgaatacattgttgtctttggaggaaagctctgaactcctacatttggtgccagtcgagcgtgttaagaatttagtattgacattccctctggagccaagcgtgctgctcctgactgatttgtactatcagcgtctcgctctgtgcggatgtaaggggcctttgtcccaggaagcactgatggaacttttccctaaactgcaagcgaacatttcaacgggagtaagcaagatccggctgctgactatccggatcttgaaccacttcgacgtgcagctgccagagtctatggaggacgacgggctgtctgagaggcagtccgtatttgccattcttaggcaagccgagcttgtgcccgcaaccgtgaatgactatagagagaaactgctccaccttcggaagttgaggcatgacgtggtgcagaccgcagtgcccgacgggcctcttcaggaagtgccgctaagatacctacttggaatgctgtacatcaacttctctgccctgtgggatcccgtgatcgaactaataagctctcacgcccatgaaatggagaataaacagttctggaaggtctactacgaacacctggagaaggcggctacacacgcagagaaagaactgcagaacgacatgacagacgagaagtccgttggggacgagtcctgggaacaaacacaagaaggtgatgtgggcgctctttatcacgagcagcttgcacttaagaccgattgtcaagagcgccttgatcacaccaacttccgttttctactgtggcgtgctctgacaaagttcccggagagagtggaaccacgaagtcgcgagctgtccccactgttcctgcggttcattaacaacgagtattatcctgctgaccttcaagtggcccctactcaagatctcagaagaaaggggaagggtatggtagccgaagagatagaagaagagcccgctgccggtgatgacgaggaactggaggaggaggctgtgccacaggacgaaagctcccagaaaaagaagacgcggagagccgcagccaaacagctgatcgcacacctgcaggtcttcagtaaattctccaatccaagggctctgtacctggagtcaaagctgtatgaactttacttgcagctgctcctgcaccaggaccagatggttcagaaaatcactctggattgcataatgacatataagcacccccacgtcctaccttaccgggagaacctgcagagattgctggaggacaggtcctttaaagaggagatcgtccactttagcataagcgaagataacgctgtcgtaaagacagctcaccgggcagatctcttccctatcctgatgagaatcctctatggccgaatgaaaaacaaaactgggtcaaagacccagggaaaatcagccagtggcactcgcatggcaatagtattgagatttttggccggaactcagccagaagagatccaaatttttcttgatcttcttttcgaaccagttcgacactttaagaatggagaatgccactctgcagtcattcaggctgtggaggacttagacctgtccaaggtgctgcccttaggaagacagcacgggatcctcaatagtcttgaaatcgttcttaagaatatcagccacttgatctcagcgtacctccccaagatcctacagattttattatgcatgactgctacagtaagtcacattctggaccaaagggaaaaaatccaactacgcttcattaaccccttgaaaaacttacgcaggctgggaataaagatggtgacagacatattccttgattgggaatcgtatcaatttaggaccgaggagatcgatgcagtcttccacggggctgtctggcctcaaatctcaagacttggaagcgagtcccaatactcgcctaccccgttgctgaagttgatctccatatggtcccgtaacgctaggtacttccccttgctggctaagcaaaaacctggacaccccgaatgtgacattctgaccaatgtgtttgctatcctgtccgcgaaaaacttgagtgacgctacagccagcatcgtgatggacatcgttgacgatttactgaatctccccgacttcgagcccacagaaactgtccttaacctcctggtaactggatgtgtctaccccggaatcgcggagaatataggcgaaagcattacaatcggaggtcgcctgattcttccacacgtgcccgcaattcttcagtatctgtccaaaaccacaatctctgccgaaaaggtcaaaaagaagaagaatagggcccaagtctccaaggaattaggcatcttatctaaaatctccaagtttatgaaggataaggaacagagcagtgttcttatcacgctgctgttacccttcctgcaccgcggtaacattgccgaggacaccgaagtggatatcctggtgaccgtccagaatttgttaaaacactgtgtagacccaacgtcattcctgaagccaattgcaaaactgtttagtgtgatcaaaaataaactttcaaggaagctcctctgtacagtgtttgagacattaagtgactttgaatccgggctgaagtatataacagacgtggttaagttgaacgcctttgatcagcggcacctggatgacattaattttgatgtgcgttttgaaacattccaaactatcacatcttatatcaaagagatgcagatagtggacgttaactacctgatccctgttatgcacaattgcttctataacctggagcttggagatatgagcctctcggacaatgcctccatgtgcctaatgagcataatcaaaaaactggcagctcttaacgtaaccgagaaagactatagagaaatcatccacaggagcttactggaaaaactccggaagggacttaagagccaaacagagagtattcagcaggactacactacaatcctgagctgtctaatacagacttttcctaatcagctggaattcaaggacctggtgcaattgactcactatcatgatcccgagatggatttttttgaaaacatgaagcacatccaaatacatagaagagctcgtgctctcaaaaagctcgcaaagcagcttatggagggaaaggtggtgctgagctcaaagtcactccagaactacatcatgccttatgcaatgactcccatttttgatgaaaagatgttaaaacacgagaatataactactgccgcaacggaaattataggagcgatctgcaagcatttatcttggagtgcctatatgtattatctgaagcattttatacatgttttgcaaactgggcaaatcaatcagaaactgggggtttcgctgcttgtgattgtacttgaggcctttcacttcgatcacaagactctcgaagaacaaatgggtaaaattgaaaatgaagaaaacgctatagaagcgattgagctcccagagccggaggcgatggaactagaaagggtggacgaagaggagaaggagtacacctgtaagtcattatctgataacggccagcctggcacacccgatccggcagactccggcggaaccagtgctaaggagagtgaatgtatcaccaagccggtgtcattcctgccccagaacaaggaagagattgagcgcaccatcaaaaatatccagggcacaattaccggggatatactgccacgtctgcataaatgtctggccagcactacgaaaagagaggaggaacataaattagtgaaaagcaaagttgtgaacgatgaagaagtcgtgcgcgtccccctcgcgttcgccatggtcaagctgatgcagtctctcccacaggaggttatggaggcgaatctaccatcaatcctcttgaaggtatgcgcgttacttaaaaaccgggctcaggagatccgcgacattgccaggagcacactggctaagatcattgaggatctaggggtccacttcttgttatatgtgctgaaggagttgcagacaactcttgttcgcggataccaagtccatgtgctgaccttcactgttcatatgttgttgcagggactcaccaacaagttgcaggtgggggacttggactcctgccttgacatcatgattgagatctttaaccacgaactctttggagctgtggccgaagagaaggaggtgaagcagatcctgtctaaggtgatggaagctaggcgcagtaaaagctacgacagctacgagatcctgggcaagtttgttggcaaggaccaagttaccaaacttatccttccgcttaaagaaatcttacaaaataccacgtcacttaagcttgctcggaaggtccatgaaacgctgcgaaggatcactgtggggctgatagtgaaccaggagatgactgctgagtcaattttactgttgagctacgggctcatatctgaaaatctaccactgctgacagagaaggagaagaacccggtggctcctgcccctgaccctcgactacctcctcagtcttgcctcctcctcccccctacacctgtcagaggcggacagaaagccgttgtgtcacgcaaaaccaatatgcacatatttatcgaatctggtctgaggctcttgcacctgtccctgaaaactagtaagatcaagagctccggcgagtgtgttctggagatgctggatccatttgtgtcattgctaatcgactgcttgggatctatggacgtgaaagtcataactggcgcactgcagtgtctaatctgggtattgcggttcccactcccaagcatcgaaacgaaagccgaacaactgaccaagcatcttttcttgctgttgaaagactacgccaagctcggtgctgcaagagggcagaactttcacctcgttgtgaattgcttcaagtgcgtaacgatcctggtgaaaaaggtcaagtcctaccagattaccgagaagcagctgcaggtgcttcttgcttacgcagaggaggacatctatgacacttctaggcaggccacagcattcggcttattaaaagcgatactgtcccggaagctgctcgtgcctgagatcgacgaggttatgagaaaagtttccaagctggccgtatcggcccagtctgaaccagctcgggttcagtgccgccaggtcttcctcaagtatatcctggactatcctctgggggacaagttgagacctaaccttgaattcatgctcgcgcaacttaattacgaacacgagactggcagagagtccaccctcgagatgatagcctacctgttcgacaccttcccacagggcctgctgcacgagaattgtggcatgttctttatacccttatgcctcatgacaatcaacgacgactcggccacttgtaagaagatggcctccatgactataaaatcactattaggtaaaatatctctggaaaaaaaagactggctgttcgacatggtgacaacatggtttggcgctaagaaaagacttaaccgtcagttggccgcattgatctgcgggctctttgtagagtcagaaggagtggacttcgaaaaaaggttaggcaccgtcttgccggttatcgagaaggaaattgacccggaaaacttcaaggacatcatggaggagactgaggaaaaggccgcagataggctgctctttagctttttgactctaatcaccaagctcattaaggaatgcaatatcatacaattcaccaagccagctgaaacgctgagcaagatctggagccacgtgcacagtcatttgcgccaccctcacaactgggtctggttgacggcagcacagattttcggcctgctcttcgcctcatgccagcctgaggagcttattcagaagtggaacaccaagaaaactaaaaagcacctgcccgagccggttgctataaaattcctggctagtgatctggaccagaaaatgaagagcatatctctggcctcctgtcaccagctgcattctaagttccttgaccagagcctcggggaacaggtggttaagaacttgctgtttgcggcaaaggtgttgtacctgcttgagctgtattgtgaagataagcagagtaaaattaaggaagacttggaggaacaagaagcattggaggatggggtggcttgtgccgacgagaaggcagagagcgacggtgaagagaaggaggaggtgaaggaagaattagggaggccagcgacgctgttatggcttatccaaaaactgtcccgaatcgccaaacttgaagctgcatactctcccaggaatcctttgaaacggacctgtatcttcaagtttttaggtgcggtggccatggacctgggaattgacaaagtcaagccctacttgcccatgattattgctcccttattccgggaactgaattctacatactccgaacaggatcctttgctaaagaatcttagccaagagattatcgaactgctgaaaaagcttgtagggctggaaagtttctccctggctttcgcctctgtgcagaaacaggcaaatgagaagcgagcactcagaaagaaacgcaaagctctggaatttgtcacaaaccctgatattgccgcaaaaaagaaaatgaagaaacacaaaaacaaatcagaggcgaaaaaaaggaagatagagtttcttcgtccaggatataaggcaaaaaggcagaagagccattcactgaaagacttggctatggtcgaatag

SEQ ID NO: 246424 - DNA, 1440 bp, synthetic construct
  misc_feature 1..1440: note = Description of Artificial Sequence: Synthetic coding sequence
  source 1..1440: mol_type = other DNA
atggtcggtaggagcaggagacggggtgcagccaaatgggcagccgtgagagccaaagcaggtccaacacttactgacgagaatggggacgacctaggtctgcccccatcccccggagatacatcctactatcaagaccaggtggatgacttccatgaggctcggagccgtgctgccttggccaagggatggaacgaggtgcaaagcggggatgaggaagatggcgaggaagaggaggaggaagtactggccttggacatggatgacgaggacgatgaggacggcggtaacgctggcgaggaggaggaggaagaaaatgcagatgatgatggagggtcctctgtccaatcagaggcagaagcctcagtcgacccgagcctgagctggggtcagagaaagaagctgtattacgataccgattacggctctaaatcacgaggaagacagtcacaacaggaggctgaggaggaggaacgcgaggaggaggaggaggcacagataatccagcgccgacttgcgcaggccctccaggaagatgactttggcgtggcttgggtcgaggcgttcgccaaaccagtgccacaggtagacgaggctgagacccgcgtcgtgaaggatctggcaaaagtgtccgttaaggaaaaactgaaaatgttacggaaagaatctcccgaactgctggagctgattgaagacctcaaagtgaagttgactgaggtcaaagacgaactggagcccctgctggagctcgtggagcaagggatcattccacccggaaaaggatctcaatacctgagaactaagtataatctgtacctgaattactgctcgaatatctctttctatctgatacttaaggcgagacgcgttcccgcacatggacacccggtgattgagcggcttgttacctataggaacctcatcaacaaactctccgtcgttgaccaaaagctcagttcagagatacggcacctactcactttgaaggacgacgctgtgaagaaggagttgatccccaaagcaaagtctaccaagcctaagccaaaaagcgtaagcaaaacgtcggcggcagcgtgcgccgtgacagacttgtccgacgattccgattttgatgagaaggccaaacttaaatattataaggaaatcgaagataggcagaagctcaagcgcaagaaggaagaaaactccacggaagagcaggctcttgaagaccagaacgcgaagagagcaatcacctatcagattgcaaaaaataggggactcaccccgaggagaaagaaaattgatcggaaccccagggtaaagcaccgcgagaagtttcgtagggcaaagatacgtcggagaggccaggtgagagaagtgcgcaaggaagagcaaagatatagcggtgaactgtccggaatacgggctggggtgaagaagtccataaaattgaagtag

SEQ ID NO: 246425 - DNA, 756 bp, synthetic construct
  misc_feature 1..756: note = Description of Artificial Sequence: Synthetic coding sequence
  source 1..756: mol_type = other DNA
tgaatcggcttgatgagtttaagcaaggggctactggaggagaaataccgctacctgttcaaggaagtcgccggaccgaccgagatgtgcgatcaacggcagctgggcctgttactgcacgacgcaatacaaatcccacggcaactgggggaggtagcagcattcgggggaagcaacatcgagcccagcgtcagaagctgttttcagcagaacaataacaaacccgagatcagtgtaaaggaatttattgactggatgcacctggagccacagagcatggtgtggctgcctgtattgcaccgcgttgcagccgctgagaccgcaaaacaccaagcgaagtgcaatatttgcaaagaatgcccaatcgttgggtttcggtaccggagcttgaagcattttaactacgacgtatgccagagctgctttttttcaggacgcacagccaaggggcataaactgcattaccccatggtagaatactgcattcctactaccagtggtgaggacgtcagagattttacgaaggttttgaaaaacaaattccgaagtaaaaagtacttcgcaaagcatccccgactgggctacctgcctgtgcagacagtgctggagggggacaacctcgagactccgagccagagcccgcagttatttcatgacgacacacactccaggatagaacagtatgctacccgtctggcccaaatggaacgcaccaatggctctttcttgacagattcctcctcgactaccggttag

SEQ ID NO: 246426 - DNA, 201 bp, synthetic construct
  misc_feature 1..201: note = Description of Artificial Sequence: Synthetic coding sequence
  source 1..201: mol_type = other DNA
atgataggtctgaactttaatctccgagaattgctcaccaaattcgagaaagatattcaggctgagatcgacgctcacaacgacatctttaaaagtatcgatggcaacaggcagaaaatggtgaaagcactcgggaacagcgaagaggccaccatgctacagcaccgtttggatgatatgaatcagcggtggaatgattag

SEQ ID NO: 246427 - DNA, 2967 bp, synthetic construct
  misc_feature 1..2967: note = Description of Artificial Sequence: Synthetic coding sequence
  source 1..2967: mol_type = other DNA
atgcaaattctcagatgcctgcaaaagtgtggtaaattaaagatgatggccgttgtcagaacctcattgcaaaaagttgtcgttttgctacaccgactgcagcgcatggcagtttccagccccaggtatcagaagctatgtaaagatattcaggccgagatcgacgcacataatgacatttttaaatcaatcgatggcaaccgacaaaaaatggtgaaggctctcggaaactcagaggaagccacgatgctccaacatcggctggacgacatgaatcagaggtggaacgatctgaaagctaagagtgcgtcaatccgagcccatctagaggcatccgcagagaagtggaacagactgctgatgagcttggaggaactcatcaaatggctcaatatgaaagatgaagagttgaaaaagcagatgcctattggaggcgatgtccctgcccttcagcttcaatacgatcattgtaaagctttgagaagggaactcaaagagaaggagtattccgtgctgaacgcagttgaccaggccagggtatttctggccgatcagccgatcgaggccccagaggagcctagaaggaaccttcaatccaaaacagaacttactcctgaagaacgcgcacaaaaaattgcaaaagctatgcggaagcaatctagtgaggttaaggaaaaatgggagtctctcaacgcagtcaccagcaactggcaaaagcaggtggacaaggctctggagaagcttcgtgatttgcagggcgctatggatgacttagatgcagacatgaaagaagcggaaagcgtgagaaatggatggaagcctgtcggggacctccttattgactcattgcaggatcacatcgaaaaaattatggcatttagggaggaaatcgccccaatcaactttaaggtaaagactgtcaatgacctgtcaagccagctctcgcccttagacctgcatcccagtttaaaaatgtcacgccaactggatgatctgaatatgcggtggaagctgcttcaagtgtcagtggacgatagactgaagcagctacaggaagcacacagagacttcggcccaagctcacaacatttcctgtccaccagcgttcaactaccgtggcagagatcaatatcccacaacaaggttccttattacatcaatcatcagacccagaccacatgctgggaccatcctaaaatgaccgagttgttccagtctctggccgaccttaataacgtccggttcagcgcctatcgaacagccattaaaatcaggcgcctccagaaggcactgtgcctggacctgcttgagctaagtaccacaaacgagatcttcaaacaacataaactcaatcaaaacgatcagctgctgtccgtccctgacgtgattaactgccttaccactacatatgacgggctggagcaaatgcacaaagacctggtgaatgttccactttgcgtggatatgtgcctgaattggctactgaacgtatatgatacaggcaggaccggtaagatccgcgtgcaaagtctgaagatcggattaatgtcattaagcaaagggctactcgaagagaaatataggtatctcttcaaggaggttgctggacctacagaaatgtgcgatcagcgccagttagggcttctgctgcacgacgcgattcagatcccacggcaactcggcgaagtggccgcttttgggggatcaaacatcgagccatctgtacgcagctgctttcagcagaataacaacaagccagaaatctcggttaaggagtttattgactggatgcatctggaaccgcaatctatggtgtggctgcctgtgttgcatcgtgtggcagcagcggaaacagcaaaacaccaggccaagtgtaacatctgtaaagaatgtccaattgtcggttttcggtatcgtagcctcaagcattttaactatgacgtgtgtcaatcttgcttcttttccgggcgtacagcgaagggacataaacttcactatcccatggtggagtactgtatccctacaacgtccggcgaggatgtgagggactttacaaaagtgcttaagaataagttccgttcaaaaaagtacttcgcaaaacacccaaggctgggctatctcccagtgcagactgtacttgagggagacaacttggagacgccgattacccttatatccatgtggcccgagcactacgaccctagccagtcccctcagttattccacgacgacactcattcacgtattgagcagtatgctacacgcctggctcaaatggagaggacgaacggaagcttcctgactgattccagcagtactacagggtcagttgaggacgagcatgccctcattcaacagtattgccaaaccttggggggtgagagcccagtgtcccaacctcagtctccagcccagattctgaagtccgtggagcgagaggagaggggcgagttagaaaggattatcgcggacttagaggaggaacagcgaaatttgcaagtggaatatgagcagcttaaggatcagcacctcagacgaggactgcccgtggggtccccacccgaatctatcatttctccccaccatacttccgaagattccgaactcattgctgaggccaagcttctgcggcagcacaaaggcaggctggaggcccgtatgcagatactagaagatcacaataaacagttagaaagtcagttgcataggctgagacaactgctggagcagcctgaatcggactctagaatcaacggagtaagcccatgggcttctccacagcatagcgcattgtcctactctttggatcccgacgcttctggcccacaattccaccaggcagccggagaagacttactggccccaccgcatgacacatccaccgacctcacagaagttatggagcagatacactccacgtttccttcttgctgcccaaacgtgccctctcggcctcaagccatgtag

SEQ ID NO: 246428 - DNA, 3069 bp, synthetic construct
  misc_feature 1..3069: note = Description of Artificial Sequence: Synthetic coding sequence
  source 1..3069: mol_type = other DNA
atggctaagtacggagagcacgaagcctctcctgataatggtcagaatgagtttagcgacattattaagagccgcagtgatgaacacaatgatgtccagaaaaagacctttacaaagtggatcaatgcaaggttctcaaagtcagggaagccccctattaacgacatgtttaccgatctcaaggatgggaggaagctcttggacctgctcgaggggctcacaggaaccagtctccctaaggagagggggtcgactcgtgtgcatgcgctgaacaacgttaatagagtgctccaggtcttgcaccagaataatgtagaacttgtgaacatcggaggaactgatatagtggatggcaaccacaaactcaccctgggtctcctgtggtctattatacttcactggcaagtaaaggatgtgatgaaggatgtcatgagcgatctgcagcagactaattcagaaaagatcctcctgtcctgggtgcggcaaactaccaggccatacagccaggtaaacgtccttaacttcacaacctcatggactgatggtttggccttcaatgcggttctgcacaggcataagccggacctcttctcctgggacaaggtcgtaaagatgagccctatcgagagacttgagcacgcctttagtaaagcccagacttacctcggtattgagaagcttctggatcctgaagacgtcgctgtgcagttacccgataagaagagtattatcatgtacctgacctccctcttcgaggtcctgccacagcaagtgaccattgacgccatcagagaagtagagaccctgccaaggaagtacaaaaaggaatgcgaggaggaagccataaacatccagtccacagcccctgaggaggagcacgaaagcccgagagccgaaaccccttccactgtcacggaagtcgatatggatctagatagttatcagatcgccctcgaagaggtgttgacttggctcctgagcgccgaggacacattccaggaacaggacgacatctcggacgatgtagaggaagttaaggatcagttcgcaacccacgaggccttcatgatggagctaacagcccaccaaagcagcgtgggctcggttctgcaggccggaaatcagttaattactcagggaactctctctgatgaagaggaattcgaaattcaggagcagatgaccttacttaatgccagatgggaagcgttgcgtgtggagagtatggatcggcagtcccggctacacgacgtactaatggagttgcagaagaagcagttgcagcagctgtctgcttggctgaccctgacagaagagagaattcagaaaatggagacctgccctttagacgacgatgtcaaaagcttacaaaaacttctggaggaacacaaaagcctgcagtccgacctcgaagccgagcaggtgaaggttaatagcctgacacatatggtagttatcgtggatgagaactcaggagagtcagctaccgctattctggaggatcagttgcagaagctaggggagaggtggactgccgtttgtcgctggacagaggagagatggaatcgcttgcaggaaatcaacatcctctggcaagagttgttagaggaacagtgtctcctgaaagcctggcttacagaaaaggaggaggcgctcaataaggtgcagactagtaactttaaggaccagaaagagctgagcgtctcggtgcgaagacttgccattctgaaagaggatatggagatgaagcgccaaacgttggatcagctgtctgaaataggccaggacgtcggccagctgctggacaattctaaggcgtctaagaaaattaactccgatagcgaagaattgacccagagatgggattcactggtccagagattagaggattctagtaatcaggttactcaagcggtagccaagttggggatgagccagataccccaaaaggatctcctcgagacagtgcgcgtgagagagcaagctattaccaaaaagtctaagcaggaactgcctcccccaccaccgccaaagaagagacagattcacgtggatatcgaagcgaaaaagaaatttgacgccatctcggccgaattgttgaattggattttgaagtggaagaccgcgatccagacaaccgaaattaaagagtacatgaaaatgcaggatactagcgaaatgaagaagaagctaaaagccctggagaaggagcagagggagcgcatacctagagctgatgagctgaaccagaccgggcagattcttgtcgagcagatgggaaaagagggtctgccaaccgaagagatcaaaaacgtgctggaaaaagtttcaagcgaatggaagaacgtgagccagcatcttgaggacctggagagaaagattcagctgcaagaagatataaacgcgtactttaagcaacttgatgaactagagaaggtaatcaagacaaaagaagaatgggtcaagcatacctcaatttccgagagcagtcggcagtccttacctagccttaaagattcctgtcaaagggagctgaccaatttgttagggctacatccgaaaatagagatggctagggcatcatgttccgcgttaatgtcacaacccagtgctcctgactttgtccagaggggttttgatagctttttgggtcggtaccaggccgttcaggaggctgttgaggaccgccagcagcacttggaaaatgaactaaaaggccaaccgggtcacgcctatcttgagacactgaagaccctgaaggatgttttaaatgattctgagaataaagcacaggttagtttgaatgtcctcaacgacctcgctaaggtggaaaaagcattacaggagaagaagactctggatgagattttggaaaaccaaaagccagccctacataaactagccgaagaaacaaaggccttagaaaagaacgtacatcccgatgtggagaagctttacaagcaggaattcgatgacgtccagggcaagtggaacaaactgaaggtcctcgtgtccaaagacttgcacttgttagaggagattgcgttaacactgcgcgcttttgaatag

SEQ ID NO: 246429 - DNA, 10302 bp, synthetic construct
  misc_feature 1..10302: note = Description of Artificial Sequence: Synthetic coding sequence
  source 1..10302: mol_type = other DNA
atggccaaatacggagaacacgaggctagtcccgataatgggcaaaatgagttttccgatataatcaaatccagatctgatgaacacaatgatgttcaaaagaaaacattcaccaaatggatcaacgcccgtttcagcaaaagcggaaagccacccattaatgatatgttcaccgacctgaaagacggacgcaaacttttagatctgctcgaaggtctcacggggacttccctgccgaaggaacgaggctccactcgggttcatgccctgaataacgtgaaccgcgtccttcaggtcctccaccagaataatgtcgagttagtgaatataggaggaaccgatatcgtagatggcaatcacaagcttactctcggactgctgtggtcaataattctgcactggcaggtcaaggatgtgatgaaagacgtcatgtccgacttacagcagacaaacagtgagaagatcctcctatcctgggtgcgacagactacgaggccgtattctcaggttaatgtattaaatttcactacaagttggaccgacggactggcatttaatgcggtactccataggcacaagcccgacctgtttagctgggataaggtcgttaagatgtccccaatcgagagactcgagcatgctttttccaaggcccagacctaccttggaatagaaaaacttttagaccctgaggatgtggccgtgcagctgccagacaaaaaatctataattatgtacctgacctctttgtttgaggtgctgccgcagcaggtcaccatcgacgcgatcagggaggtcgaaactctgccaaggaaatacaaaaaggagtgcgaggaagaagcaataaatatccaaagcactgctccagaggaagaacacgagagtccacgagctgaaacgccgagcactgtgaccgaggttgacatggacttagattcctaccagatcgcccttgaagaagtgctcacctggttactgtctgcggaggatactttccaggagcaggatgatatctcagatgatgtcgaggaggtcaaagaccagttcgccactcacgaagccttcatgatggagctgactgcccaccaatccagtgttgggagtgtgctacaagcaggaaaccagctcatcacacaggggacgctgtctgacgaagaagaattcgaaatacaggagcagatgacgctactcaatgcacgatgggaggctcttcgggttgagtccatggatcgacagtctcgactgcacgacgtcctgatggagcttcagaagaaacagctgcagcagctaagcgcttggctgacactgacggaggaacggattcagaagatggaaacctgcccactggacgacgacgtgaagagcctgcagaaactattggaggagcataagtcattacagtctgaccttgaggccgagcaggtgaaggtgaactccctgacccacatggtcgtgattgtagacgaaaacagtggagagagcgccactgctatcctcgaagatcagctccagaagttgggggaacgatggactgccgtgtgtcgttggacggaagaaaggtggaaccggctgcaggagatcaacatcctttggcaagagctgctggaagagcagtgtctgctaaaggcctggctgacagagaaggaggaggcgctgaataaggtacagacttccaatttcaaagaccagaaagaactcagcgtttccgtgcggagactggctatcttaaaggaggatatggagatgaagcgccaaaccctggaccagttgtctgagatcgggcaagatgtggggcagctcctggacaactccaaggctagtaaaaagatcaattccgactccgaagaattgacacagcgctgggacagtctcgtgcagcgtctggaggacagcagcaatcaggtgacccaggccgtggccaaactcggcatgtcccagatcccacagaaagacctgcttgaaacggtgagggtgagagagcaagccattaccaagaagtctaagcaagagctgcctcctcccccaccacctaaaaaaaggcaaatccacgtcgatatcgaggctaagaagaagttcgatgccatttctgccgagctgctaaactggatcctgaaatggaagactgccatccagacgaccgagatcaaagagtacatgaagatgcaggacacatcagagatgaagaagaagttaaaagccttggaaaaagaacagagagagcgtatccccagggcggatgagctgaaccagactggccagatcctggttgagcagatgggcaaagaaggactccccaccgaagagatcaagaacgtcctcgaaaaggtgtcttcggagtggaagaatgtatctcagcatctcgaggatttagagcgcaaaatccaactacaagaggacattaacgcctattttaagcaactcgacgagctggaaaaagtcatcaagaccaaagaagaatgggtgaagcatacatctatctcggaaagctcgcgacagtcactgccaagcctcaaagattcttgccaacgcgagctgactaacttactgggactccaccctaaaatcgagatggcccgagcttcatgctccgccctgatgtcccagccatctgcccctgactttgtgcaacgtggatttgatagctttcttgggcgatatcaggcagtgcaagaagcggtggaagacagacaacagcacctcgagaatgaactcaaagggcagccagggcacgcctacttggagacattaaaaaccctcaaagacgttctcaacgattcagaaaataaagctcaggtgtcgcttaacgtcttgaacgatttggcgaaagtggagaaggctctgcaagaaaagaagaccctggacgagattctcgagaatcaaaagcctgcactacataaactcgccgaagaaaccaaagctctggagaagaatgtgcacccagacgtcgagaaactgtataagcaagagtttgacgatgtccagggcaagtggaacaaactcaaagtactggtgtctaaagatctgcatctgctcgaggaaattgccctcactctgcgagccttcgaagcggactccaccgtgatcgagaagtggatggacggcgtgaaggattttttgatgaaacaacaagccgctcagggagatgacgccggtctgcagcggcagctcgaccagtgttcagccttcgtgaatgagatcgagacaattgagtcctctctgaagaatatgaaggagatagaaacaaatctacgatcaggtcccgtggcagggatcaagacatgggtacagacgcgcctgggtgactaccagacccaactggaaaagctgtcgaaggagatcgccacccagaagagccgtttgtcggagtcccaggaaaaagccgctaatctcaaaaaagacctcgccgaaatgcaggagtggatgacgcaagctgaagaggagtatttggaaagagattttgagtacaaaagtccagaggaactcgagtccgcggtggaagaaatgaagagggcgaaggaggatgtgctgcagaaggaggtcagggtaaagatccttaaggataatattaaactgctcgcggctaaggtgccttccggcggacaggaactaaccagcgaacttaacgtcgtgttagagaactaccagcttctgtgtaacaggatccggggaaagtgtcacacacttgaggaagtgtggagttgttggatcgagctgctacattatcttgatctggagacaacttggctcaacaccctggaagagagaatgaaatcgactgaggttctacctgagaagaccgatgccgtgaatgaggcactggaatctcttgagagtgtgctgcggcacccagcagacaacagaacacaaattcgtgagctgggacagacacttatcgacggaggcattctggatgatataattagcgagaagctggaggcattcaattctcgatacgaggacctctcccatttagctgagagtaagcaaatctcccttgagaagcagctgcaagtccttcgggagacagaccagatgctgcaggttctgcaggaatctctgggagagctggataagcagttgaccacctacctgaccgaccgcattgatgcctttcaggtgccacaagaagcccaaaaaatccaggctgagatcagcgcccacgagctcactctcgaggagctcaggcgcaatatgcgatcccagccactcaccagccccgagtcacgaactgcaagagggggatcccagatggacgtgctgcagcgcaagctgagagaggtaagtactaaatttcagctgttccagaaaccagctaattttgagcagcgaatgctcgactgtaagcgcgtcctcgatggcgtaaaggccgagcttcacgtgcttgatgtcaaggacgtggaccctgacgtcatccaaacccatttagacaagtgcatgaagctttacaaaactctttccgaagtgaagctggaggtggagacagtgatcaagaccggcaggcacatcgttcagaagcaacagactgataaccctaaaggcatggacgaacagttaaccagcctgaaagttctgtacaacgatcttggggctcaggtaacagagggaaagcaggatctcgagagggctagccagttggccaggaagatgaaaaaagaagccgcttcgttatcagaatggctgagcgcaacggagacagaactcgtgcagaagtctacaagtgaaggtctgctaggagacctggacacagagatatcctgggctaagaatgtgctcaaggacctcgagaaacgaaaggcagacttgaacacaatcaccgagtccagcgcggcactccagaatctaattgaaggatcagagcctattctcgaagagagactgtgtgttttaaacgcaggctggtccagggtgcgcacatggactgaggactggtgcaataccctaatgaaccaccaaaatcagctcgagattttcgacggtaacgttgcacacatctctacatggctgtatcaggcggaggcactcctcgacgaaatcgaaaagaagcccacgtcaaagcaggaagaaatcgttaaaagacttgtttcagaactagatgacgctaatctgcaagtggaaaacgtcagggaccaggcactgattttgatgaatgcacgcggttcctcaagccgagagctcgtagagccaaaactggccgagctgaatcggaattttgagaaggtgagccagcatatcaaatctgcaaagctgcttattgcacaagagccattgtatcagtgtttagtgaccaccgagaccttcgagacaggcgtgccattttcagacctggagaagctagaaaatgatattgaaaatatgctgaagtttgtagagaagcatctcgagagctcagacgaagatgagaagatggatgaagaatcagcacagattgaggaggttctccaacgcggagaggaaatgttacatcagcccatggaagacaacaagaaggagaagataaggctgcagctgctgctgctgcacacccgttacaacaaaatcaaggccatacccattcaacagaggaagatgggccagctcgcatccggcatccggagttctcttctgcctaccgattacctggtggaaattaacaaaatccttctttgcatggatgacgtggagctgtcactgaatgtgccggagctgaatacggccatttacgaggatttttcttttcaggaagattctctgaaaaatataaaagaccagctggacaagctgggggaacagattgcggtgatccatgagaaacagccggacgtcatcctggaggcatcaggtcctgaggccatccaaattcgtgacaccttgacgcagttaaatgccaagtgggaccgcattaacagaatgtactctgatcgaaaaggctgttttgatcgggctatggaggagtggaggcagtttcactgcgatctgaacgatctgacccagtggattacagaggctgaagagctgctggtggacacttgtgcccctggaggctcactcgatttagaaaaggcacgcatacaccagcaagaactggaggtaggtatttcaagccatcagccgagcttcgccgcactcaaccggaccggggatggtatagttcagaaactgagccaggccgatgggagtttcctaaaggaaaaactcgcgggtttgaaccagcggtgggacgctatcgttgcggaagtaaaagatcgccagcccaggcttaaaggcgaaagcaaacaggttatgaagtatcgacatcaacttgacgaaatcatttgttggctcaccaaagctgagcatgcgatgcagaaacggagcaccacagagttgggagaaaacctgcaagagttgcgggatctgacccaagagatggaggttcacgccgagaaactgaagtggctgaaccggacggaattggaaatgctttctgacaaatccctgagccttccagaacgagacaaaatttctgaaagcttgcgcacagtgaacatgacatggaataagatctgtagggaggtaccaactaccctgaaggagtgtatccaagagccttccagcgtgagccagactagaatcgcggctcaccccaatgtccagaaagtggtgctggtgagcagtgcctcagacatccccgttcagtcccaccgtacttcagaaatcagcatcccagcggaccttgacaagacaataaccgaactcgcagattggctggttctgattgaccagatgctgaagtctaacattgtgacagtgggagatgtcgaggagattaataagaccgtctcccgcatgaagattaccaaggcggatctcgaacagcgtcacccgcagcttgactacgtattcactttggctcaaaatctgaagaataaggcctcttcttcggacatgagaactgcaattactgaaaagcttgaacgggtgaagaaccagtgggacgggacccagcacggcgtggagctacgccaacaacagctcgaggatatgatcatcgatagcttacagtgggatgaccatcgtgaagagacggaggaacttatgcgaaaatacgaggctcggctctacattctccagcaggcacggcgtgaccccttgacgaagcaaatcagcgacaaccagattctccttcaggagttgggcccaggtgacgggatcgtcatggcattcgacaacgtgttacagaaactcctcgaagagtacggctccgatgacacacgaaacgttaaggagaccacagaatatctgaagacatcatggatcaatctgaagcagtctatcgcagacaggcagaacgcactcgaagccgagtggcgtacagtgcaggcaagccgcagagatcttgagaatttcttgaaatggatccaggaagccgagacaactgtgaacgtgcttgtggatgcaagccatcgtgaaaatgccttgcaggatagcatcttagcacgagaattgaagcagcagatgcaggatatacaggcagaaattgacgctcataacgatatttttaaatctattgacggcaaccgccagaagatggtgaaggccctcgggaatagcgaggaagccaccatgctgcagcatcggttggacgacatgaatcagaggtggaacgatttaaaagcaaagtccgccagcatcagggcgcacctggaagccagtgcagagaagtggaatcgactgctaatgtcgctggaggagctgatcaagtggttgaatatgaaagacgaggagctgaagaagcaaatgcctataggcggagatgtgcccgcactgcagctgcagtatgatcactgcaaagctctgaggcgggaattgaaagagaaagaatacagtgtcttaaacgcagtggaccaagctcgggtgtttctggcagatcagccgattgaggctcctgaagaaccacggagaaacctgcaatctaaaacagaactcactccagaggagcgcgctcagaagattgccaaggcaatgcggaaacaatcatcagaggttaaagagaaatgggagagcctgaacgcagttacgtccaattggcagaagcaggtggataaggctcttgagaaactgcgagatctccagggggcaatggacgatctggatgccgatatgaaagaggcagaatccgtacgcaatggatggaagcctgtaggcgacctactgattgacagtctgcaggaccatatcgagaagatcatggcctttagagaggagatagctcccattaactttaaggtaaagaccgtgaatgatcttagcagccagttgagccctctggacctccacccctcccttaagatgagccggcagctggatgacctaaatatgcgctggaagctgctccaggtgagcgtggacgatcgcttgaaacaattacaagaggctcaccgggacttcggcccatcatcacagcacttcctatcaacttcagtccaacttccgtggcaacgtagcatatcccacaacaaagtgccctactatataaatcaccaaacgcagactacgtgctgggatcacccaaagatgacagagttattccagtccctcgcagatttaaacaatgtacgtttcagcgcttacagaactgccataaagatccgacgactgcaaaaggccctgtgcttagaccttttggaactgtcgaccactaacgaaatctttaagcaacacaagcttaatcagaacgaccaactgcttagcgtgcccgacgttatcaactgtctgacgactacttatgatggcctggagcagatgcacaaagacctcgtgaacgtccccctctgtgtggacatgtgtctgaattggctgttgaacgtgtatgataccgggaggaccggcaagatccgggtccaatctttgaagattggactaatgtccctctcgaaaggtcttctcgaggagaaataccgctacctcttcaaggaggttgccggtcctacagagatgtgtgatcaacgacaactgggcctgctactccacgatgctatccagattccccgacaactgggcgaagtagccgctttcggcggttccaacatcgagccatccgtgagatcctgctttcagcagaataataataaaccggagattagtgtcaaggaattcatcgactggatgcacctggagcctcagagcatggtatggttgcctgtgctccaccgagtggctgctgctgagaccgccaagcaccaggcaaagtgcaatatttgcaaagagtgtcccattgtcggctttcgttaccgctccctcaagcacttcaattatgatgtgtgccagagttgtttctttagcggaagaaccgcaaagggacacaagttgcactatcctatggtggagtactgcatacccaccacatccggcgaggacgtgagggactttacgaaagtcctgaagaacaagttccgaagtaagaagtactttgcgaaacaccctcgcctcggctacctgcctgttcagacagtgttggaaggcgacaacttagaaacaccaatcactcttattagcatgtggcccgagcactatgaccctagccagagccctcagctcttccacgacgacactcactctagaatagaacaatatgctacacgattggcccagatggagcggacaaacggaagcttcttaaccgactcatccagcaccacgggatcggttgaggatgaacacgccctcattcaacaatattgccagactctaggtggagaaagccctgtgtcccagcctcagagccctgcccaaatccttaagtctgtggagcgggaagagagaggagaacttgagcggataatcgcagatctcgaagaagaacagcggaacttacaggtagaatatgagcaactcaaggatcagcacctcagaagggggctcccggtgggtagcccccctgaaagcatcattagccctcaccatacgtccgaagacagtgagctaattgccgaggcaaaattgttacggcagcataaaggcaggctggaggccaggatgcaaatcctggaggaccataataagcagcttgagagccagctacataggttaaggcaactgcttgaacaacctgagagcgattcccgtataaacggcgtgagtccctgggccagtcctcagcatagtgccctgtcctattcccttgatccagatgcatctgggccacaattccatcaggctgcgggtgaggatctcctagctccaccacacgacacttcaacagaccttacagaagtcatggagcagatccatagtacattcccatcgtgctgccctaacgtgccctcccggccacaggcaatgtag

SEQ ID NO: 246430 - DNA, 555 bp, synthetic construct
  misc_feature 1..555: note = Description of Artificial Sequence: Synthetic coding sequence
  source 1..555: mol_type = other DNA
atgcacctggaaccccagagtatggtgtggctcccggtgttacaccgagtagccgcagctgagactgcgaagcaccaggccaagtgtaacatctgcaaagagtgccccattgttggctttagataccgatctctgaagcacttcaattatgacgtgtgtcaatcctgtttttttagcggtcgcacagcaaaaggacataaactgcattatccgatggtcgaatactgtattcctaccactagcggggaggatgtgagggacttcactaaagtccttaagaataagtttaggtctaaaaaatatttcgccaaacatcccaggctggggtatctgcccgtgcaaaccgtcctggagggagataacctcgagaccccatcccagtcgcctcagttgttccatgatgatacccactcacgcatcgagcagtatgctacaaggcttgcccagatggaacgaaccaacgggtcttttcttacagactcttctagtaccaccggttctgtagaggacgaacacgcactcattcaacagtactgtcagacccttggaggttag

SEQ ID NO: 246431 - DNA, 462 bp, synthetic construct
  misc_feature 1..462: note = Description of Artificial Sequence: Synthetic coding sequence
  source 1..462: mol_type = other DNA
atgtcaggcctggccgcaaccacgtttcattggaagaagtgcaggctcgatttaccgggacacgtggcactgcaagcatgcaaacgacttccggatgaacataatgatgtgcagaagaaaacattcactaagtggataaacgccagattcagcaaatcaggaaagcctccaataaacgatatgttcaccgatctcaaggatggccgtaagctgctcgacctgctggagggcctgaccgggaccagtctgccaaaggaacgaggttcaaccagggtgcacgccttaaataatgtaaatagggttctgcaagtgctgcaccagaacaacgtcgagctcgtcaatatcggcggtactgacatcgtggacggaaatcacaaactgaccctgggattgctatggtccataatactgcactggcaggttgacgtgatgaaagacgtcatgagcgaccttcagcaatag

SEQ ID NO: 246432 - DNA, 546 bp, synthetic construct
  misc_feature 1..546: note = Description of Artificial Sequence: Synthetic coding sequence
  source 1..546: mol_type = other DNA
atgcatctggagcctcaatctatggtatggctgcctgtactacacagagtcgcagctgcggagactgctaaacatcaggcaaaatgcaacatctgtaaagagtgccccattgtgggttttaggtaccgaagccttaaacatttcaattacgacgtgtgtcaatcctgtttcttctccggccgtaccgctaagggtcataagcttcattatcctatggtggagtactgtattcctaccacttccggcgaggatgtacgggacttcacgaaggtgttgaaaaacaagttccggtccaagaaatattttgcgaagcatcctcggctcggatatctgcctgtgcagactgttctggaaggggacaacctggaaactcctattacgctcatttcaatgtggcccgagcactacgaccccagccaatcgccccagctgttccatgatgacacccactcaagaatcgaacagtatgcgacccggctggcccaaatggaacggacaaatggtagcttcctgacagatagcagtagtactaccggttcggtgtag

SEQ ID NO: 246433 - DNA, 144 bp, synthetic construct
  misc_feature 1..144: note = Description of Artificial Sequence: Synthetic coding sequence
  source 1..144: mol_type = other DNA
atggccaagtatggagagcatgaggcctcccctgataatggccagaatgagttcagcgatataattaagtctcggtcggatgagcacaacgacgtgcagaagaaaactttcacaaaatggatcaacgccagattctccaaatag

SEQ ID NO: 246434 - DNA, 561 bp, synthetic construct
  misc_feature 1..561: note = Description of Artificial Sequence: Synthetic coding sequence
  source 1..561: mol_type = other DNA
atgctggaggaggaagagtggtatcggagtctcaagcactttaattacgacgtttgccagtcgtgtttcttttctggcagaactgccaaaggtcataagctgcattaccctatggtagaatactgcattcccactacttccggcgaggacgtgcgcgacttcactaaagttctaaagaacaagttcaggagtaagaagtactttgcaaagcaccctcgactaggctacctccctgtccaaactgtgctggagggcgacaacctcgaaactccttcacagagtcctcagctgtttcatgacgacacacactcccgaatcgaacaatacgcgacccgattggctcagatggagagaacaaacggttcttttcttacagactcttcctccacaacgggctctgttgaagacgagcatgccctgatccagcagtattgccagaccctgggtggggagagccctgtgagccaaccccagtcacccgctcaaatcctcaagagcgtcgagagagaggagcgtggcgagctggaaagaatcattgcggatctagaggaagagcagtag

SEQ ID NO: 246435 - DNA, 201 bp, synthetic construct
  misc_feature 1..201: note = Description of Artificial Sequence: Synthetic coding sequence
  source 1..201: mol_type = other DNA
atgattggactaaacttcaatctccgagagctgcttaccaagttcgaaaaagatattcaggctgagatcgatgctcacaatgacatatttaaatcaatagatgggaaccggcagaaaatggtgaaagcactcgggaactctgaagaggctaccatgctacagcatcggctcgacgatatgaatcagcgatggaacgactag

SEQ ID NO: 246436 - DNA, 555 bp, synthetic construct
  misc_feature 1..555: note = Description of Artificial Sequence: Synthetic coding sequence
  source 1..555: mol_type = other DNA
atgcacctggaacctcagagcatggtgtggctgccagtgctccacagagtggcagccgcagaaaccgctaagcaccaggccaaatgcaacatttgcaaagaatgtccaatcgttggattccggtatcgcagtcttaagcattttaattatgacgtgtgccagtcatgtttcttttctgggaggactgctaaggggcataaactacactaccctatggtggagtattgtatcccaacaacctccggagaggatgtccgagatttcacaaaggtgctgaagaacaaattcaggtccaaaaagtatttcgcgaaacacccacgactgggttacttaccggtccagactgttttggagggcgataatcttgaaaccccatcacagtcacctcagctattccatgacgatacccactctcgtattgaacaatacgccacaaggctggcacaaatggagcggacaaacggatctttcttaactgacagcagttctactacggggtcagtagaagatgagcacgccctgatccagcagtactgccaaactctaggcggatag

SEQ ID NO: 246437 - DNA, 2100 bp, synthetic construct
  misc_feature 1..2100: note = Description of Artificial Sequence: Synthetic coding sequence
  source 1..2100: mol_type = other DNA
atgtcggccagcgcaagcgttggcggtccagtaccccagcctcctcctggtcctgccgctgctctcccaccaggatccgccgcacgagccctgcatgttgagctaccgtcacagcagagaaggctgaggcaccttcgcaatatagctgctcgcaatattgttaaccggaacgggcaccagcttctggatacatacttcaccctccacctttgtagcacagagaagatctataaggagttctaccggtcggaggtgataaagaatagtctgaatccaacttggcgctctctggacttcgggataatgcccgatcgcttggacacttccgtctcctgttttgttgtaaagatatggggcggtaaggagaacatctatcagctgctaatcgagtggaaagtctgtcttgacggactgaagtacctgggtcagcagattcacgctcggaaccaaaatgagattatattcggactgaatgatggatactacggagcccctttcgagcataagggctattcaaacgcacagaaaactattttgctacaggtggatcagaattgcgtccgcaattcgtacgacgtgttctcactgctcagacttcaccgcgctcagtgcgccataaagcagacccaggtcactgtccagaaaattggcaaagaaattgaggaaaaactgcggctgaccagtacgagcaacgagctcaagaaaaagtctgagtgcctgcagctgaaaatcctggtccttcagaatgaactcgaacgccagaaaaaggctctggggagagaagtggccctcctccacaagcaacagatagcactccaggataaggggagtgccttctcagcagagcatctcaagctccaacttcagaaggaatcgctgaacgaactcagaaaagaatgtaccgccaagcgcgagctttttttaaagacaaacgcgcagcttaccatccgctgtcggcagttattgtctgagctatcctacatataccctattgatctaaacgaacataaagattattttgtatgtggcgtaaagttacccaactccgaggacttccaagccaaggacgacggatccatcgctgtggcccttggatacactgctcacctcgtgagcatgatcagcttcttcctgcaggtccctcttaggtaccccatcattcataaggggagccggtcaactattaaggataatatcaacgacaagcttacagagaaggaacgcgaatttcccttatatccgaaaggaggcgaaaaacttcaattcgactacggcgtgtacctgctgaacaaaaacatcgcacagttgcgttatcagcacgggctggggaccccggacttaaggcagacattgcctaaccttaaaaatttcatggaacatggattaatggtgcgctgtgacaggcaccacacatccagtgcaattcctgtaccgaagcgacagagcagtattttcggaggtgcagacgtgggctttagtgggggtatcccttcacctgacaaaggacacagaaagcgagcctcctcggaaaacgagcggctccaatacaagacaccgccaccttcctataatagcgcgttagcacagccggtaacaacagttccctctatgggggagactgagcggaagatcacgtctctgagctctagtttagacacctcacttgacttcagcaaagagaacaaaaaaaagggtgaggatctggtcggttcccttaatggcggtcatgccaacgtgcatccaagccaggagcaaggcgaggctctttccggtcatcgtgctacggtgaacgggacgctgctgccttccgagcaggcaggatctgcatccgtgcagctacctggtgagtttcacccagtttctgaggccgaactgtgctgcactgtcgagcaagccgaggagataattgggcttgaggctaccggcttcgctagcggcgaccaacttgaggccttcaactgcatacccgtggatagcgccgtggcagttgaatgcgacgagcaggttttaggtgagttcgaagaattctctcgccgaatttacgccttgaatgaaaatgtgtcctcatttcgacggccaagacggtccagcgataagtag

SEQ ID NO: 246438 - DNA, 768 bp, synthetic construct
  misc_feature 1..768: note = Description of Artificial Sequence: Synthetic coding sequence
  source 1..768: mol_type = other DNA
atgttcatatccgtggcccagcgccagcgagaaaacgcattcagctgttccaccttcctaaggtgtgaccggcaccacacaagctctgccatccccgtgcccaagcggcagtcatctatatttggaggggcagatgttggcttttcgggcggaatcccctctcccgataaagggcatcgtaaacgagcctccagtgaaaatgagcgccttcaatacaagactcccccaccatcttacaattcagcactggcccagccagtcacaacggtgcctagtatgggagaaaccgagagaaagatcacgtccttaagtagttcgctagacacaagcttggacttctcaaaggaaaacaaaaagaagggagaggatctcgtaggcagcctgaatggcggtcacgccaacgtgcacccctctcaagagcaaggagaggccctcagtgggcatcgggcaaccgtgaacggtacactcttaccgtctgagcaggcgggtagcgccagcgtgcagctgcccggagagtttcatcccgtgtcagaggcagagctgtgctgcactgtagaacaggcagaggaaattatcggcctagaggccaccggattcgcgtccggcgatcagctggaagcatttaattgtatcccagtcgactcagccgtggcagtcgaatgcgatgagcaggtgcttggagaattcgaagaattctctcggaggatatacgccctgaatgaaaacgtctcctccttcaggcgtccacggcgtagcagcgacaaatag

SEQ ID NO: 246439 - DNA, 984 bp, synthetic construct
  misc_feature 1..984: note = Description of Artificial Sequence: Synthetic coding sequence
  source 1..984: mol_type = other DNA
atgattagtttcttcctccaggtcccactgcgctacccgattatacacaagggttccaggtccactataaaggataacattaacgacaagcttacagagaaggaaagggagttccctctgtacccgaagggcggagaaaagctccagttcgactacggcgtgtacctgctgaataaaaacatcgcccagctgcgataccagcatggacttggtactcctgacctgcgccagacacttccaaacttaaagaacttcatggagcacgggctgatggtgcgctgcgatcggcaccatacgagtagcgctattccggtgccaaagcggcaatcctcgatctttgggggagccgatgtggggtttagcggcggaataccaagccccgataagggccacaggaaaagagctagctccgaaaacgagcgcctgcagtataaaacgcccccaccctcatacaactctgccctggctcagccagtgaccacagttcctagtatgggggagaccgagaggaaaattacttcactgtcttcaagtctggatacgagcctggacttctctaaggaaaataagaagaaaggtgaggacctagtcggatccctgaatgggggacacgccaacgttcacccttcccaggagcaaggcgaggcacttagcggacatagagcaacagtgaatggaacactgctcccatctgaacaggcgggttcagctagtgtccaactgccaggggagttccaccccgtgagcgaagcggaattgtgctgcaccgtggagcaggccgaggagatcatcggactggaagctaccggattcgcatccggtgaccagctggaggcatttaactgcatcccagtggactctgccgtcgctgtcgagtgcgacgagcaagtcctgggcgaatttgaagaattttctagacgtatctacgcgctgaacgagaacgtcagctctttcaggagaccacgtcggtcttccgataagtag

SEQ ID NO: 246440 - DNA, 4251 bp, synthetic construct
  misc_feature 1..4251: note = Description of Artificial Sequence: Synthetic coding sequence
  source 1..4251: mol_type = other DNA
atgaagagtctgaagagtcgcctccggagacaagacgtgccaggccctgcctcttccggagccgcagctgctagtgcgcacgctgctgactggaataaatacgacgacaggctcatgaaggctgccgagcgtggtgatgtagagaaggtaacctccattctggctaagaagggggtgaacccaggaaagctggatgtagaagggagaagcgtttttcatgtggtgacatcaaagggtaatctggaatgcctgaatgctatactgatccacggcgtggacataaccacttctgataccgccggacgaaatgcgttacacctggcggcaaagtacggtcacgccttgtgtctacagaaactactgcagtataattgtccaacagaacatgctgatctgcaggggcgtaccgcgctccacgacgccgcaatggcggactgtcccagttcgatccaactcctttgtgatcacggcgctagtgtgaatgcaaaagacgtagacgggaggacacccctggttctggccacccaaatgagtaggccgaccatctgtcagctcctcatcgatcggggagcagatgtcaatagcagagacaaacagaacaggaccgcacttatgctggggtgtgagtatggctgcagagatgcagtcgaggtgctaatcaaaaatggagccgacatctccctgttggatgccctcggccacgattcctcctactacgcacggataggcgacaacctggatatactgacattgctgaagaccgcgtctgaaaataccaataagggcagggaattgtggaagaagggcccaagcctgcaacaaaggaacctgacacatatgcaggacgaggttaacgttaagtcccaccaacgcgagcaccagaacatacaagacctagagattgagaatgaagaccttaaggagcggctcagaaagattcaacaagaacagcgtattctgctggacaaggtgaacggcttgcaactgcagctgaatgaagaggtgatggtcgcggacgacctcgagagtgagagagagaaactcaaatctttgcttgcagccaaggaaaagcaacacgaggagtctctcagaacaattgaagcactcaagaatcgatttaagtacttcgaaagtgatcatcttggaagcgggtcccatttttctaatcgcaaggaggacatgctgctgaagcagggacagatgtacatggccgactcgcagtgcacatctcctggaattccagcccacatgcagagcaggagcatgcttcgccctcttgagctgtccttgccaagtcagacttcatattctgagaacgaaattctgaagaaggagctggaagcaatgagaactttctgtgaaagtgccaagcaggatcggctgaaactgcagaacgaactcgcccacaaagtggccgaatgtaaggcactggccctggaatgcgagcgagtgaaagaagattcagacgagcagatcaagcagctcgaagatgccttaaaggacgtgcagaaaaggatgtatgagagtgagggcaaagtgaagcaaatgcagactcacttcctcgccctaaaagaacatctaacctcagaagctgcatctggaaatcacaggctgactgaggagctgaaagaccagctgaaggacctgaaggtgaaatacgagggggcatccgccgaggttggcaagctgcggaaccagatcaaacagaatgaaatgattgtggaggaatttaagcgggacgaaggtaaactgatcgaggagaataagcggttacagaaagagctctcaatgtgcgagatggaacgagagaaaaagggcaggaaggtcaccgagatggagggccaggcgaaagaactgtctgccaagctggccctatctattccagctgaaaaatttgagaacatgaagagcagtctgtccaacgaggtaaatgagaaggcgaagaagttggtggaaatggaacgggagcacgagaagtctctcagtgaaatccgccagctcaagagagaactcgagaatgtcaaggccaaattggcacagcatgtaaaaccagaagagcatgaacaggtaaaatctcgtcttgaacagaagagcggagagctaggcaaaaaaattactgaattaactctgaaaaaccagacactccagaaggagattgagaaagtgtaccttgataacaaattactgaaagaacaggcccacaacttaactatcgagatgaagaaccactatgtacctcttaaggtaagcgaggacatgaagaaatcccatgacgctattatcgacgacctgaaccgaaaactgttggatgttacacagaagtacacagagaagaaactggaaatggagaaactcctacttgagaacgattccctgtctaaggacgtctcccgactggaaacggtgtttgtcccacccgagaaacacgaaaaagaaatcattgcccttaaaagcaacatcgttgagctgaagaagcagctgtcagaactgaaaaagaaatgcggtgaggatcaggaaaagattcatgccctcacttcggagaatacgaatctgaagaagatgatgagcaatcagtacgtcccagtaaaaactcacgaggaggtgaagatgaccttgaacgacactctagccaagaccaacagagagctgctggatgtgaagaaaaaattcgaggatatcaatcaggagtttgtcaagattaaagacaagaatgaaatcctgaaaagaaacttggagaacacccaaaatcagatcaaagccgagtacatttcactggcagagcacgaagccaaaatgtcaagccttagtcaaagcatgcgtaaggttcaggatagcaatgctgagatcctggccaattacaggaagggccaggaggaaattgttacactccacgcagagattaaggcccagaagaaggaacttgataccatacaggagtgcattaaggtcaaatatgcccctatcgtgtcgttcgaagaatgtgagcgcaaattcaaggctacagaaaaggaactgaaggatcaattgtcagaacagacacagaaatatagtgtgagtgaggaagaagttaaaaagaacaaacaggagaatgacaagctgaaaaaggagatcttcacactgcagaaagaccttcgcgacaaaacagtactgattgagaagtcccatgagatggagcgtgccttgtccaggaagacagacgagttaaataagcagctgaaggacctctcacagaaatatacggaggtaaagaatgtaaaggagaagctagtggaagagaacgccaaacagacatccgagatccttgccgtgcaaaatctgttacagaagcagcacgtgccattggaacaagttgaggccttaaagaagagcctgaatggcaccatcgagaaccttaaggaagagctcaagagcatgcaaagatgttacgaaaaagaacagcagactgtaacaaagctgcaccaacttttagagaaccagaagaatagctctgtgcccctcgccgagcacctgcagattaaagaggcctttgagaaagaagtaggaatcatcaaggcctctttacgcgaaaaggaagaagagtcccaaaataaaatggaagaggtgtctaaactccagtccgaggtgcagaatacaaagcaagccttgaagaaacttgagacccgggaggtggtcgatttgagcaagtataaggccacgaagtcagatctggagacacagatatctagcttaaatgaaaagctggctaacctcaacaggaaatacgaggaggtctgcgaggaggtcctacacgctaaaaagaaagaaatctccgccaaggacgagaaagaattgttgcactttagtatcgaacaggagatcaaagatcagaaagagcggtgcgacaagtctttgaccacaatcaccgaattgcagcggagaatccaggagtccgcaaagcagattgaagctaaagacaacaagattacggaactgttgaacgatgtcgaaaggcttaaacaagcccttaacgggcttagccagctcacctataccagcgggaatccaacaaaacgccagtcccagctcattgacacccttcagcaccaggtcaaatctctggagcaacagctggccgatgccgataggcagcaccaagaggtgattgctatttaccgaacccacctgctgtccgctgctcaagggcacatggacgaggacgtgcaagaggctctgcttcagatcatccagatgagacaggggctggtctgttag

SEQ ID NO: 246441 - DNA, 4212 bp, synthetic construct
  misc_feature 1..4212: note = Description of Artificial Sequence: Synthetic coding sequence
  source 1..4212: mol_type = other DNA
atgatgaattgctggttttcttgcacccctaaaaatcggcatgctgccgactggaataaatatgatgatagactcatgaaagccgcagagcggggagacgtcgaaaaggtaactagcatcctcgcaaagaaaggcgtcaacccgggtaagttagacgtcgaggggaggagcgtcttccatgtggtgactagtaaaggcaatctcgagtgtttaaatgccatcttgatccacggggtagatataacgacatctgatactgctgggaggaatgcactacatttggccgcaaaatacgggcacgctctgtgcctgcagaagctcttgcagtacaattgtcctaccgaacacgcggacctgcaggggagaaccgccctgcacgacgcagccatggccgattgcccgtcctctatacagctgctgtgtgaccacggtgcgtctgtgaatgccaaagacgtcgacggacgaacccccttggtgctggcaacacagatgtctaggcccaccatttgccagctcctgatcgatcggggtgccgatgtgaatagccgcgataagcagaaccgcaccgccctcatgttaggatgcgagtacgggtgtagagatgcagtggaagtgctcatcaagaacggagccgacatctcattactggacgccctgggacacgattcatcctattacgctaggataggcgacaatctggatattctgaccctgctcaagaccgcatctgagaacaccaacaaaggcagagagctgtggaaaaaaggcccatctcttcagcagagaaacctaactcatatgcaggatgaagtgaatgtgaaatcgcaccagcgcgagcatcaaaatattcaagacctagagatagaaaacgaagatttaaaggagaggctgcgcaagatccaacaagagcagaggatcttgctcgacaaagtgaatggtctgcagcttcagctgaacgaggaagtgatggtggccgatgacctggagagtgagagggagaaactcaaatccttattagccgctaaggaaaaacagcatgaagagtctctgagaactatcgaagctcttaaaaaccgctttaaatattttgaatctgatcaccttggcagcggctctcactttagcaacaggaaggaggacatgttgctgaagcaaggccaaatgtatatggctgattctcagtgtacaagtcccggtattccagcccacatgcagtcaagatccatgttgaggccactggagctgtccctaccttcccagacatcctactctgagaacgaaatccttaagaaggagctggaagccatgcggaccttctgcgagtccgctaagcaggatagattaaagctccaaaatgaactggcccacaaggtcgccgaatgtaaggccctcgccttagaatgtgagcgggtcaaggaggatagcgacgagcagatcaagcagctggaggatgcactcaaggacgtacagaagcggatgtatgagtctgagggcaaagtaaaacagatgcagactcatttccttgctttgaaagagcatttgaccagtgaagcggcatctggcaatcaccgcctcacagaagagctgaaagaccaactcaaggacctgaaggtgaagtatgagggggcttccgctgaggtgggtaagctcagaaatcaaatcaagcaaaacgagatgatcgtggaggagttcaaacgcgacgaggggaaactgatcgaggagaataaaaggctccagaaagaattaagcatgtgcgagatggaaagggagaaaaagggacgtaaggtcacagaaatggagggacaggccaaagagttgtcggccaaattagctctctccatcccggcagagaagttcgagaatatgaaaagctctctctccaacgaagtgaatgagaaggccaagaaacttgttgaaatggaaagggagcacgaaaagagtctgtctgagatccgccagctaaaaagagaactggagaacgtgaaagctaagctggcccagcacgtaaagccagaggagcatgaacaggtgaagagcaggttggaacagaagtctggcgaactagggaaaaagattactgagctcactctaaagaaccaaaccctgcagaaggagatagaaaaggtctatctggataataagttgctcaaagaacaagcacataatctgacaatcgaaatgaaaaatcattatgttccacttaaagtctctgaggacatgaaaaagagccatgacgctatcatcgacgacctcaacagaaaactgttagacgtaacccagaagtataccgagaaaaagctggagatggaaaaacttttgctggagaacgacagcctgagcaaggacgttagcagattagagaccgtcttcgtgcccccagagaaacacgaaaaggagatcatcgccttgaagtctaatattgtcgagcttaagaagcagctgagcgagcttaagaagaaatgcggagaggaccaggagaaaattcacgctcttactagtgaaaatacaaacttgaagaaaatgatgtcaaaccagtacgtgcctgtcaagacccatgaagaagtgaagatgaccctcaacgatacgctagcgaaaacgaaccgtgagttgctcgacgtgaagaagaaatttgaggatatcaaccaggagttcgtcaagataaaggataaaaacgagattcttaaacgcaacctagaaaacacgcagaatcaaatcaaagcagagtacatttccctggccgagcatgaagccaaaatgtccagcctgtcccaaagcatgcggaaggtgcaggactctaatgctgaaatcttggccaactatcggaagggtcaggaagagatagtcaccctgcacgcagagataaaagcccagaagaaggagctggacacgatccaggaatgtataaaggttaaatacgcacccatcgtgtctttcgaagagtgcgaacggaagttcaaagcaacagagaaggagctcaaagatcagcttagcgagcagacacagaagtactcagtatccgaagaggaggtaaaaaagaacaaacaggagaatgataaactgaaaaaagagatctttacactgcagaaggatctgcgggataagacagtgctcatcgaaaaatcccatgagatggaacgggcattgtcgcgaaagacggacgaattgaacaaacagctcaaggacctgtcccagaagtatacagaagtcaaaaatgtaaaagagaagttggtcgaagaaaatgcgaagcagacttcagaaatcctggccgtacagaacttgctgcagaaacaacacgttcccctggagcaggtggaggcgcttaaaaaatctctgaacggcacaatcgaaaatttaaaagaagaactaaagtctatgcagcggtgttatgaaaaggagcagcaaactgttactaaactgcatcagctccttgaaaaccagaagaactcaagcgtcccactcgccgaacacctacagatcaaggaggccttcgagaaggaggtaggcatcataaaggccagtctgcgcgagaaagaagaggagagtcagaacaaaatggaagaagtcagcaagttgcagtctgaggtgcagaatactaagcaggcccttaaaaaacttgagactagggaggtggtcgacctgtctaaatataaagccaccaagtcagatctggagactcagattagcagcttgaatgaaaaattggcaaatttgaatcggaaatacgaagaggtgtgcgaggaggtcctccatgctaagaagaaggaaatttcagcaaaggatgaaaaggaactccttcacttcagtattgaacaggagatcaaggaccaaaaggagcggtgtgataaaagcctcaccacaatcaccgaactccagcgcaggattcaagaaagtgctaagcagatagaagccaaagacaacaaaatcaccgaactgctgaatgacgtagagagactgaagcaagctctgaacggactgtctcagctcacctacacgagcggcaatccaacgaaaaggcagagccagctaatcgacaccctgcaacaccaggtgaagtcgcttgagcagcagcttgctgacgcggatagacaacaccaggaagtcatagccatctataggacgcacctgctgtcagctgcccagggacacatggatgaagatgtgcaggaggcccttctgcaaatcatccagatgcgccagggtctggtatgctag

SEQ ID NO: 246442 - DNA, 1686 bp, synthetic construct
  misc_feature 1..1686: note = Description of Artificial Sequence: Synthetic coding sequence
  source 1..1686: mol_type = other DNA
atgatgaattgttggttctcttgtactcctaagaaccgccatgcagccgactggaacaagtatgatgatagacttatgaaggcagccgagcggggtgacgtggaaaaagtaacgtcaatcttagctaagaaaggggttaatccaggcaaactggacgtggaaggacgcagcgtttttcacgtagtgaccagtaagggcaaccttgagtgtttaaatgcaatactcattcacggggtagatatcaccacctcagatacagcgggacgaaatgctttacatttggcagccaagtatggacatgctctttgtctgcagaagcttctgcagtataactgtcctactgagcacgcggatctccaggggagaaccgcccttcacgacgccgctatggccgattgtccttccagtatccaactgctgtgcgatcatggcgcatccgtcaatgcaaaagatgtagacgggaggactccactcgttctggccactcagatgagtcgaccgacgatctgtcagcttctgattgaccgtggagccgacgtcaacagtagggacaagcagaaccggactgctctgatgctaggatgcgagtatggttgtcgagatgctgttgaggtcttaattaaaaacggcgctgatattagtctcctggacgccctgggacatgactcaagttactatgccagaataggagacaaccttgacatattgaccctgctgaaaacagcttccgagaacaccaacaaggggagagagttgtggaaaaaaggcccaagtttgcagcagagaaatcttactcacatgcaggacgaagtaaatgtaaaaagccatcaaagggagcaccaaaacattcaggacttagaaattgaaaatgaggatctgaaggaaagattgcggaaaattcagcaagaacagaggatcctgcttgataaagtgaacggtttacagctgcagttaaacgaacgtgagaagctcaaatccttgctggccgcaaaggagaagcagcacgaagaatccctcagaacaattgaggctctgaaaaatcggtttaaatatttcgagtccgaccacctggggagtggaagccactttagcaatagaaaggaggacatgctgttaaagcagggtcagatgtacatggctgactcgcaatgcactagcccaggtatcccggctcacatgcagtccaggagcatgctgcggcctcttgagttgtccttgcccagtcagacttcatattcagagaacgaaatcctgaagaaggagctggaagccatgcgcactttctgcgagtctgcgaaacaggacaggttgaagttacagaacgaacttgcccacaaggtggccgaatgcaaggcccttgccttggaatgcgaacgggtgaaagaggattctgatgaacagatcaagcagttagaggacgcccttaaagacgtgcagaagagaatgtacgaatccgaaggaaaagtgaaacagatgcagactcacttcctggcactgaaagaacatttgacaagtgaagccgcatctggcaaccacagactcaccgaggaactcaaggaccaactgaaggatctgaaggtgaagtatgaaggcgcatccgccgaggtgggaaagctgaggaatcaaataaagcagaacgagatgatcgtggaggaattcaaaagggacgaaggcaaactcatctag

SEQ ID NO: 246443 - DNA, 4206 bp, synthetic construct
  misc_feature 1..4206: note = Description of Artificial Sequence: Synthetic coding sequence
  source 1..4206: mol_type = other DNA
atgatgaactgttggttctcatgtacgcctaaaaatcgacatgctgccgactggaacaagtatgacgaccggttaatgaaagctgcagaacgtggagacgttgaaaaagtaaccagtatcctcgccaaaaaaggagtgaacccgggtaaactggacgtggagggtcgatctgtgttccatgtggtgacttctaaaggcaacctagaatgtctcaatgccatcctcattcacggagtggacatcacaacaagtgacaccgccggacgaaacgccctgcacttagctgcgaagtatgggcatgccctctgtctgcagaagctgttacagtacaactgtcccaccgagcatgctgacctccagggcagaaccgcactgcacgatgcagctatggcggactgccctagctccatacagttgctttgtgatcatggagccagcgtcaacgcaaaggacgtggacggcaggacacccttggtccttgcaacccaaatgtcacggcctacaatctgtcagttgctgatcgacaggggggctgatgtgaattcccgagacaaacagaataggaccgctcttatgctcgggtgcgagtacggatgcagggatgcagtcgaggtgctgattaaaaatggagcagacatatccctccttgatgctctgggacatgatagcagttattacgcccgaatcggagataaccttgatattttgactctgctgaagacggcatctgagaacaccaacaaagggagagagttgtggaaaaaaggaccttccctgcaacagagaaacctgacacacatgcaggacgaagttaacgtcaagtcccatcagcgcgagcaccagaacatccaggatctggagatcgagaacgaagacctgaaagagagactaagaaagattcaacaggagcaacggattctgttagataaggtcaatggactgcagcttcagctgaatgaggaggtcatggtggccgacgatctggagtctgagcgcgagaagctgaaaagtctgctggcagccaaggagaagcagcacgaggagtctctgcggaccattgaggccctcaaaaatagatttaagtattttgaaagtgaccacctcggctcaggatcccactttagaaaagaggatatgttactgaaacaagggcagatgtacatggcggacagccagtgtacctctccgggaattcccgcacacatgcagagccgcagtatgcttaggccgttggagttatccctgccatcacagacctcctacagcgagaacgagatcttgaaaaaggaattggaggcaatgcggactttctgcgagagcgccaaacaggacagattaaagttgcaaaatgagctggcccacaaagtggccgaatgcaaggcacttgcactggagtgtgagcgagtgaaggaggactcagacgagcagataaagcagcttgaggacgcattaaaggacgtacagaaacgcatgtacgaatcagagggcaaggtcaagcagatgcagacccattttctggccctgaaagaacacctcaccagtgaggcggcatcggggaaccaccgcctgacagaagaattaaaagatcagcttaaagacttgaaggtgaagtatgagggagcatcagctgaggtcgggaagcttaggaaccagatcaaacaaaatgagatgatcgtcgaagagtttaagcgcgacgaaggaaaacttattgaggagaacaagcgtctccagaaagaattatccatgtgtgagatggagagggagaaaaaggggcgaaaggtcaccgaaatggagggacaggccaaggaactgtcagctaagttagccttatctatccctgccgaaaaatttgaaaatatgaagtcatctctgagtaatgaagtaaacgaaaaggccaaaaagctcgttgagatggagagggaacacgagaagagcctgtctgaaattcgtcagctgaagagagaactcgaaaacgttaaagccaaactcgctcagcatgttaagccggaagagcacgagcaggttaagtctcgacttgaacagaaatcaggcgaactcggcaagaagataaccgagttgacactgaaaaaccaaacattgcagaaagagattgagaaggtgtatctagacaacaaactcctaaaagaacaggcccacaacctgactattgaaatgaagaaccactacgttccccttaaagtgtctgaagatatgaagaaaagccacgacgctattattgatgacttaaatcgcaaactcctggacgtcacacagaagtataccgagaaaaagttggagatggagaagctgctgctggaaaacgatagcctttccaaagatgtttcgcgcctggaaaccgtgttcgtgccacctgagaaacacgaaaaggagattatagcgctgaaaagcaatatcgtcgagttgaaaaagcagctgagtgagctgaaaaaaaaatgcggagaggaccaggagaagattcatgctttaacatcagagaatactaatcttaaaaagatgatgagtaatcagtatgtgccagttaaaactcatgaagaagtgaagatgaccctgaacgatacattagctaaaaccaatcgggagctgctggatgtgaagaaaaagtttgaagatatcaatcaggagtttgtaaagataaaggacaagaacgagattctgaagagaaacctcgagaacacccagaatcagattaaggctgagtatataagtctcgcagaacacgaggcgaagatgtcctcactcagtcaaagcatgaggaaggtgcaagactcaaacgccgagatccttgccaactatcggaagggccaggaagagatcgtgaccctgcacgcagagataaaggcccagaagaaagagttggacacaatacaagaatgcatcaaggtgaaatacgctcccattgtgagctttgaggaatgtgagcgaaaattcaaggccaccgaaaaagaacttaaggatcagctttccgaacagacacaaaagtattctgtttccgaagaagaagtgaaaaaaaataagcaggagaacgataagctcaagaaggaaatattcacactacaaaaggatctcagagataagactgtcctgatcgaaaaatcccatgagatggaacgcgctctgtccaggaaaactgacgagctgaataagcagcttaaggatttaagtcagaaatacaccgaagtcaaaaatgtaaaagagaaattggtggaggagaatgcaaaacagacatccgaaatcctagctgttcagaacttacttcagaagcagcacgttccactggaacaggtggaggctctgaaaaagtccctgaatggcaccatcgagaacttgaaagaagaacttaaaagtatgcagcgatgttacgaaaaggagcagcagacagttacgaaactgcatcaactcctcgaaaaccagaagaattctagcgtgccattagcagaacatctgcagataaaggaggcctttgaaaaagaagtcggtattatcaaagcatccctcagagagaaagaagaggagtcccagaataaaatggaggaagtatcaaagctgcagtccgaagtccagaatacaaaacaggcgctgaagaagcttgaaacaagagaagtagttgacttgtctaagtataaggcaactaaatctgacttggaaacccagatatctagcctgaatgagaagctggccaacctgaatcgcaaatacgaggaggtgtgtgaagaagtgctgcacgccaagaaaaaagagatatcagccaaagatgagaaagaactactccatttttcaattgagcaggagatcaaggaccagaaggagcgctgcgacaagtcattgacgactatcactgaactgcagcgacggatccaggagtccgccaagcaaattgaggctaaagataacaaaatcactgaacttctgaatgacgtggaaaggctgaaacaagcactgaacggactttcacagcttacctacacgtccggcaacccgactaagcgtcagtcccaactaatcgatacgctccagcaccaagtgaaatccctggagcaacagctagctgatgctgaccgccagcatcaggaggtgatagctatataccgtactcacctgctttcggccgctcaaggccatatggacgaggatgtccaggaggccttgctgcagattatacaaatgcgtcagggcttggtttgttag

SEQ ID NO: 246444 - DNA, 3195 bp, synthetic construct
  misc_feature 1..3195: note = Description of Artificial Sequence: Synthetic coding sequence
  source 1..3195: mol_type = other DNA
atggtgcttggtacagttttactgccgcctaattcctacggcagggaccaggacacatcactttgctgcctctgcacagaggctagtgaaagcgctctgcctgaccttacagaccactttgcatcctgtgtcgaggacggatttgagggggacaaaaccggaggcagctcccccgaggctctccacaggccatatgggtgcgacgtcgaaccacaagctctgaatgaggctatccggtggagctccaaggaaaatctgctgggcgcaaccgaatccgatcctaacctgttcgtcgccctttacgatttcgttgcttccggcgacaacacattgtccatcacaaaaggcgagaaactacgcgtcctgggatataatcaaaatggggagtggtcagaggtaaggtcaaagaatgggcagggatgggttccaagcaactacatcactccggtgaattctctggaaaagcattcatggtaccacggccctgtgtcccgaagcgccgcagaatacctcctctccagtctcatcaatggatctttcctggtacgggagtccgagagctctccaggacagctgtcaatttctctccgatatgagggacgagtctaccactacagaatcaacaccacagctgatggaaaggtctacgtgacggctgaaagtagatttagcactctggccgagctggtgcaccaccacagcactgtagccgatggactggtgactacgttacactaccctgccccaaaatgtaataagcccacagtgtacggagtcagtcctatccatgataaatgggagatggagagaactgacattactatgaagcacaaactgggcggaggtcagtatggtgaggtttacgttggcgtttggaaaaagtattccttgaccgtggccgtgaaaactttgaaggaagacaccatggaagtggaggaattcctgaaagaagccgcagtgatgaaggagatcaagcaccccaacctggtgcaattgctcggagtctgcacactcgagccccctttttatatagtgacagagtatatgccatatgggaatctcctcgattatctgagggagtgcaacagagaagaggtcacagccgtggtgcttttgtacatggccacgcaaatatccagtgccatggaatatctggagaaaaagaacttcatccacagggatctcgctgctagaaattgtttggtcggcgaaaatcatgtggtgaaagttgcagatttcggattgtcaaggttgatgactggggatacttataccgctcacgcgggtgcaaagtttcctatcaagtggacagcacccgagtcacttgcgtataacactttttctattaaatctgatgtctgggcgtttggtgtcttgctgtgggagattgccacatatggcatgagcccataccctggcattgacttgtctcaagtctacgatctcctggaaaaaggataccgaatggaacagcctgagggatgccccccaaaagtgtatgaacttatgcgggcatgctggaaatggtcgcctgcagaccggccatccttcgcggagacacatcaggcctttgaaactatgtttcacgattcctctattagtgaggaagtggctgaggaactgggcagggccgcatcatccagttccgtggtcccttacctgcctcgcctacccatacttcccagcaaaacaaggactttgaagaagcaagtggagaacaaggagaacatagagggagctcaggatgcaacggagaacagtgcctcttcgctagcccctggtttcattagaggcgcacaggcttcttctgggtcgccggctctgccgaggaagcagcgcgataagtcccctagcagcctcctggaggacgcgaaagagacctgtttcacccgcgatcggaagggcggtttcttttcatcctttatgaaaaaacgcaacgcccctactccccctaagcgatccagcagctttcgggagatggagaatcaaccgcataaaaagtacgaactgaccggactccccgagcaagaccggatggcaatgaccctccctagaaattgccagaggtccaaacttcagctggagcgtacagtgtcaacctcctcgcagcctgaggaaaacgtagaccgggcaaacgatatgctcccaaaaaagagcgaggagtccgctgccccaagtagggaaaggcccaaagccaaactcctgccccgtggagctacagcactaccgcttcggaccccgtccggggacctggctataactgagaaagacccgccaggggtaggtgtcgcaggggtggcagccgctcctaaaggaaaggaaaaaaatggcggagcacgactgggcatggcaggagttcctgaggatggagaacagccgggatggccctctccagctaaggcggctccggtcctgccaacaacacacaaccacaaagtgcccgtcctgatttctcctaccctcaagcacactccggcagacgtgcagcttattggcacagattctcaaggcaacaagttcaaattgctgtctgaacaccaggtaacttcgtcaggcgacaaggacaggcctagacgcgtgaaacccaagtgcgcgccacccccaccaccggtgatgcggttgctgcaacaccccagtatctgcagcgacccgactgaagagcctaccgctttgacagcaggtcagtcaacttccgagactcaagaaggagggaaaaaagccgcactgggcgctgtgccaattagtggcaaggccggacgccctgtgatgccccctccgcaggtgcctctccccactagcagcatttctcctgccaaaatggctaacggcactgcaggaaccaaagtggccctacgtaagaccaaacaggctgccgagaaaatatcagccgataaaatctcaaaggaagccctcctcgaatgtgccgacctgctgtccagcgccttgaccgagcccgtgccaaattcacagcttgtggacaccgggcaccaattgctcgattattgctcaggctacgttgactgtataccgcagaccagaaacaagtttgccttccgagaagcagtgtctaaactggaattatctcttcaggagctgcaagtgtcgagcgctgccgcaggagtacccggaaccaaccctgtcctaaataatctgctcagttgtgtacaggagatttctgacgtcgtgcagagatag

SEQ ID NO: 246445 - DNA, 1629 bp, synthetic construct
  misc_feature 1..1629: note = Description of Artificial Sequence: Synthetic coding sequence
  source 1..1629: mol_type = other DNA
atgggccagcaagtgggacgggtgggggaggcacctgggctgcagcaaccacagcccaggggcatccgtggatcttccgctgcacggcctagtggcaggcgccgagatcctgccggaaggaccaccgaaaccggttttaatatctttacacagcacgaagcactgcacaggccctacggctgtgacgtcgagccacaagccctaaacgaggccattaggtggtcttcgaaggaaaatctgctgggcgcaactgagagcgacccgaatctgttcgtcgcgctgtatgacttcgtggcttcaggggacaacaccttatctatcactaaaggtgaaaagctcagagtcttgggatacaaccagaatggcgagtggtcagaggtgcgctccaaaaacggccaggggtgggtcccctcgaactacattactcccgtcaattctttagagaaacactcatggtatcatgggcctgtgagccggtctgccgcagagtaccttctttcatccctcattaatggcagctttctggtgagagaaagtgagtcgagccctgggcaactcagcatcagcttgcggtacgaagggagggtgtaccactatcggatcaacacgactgccgacggtaaagtctacgtgacagcggagagccgttttagtacccttgccgagctggtgcatcaccattctaccgtggcagacgggctggttaccaccctgcactatccagctcccaaatgtaataagcccacagtgtacggagtctccccaatccacgacaaatgggagatggaaaggacagacataaccatgaaacataaactaggcggaggccagtatggagaggtctacgtgggggtgtggaaaaaatactcattgaccgttgctgtgaagaccctcaaggaggatacaatggaggtggaggagtttctgaaggaagcggcagtgatgaaagaaatcaagcatcccaacttagtgcagctcctgggtgtatgcacgttggagccccctttctatatagtgactgaatacatgccatacggtaacctgctcgactatttaagggaatgtaatcgggaagaggttacagctgttgttttgctgtacatggctacccagatatcttctgccatggagtacctcgaaaagaagaacttcattcacagggatctggctgccagaaattgcttggtgggggaaaatcacgttgttaaggtggcagactttggcctgtcaagacttatgaccggggacacctataccgctcatgctggagcgaagttcccgatcaaatggactgcgcctgaaagtctagcatacaatacgttttccattaagtcagatgtgtgggcgttcggagtgctactatgggagattgcaacttatggaatgagcccttacccagggattgatctgtcccaggtttatgaccttctggaaaagggatacagaatggaacaaccagaggggtgccctcctaaggtctacgaacttatgcgggcttgttggaaatggtcgcctgccgacagacccagcttcgctgagacccaccaagcctttgagacgatgttccatgactcttcaatttctgaagtcctcttgcattgcgcaaatcagacctgcatcacactgtag

SEQ ID NO: 246446 - DNA, 3441 bp, synthetic construct
  misc_feature 1..3441: note = Description of Artificial Sequence: Synthetic coding sequence
  source 1..3441: mol_type = other DNA
atggtactggggacagtcctcttacctcccaatagctatgggagagaccaagacacttcactgtgctgcttgtgtacggaggccagcgaatctgcactgccagacctgactgaggcactccaccgaccgtatgggtgtgatgtcgagccgcaggccctgaacgaggcaatacggtggtcatcgaaagagaacctcttaggggctactgagtctgacccaaacctcttcgtcgccctgtacgacttcgtggccagtggggacaacactctcagcatcacgaaaggggagaaactccgcgtactgggctataaccaaaacggagaatggagcgaagtccggtctaagaacggacaggggtgggttccttcgaattacatcacccccgtgaactcgctggagaagcattcctggtaccacggacccgtgtcacgaagcgccgcagagtatcttctgagttcgctcattaatgggagctttctggtgagggaatcagagtcctccccgggtcaactgtcaatctcactgcgctatgaaggacgcgtttaccattaccgaataaatacgaccgctgatgggaaggtgtacgttaccgcagagtctagattttccactttagcagagcttgtgcatcaccacagcactgtggccgatgggttagtcactacacttcattatcctgcaccgaagtgcaataagccaacagtatatggggtgtccccaatccacgataagtgggagatggagcgcacggacatcaccatgaaacataaattgggcggaggccagtacggtgaagtgtacgtcggcgtttggaaaaagtattctcttacggttgccgtgaagaccttgaaagaagatactatggaagtcgaagaatttcttaaagaagcagcggttatgaaagagatcaagcatcccaatctggtacaactgttgggtgtgtgcactctcgagcctccattctacattgtgacggaatatatgccctacggtaacctgcttgactatctcagggagtgtaatcgggaggaggtaacagcagtggtgctgttatatatggccactcaaataagctcagctatggagtacttggagaagaaaaacttcattcacagggatctggcggcaaggaattgtctagtaggagaaaaccacgttgtcaaagtggccgatttcggattgtcacggttgatgacaggggatacctacactgcgcacgccggtgctaagtttcccattaagtggactgcaccggaatccctggcctacaatacgttcagtatcaagtcagatgtctgggcattcggagtgttgctttgggagatcgccacatacggaatgagcccctatcccggtatcgatctaagccaggtgtatgacctccttgaaaagggctaccgcatggaacagccagaaggatgtcctcccaaggtctatgagcttatgagggcatgctggaagtggtcaccggctgatcgaccctcttttgctgaaacccatcaggcattcgaaactatgtttcacgattcaagcatatccgaggaagtggcagaggagctgggccgagctgcttctagtagcagcgttgtaccgtatctacctcggcttccaatactgccttcaaaaactagaactctgaagaaacaggtggaaaacaaagaaaacattgaaggagcccaagatgccacagagaatagcgccagttcactcgcaccaggattcatccgaggtgcacaggcatccagcggttcccctgccttgccacgtaaacagcgtgataagtccccaagttcactgctagaggatgcaaaggaaacctgttttactcgggatcgtaaagggggattcttctctagcttcatgaagaaacgaaatgctcctacaccacccaagcgctcatcctccttccgggagatggagaaccagccacataagaaatacgaattaaccgggaactttagcagcgtggcttcgctccagcacgccgacgggttctccttcacaccagctcaacaggaggccaacctggtacctcccaaatgttacggaggctctttcgcgcaaaggaatctgtgcaacgatgacggagggggaggcggaggcagcggaacagcgggtggcggatggtccggcatcaccggcttcttcactccccgactcataaaaaagaccttaggcctacgagcaggcaagcccacagcctccgacgatacgtcaaaaccctttccccgaagtaactcaacaagtagtatgtcttcagggctgcccgagcaggatcggatggccatgacattgccgagaaattgccagcgctctaaacttcagctggagcggactgttagtaccagcagccagcccgaagagaatgtggacagggctaacgacatgctgcccaaaaaatctgaagaatccgcagccccttcacgagaaaggccaaaggcgaagctcttacccagaggcgcaacggccctgccattaaggaccccctcaggtgacctagcaattacagagaaggatcctcccggtgttggggtggcgggagtcgccgcagctcccaagggaaaagaaaagaacggcggagccagactgggtatggccggagtccccgaagacggggagcagcccggttggccttctccggcaaaagccgctccagtactgcctactacccataatcataaggtgcctgtgcttatttctcctaccctgaagcacacaccagcagatgtgcaattgattgggaccgactctcaggggaacaagtttaagctcctgtctgaacaccaggtgacctcttcaggcgacaaagaccgcccacgaagagtgaagccaaaatgtgcccctccacccccacctgttatgaggctgttgcagcatcccagcatttgtagcgaccccacagaagagcccactgcactgaccgctggacagagcacttccgaaacgcaggagggaggcaaaaaggccgctctgggcgcagtgcctatcagcggtaaagctggtcgcccagtgatgccacctccccaggtcccgctgccaacctcatccatctcgcccgctaagatggctaatggtactgcagggactaaggttgcactgcgcaaaactaagcaggccgctgaaaaaatctcggccgataagatttctaaagaggcccttttggagtgtgccgacctgctgagctcagccttgactgagcccgtaccgaatagccagctggttgacactggccatcagcttttggattactgttctggatatgtcgattgcattcctcagacccgtaacaagttcgccttccgcgaggcggtgtcgaagctggagctttccctgcaagaacttcaagtgtctagcgctgctgccggtgtaccaggaaccaatcctgttctgaataatttactttcctgcgtgcaggagataagcgacgttgtgcaaagatag

SEQ ID NO: 246447 - DNA, 3549 bp, synthetic construct
  misc_feature 1..3549: note = Description of Artificial Sequence: Synthetic coding sequence
  source 1..3549: mol_type = other DNA
atggggcagcaggtcggccgagtcggcgaggctcccggactgcagcagccccagccacgagggatcagggggagctctgcagctaggcccagtggaaggagacgagaccccgcaggaaggactacagaaaccggtttcaatattttcacgcagcacgatcacttcgcctcatgtgtcgaggacggtttcgagggtgacaagactgggggttcaagccccgaagcgttgcataggccatacggttgcgatgtggaaccccaggctctgaacgaggcaatcaggtggtctagcaaagagaatctgctcggtgctacggaatcggaccctaacctgtttgtggcgctttatgacttcgtggcttctggggataacacgctaagtatcaccaagggcgagaaacttagagttctggggtacaatcaaaatggggagtggtcggaagtgcggtctaagaatggccaggggtgggtcccatctaattacattactcccgttaattcacttgaaaagcacagctggtatcatggccctgtttcccggtccgctgctgaatatctgcttagcagtctgattaatggcagctttttagtacgtgagtccgagtcatcacctggacagctctcaatcagcttacgttatgaggggagggtttaccactaccggatcaacactaccgccgatgggaaagtgtatgtgaccgcggagtctcggttctcaactctggccgagctggtccatcaccactctacagtcgctgacggcctggtcactactctccactatccagcacccaaatgtaacaaaccaaccgtctatggcgtgtcaccaattcatgataagtgggaaatggagagaaccgacataacaatgaagcataagttgggtggaggacagtatggcgaggtgtatgtgggggtgtggaaaaaatactcactaactgtggccgttaaaacactgaaggaggatacaatggaagttgaagagttccttaaggaggctgcagttatgaaggagattaagcaccctaatctggtccagctgctaggggtgtgcacactggaaccacctttttacattgtgactgagtacatgccctatgggaatcttctggactacctgcgcgagtgcaatcgggaggaagtcaccgccgtagttctcttgtatatggccacccagattagttcagctatggagtacctggaaaagaagaacttcatccacagggacctcgccgctaggaattgtttggtgggggagaaccacgtcgtcaaagtggcggatttcggcctgagccgactgatgacaggtgacacctatacagcccatgcgggagccaaattccccatcaagtggacagctcccgaatctttagcctataatacctttagtatcaaaagcgacgtgtgggcgtttggagttctgctctgggagatcgcaacgtacggaatgagcccctacccaggaatagatctgtctcaggtgtatgacctgctggagaaaggctaccgtatggagcaaccggagggatgcccaccaaaggtttacgaactcatgagagcctgttggaaatggagccctgcggatagacctagttttgcagaaacccaccaggcctttgaaactatgttccatgattcttcgatctcggaggaagtggcagaggagttagggagggcagcctccagcagctctgtggtcccctacctgcctaggctgcccatactgccgtctaaaaccaggacgttaaaaaaacaggtggagaacaaggagaacattgagggcgcacaagatgcaacagagaattcagcttccagcctcgctcctggattcattcgaggagcacaggcatcatccggctccccagcactgccaaggaaacaacgggacaagtcgccaagctctctgctggaggacgccaaagagacctgctttacgcgcgatcgtaaaggtggtttcttctcttcttttatgaagaaacggaatgctcctacaccaccaaagagatcttcttcttttagagaaatggagaaccaaccgcataaaaaatacgaactgacgggtaacttcagttcagttgcatcgttacagcatgccgatggtttctccttcacccccgcacaacaggaggccaacctagtgccccctaaatgttatgggggtagtttcgcccaacgcaatttgtgtaatgacgacgggggaggcggaggaggtagcggaaccgcaggcggtgggtggtccggtatcaccgggtttttcacacccaggcttataaaaaagacacttggacttagagccggtaagcctaccgcctctgacgatacgagcaagcctttccctaggagcaacagcacctcctccatgagtagcggtctgcccgagcaggatcgcatggcgatgaccctccctagaaactgtcagcgcagcaagcttcagttggaacgaactgtgtctaccagctcccaaccagaggagaatgtcgatcgcgctaatgacatgctgccaaaaaagtccgaggagtctgccgcaccaagccgggagagaccaaaagctaaactgttgccaagaggtgccaccgctctcccattgagaacacctagtggtgatctggccattacggaaaaggaccccccaggagtcggcgtagcaggggtggccgcagcaccgaaaggaaaggaaaagaacggtggggctagacttggaatggctggcgtaccagaagatggagagcagccaggctggccttcaccggctaaggccgctcctgtgctgcccacaacacacaaccataaggtacccgttctgattagccctaccctgaagcacacacccgctgatgtgcagctgataggtacagacagccagggcaacaagttcaagctccttagtgagcatcaggttacgtctagcggtgacaaggatcgtccacgtcgcgtgaagcctaagtgtgctcctcctcccccaccagtgatgcgcttgctgcaacatccttctatctgctcagatcctaccgaagaacctactgcactgaccgcgggtcaatccacctctgaaacacaggagggaggaaaaaaggccgctctgggcgcagtgccaatatccggaaaggccggtcgacccgtcatgccccctccccaggtccccctcccaacgagctcaatctctcccgctaaaatggctaacgggacagccggaaccaaggtagctttgcgaaaaactaagcaagccgcagagaaaatctctgcagataagatctccaaagaggccctcctggagtgtgccgatctgttgtcttcagcgctgactgagcccgtccctaacagtcagctggttgacactgggcatcagctgctggattactgtagtgggtatgtcgattgtattccccagacccggaacaagttcgccttcagagaagccgtgagcaaactggagctttcactacaggagctgcaagtttcttccgctgctgctggagtgccaggaaccaatcccgtattaaacaacttgttatcatgcgtccaggaaattagtgatgtggttcaacggtag

SEQ ID NO: 246448 - DNA, 3132 bp, synthetic construct
  misc_feature 1..3132: note = Description of Artificial Sequence: Synthetic coding sequence
  source 1..3132: mol_type = other DNA
atggtcctggggacagtgttactccctcccaacagctacgggagagaccaggacacaagtctgtgttgcctgtgtaccgaagcttcagagtcagcgctgccagatctgacagaggcactgcaccggccttatggatgcgatgtcgaacctcaggctctgaacgaggccatccgttggtcctctaaggagaatctcctcggcgcaaccgaaagtgatccaaatctctttgtcgccctttatgatttcgtagcctccggagacaatactctgagcataactaagggggagaaactgcgagtcctaggatacaaccagaatggagaatggagcgaggtccggagcaagaacggccaaggttgggtaccatccaattacattacgccagtcaactctctcgaaaagcactcgtggtaccacggtccagtctcccgaagcgcagcagaatatcttctgtcaagcctcattaacggctcatttctggtgcgcgagagtgagtccagcccaggtcagctttcaatctcactcagatacgaaggtcgcgtgtatcactaccgaatcaatacgactgcagatgggaaggtttatgtgacagctgagtcgaggttctctaccctggcggaactagtccaccaccatagtacagttgctgacggactcgtgaccactctccattatccagcgccaaaatgcaacaaaccaactgtctatggcgtgtcgcccatccatgataaatgggaaatggagcggactgatatcaccatgaagcataaattgggtggcggacaatacggggaggtgtatgtgggcgtctggaagaagtactcactgaccgtcgccgttaaaacgctgaaagaggacacaatggaggtggaagaattcttgaaagaggcagctgtgatgaaagagattaaacacccaaatctggtgcagctgctcggtgtctgtacgcttgagccaccattttacatagtgactgagtatatgccatacgggaatcttttggactacttgagagagtgtaacagagaggaagtcactgccgtcgttcttctgtacatggcaacccagattagctctgcaatggagtatcttgagaaaaaaaatttcattcatcgcgacctcgctgctagaaactgccttgtcggggaaaatcacgttgtgaaggtagcagactttggcctctccaggctcatgaccggagatacatatactgcacatgcaggcgcaaaatttccaatcaagtggactgcgcctgagtcacttgcatacaacaccttcagtatcaagagtgacgtttgggcctttggcgtgctgctatgggaaatcgctacatatggtatgtctccatatcccggtatagacctgtcacaggtatatgacttgctcgagaagggatacagaatggaacagccagagggctgcccccctaaagtctacgaactcatgcgcgcttgctggaaatggtctccagcggaccggccttcatttgccgagacccaccaagcgtttgagaccatgtttcatgactcttctatttctgaggaggtcgctgaggagttgggacgagctgctagttctagttccgtggtgccttacttgccacgactgccaatccttccgagtaagactcgtactctcaagaagcaagtagagaacaaggaaaatatcgagggagcccaggacgccactgaaaactcagcctccagtttggcgccaggattcattcggggagcccaggcaagtagtggaagtcctgccttgcctagaaagcagagagacaagagccctagttcactgctggaagacgcgaaggagacctgtttcacaagggacaggaagggagggttcttttctagtttcatgaagaagagaaatgcgcctacacccccaaaaagatcctcttcctttcgggagatggagaatcagccccacaaaaagtacgaattgaccggcttgccagagcaggatcggatggccatgaccctacccagaaactgtcagagatctaagctgcaactggaaagaactgtcagtacaagctcccaacctgaggaaaacgtagaccgcgcaaacgacatgcttcccaaaaagtcggaagaatccgcggcaccgtcccgagaaagacccaaggcgaaactgctgccgaggggtgcgacagccctccctctaagaacccctagtggggatcttgctattaccgaaaaagaccctccaggcgtgggtgtggccggtgttgccgctgctcctaaaggaaaggaaaaaaacggtggtgctcgcttgggcatggcaggggtgccagaggacggagagcaacccggatggccatcaccggcaaaggcagctcccgttctccctacaacccacaatcataaggtcccagtcctaatttcccctacgctaaaacatacgccagctgatgtgcaactcatcggaaccgactcccagggcaacaagttcaagctcctttccgaacaccaagtgacttcctccggcgataaagaccggccacgtagggtcaagcccaagtgtgcccctcctccacccccagtcatgagattgcttcagcaccccagcatctgcagtgacccaaccgaggagcctacagctctgacagctggacagtctacgtccgagacacaggaggggggaaagaaagctgccctgggcgcagtgcccattagcggtaaagccggaaggccagtgatgcctcctcctcaggtccccctgcctacaagttcaatctctcccgcaaagatggccaacggaacagcaggcacaaaagtggcactgaggaaaacgaagcaggccgctgaaaagatatctgccgataaaataagcaaagaggccttgctcgaatgtgccgacctgttgtctagcgcgctgactgagccagtgcccaactcacaactggtagatactgggcatcagctgctcgattactgctccggctatgtagattgcattccacagacccggaacaagttcgctttccgcgaagctgtgtcaaagttggaattaagcctgcaagagctacaagtgtcaagcgcggcagccggtgtgcctggcaccaaccctgtgcttaataacctgctctcatgcgtgcaggagatttcagacgtggttcagcgctag

SEQ ID NO: 246449 - DNA, 3504 bp, synthetic construct
  misc_feature 1..3504: note = Description of Artificial Sequence: Synthetic coding sequence
  source 1..3504: mol_type = other DNA
atggttctgggcactgtcctgttgccccctaactcttatggcagagaccaggataccagtctgtgttgtctttgtacagaggcaagtgagtccgctctgcccgatctcacagaccacttcgccagctgcgtggaagatggcttcgaaggcgacaaaacaggaggttcgagcccagaagccctgcaccgcccatacggatgtgacgtagagccgcaggccctgaacgaggccatacgctggtcgtctaaagagaatctcctaggagccaccgaatcagatccaaacctgttcgtggctctgtatgacttcgttgcttccggagacaacactctgagcataaccaaaggagaaaaacttcgcgtgttaggttacaaccaaaatggagagtggtccgaggtacgatcaaaaaacggccaaggttgggttcctagcaactacattacccccgtcaattccttggaaaagcatagttggtaccacggcccagtgagcagaagcgccgctgagtacctcttgagttccttaatcaatggaagtttccttgtcagggagtcagagtcttctcccggacaactttcaatttcactgcgttatgaggggagagtataccattatcgcataaatactaccgccgacggcaaggtctatgtaactgcagagtccagattctctaccctggctgaactggttcaccaccattcgactgtggccgatggactggttactacgctgcactacccagctccaaaatgtaacaagccaaccgtctatggcgtcagcccgattcacgacaagtgggagatggagaggactgatatcacaatgaagcataagctaggaggagggcaatacggagaagtttacgtgggtgtgtggaaaaagtactctctaacagtggctgttaaaactttgaaagaggatactatggaggtggaggaatttctgaaggaggccgctgtgatgaaggagattaagcatcccaaccttgtgcagcttttgggggtgtgtaccctggaacccccattttacatagtcactgaatatatgccctacgggaacctgctcgattatttaagggagtgtaaccgcgaggaagttaccgccgtggtgcttctgtacatggctacacagatctcttccgctatggagtatttggaaaaaaagaactttatccatagagatttggcggctcgcaattgtcttgtcggcgaaaaccatgttgtcaaggtggctgacttcgggctctcgcgcctgatgactggcgatacgtacacagcgcatgcgggagccaagttcccgattaaatggactgcccctgagagtctggcctataacacattttccatcaagagtgatgtgtgggcatttggcgtcctgctctgggaaatagccacatacggaatgtccccctatcccggtatcgacctttctcaagtgtacgacctgttggagaagggataccgaatggagcaacctgagggatgtccgcctaaagtgtatgaactcatgcgagcttgttggaaatggtctcccgctgatcggcctagtttcgcagagactcatcaggcttttgaaacaatgtttcatgatagtagtatcagcgaagaagttgctgaggaactaggaagagccgcttcaagctcaagtgtggtgccatatctgcccagactgccaatcctcccatccaagaccaggacgctgaaaaaacaggttgagaacaaggagaatatcgagggggcacaagatgccacagaaaacagtgcctcctcattggcaccagggttcatacggggagcccaagcaagctccgggtcgccagctctgccacgaaagcaacgagacaaatctccgagtagcttgttggaagatgctaaggagacatgctttacccgcgatcgcaaagggggatttttctcgagcttcatgaaaaaaagaaacgccccaacaccgcctaaacggagcagcagcttccgtgaaatggaaaatcagcctcataagaagtacgaactaactggcaacttcagctctgttgcaagcctgcagcatgccgatggtttcagtttcacaccagctcagcaggaggctaatctggtgcctcccaagtgctatgggggatcatttgctcagcgcaatctgtgtaacgacgatgggggtggtggaggagggtccggcaccgcaggtggcggatggagtggtatcacagggttctttactccccgtctgatcaagaagaccctgggattaagggctggtaaaccaacagcctcagacgataccagcaagccctttccccgaagcaactccacaagcagcatgagcagcggcctgccagagcaggacagaatggcgatgacgctgccaaggaactgccagcggtcaaaattacaattggagcgtaccgtctccacgtcttcgcagcccgaagaaaatgtggaccgcgcaaatgatatgctgccaaaaaaatctgaggagtccgcggcacctagtagggagagaccaaaagccaaactgttacccaggggagctaccgctctgcctctgcgcaccccgtccggtgacttagcaatcacggaaaaggatccccctggggtcggagtggcaggggtcgccgctgctcctaaagggaaagagaagaacggaggagccagacttggaatggccggagtccccgaagatggggaacagcccggatggcccagcccagctaaggccgcacccgtcctgcctaccacccataatcataaggtccccgtattgattagtcctaccctgaaacacacacctgcagatgtccaactgattgggacagattctcagggtaataaatttaagctgctgtcggaacaccaagttaccagctccggcgacaaggatcgtcctaggcgtgtcaagcccaaatgcgcccctcctcctcccccagtgatgagattgttacagcacccctctatttgcagcgacccgactgaggaacctacagctctcacagcagggcaaagtacaagcgagacacaggagggtggcaaaaaggccgctctaggagcagtacctatctcagggaaggccggaaggccagtcatgccccctcctcaagtgcccctgcctacaagcagcatctcccccgctaaaatggctaacggaactgctggcactaaagtagctctgcgcaaaactaagcaggcagctgagaagataagcgctgataagatctccaaagaagctctcttggaatgcgcagatctgctgtcttctgcgttgacagagccagttcctaattctcagctggtggatactggtcaccagctcctggactattgttctggctacgtggattgcatcccgcaaacccggaataagttcgcctttcgcgaagccgtgagtaagctggaactaagtttacaggaattacaggtcagttccgccgctgctggcgtccctggaacaaatcccgttctgaataatcttctgtcttgcgtgcaggagatcagcgacgtggtgcagcgctag

SEQ ID NO: 246450 - DNA, 3486 bp, synthetic construct
  misc_feature 1..3486: note = Description of Artificial Sequence: Synthetic coding sequence
  source 1..3486: mol_type = other DNA
atgggtcagcaggtaggtagagtgggtgaggctcccggactgcagcagccccagcccaggggaattagggggtccagcgcagctaggccgtctggaagacggcgtgacccagcagggaggacaactgagaccgggtttaacatcttcactcagcacgaggccctgcacaggccatatggttgtgacgtggaacctcaggccctgaatgaagccattcgatggtccagcaaagagaatttactgggggcaaccgaatctgatcctaacttgtttgtagcactctatgattttgtggctagcggggacaatactctcagtatcaccaagggggaaaaactgcgggttttaggatacaaccaaaacggagagtggtcagaggttagatcaaagaatggccaggggtgggtgcccagcaactacattacccccgtaaattctttggaaaaacattcctggtaccacggcccagtctctagatctgcggctgagtatctgctctctagcctcatcaatggctcctttttagtacgcgaaagcgagtcttcccccggacagttgtcaattagcttacgatacgagggcagggtttaccattaccgcattaacaccaccgccgacggtaaagtgtacgtgactgccgaaagccgattcagcactctggccgagttggtgcaccatcatagcacggtggccgatggcctcgtgacaacgttacactatcctgcacccaagtgtaataaacccaccgtatatggcgtttctcccattcatgataaatgggagatggagaggactgacataaccatgaagcataaacttgggggtggtcagtatggcgaagtgtacgtgggggtgtggaagaagtattccttaaccgtggcggtgaagacccttaaggaggacacaatggaggtcgaagagtttctgaaggaagctgctgtgatgaaagagattaagcaccccaatttagtgcagctactgggtgtttgcacgctggaacctccattctacatcgtcacagagtacatgccctacggcaatctgcttgattatctgcgggagtgtaaccgtgaggaggtgacagccgtcgttctgctgtatatggccactcaaatctccagtgcgatggaatacctcgagaaaaaaaacttcattcacagggatctagccgcacggaactgtttggtaggcgagaaccacgtggtaaaagttgcagacttcggattgtccaggctcatgacgggggatacatacacggctcatgccggagccaagttccctattaaatggacagccccagagtcgcttgcctataacacgttttccatcaaatcagatgtgtgggcctttggagtcctcctgtgggaaattgccacttacgggatgagcccttatccaggaatcgacctgagtcaagtatatgatcttctcgagaaaggctacagaatggaacagccagaagggtgcccgcctaaggtgtacgagctcatgcgagcctgttggaagtggagccccgctgaccggccaagcttcgccgaaacacaccaagcctttgaaacaatgttccacgattcatctatcagcgaggaggttgccgaggagctgggtcgcgcagcctcttccagctccgtggtgccgtacctgcctaggctaccaattcttccatctaaaacgaggacgctaaaaaaacaagtggaaaataaggaaaacatagaaggagcccaagatgcgacagaaaattcggccagctcattggccccaggtttcattcggggtgcacaggccagcagcggttcaccggcacttcctcgaaaacagcgagacaaatctcccagtagtctcctggaggacgcgaaagagacatgtttcacccgggacagaaagggcggatttttttccagcttcatgaagaaaaggaatgccccaacaccaccaaaacgatcaagttcattccgggagatggaaaatcagccgcataaaaagtacgaactgacaggaaatttttcatccgtggcttcattgcagcatgctgatgggttttcatttacacctgcacagcaagaggctaacctggtcccacccaagtgttacggcggatcatttgcccagaggaatctttgtaacgacgacggcggaggcggtggcggaagcgggaccgccggtgggggttggagcggtatcactggttttttcacgccacggctgattaagaaaaccctgggactgagggctggcaagccaaccgccagcgacgacacaagcaagccttttccacgttccaattctactagttccatgagcagcggcctgcccgaacaggacaggatggctatgaccctgcctagaaattgccaacgatctaaactgcagctcgaaaggacggtctcaacttccagccaaccagaagaaaacgtggacagagctaacgatatgctgccaaaaaagtccgaagagtccgccgctccatccagggagcgccctaaggccaaattgcttcccagaggggcaactgcgctccctttgagaacacccagcggtgatctcgctatcacagagaaggatcctccaggggtgggtgtggcaggtgtagctgccgcacctaaagggaaggagaagaacggcggtgcaagacttggcatggccggtgtgccagaagacggggagcagcctggatggccctccccagctaaagctgcgcctgtgctaccgactacccataaccataaggttccagtcttgattagtcccacacttaaacacacgcctgccgatgtacagctcatcggcacagacagccagggcaacaagttcaaactgttaagcgaacaccaagtaacaagctccggggataaggaccgcccacgcagagtgaaacccaaatgcgcccctccgccaccaccggttatgcggttgttgcagcatccttccatttgcagtgatcccactgaagaacctactgctctgaccgcgggtcagtctaccagcgagacacaagaaggaggcaagaaggcagccttgggggcagtgcccatttctggcaaggctgggaggcctgtcatgccaccccctcaggtgcccttgcccacctcctccatttcacctgccaaaatggccaatggaacagccggaacaaaggtagcgctgcgcaagactaagcaagccgcagaaaagataagcgccgataagatctccaaggaggctcttcttgaatgtgccgatctgctctcctcagctcttacagaacctgtgcccaattcccagctggtggataccgggcaccaacttcttgattactgcagcggctatgtcgactgtatcccgcagacacggaacaagttcgccttccgggaggctgtgagcaagttggagttgtcactgcaggaactccaggtcagttcggccgcagccggagttcctggaacaaaccccgtgctcaacaacttgctcagctgcgtgcaggaaatttccgacgttgtccagagatag

SEQ ID NO: 246451 - DNA, 3177 bp, synthetic construct
  misc_feature 1..3177: note = Description of Artificial Sequence: Synthetic coding sequence
  source 1..3177: mol_type = other DNA
atgggacagcaggtgggacgggtgggtgaggcgcctggcctccagcagccacagccgcgtggcatacgcggtagctctgctgccaggccttctggaagaaggagggatcctgccggacggaccactgaaaccggattcaacatttttacgcagcatgaggccctacacaggccatatgggtgcgacgtcgagccacaggccctgaatgaggccataaggtggagctccaaggaaaatcttctaggggctactgaaagtgatccgaacctcttcgtcgccctgtatgactttgtcgccagcggagataatacactatctatcacgaaaggggagaagctcagggttctgggatataaccagaacggtgaatggagtgaggtaagatctaaaaacgggcaaggctgggtgcccagcaactacattacccctgttaacagcctggaaaagcacagctggtaccatgggcctgtgtcgagaagcgcagctgagtacctgttgtcatcgctcatcaatggaagcttcctcgtgagagaatctgaatcatctccagggcaattaagcatcagcctccggtacgaaggtcgggtgtaccactatcgcattaataccaccgcagatgggaaggtgtacgtgaccgcagagtctaggttcagtaccctggccgagctggtgcaccaccattccacggtggctgatggtcttgtgacaaccctccactatccagctcccaagtgtaataaaccgaccgtatatggtgtcagccctattcatgataagtgggaaatggagcggaccgacattaccatgaagcacaagttgggcggtggacagtacggcgaagtttacgttggcgtctggaaaaaatacagcctaacagtggccgtcaagactctgaaagaagacacaatggaggtggaagaattcctgaaggaggccgcagtaatgaaagagatcaaacacccgaacctggtccagttactgggagtttgtactctcgaaccgccattctatatcgtgaccgaatacatgccttatggtaatctgctggactatctgcgcgagtgtaacagggaggaagtgaccgcggtggtactcctatacatggctacccagatttcgtccgcgatggaatacctcgaaaagaaaaatttcattcatcgagacctggcagcccgaaactgcctggtgggcgaaaaccacgtcgtaaaagtggctgatttcggtctatcaaggttgatgacgggtgacacttacacagcccacgctggtgccaaatttccaattaaatggacggccccagaatccctggcttacaataccttctcaataaaatcggacgtgtgggcctttggggtactgctctgggaaattgccacctacggaatgagcccttaccccggaatcgatctgtcccaagtgtacgacctactggagaaaggctatcggatggaacaacccgaaggctgccctcctaaggtgtacgaactgatgagggcttgttggaagtggagtcccgctgatcgccctagttttgcagagacacaccaggccttcgagaccatgtttcacgattctagcatttccgaagaggtcgccgaagagcttgggcgagccgcatcttcaagttccgtagttccatatctcccacgtctccctatactgccctcaaagactagaacgctgaagaagcaggtggaaaacaaagaaaacattgagggagcgcaggacgccactgagaacagcgcctcttctctggccccaggcttcatcagaggcgctcaggcaagtagtggaagccctgcactacctagaaagcagagagataagtcaccgtcaagcctgttagaggacgctaaagagacatgcttcacaagagatagaaaggggggtttcttcagttcatttatgaagaaaagaaacgctcctactccaccaaaacgaagctccagcttcagagagatggagaatcagcctcacaaaaaatatgaattaaccggattgcctgagcaagaccgcatggctatgacactgccaagaaattgccaaagaagtaaactgcaactggagcgcactgtatcaacaagttcgcagcctgaggagaatgtggatagagctaatgacatgctgccaaaaaaaagcgaggagtctgccgctccctcaagggagcgccctaaagccaaattactgccccgtggagccacggctttacccctccgtactccctccggcgacctggccatcaccgagaaggacccccctggagtgggggttgccggtgtggcagctgccccaaaagggaaggaaaagaacgggggagcaaggctcggaatggcaggcgtgcctgaagatggggaacagcccggttggccatcacccgcaaaggccgcaccagtgttgccgacaacacataaccataaagttccagtgctgatctcccccacattaaagcacaccccagctgatgttcagctgatcggaaccgattctcagggtaacaagtttaagctcctgagcgagcatcaggtaacatctagtggggacaaggatagaccacgtagggtaaagccaaaatgcgcacctccccctccaccagtgatgagattgttacagcatccgtctatttgttcagacccaactgaagagcctacagctctgaccgctggtcaatccacaagcgagacccaggaagggggaaaaaaagctgccctgggcgcagtcccaatttctggcaaagctggaaggccagttatgccgcctcctcaagtccccctccccaccagctccatttcacccgcaaagatggccaatgggacggctgggactaaagtggctctgagaaaaaccaagcaggccgctgaaaaaatctcggcggacaagatctctaaggaggcattgctagaatgtgctgatctcctgtcaagcgccctgaccgaacccgtacctaactctcagctggtagacaccgggcatcaactgctggactactgtagtgggtatgtggactgcattccgcagacaaggaataagtttgccttccgcgaagctgtgtcgaagctggaattgtctctccaggaactacaggtgtcatccgcagccgcaggcgtgcctgggaccaatcctgtacttaacaacctgctgtcctgtgtccaagagatctccgacgtggtgcagcggtag

SEQ ID NO: 246452 - DNA, 3240 bp, synthetic construct
  misc_feature 1..3240: note = Description of Artificial Sequence: Synthetic coding sequence
  source 1..3240: mol_type = other DNA
atgggacagcaggtaggtcgggtcggagaagcgcctggattacagcaaccgcagccacggggaatccgtggttcgagcgccgctcgaccaagcgggcgtagacgtgaccccgcaggcaggacaactgagaccggatttaatattttcacacagcatgatcacttcgcctcttgcgttgaagacgggttcgaaggggacaaaactggcggtagcagtcccgaagccctgcatcgcccttatggatgcgacgtggagccacaggcattgaatgaggctatccggtggagttctaaagaaaacttgctgggagcaacggaatccgatcccaatctcttcgtggccctgtacgatttcgtcgccagcggcgataacacactgtctatcactaagggcgagaagcttcgagtactcggctacaatcaaaatggggaatggagtgaagtgcgctccaaaaatggtcaagggtgggtccctagcaattatattacgcctgtgaactcactggagaagcattcgtggtatcatggcccagtctcccggtccgccgctgagtacctgctctccagcctgataaacgggagcttcttggtacgcgagtccgagtcctctcctggacagctgtcaatcagcctgcgttatgaaggacgtgtgtatcactatcgcatcaacacaaccgccgatggcaaggtttatgtcactgctgaaagtaggttcagtacactcgccgaacttgtacaccaccattccaccgtcgctgatggcctggtcacaaccctccactaccctgcgccaaagtgcaataagccaacagtgtacggagtctcgcctatccatgacaagtgggagatggaacggacagacatcactatgaagcacaaactgggcggtggccagtatggcgaggtgtacgtaggtgtttggaaaaaatattccttaactgtggctgttaaaactcttaaggaagatactatggaagtggaagaattcttaaaggaggctgcggtcatgaaagagattaaacatcctaatcttgtgcaattacttggggtctgtaccctggaaccgcctttttacatcgtcaccgaatatatgccttatgggaacctccttgactacctgcgtgagtgtaatcgcgaagaggtaacagctgttgttctcctgtatatggcaactcagatatcatcagctatggaatacctggagaagaaaaacttcatccatagggacttggcagccaggaactgtctggtgggagagaaccacgtagttaaggtagctgatttcggactctcacgtttgatgactggtgacacctacacggcacatgctggtgccaagttcccgatcaagtggaccgcccctgagtccctggcgtataacactttctcgatcaagagtgacgtgtgggctttcggcgtgctcttgtgggagatcgcgacctacgggatgtcaccctatcccggtatcgacttatcccaggtgtatgacttgcttgagaaaggctaccggatggaacaaccggagggatgtcccccaaaggtgtacgagctgatgcgcgcatgctggaaatggagccccgctgaccggcctagctttgctgagacacaccaggctttcgagaccatgtttcatgacagctcaatctcggaggaggtcgcagaggagctggggagagctgcgtctagttcctcagttgttccctatttgcccagactgccaattcttccaagtaagacacgcacgctgaagaagcaagttgaaaacaaggaaaacatcgagggcgctcaagatgctacagagaactccgcctctagtctggcgcctggctttatccgaggcgcacaagccagcagcggcagtccagctctgccccgaaaacagagggataaaagtccgtcctcactcctggaagatgctaaggaaacttgctttactcgggacagaaagggaggtttttttagctctttcatgaagaagaggaatgcccctacgccacccaagagatcctcttctttcagggagatggaaaaccagcctcataagaaatatgagctgacaggtctgccagaacaggatcgcatggcaatgacccttcccagaaattgtcaacggagtaaattacagctggagagaacggtttctacatcttctcaacccgaggaaaatgtggaccgggctaacgacatgctgcccaaaaagtccgaggaatccgctgcccctagccgagagcgccctaaggctaagctgctcccccgaggggcaacggccttacctctcaggacaccctccggcgatttggccatcacggaaaaggatccacctggtgtgggcgtggcgggagtggctgctgcaccaaaaggcaaggagaaaaatggcggtgccagattgggaatggctggggtacctgaggacggggaacaacctggctggcctagccccgcaaaagccgctcccgtgctgccaacaacacataaccacaaggtgccggtcctgatcagtcccactctgaagcatacccccgctgacgtgcaactcattggaacggactcccagggcaacaagtttaagctgctgtccgaacatcaggtgacctctagcggtgataaggacagaccaaggcgagtgaagcccaaatgtgcaccgccaccacctccagtcatgaggcttctgcaacatccgtcaatctgctccgacccaacggaagagccaaccgccctcacagccggtcaaagtacttccgaaacccaggaagggggaaaaaaggcagccctcggtgcggtgcccattagtggaaaggccggaaggccggtgatgcctccgcctcaggtgccactacccacatcctctatttcacccgctaaaatggccaacgggaccgcgggaaccaaggtggcgctacgcaagacaaagcaggccgctgagaaaatttccgcggataagatctcaaaggaggcactcctcgagtgtgctgatttgcttagctcagcgttaaccgagccagtacccaattcccagctagttgataccgggcatcagctcctggattattgtagtgggtatgttgattgcatccctcaaaccaggaacaagttcgcctttcgggaggccgtgtctaaattggagctgtctctgcaggaactccaggtatcatcagctgccgcaggtgtccccggaacaaatcctgtgctaaataaccttctttcctgtgtgcaggaaatctccgacgtagtgcagagatag

SEQ ID NO: 246453 - DNA, 2349 bp, synthetic construct
  misc_feature 1..2349: note = Description of Artificial Sequence: Synthetic coding sequence
  source 1..2349: mol_type = other DNA
atgaatcctgaaaaggacttcgccccattgactcccaatattgtcagggcccttaatgataaactgtacgaaaagcgcaaggttgctgctctggaaatagaaaagctcgtccgggagtttgtggctcagaacaatactgtccagattaagcacgttattcaaactctgagtcaggaattcgccctttctcaacatccccatagtcgaaagggcggtttgattgggctcgcggcttgttctatcgcattgggcaaagacagcgggctttacctgaaagagctaatcgaaccagtgctcacttgctttaacgatgcggatagcaggctgagatattacgcttgtgaagcactgtacaacatcgtgaaagtcgcaaggggggcagttctgccacatttcaacgttcttttcgacggactgtcgaaactggcagccgatccagatcccaacgttaaatcaggttccgagttacttgacaggctgttgaaagatattgtaactgaatctaataagttcgacctcgtatcctttatcccgttgctgagggagcggatctacagtaataatcagtacgctcggcaattcattataagttggatcctagttctggagagcgtgcccgatatcaacctgctggactacttacccgagatcttggacggcctcttccagatactgggcgataacggtaaagaaattcggaaaatgtgcgaggtcgtccttggcgagtttctgaaagagattaaaaagaatcccagctctgtcaaatttgcggaaatggcgaatattctggtcattcactgccagacaaccgatgacctgattcaattgacagccatgtgttggatgagggaattcattcagctggctggcagggtcatgctgccctatagctctggtatcctcacagccgtcctcccctgcctggcctatgacgatcggaaaaaaagcattaaagaggtcgccaatgtctgtaaccagtctctgatgaaactggtgacacccgaagatgatgaactggacgaactccggccagggcagaggcaggcggagccgactcctgacgacgcactgccgaaacaggaggggactgcctccgggggtcccgacggctcgtgcgacagcagtttcagttcaggcatctccgtgtttactgccgcttctactgagcgggctcctgtgacacttcatctagacgggattgtgcaggtcctcaactgccacttgtctgataccgctattgggatgatgaccagaatcgctgttcttaaatggctctatcacctgtacatcaagacacctaggaaaatgttccgccacactgattccctgttccccatattactgcaaaccctaagtgacgagtcagatgaggtgatactgaaggatctggaggttctggccgagattgccagctccccagcgggacaaaccgatgatccagggccactggatgggcctgatctacaggctagccactcagaattacaggtgccaacgccaggacgggctgggctgttgaataccagtgggacaaagggcctggaatgtagtccctcaacacccactatgaatagctatttttataagtttatgattaatctcctgaagaggttcagctccgagagaaaactgctagaggtgaggggacctttcattattcggcagttgtgtctgctgcttaacgcagagaacatcttccactccatggccgacatcctcctccgggaagaggacttgaagttcgccagtactatggtgcatgcccttaatacgatcctgcttacctcaactgagttgtttcaactgagaaaccaactcaaggatctgaagacccttgagtcacagaacctgttctgctgcttatacagatcttggtgccataatcccgtgacaaccgtatccctgtgtttccttacccagaattatcgtcatgcttacgatcttatccagaaattcggcgatttggaggtcacagtggattttcttgccgaggtggacaaactcgtgcagctgatcgaatgtccgatttttacatatctgagacttcagcttctggatgtcaaaaataacccgtatctgataaaagcgttatacggactcctgatgcttctcccccaatcatctgctttccaacttctctctcatcggcttcagtgtgtgcccaacccagaacttctccagaccgaggacagcctaaaagcagctcccaaatcacaaaaagccgattcaccatctatcgactacgcagaactgctgcagcatttcgagaaggtgcagaacaagcacttggaggtgcgccaccagcgttccgggaggggcgaccacctcgaccgtcgagtggtcctctag

SEQ ID NO: 246454 - DNA, 645 bp, synthetic construct
  misc_feature 1..645: note = Description of Artificial Sequence: Synthetic coding sequence
  source 1..645: mol_type = other DNA
atggctgacatcctactcagggaggaggatttgaaattcgcctcgaccatggtccacgcactcaacactattctgctgactagcactgaactcttccagctacgtaatcagctgaaggacttgaaaaccttagaatctcagaacctattttgctgcctctatcgctcgtggtgtcacaaccctgtgacaaccgtttctttgtgctttctgacacagaactatcgccacgcctacgaccttatccagaaattcggggatcttgaagttaccgtggattttctggccgaggtggacaagctcgttcaattgattgagtgcccgatattcacctacctgcgcctgcagcttctggacgtcaaaaacaacccttacctgatcaaagcactgtacggcctgctgatgctgctgcctcaatcctccgcttttcagttgcttagccataggctacagtgcgttccgaacccagaattgctgcaaactgaggattccctgaaagcagctcctaagagccaaaaggccgacagcccatcaatcgattatgcggagctactacagcattttgagaaagtgcaaaataagcacctggaggtgagacatcaacgctccggtcgcggagatcacttagataggcgggtggttctatag

SEQ ID NO: 246455 - DNA, 1062 bp, synthetic construct
  misc_feature 1..1062: note = Description of Artificial Sequence: Synthetic coding sequence
  source 1..1062: mol_type = other DNA
atggcctcctcgtggcccccactagaattgcaatcatctaaccaatcccaactgtttccacagaacgccactgcctgtgataatgcgccagaggcctgggatctactgcaccgggtcctgcctacattcatcatttccatctgtttcttcggcctgcttggcaatctcttcgtgctgcttgtgtttctactgcctcgtaggcaactcaatgttgccgaaatctacctcgccaacctggctgcatctgatctcgtgtttgtgctcggattacctttctgggctgaaaacatatggaatcagttcaactggcctttcggtgctctgctgtgtagggtgatcaatggagtgatcaaagcaaacctcttcattagcatattcctggtggtcgcgatctcccaggatcggtacagggtactagtgcatcccatggcgtctaggcgccagcagcgcagacggcaggcgcgtgtgacgtgcgttctcatctgggtggtcgggggactgctaagcatccctacattcctcctgcggagcatccaagcagtgcccgaccttaatatcacggcctgcattctgctactccctcacgaagcctggcatttcgccagaatagttgaactgaacatcctgggatttctactccctctggcggctatagtcttctttaattaccatatactggccagcctgcgaacgcgtgaagaggtgtccagaacccgatgcggcggacgaaaggactctaagactacggcattgattctgactcttgtcgtggctttcctggtatgctgggctccatatcacttttttgcattcttagagtttctcttccaggtgcaagccgtgagagggtgcttttgggaggactttatagatctagggctgcagttggccaacttctttgccttcaccaactctagtctcaacccggtaatctacgtgtttgttggacgcctgtttagaacaaaggtgtgggaattgtacaagcaatgcacccccaaaagtctggcacctataagcagtagccaccggaaagaaatattccagttattttggagaaactag

SEQ ID NO: 246456 - DNA, 1527 bp, synthetic construct
  misc_feature 1..1527: note = Description of Artificial Sequence: Synthetic coding sequence
  source 1..1527: mol_type = other DNA
atgccacccaagcgcaacgagaagtacaagctgccaatcccattccctgaggggaaagtcctggatgatatggaggggaatcagtgggtactgggaaaaaaaatcggaagcgggggatttggactcatctaccttgcctttccgacaaataaacccgagaaggatgcgagacacgtggttaaggtcgagtatcaggagaatggacctctgttcagcgaactcaaattttaccagagagtcgcgaagaaggactgtattaaaaagtggatcgagcgcaaacagctagattacctgggcatcccactcttctacggttcaggcttaactgaatttaagggacgaagttaccgctttatggtgatggagcgactcggcattgatcttcagaaaatctctggccaaaacgggaccttcaaaaagtcgacagtgcttcaactgggcatccggatgcttgacgtgctcgagtacattcacgagaacgagtacgtgcatggcgacatcaaggccgcaaatctgctgttgggttataagaatccggatcaggtctatctggcagattacgggctttcctatcggtactgccctaacgggaatcataaacaatatcaggaaaaccctcgcaaaggccataacggaaccatcgagtttaccagcctcgacgctcacaagggcgttgccctgtccaggagaagcgacgtggagatcctgggatactgcatgcttcggtggttatgcggaaagctgccctgggaacagaatttaaaggatcctgtggctgtgcaaactgcgaagacaaatctcctggacgagctgcctcagtccgttctgaagtgggcaccatccggttcttcctgctgtgaaattgcacaattcctcgtgtgcgcacactcccttgcctatgacgagaagccgaactaccaggccctcaaaaagattctcaacccccacggtatacctctcggacctctggacttcagtaccaaaggtcagtcaatcaacgtccataccccaaactctcaaaaggtggacagccagaaagcggcaaccaaacaggtgaataaggcccataacagactgatcgagaaaaaggtccattccgagaggtctgccgagtcttgtgcaacctggaaggtacagaaagaagaaaagctgatcgggctgatgaataacgaagctgcgcaggaatcaactcggcgtcggcagaagtaccaggagagccaggaacccctgaacgaagtgaacagcttcccgcagaagattagttacacacagttccctaactcattttacgagcctcaccaggattttacctctcccgatattttcaagaagagccgctcccccagctggtataaatatacaagcacggtgagcaccggcatcaccgatcttgagagctcaaccggcctgtggccaacaatttctcagttcaccctgagcgaggagactaacgcagatgtttattattataggattatcatcccagtactgcttatgcttgtctttctcgctctcttttttttgtag

SEQ ID NO: 246457 - DNA, 1203 bp, synthetic construct
  misc_feature 1..1203: note = Description of Artificial Sequence: Synthetic coding sequence
  source 1..1203: mol_type = other DNA
atgcctcctaaaagaaacgagaaatacaaactgcctattccttttcccgaggggaaggtgctggacgacatggaaggcaatcagtgggtcctcggaaaaaagattgggtctggtgggttcggcctgatttacctcgccttcccaaccaacaagccagagaaggatgctcggcatgtagtcaaagtggagtaccaggaaaacggaccactcttcagcgagctcaaattttaccagcgcgtggccaagaaggattgtatcaagaagtggatcgagaggaaacagctggactacctggggatacccctgttttacgggagcgggttgactgagttcaaaggccgttcctacaggtttatggtcatggaacggttggggattgatctgcaaaagatcagtggacagaatggcacctttaagaaatctactgtgctgcaactggggatacgcatgttggacgtgctagagtatattcacgaaaacgaatatgtgcacggcgacatcaaagcggcaaatctattgctcggctataagaatcccgaccaggtgtatctggccgattatggcctgtcttatcgatattgccccaacggtaaccacaaacagtatcaagagaatcctaggaaaggacacaacggaacgatcgagtttacctctctggatgcacacaagggcgtggcgctgtcccgcagaagcgacgtcgaaattttgggctactgcatgctaaggtggctttgcggaaaactgccatgggagcagaatctgaaggaccccgtggctgtccagactgccaagaccaatctgcttgatgagcttcctcagtccgtcctgaagtgggccccatcagggtcgagttgttgcgaaatagcacaattcctcgtctgcgcccactcgctcgcttatgatgagaagccgaattatcaggctctgaaaaaaatcttaaatccacatggaatcccactgggtcccctggacttcagcacaaagggtcagagcataaacgtgcacaccccaaactcccagaaagttgattcgcaaaaggccgctactaagcaagtgaacaaggctcacaacaggttaatagaaaagaaagttcactcagagaggagtgctgagtcctgcgctacctggaaagtgcagaaggaagagaagcttattggactcatgaacaacgaggcagcacaaatccgacaactcggctattag

SEQ ID NO: 246458 - DNA, 1191 bp, synthetic construct
  misc_feature 1..1191: note = Description of Artificial Sequence: Synthetic coding sequence
  source 1..1191: mol_type = other DNA
atgccccctaaacgtaatgagaagtataagcttcctataccttttcctgagggtaaggtgttggatgatatggaggggaatcaatgggttcttggtaaaaagattggctctggagggttcggtttgatctacttggctttccctaccaataagcccgagaaagatgcacgacatgtggtgaaagtcgaatatcaagaaaatggcccactgtttagcgagctgaaattttaccagcgtgtggctaaaaaagactgtatcaagaaatggatcgagaggaaacagctggactatctgggaatccccctcttctatggatccggcctcactgaattcaaagggagatcatataggtttatggtgatggagcggctgggcattgacttgcaaaaaataagtggtcagaacggtacatttaaaaaatcgactgtgttgcagctggggatcagaatgctggacgtccttgagtacatccatgaaaatgaatacgtccacggcgacatcaaggccgctaatctgctgctgggatacaaaaacccagaccaggtctaccttgccgattatggcctctcatatcggtactgccccaatggtaatcacaagcaataccaagaaaacccgagaaagggacacaatggtaccatagagtttacaagtcttgacgcgcataagggcgtggctttgagccgaaggagtgatgttgaaatcctggggtactgtatgttacggtggttgtgcggcaagctgccttgggaacagaaccttaaggatcccgtggctgtgcagacggccaagaccaacctattggatgaactcccacagtcagtcctgaaatgggctccgagcgggagttcctgttgtgagattgcccagtttcttgtctgcgcccactccctcgcctacgacgaaaaacccaactatcaggcacttaagaagatcctgaatcctcatggcatcccgctcggacccctggatttttccacaaaaggccagagcatcaacgtgcacaccccaaacagtcaaaaggtggacagccagaaggctgcaaccaagcaggttaacaaggcccacaacagattgattgagaagaaggtgcactccgaacgttccgccgagtcctgcgccacgtggaaagtccagaaggaagaaaagctgattggcctgatgaacaacgaggcggctcaattccggtag

SEQ ID NO: 246459 - DNA, 876 bp, synthetic construct
  misc_feature 1..876: note = Description of Artificial Sequence: Synthetic coding sequence
  source 1..876: mol_type = other DNA
atgcctcccaaacgaaacgaaaaatataagctgccaatccccttccctgagggtaaagtgcttgacgatatggagggtaaccagtgggtgctaggcaagaagatcggatcaggaggatttggactaatctatcttgccttcccgacaaataagcctgaaaaggatgctcgccatgtggtcaaagttgagtatcaggagaatggcccactgttctctgagttgaagttctaccagcgggtggccaagaaggattgtattgtctttgtggtgaagaaatggatcgagcgtaagcagctggattacctgggcatccccctgttttatggtagcggacttaccgagtttaaagggagaagctatagatttatggtgatggagcgactcggcatagatcttcaaaagatctcagggcagaacggaacatttaaaaagtccacagtcctccagctgggtatccggatgcttgacgtcctggagtacatacacgaaaatgaatacgtgcatggagatataaaagctgcaaatctcctgcttggatacaaaaacccagaccaagtatatctagcggattatggcctttcctaccggtattgccctaacgggaatcacaaacagtaccaagagaacccaagaaagggacacaacggcaccatcgaatttacgtcactggatgcccacaagggggtagccctgagcaggcgctctgatgtagagattctgggatattgcatgctgcggtggttatgtggaaaactgccatgggaacagaatctgaaggatcccgtggccgtgcagactgccaaaaccaaatacaaatttagctcaatctcttcatgtacagctccgggactgaaaggttatataaagggaagttag

SEQ ID NO: 246460 - DNA, 1527 bp, synthetic construct
  misc_feature 1..1527: note = Description of Artificial Sequence: Synthetic coding sequence
  source 1..1527: mol_type = other DNA
atgccaccgaaacgaaacgagaagtataagctgcccatcccctttcctgagggtaaggtgctagatgatatggaagggaaccagtgggttctggggaagaagattggcagtggcggttttggtcttatataccttgcttttcccactaataagcccgagaaggatgcacgccacgtagtgaaagtagagtatcaggagaacggacccttgttttccgagctaaagttctaccaacgggtggccaaaaaggattgcatcaaaaagtggatcgaaagaaaacagttagactacctcggcatccctctattctacggctccggtctgactgaatttaaggggagaagttaccgctttatggtgatggaacgcctcggcatcgatttgcaaaagatctctggccagaatgggactttcaagaagtccaccgtcctgcagctcggaatacgtatgcttgacgtgctggaatatattcatgagaacgaatatgtgcacggagatattaaagccgctaatctgcttcttgggtacaaaaacccagatcaggtgtatctggctgattacggtctttcttacagatactgtcccaacgggaatcataagcagtatcaggagaaccctagaaaggggcataacggcacgattgagtttacatcattggacgcacataagggcgtggctctatctcgcaggagcgacgtcgaaatcctcggatactgtatgctgcgatggttatgcggaaagttgccgtgggagcagaacctgaaagacccagtggcggtgcaaaccgccaaaacgaacctgctggacgaattaccacaatctgtcctgaagtgggctccgtccggaagttcctgctgcgaaattgcacagttcctggtatgtgcccatagtctagcatacgatgagaagcctaactaccaggcactgaagaagatcctaaacccccatggaatcccattggggccacttgacttctccactaaaggacagtcaattaacgttcacacccccaacagtcagaaggtggattcccagaaggccgcaacaaagcaagtgaacaaagctcacaacagactgattgagaaaaaagtgcatagcgaaagaagcgctgaaagttgcgccacctggaaggttcagaaggaagagaagcttatcgggctcatgaataacgaagcagctcaggaatcgactagaagaaggcagaaataccaagagagccaagagcccttaaacgaggtcaatagctttcctcagaagataagctatacacagttcccaaattccttttatgagccacaccaggatttcacgtctccagacattttcaagaagtcacggtccccttcctggtacaaatacactagtaccgtttccacgggaattaccgatctcgagtcctctacaggtttgtggcctacaattagccagtttacgctaagtgaggaaaccaacgccgacgtctactactaccggattataatccctgtcctcctgatgttagtattcctcgcattgttttttttatag

SEQ ID NO: 246461 - DNA, 1458 bp, synthetic construct
  misc_feature 1..1458: note = Description of Artificial Sequence: Synthetic coding sequence
  source 1..1458: mol_type = other DNA
atggaggggaaccagtgggtgctcggaaagaagatcggctctggcggtttcggtttgatttacttagctttcccaaccaataaacctgaaaaggatgccaggcatgttgtgaaagtcgaataccaggaaaatggtccgttgttttcggagttaaaattctatcagagggtcgccaagaaggactgcatcaaaaagtggattgaacggaagcaactggattacctggggatccctctgttctacgggtccggactgactgagtttaaggggcgtagttatagattcatggtgatggagaggttggggattgatctccagaagatcagcggacagaatggcacctttaagaagtccacagtgctccagttgggtatccgtatgctggatgttctcgaatatatccacgagaacgaatatgtccacggagacattaaagcagcaaacctgctcctgggctataagaatcctgatcaggtatatttggctgactacggcctaagttataggtattgccccaacggaaatcataagcagtatcaggaaaaccctcggaaaggccacaacggcacaattgaattcacctccctggatgcacataagggtgttgcactgagcaggaggagcgacgtggaaattctggggtattgcatgttgagatggctatgcggcaagttgccatgggagcagaatctgaaagaccctgtagccgtgcaaacagcaaaaactaacttgctggacgaactgcctcagtccgtgctgaaatgggccccatccggttccagttgctgcgaaatagcacagttcttggtgtgcgctcattcccttgcctacgacgagaaacctaattatcaggccctgaaaaagatcttaaacccccacgggattccactgggcccactggacttctccaccaaaggccagtcgatcaacgttcacacccccaatagccagaaggtggattcgcagaaagccgcaaccaagcaggttaataaggcccacaaccggttaattgagaaaaaggtgcattcagagagatctgctgaatcttgcgccacttggaaagtgcagaaggaagaaaaactcatcggcctgatgaacaacgaagctgctcaagaatccaccagacgacgtcagaaataccaggaaagccaagagcccctcaatgaggtcaacagcttcccacagaaaattagttacacccagtttcccaactcgttttatgagcctcaccaagacttcacctctcctgacatcttcaaaaagagtcgatcaccaagctggtacaagtacacaagcaccgtgtctactggaattacggatctggagagctcaacagggttatggcctacaattagtcagttcaccctgagtgaagaaacaaacgccgatgtgtactattacaggattatcattcccgttttgctgatgctggtgtttctggctctgttttttctgtag

SEQ ID NO: 246462 - DNA, 531 bp, synthetic construct
  misc_feature 1..531: note = Description of Artificial Sequence: Synthetic coding sequence
  source 1..531: mol_type = other DNA
atggctatgtcctttgagtggccctggcaatataggttccctccattcttcacactgcagcctaatgtcgatacaaggcagaaacagctggcagcctggtgcagccttgtcctgtcattttgtcggttacacaagcagagctctatgaccgtaatggaagcccaagagtcccccttatttaataacgtgaaattgcagcgcaagttacccgtggaaagtatacaaatcgttcttgaggaactgaggaaaaaagggaatcttgagtggttggataagtccaagagcagctttttaattatgtggcgcagaccagaggagtggggtaaactgatctaccagtgggtgagcagatccggacaaaataattcggtgttcacactgtatgagctaaccaatggggaagacacggaagatgaggaattccacggcttggatgaggctacactcctgcgcgcattgcaagctctgcaacaagagcacaaggcggagattattacagtgagcgacgggagaggcgtcaagttcttttag

SEQ ID NO: 246463 - DNA, 984 bp, synthetic construct
  misc_feature 1..984: note = Description of Artificial Sequence: Synthetic coding sequence
  source 1..984: mol_type = other DNA
atgagctttttagggggtttcttcggtccgatatgtgaaattgatatcgtcctgaatgatggggagactcgcaagatggcagagatgaagaccgaggatggcaaagtcgaaaagcattacctcttctatgacggggaatctgtcagcggtaaggttaatcttgcctttaaacaaccagggaagcgcctggagcatcaagggatccgcatagagttcgtgggacagatcgagcttttcaatgacaaaagtaatacacatgagttcgtgaacctagtgaaggagcttgcccttcccggtgagctaacacagtcaagatcctatgacttcgagttcatgcaagtcgagaaaccttacgagagttatatcggggcaaacgtgcgtctaagatacttcctgaaggtaaccatcgtacgcaggctcaccgatttggtcaaggaatatgatctgattgtgcaccaactagccacctaccccgacgtgaataatagtataaagatggaggtcgggatcgaggattgcttgcatattgaattcgagtacaataaaagcaagtatcacctgaaggatgtgatagtgggcaagatatactttctgctggtgagaataaagattcagcacatggagctgcaactgataaagaaggagatcaccggcatcggcccttccaccacgactgagaccgaaacaatcgctaaatacgaaattatggacggagcgccagtgaagggagaaagtatccccatccggctctttctcgccggatatgacccaacacccaccatgcgggatgtgaacaagaaattctcagtgcggtatttcttgaaccttgtattggtggatgaagaggacaggagatacttcaaacagcaagagatcattctctggagaaaggctcctgaaaaacttcggaagcagcgtacaaacttccatcaacggttcgaatcccccgaatcacaagcaagtgccgagcagcccgagatgtag

SEQ ID NO: 246464 - DNA, 984 bp, synthetic construct
  misc_feature 1..984: note = Description of Artificial Sequence: Synthetic coding sequence
  source 1..984: mol_type = other DNA
atgagctttttgggagggttcttcggccctatctgcgagatcgacatcgtacttaacgacggtgagaccaggaaaatggccgagatgaagacagaagatggaaaggttgagaagcattatctgttctacgatggcgagagcgtatccggaaaggttaacctcgcgtttaagcagcctggcaagagattggagcatcagggaatccggattgagtttgttggacaaattgagctgttcaacgacaagagtaacacacatgaatttgtaaacctcgtgaaagagcttgccttacccggagagctgacccaatcacggagttatgattttgaatttatgcaggtggaaaaaccatacgagagctacatcggcgcaaacgtgagactgcgttacttcctgaaggttacgatcgtccgccgtcttactgacctcgttaaagagtacgatctgatcgtgcatcaattggctacgtatcccgatgtcaacaatagcattaaaatggaggtagggattgaggattgtcttcacatcgaattcgagtataacaaaagtaagtaccatctcaaggacgttattgtgggcaagatttacttcctacttgtgaggatcaagatccagcacatggagctgcagctgatcaaaaaggagatcaccggaattggcccatcgacgacaacagagacagagaccatcgcaaagtacgaaattatggacggggctcctgtaaaaggggagtccattccaatacgcttattcctggccggatatgaccctacacccacaatgcgcgacgttaataaaaaattcagcgtgcggtattttttaaacttagtgttagttgacgaggaagatcggaggtactttaagcaacaagaaataattctctggaggaaggccccagaaaagctgcggaagcagcggaccaactttcatcagcgtttcgagagtcccgaatcgcaggcctccgctgagcagcctgaaatgtag

SEQ ID NO: 246465 - DNA, 756 bp, synthetic construct
  misc_feature 1..756: note = Description of Artificial Sequence: Synthetic coding sequence
  source 1..756: mol_type = other DNA
atgtcatttctcggcggatttttcggcccaatttgtgagatcgatattgttctgaatgatggtgagacacgcaagatggcagagatgaaaacagaagatggaaaggtcgagaagcactatctgttctacgatggagaatccgtgtctggaaaagtgaatttggccttcaaacagcccggtaaaaggctcgagcaccagggcattaggatcgagttcgtgggccaaatcgagctgttcaatgataagtccaatacacacgaatttgtaaacttagtcaaggagctcgcactgcctggtgagctaacacagtctagatcttacgacttcgaatttatgcaagtggaaaagccctatgagagttatattggggctaacgtccgtctgaggtacttcctgaaggttacaatcgttcgccgactaaccgatcttgtcaaagagtatgatctgatcgtacatcagcttgccacttatcctgacgtgaataactcaatcaaaatggaggttggcattgaagattgcctgcacatcgaatttgagtataacaaaagtaaatatcatcttaaagacgtgatcgtaggaaagatctatttcttactggtgcggatcaagatacaacacatggagctccagcttatcaagaaggagatcacaggcattggcccatccaccactactgagacggaaaccattgccaagtatgaaatcatggacggagcaccggtgaagggagataacttcatggaaaagtccagttag

SEQ ID NO: 246466 - DNA, 651 bp, synthetic construct
  misc_feature 1..651: note = Description of Artificial Sequence: Synthetic coding sequence
  source 1..651: mol_type = other DNA
atgcaggtggagaagccgtacgaatcgtatattggcgctaacgtgcggctgcggtacttcctaaaagtgaccatcgtaaggcgacttacagacctcgtgaaggaatacgatctgatcgtgcaccagcttgcaacgtatcctgatgtgaacaactccataaaaatggaggtggggatagaggactgtctacacattgagtttgaatataataagagtaagtaccatctcaaagacgttattgtgggcaaaatttactttctcttggttagaattaagattcagcatatggagcttcagctgatcaagaaggaaataaccggcataggcccatctacgaccacagagacagaaaccattgctaagtacgagataatggacggagccccagtgaagggtgaatccattccaatccgcttgttcctggcagggtacgaccccactcctacgatgcgcgatgtgaacaagaagttcagtgtccgatattttctgaacctcgtcctggtggacgaggaggaccgtaggtattttaagcagcaagagattatcctctggcgcaaggcccctgagaaactccggaagcaaaggacaaactttcatcagagatttgagagtcccgagagccaggcttccgcagagcaaccggagatgtag

SEQ ID NO: 246467 - DNA, 933 bp, synthetic construct
  misc_feature 1..933: note = Description of Artificial Sequence: Synthetic coding sequence
  source 1..933: mol_type = other DNA
atgaccgaaaatccgtttcaagagcgttacagcgtggaggacttatcaacgttcggaatgtgcttgtgcatggtgaggtacgtttacgatgccttttataaggtgaatctcgcttttaaacagcccggtaagcggttggaacatcaaggaatacggatcgagtttgtggggcagatcgaactgttcaacgacaaatccaacacccatgagtttgtgaatctggtcaaagaactggccttacccggagagttgactcagtcccgatcctacgattttgaattcatgcaagtcgaaaagccatacgagtcttatatcggcgcaaacgtccggctgagatactttctgaaggtcacaatcgtgaggcgccttaccgacctggtgaaggagtatgatttgatagtgcatcaacttgctacctaccccgacgtgaacaacagcataaagatggaagttggtattgaagactgtctacatatagagttcgagtacaacaaatccaaataccacttaaaagatgtgatcgttgggaagatctacttcctactggtgcggatcaaaatacaacacatggagcttcaactgattaaaaaggaaatcacaggcataggtcctagtaccactaccgaaaccgagactatagcaaaatatgagataatggacggagccccagtgaagggtgaatcaatacccatccgcctgtttttggcaggctatgatccaacccccacgatgagggatgtgaacaagaaattctccgtgcggtactttctgaacctggtactggttgatgaagaagatcgaagatacttcaagcagcaggaaatcatcctatggaggaaggccccagagaagctgaggaagcagaggactaattttcaccagcgattcgagtccccagaatctcaggcctccgccgagcagcctgaaatgtag

SEQ ID NO: 246468 - DNA, 1011 bp, synthetic construct
  misc_feature 1..1011: note = Description of Artificial Sequence: Synthetic coding sequence
  source 1..1011: mol_type = other DNA
atgtccttcttcggctttggacagagtgtcgaagtggaaattttgttgaatgacgctgaaagtcgtaaacgggctgagcacaaaacagaagatggtaagaaagagaaatactttctgttctatgatggcgagaccgtgagcgggaaggtaagcttggcacttaagaacccaaacaaacggctggaacatcagggcattaaaatcgagtttatcggccagattgaactctactatgaccggggaaaccatcacgagtttgtgtctctggtgaaggacctcgcacgcccaggagagatcacccaaagccaagcttttgatttcgagtttacccacgtggaaaagccatatgagagctacacgggacagaatgtcaagctgaggtacttcctcagagctaccatttccaggcgtctcaatgacgtcgtcaaggagatggacattgtagtccacaccctgtctacttacccggagttgaatagtagcataaagatggaggttgggatagaagactgcctgcacattgagttcgagtataacaaatccaaatatcacctcaaggatgttatcgtgggaaagatctatttcctgctggtgagaataaaaatcaaacacatggaaatcgatatcatcaagagggaaaccaccggcaccgggcctaatgtgtaccacgagaacgatacgattgcgaagtacgaaattatggacggcgcacccgtcaggggtgagagtatccccatccgactcttcttagccggttatgagctcacgcccactatgcgggatattaataagaaattttccgttcggtattatctcaatctggtgcttatcgatgaggaagagcggagatatttcaagcagcaggaagtggtcctctggaggaaaggcgacattgtgcgaaagtccatgtcccatcaggctgcaattgcctctcaacgctttgaggggactactagtctgggagaagtgcgcaccccctctcagttgtcggacaacaattgcaggcagtag

SEQ ID NO: 246469 - DNA, 666 bp, synthetic construct
  misc_feature 1..666: note = Description of Artificial Sequence: Synthetic coding sequence
  source 1..666: mol_type = other DNA
atgtttcacggtatccctgccacgcccggtatcggcgcaccaggcaataagcccgagctgtatgaagaggttaagctgtataagaacgccagagagagggaaaaatacgataatatggcagagctgttcgcagtggtgaagaccatgcaggcactggagaaggcatacatcaaagattgcgtgtctcctagcgagtacacagcagcctgctcacgcctgctagtccagtataaggcggcatttaggcaagtacagggaagcgagatcagcagcattgatgagttctgtagaaagtttaggctggattgcccccttgcgatggaacggataaaggaggatcgccctattactattaaagatgataagggaaaccttaaccggtgcatcgccgacgtggtcagcctttttattacagtgatggataagcttagactggagatccgggctatggatgaaatccagcctgatttacgcgagcttatggagaccatgcacagaatgagtcatttgccacctgacttcgagggtcggcaaacggtcagtcagtggctgcagacattaagcgggatgagtgcatccgatgagctggacgatagccaggtgcggcagatgctgtttgatctggaatctgcctacaatgccttcaaccggtttttgcacgcctag

SEQ ID NO: 246470 - DNA, 702 bp, synthetic construct
  misc_feature 1..702: note = Description of Artificial Sequence: Synthetic coding sequence
  source 1..702: mol_type = other DNA
atgtttcacggaataccggctactcccggtatcggtgcacctggaaataagcctgagctctacgaagaagtcaaattatataaaaacgcccgtgaacgggagaagtacgataacatggccgagttgttcgccgtagtcaagacaatgcaggccttagaaaaagcctatataaaggactgcgtttcaccctccgagtatactgctgcctgctctagactgctggtccagtataaagccgcttttcgacaggttcaggggtccgaaatcagctccattgatgagttttgcaggaagtttaggctcgactgtcctctggctatggaaagaattaaggaagaccggcctatcactattaaggatgataaaggaaatctgaatcgctgtatcgcggatgtggtctccctttttattaccgtgatggataaactgaggcttgagattagagctatggacgagattcaaccagacctgcgggagctgatggaaacaatgcacaggatgtctcacctgccccctgactttgagggccgacagacagtctcccagtggtgggtgtccctacccgcacggcagagccctgccgtccccgagacactgcccgctagaagatctccggctgttccccttagacccagcgcgcctacatgccctgtccttcatagtcaggccgctgaccctgaaagacatgtgggcgtgcgctag

SEQ ID NO: 246471 - DNA, 666 bp, synthetic construct
  misc_feature 1..666: note = Description of Artificial Sequence: Synthetic coding sequence
  source 1..666: mol_type = other DNA
atgttccacggcattcccgctactccaggcatcggcgctccagggaataaaccagagctgtatgaagaggtgaagctgtataaaaacgcccgagaacgcgagaagtacgataacatggcagagctgttcgccgttgtgaaaactatgcaggcgttagagaaggcatatattaaggattgtgtatcaccctcggaatacaccgcggcatgctctagactccttgtccaatataaggctgctttccggcaggtgcagggctctgagatttcatcaatagatgagttttgtcgaaagttcagactggactgcccactagcaatggagagaataaaggaagaccgcccaatcacgatcaaggacgataaaggcaatcttaatcgatgcattgcggatgtcgtgtccctgttcatcaccgtcatggataaactccgcctggaaattcgtgccatggacgagatccagccagatctgagggagctgatggagacgatgcaccggatgagtcacctgcccccagactttgaggggagacagaccgtgagccagtggctgcagacgctctcaggcatgtccgccagtgacgaattggatgacagccaggtgcgtcaaatgctctttgacttggagtcggcgtacaatgcttttaatagattcttacacgcctag

SEQ ID NO: 246472 - DNA, 1791 bp, synthetic construct
  misc_feature 1..1791: note = Description of Artificial Sequence: Synthetic coding sequence
  source 1..1791: mol_type = other DNA
atggctgcccacctgtcatacggcagggtaaacctcaacgtgttacgggaggctgtgcgaagagaacttagggaatttctcgataagtgcgccggatcaaaagctatagtgtgggacgaatatctgactggtccctttggacttattgctcaatatagcttgctgaaggagcacgaggtggaaaagatgtttacactgaagggcaatcgcctccccgcagccgacgttaagaacatcattttctttgttcggcctaggctggaactgatggatataatcgctgagaatgtgctcagcgaagaccgtcgcggacctaccagagacttccatatcctcttcgtgccgagaaggtcgcttctgtgtgagcagaggctgaaggacctgggtgtgctggggagttttatccaccgggaagagtattcacttgacctcatccctttcgatggcgacctattaagcatggagtctgagggcgcttttaaggaatgttacttagaaggtgatcagacctcattgtaccatgcagctaagggcttgatgacattgcaagcattgtacggcacaattcctcagattttcggcaaaggggaatgtgcgaggcaagtggcgaacatgatgatacgcatgaagagagagttcacggggtcccagaactccatctttcccgtgtttgataatctacttctactggatcgcaatgttgaccttttgacaccattggccacccagcttacctatgaaggattgattgacgagatctacggcatccaaaattcttatgttaaacttccccctgaaaagttcgccccaaaaaagcaaggcgacggcggaaaggatctgccaacagaagccaagaaactacagcttaactccgctgaggagctgtatgccgagattcgtgacaagaatttcaatgctgttggctcggtcctttccaaaaaggctaaaataattagtgctgccttcgaagagcggcataatgctaaaaccgtgggcgaaattaaacagtttgtcagccaattaccccacatgcaggcagcgagaggtagtctggctaatcatacttccatagccgagctgataaaggacgtcacaacctcagaagacttttttgataagcttacagttgaacaggagtttatgtctggaattgacacagacaaagtgaataactacatcgaagactgtatagcccagaaacattctctgattaaggtgcttcgactggtttgtctgcagtcagtgtgtaacagtggtctgaagcagaaggtgctggactattataagcgtgaaatccttcagacctacgggtatgaacatattctgactttgcacaaccttgagaaagccggtctcttaaagccccaaactggcggaaggaataattacccaactattaggaagacgcttcgcctgtggatggatgacgtgaacgagcagaacccgacagacatttcctatgtctactcaggttatgctccactgagtgtcaggctcgcgcagctgttgtcaaggcccggatggcgcagtattgaagaggtgctgcggatcctgcctggtccacatttcgaagagagacagcctctgccgacaggcctgcagaagaagcgccagcccggagaaaatcgtgttactctgatctttttcctcggtggcgtgaccttcgcagaaatcgcagccctgcgcttcctgtcacagctcgaagatgggggaacagagtatgtgatcgcaaccacgaaactcatgaatggcactagctggattgaggcgctgatggagaagccgttctag

SEQ ID NO: 246473 - DNA, 1854 bp, synthetic construct
  misc_feature 1..1854: note = Description of Artificial Sequence: Synthetic coding sequence
  source 1..1854: mol_type = other DNA
atggcttttccgcatcggcctgacgctcccgaattgcctgatttcagtatgcttaaacgtctggctcgtgaccagctcatctatctactggagcagctgcccggaaagaaggacctgttcatcgaagctgacctaatgagccccttagaccgaattgcaaacgtgagtatactgaaacagcacgaggtagacaagctatacaaagttgaaaataaaccagcactttcaagcaacgagcagctgtgcttcctggtccggccacgcattaagaatatgagatacatcgccagcctcgtgaacgccgacaagctggccggaagaactagaaaatacaaggtcatttttagtccccagaagttttatgcatgcgagatggtgctggaggaagagggcatttatggggatgtgtcttgcgacgaatgggcgtttagtctgttaccattggatgtggatttgcttagcatggaactgcctgagttcttcagggattactttctggagggagaccaacgatggatcaataccgtcgcccaggcccttcacttgctaagtaccctgtacggacctttcccaaattgctacggcattgggaggtgcgctaaaatggcttacgaactgtggcggaatcttgaggaggaggaggatggagagaccaagggcaggaggccagagatcggacacatctttctgctcgacagggacgtcgatttcgtgacagccctgtgtagccaggtggtttatgaggggctggtggatgatactttcaggataaagtgtggttctgtagattttggtcctgaggtgaccagctccgacaaatctcttaaggtcctgctcaacgctgaggacaaagtttttaatgagatcaggaatgaacattttagtaacgtttttgggttcctttcccagaaggcccgtaatctgcaagcacagtatgataggcgtcggggaatggacatcaaacagatgaaaaatttcgtgtcacaggagctgaagggtctgaagcaggagcaccgtctgctgagcttgcacataggggcttgtgagtccattatgaaaaagaagaccaagcaagactttcaagagctgatcaaaaccgagcacgcattactggaaggcttcaacatcagggagtccacgagctatatcgaggagcatatcgacaggcaggttagtcctattgaatctctgagattgatgtgcctcttatcgatcaccgagaacggcctaataccaaaagactatcggagcctgaagacgcagtacctgcagagctacggtcccgagcaccttttgacattttctaacttacggcgtgctggcctactaaccgagcaagccccaggcgacaccttgacggcagttgaaagcaaggtcagcaaactggtaacagacaaagcagcgggaaagatcacagacgcattctcgagtttggcaaagcgcagtaacttcagagctataagtaaaaaacttaatctcatacccagggttgatggcgagtacgatctcaaggtgcctcgagacatggcttatgtgttcggaggggcatacgtccccctcagctgccggatcatcgagcaggttctggaacgcagaagctggcaaggcctggacgaggtggtacgccttctgaactgcagtgactttgctttcacagatatgactaaggaagacaaggcaagttccgagtccctacgcctcattcttgtggtgttcctcggtggatgtaccttcagcgagatcagcgcgttaaggtttcttggtcgcgaaaagggctataggttcatttttttgaccaccgccgtgacgaatagcgccaggctgatggaagctatgtccgaggtcaaggcctag

SEQ ID NO: 246474 - DNA, 1719 bp, synthetic construct
  misc_feature 1..1719: note = Description of Artificial Sequence: Synthetic coding sequence
  source 1..1719: mol_type = other DNA
atgagccccctcgacagaatcgccaacgtgtctatactcaagcaacacgaagtggacaagctgtacaaagtggagaacaaacccgctttgtcatctaacgaacagctgtgcttcctcgtacgtccacgtatcaagaacatgcgctacatcgcctcccttgtaaatgcagataagctcgcaggacgcacaaggaaatacaaggtgatcttttctccacagaaattctacgcctgcgaaatggtcttggaggaggaaggcatatatggcgatgtttcatgcgatgaatgggccttcagtctgctgccactcgacgtagacttgttatccatggaactaccagagttttttcgcgattacttcctggagggagaccagcgctggattaataccgttgctcaggctttgcacctgctgtcaaccctgtatggtcctttccctaactgttatggtatcggtcgctgcgcgaaaatggcatatgaactctggagaaacctcgaggaggaagaggatggggaaaccaaaggccgaaggcctgagattgggcacattttcctgttagatagagacgtggatttcgtcaccgccctgtgctcacaggtcgtttatgaggggctggtggacgacacgttcagaataaaatgcggatcagtggacttcggcccagaagtaacaagttccgataagagcttgaaagtcctcctcaacgctgaggacaaggtgtttaacgagattaggaatgaacatttctccaatgtgtttggcttcctctcccagaaagcacgaaacctgcaagcccagtatgaccgcagaaggggcatggacataaaacagatgaagaacttcgtttctcaggagttgaaaggcctgaagcaggaacacaggctcctcagtctccacattggtgcctgcgagtcaattatgaaaaaaaagacaaaacaagacttccaggagctgataaagacagaacacgccttattagaagggttcaacattcgtgagtctacaagttatatcgaggaacacatcgaccgtcaggtgagtcctattgagtcactacgcctcatgtgtttgcttagcattaccgaaaatggtcttataccgaaagactatagatctctgaaaacacagtatctgcagtcatatggaccagagcatctgctgactttcagcaacttgcggagagctgggcttctcaccgagcaggccccaggcgataccctaacagccgtcgaatctaaggtgagcaagctcgtgacagataaggctgcagggaagatcactgacgccttctcatctctggctaaaagatctaacttccgagctatctccaagaagctcaacctgatccctagagtagacggcgagtatgatctgaaggtccctagggacatggcctacgtattcggcggtgcatatgtgccacttagctgcagaattatcgagcaagtgctggaacgcagatcttggcaggggctggatgaagtggttagactgctgaactgttctgactttgctttcacggacatgactaaagaagacaaggcaagtagtgaatcactgagacttatattagtcgtcttcctgggcggatgcaccttctcagaaattagcgccctccgcttcttaggtcgagagaagggctatcgatttatatttcttacaaccgcagtgaccaacagcgcacgtttgatggaggccatgtcagaagtcaaagcctag

SEQ ID NO: 246475 - DNA, 2391 bp, synthetic construct
  misc_feature 1..2391: note = Description of Artificial Sequence: Synthetic coding sequence
  source 1..2391: mol_type = other DNA
atgcccactacccagcagagtccccaggacgaacaggaaaagctcctcgacgaagctatccaagctgtgaaggtccagtcgttccaaatgaaacggtgcctggacaagaataaactgatggatgcactgaagcacgcctctaatatgcttggtgagcttaggacttccatgctcagccccaaatcctactatgaattatacatggcgatttccgacgaacttcactatttggaagtgtacctgaccgacgagttcgcaaaaggaagaaaggtcgccgatctctatgagttggtacagtatgccggaaacatcattccgaggctgtacctcctcattacagtgggggtggtgtacgtgaaatcttttccacagtctagaaaggatatccttaaggacctggtagagatgtgcagaggagtgcaacaccctctccgaggactttttctcagaaactatctgctgcagtgtactcggaatattctaccagacgagggcgaaccaactgatgaagaaactactggcgacatatctgatagtatggacttcgtcctcctgaatttcgctgaaatgaataagttgtgggtgcggatgcagcaccagggccattctcgggaccgcgaaaaaagagagagagagcggcaggagcttcggatcttggtcgggactaacctggtaagactctcacagcttgaaggggttaacgtcgagaggtataaacagattgtgttgaccggaatcctggagcaggtagttaattgcagggacgcactggcccaggaatacttgatggaatgtattatccaggtgttccctgatgagttccatctgcagactctgaacccctttctccgcgcatgcgctgaattacatcagaatgtaaatgttaagaatattataatcgcccttatcgacaggttagccctcttcgcccatagggaggatggacctggaattccagccgacattaaacttttcgacatcttttctcagcaggtcgccacggttatccaatccagacaggatatgccgagtgaggatgtggtaagtcttcaggtgagtctcataaatttagcaatgaagtgttatcctgaccgggtggactacgtggataaggtgctggaaaccaccgtagagattttcaataagctcaatctggagcacatcgccacttcctctgctgtttccaaagaattaacacgcttgctcaaaatccccgtcgatacatataataatatactgacagtgcttaagctcaaacactttcaccctctgttcgaatatttcgactatgaatctaggaaatccatgtcgtgttacgtgctctctaacgtgctggactataacacagaaatcgtaagccaggaccaggtggactccatcatgaatttggttagcacattgatccaagaccagcctgatcagccggtggaggacccagatccagaggatttcgccgacgagcaaagccttgtcggcaggttcattcacctcttgagatccgaggatcctgatcagcaataccttatcctcaacacggccagaaagcatttcggcgctgggggaaaccaaaggatcagatttacgctgcctccactcgtgtttgccgcttaccagttagccttccgatataaagagaattccaaggttgatgacaagtgggagaagaagtgccaaaaaatctttagtttcgcacaccagacaatcagtgccctgatcaaggcagaacttgcggagttgcctctacggctcttcctgcagggtgccctcgctgccggagaaattgggttcgaaaatcatgagaccgtggcctacgagttcatgtcgcaagcattctcgctgtatgaagacgaaatatcagatagtaaggcccagctggcagcaatcaccctgataataggaactttcgaaaggatgaaatgcttctctgaagaaaaccacgagcctctcaggacccagtgcgctctggccgcaagcaagctgttgaagaaacccgatcaggggagggctgtgagcacttgtgcccacctcttttggtctggcagaaataccgataagaacggtgaagaactgcacggaggcaagcgggtgatggagtgcctaaagaaagcactgaagatcgccaaccaatgcatggatccatccctgcaggtgcagctgtttatcgagattctcaacaggtacatttatttttacgagaaggagaatgatgctgtgaccatacaagtgctcaaccaactgatccagaaaatccgggaagacctccccaatttggaatcatctgaggaaacagaacaaatcaataagcatttccacaacaccctggaacacttacgactcagacgtgaatccccagagagcgaaggtccaatatatgaaggactcattctgtag

SEQ ID NO: 246476 - DNA, 1989 bp, synthetic construct
  misc_feature 1..1989: note = Description of Artificial Sequence: Synthetic coding sequence
  source 1..1989: mol_type = other DNA
atgtgcaggggcgtgcagcatcccctaaggggcctgttcctgcgcaattacctccttcaatgtactcgcaacatccttcccgatgagggtgaacctactgacgaagaaactacgggcgatatcagcgacagtatggacttcgtcttgctgaatttcgctgaaatgaacaaactgtgggtccgtatgcagcaccaggggcattcgcgggaccgcgagaagagagaaagagagagacaggagctcaggatccttgtgggcacaaacctggtgcggttgtcacagcttgagggagttaacgtggagcggtacaagcaaatagttctcacaggcattctggaacaagtggtgaattgcagggatgcactcgcccaggaataccttatggaatgtatcatccaggtatttcctgatgaattccatttgcaaacattgaacccattccttcgggcttgtgcagagctgcaccagaacgtcaacgtgaagaatattattatagctctgatcgacagactcgcactctttgcccaccgtgaggatggccctggtatccccgcagatataaaactctttgatattttcagccaacaagtggctaccgtgattcagtcaagacaggatatgccttccgaagatgttgtttcacttcaggtctcgctgattaacttagctatgaaatgctacccagacagggtggattacgtggataaagtactggagaccaccgtcgagatatttaacaagctgaacctggaacacatcgctacttcaagcgcggtctccaaagagcttacacgactacttaagattcctgttgatacatataacaacattctgacagtgctaaaactaaagcatttccatcctttattcgaatacttcgactacgaaagtcgcaagagcatgtcctgttatgtgctttcaaatgttctggactataacactgaaatcgtctcccaggaccaggtggactccattatgaacctcgtttcaaccctcattcaggaccaacccgatcaacccgtcgaagaccccgatccagaggactttgccgatgagcagagcttagttggcagattcatacacttattgcgatccgaagacccggaccagcagtacctgatccttaacacggcccgtaagcacttcggagccggtgggaatcagagaatccgttttacccttcccccactcgtatttgccgcttaccagctggcgtttcggtataaggaaaatagtaaggtagacgataagtgggagaagaagtgccaaaagatcttttctttcgcccaccagactatcagtgccctcatcaaggccgagcttgctgagctgccccttcggctttttctgcagggtgcgctggccgctggggaaattgggttcgaaaaccacgaaaccgtggcgtatgaattcatgagccaagccttctcactgtacgaggatgaaatcagcgattcaaaagcgcagttggccgctatcactttgattatcggaaccttcgagcgtatgaaatgcttctcagaggagaaccacgaacccttacggactcagtgtgcattagccgcaagtaagcttctgaaaaagccagaccagggtcgggcagtatctacgtgcgcacatctcttttggtcaggcaggaatacagacaagaatggtgaggagttacacggcggaaaaagggtgatggaatgcctaaaaaaggcccttaaaatcgcaaatcagtgcatggatcccagcctacaagttcagctgtttattgaaattctaaacagatacatctacttctatgagaaggagaacgacgccatagtgactatccaagtcttgaaccagctgatccagaagatccgtgaggatctcccaaacctggaatcctctgaagagacagagcaaatcaataagcactttcacaatacattagaacatcttagactgagacgcgagagtcctgagtccgagggaccgatttacgaaggactgattctatag

SEQ ID NO: 246477 - DNA, 1161 bp, synthetic construct
  misc_feature 1..1161: note = Description of Artificial Sequence: Synthetic coding sequence
  source 1..1161: mol_type = other DNA
atggatcgattcgtgtggacatctggcctcctggaaattaatgagacactcgttattcagcagagaggcgtgcgcatctatgatggagaagagaagattaagttcgatgccggtaccctactcctctcaactcacagactcatctggcgcgaccagaaaaaccatgaatgctgcatggccattttgcttagccaaatagtgtttatagaggagcaggctgcgggaattggcaaaagcgccaaaattgtcgtgcatctccaccccgcaccccctaataaggaacccggaccttttcagtctagcaaaaattcttacatcaaattatcctttaaggaacatggccagattgaattttaccgccgactgtctgaagaaatgacacagagaagatgggaaaacatgcctgtgagccagtccctccaaacaaatcggggaccccagcctggacgtataagagctgtggggattgtcggcatcgaacgcaagttagaggaaaagcgcaaagaaacggacaagaatatttctgaggcatttgaggatctcagtaagcttatgatcaaggccaaagagatggtcgaactatctaagagcattgccaataaaatcaaggacaagcaaggcgacattactgaggacgagactatccgattcaagagttatttactgtctatgggaatcgccaatcccgttacacgggagacatatggaagtggaacccaataccacatgcagttggccaaacagctcgcaggaatccttcaggtgccccttgaggagcgtgggggaatcatgtctctgaccgaagtgtactgtttggtgaaccgagctagagggatggagctgctgtcgccagaggatcttgtcaacgcctgcaagatgctggaggcactgaaacttcccctgcgactgcgggtgttcgatagtggggtaatggtgattgaactgcagtcccacaaggaagaggaaatggtcgcaagcgccctagagactgtctcagaaaagggaagcctgacttccgaggagtttgcaaaattagtgggcatgagcgtgcttctcgcaaaggagcggctgctgctggccgaaaaaatgggacatctttgccgcgatgatagcgtggaaggactgcgattttacccaaatcttttcatgacacagagttag

SEQ ID NO: 246478 - DNA, 558 bp, synthetic construct
  misc_feature 1..558: note = Description of Artificial Sequence: Synthetic coding sequence
  source 1..558: mol_type = other DNA
atgtcatggctcttccccctgactaagagcgcttcttcatccgctgctggtagccccggtggactcacttctttgcaacagcaaaaacaacgcctgattgagagtctacgcaactcccattcctccattgcagaaattcaaaaagacgtggaatatcgtctgccattcaccattaataacctgaccatcaacataaatattctcctgccaccccagtttccacaagagaaaccggtgattagcgtctacccccctatcaggcaccacctaatggataaacagggggtgtacgtaacgtcacctctggttaataactttacaatgcactctgacctaggcaaaatcattcagtcactcctagacgagttttggaaaaacccgccagttctggcccctacctccacagctttcccctatcagctagagataagatggcaccacccacattgtcttgaaatctctctggcgaggtccagcaattcactggggttttccatctcaagttcaattagttcaaccagaagcaagcaggaatatcatttctttatctgctgctag

SEQ ID NO: 246479 - DNA, 1194 bp, synthetic construct
  misc_feature 1..1194: note = Description of Artificial Sequence: Synthetic coding sequence
  source 1..1194: mol_type = other DNA
atgagttggctgttccccctaacaaaatccgcctcctccagcgccgcaggctcaccaggcggtctcacctctctccagcagcaaaagcagcgactgatcgagtctctccggaacagccactctagcatcgccgagatccagaaagatgttgaatatcggcttcccttcactattaataacttgacgatcaatatcaatattctactccccccacagttcccccaggagaaaccagtcatttctgtctatccaccgatccggcaccatctgatggataagcaaggagtgtatgttacaagcccacttgttaataatttcacaatgcactcagatctcgggaagatcatacagtctctgctggacgagttctggaagaacccccctgtgcttgccccaacaagcactgctttcccttacttgtattctaacccatcaggaatgtctccctacgccagccagggctttccctttcttcccccatatccgccacaggaagcaaaccggtccattacttctctcagcgtcgccgataccgtgtcaagctcaaccactagtcacactacagctaaaccagccgcaccatcctttggcgtgctcagtaatctgccgctgcctatccctacagtggacgcctctattcccacctcacagaacgggttcggttacaaaatgcccgatgtgccagacgcatttcctgagctctcagagctcagcgtgtcccagctgaccgacatgaatgagcaggaggaggtgcttctcgaacagtttctgaccctcccccagctgaagcagattataactgataaagatgacttagttaaaagtatcgaggaactagctcggaaaaatctcctgctggaaccatcattagaggccaaaagacagacggtgcttgataagtatgaactactaacccagatgaaaagtacctttgagaagaaaatgcaacggcaacacgagctaagtgaatcatgcagtgcaagcgctctgcaggcgagacttaaggtcgctgctcacgaggccgaagaggagtcggataacatcgcagaagactttctggaaggtaagatggaaatcgacgattttctttcatcattcatggagaagagaaccatatgccattgtcggagagcaaaggaggaaaagctgcagcaggcgatagccatgcactcccaattccacgcccctctgtag

SEQ ID NO: 246480 - DNA, 1119 bp, synthetic construct
  misc_feature 1..1119: note = Description of Artificial Sequence: Synthetic coding sequence
  source 1..1119: mol_type = other DNA
atgagttggctgtttcccttgaccaaatctgcttccagctccgcggctgggagtcccggtggcctgactagtcttcagcaacagaagcagcgacttatcgagtcactccggaacagccactctaggttgctgcccccacagttcccacaggagaagcctgtgatctctgtgtacccccctatacggcaccacctaatggacaagcagggtgtttacgtcacttcgccactggtgaacaatttcacgatgcatagcgacctggggaagatcattcagtcgttactggacgagttttggaagaacccccctgtcctggctccaacctctactgcattcccctacctctactctaatccgtccggcatgtctccgtatgcttcccaggggttccccttcctgcccccttaccccccacaagaggccaacaggagtatcacaagccttagtgtggcagacacagtgtcttcctccacaacaagtcatacaaccgcaaaacctgctgctcctagtttcggcgtgctcagtaatttaccattaccaatacctacggttgacgcctcgatccccacatctcaaaacggttttggctataagatgcctgatgtaccggacgcattcccagagctctctgagctgagcgtctctcaacttactgatatgaacgaacaggaggaggtgctcttagagcaattcctgacactcccacagcttaaacagatcattaccgacaaggacgacctggtgaaaagtatcgaggagttggcccgtaaaaatctcctgcttgaaccctctctggaggccaagcggcagacagttttggacaagtatgagctactcacacagatgaaatctacttttgagaagaagatgcaacggcagcatgagctctccgagagctgctccgcatctgccttacaagccagattgaaggtggcagcacatgaggcggaagaggagtctgataacattgcagaggactttctagagggaaagatggagattgatgacttcctatcatcgtttatggaaaagcggactatatgtcattgcaggagggcaaaggaagaaaaactgcagcaggctatcgccatgcacagccaattccacgcacctctgtag

SEQ ID NO: 246481 - DNA, 858 bp, synthetic construct
  misc_feature 1..858: note = Description of Artificial Sequence: Synthetic coding sequence
  source 1..858: mol_type = other DNA
atggccggagcgggttctgaggccagattcgccggactttctctagtgcagctgaacgagctattggaggacgagggtcagctgaccgagatggtacaaaagatggaggaaacacaaaatgtgcaactgaacaaagagatgacactggcaagcaaccgctccctagctgagggaaatcttctctatcaacctcaactagatacgctaaaagcaaggctgacccagaaataccaagagctgcaggtcctgttcgaagcgtaccagatcaaaaaaaccaaactggatagacagtcatcctcggcttccctcgaaacactgttggccctgctgcaggcagaaggggctaaaatcgaagaggacacagagaacatggccgagaaatttctggatggcgagttgccactcgactccttcatcgacgtgtaccagagcaaaaggaaactcgcccatatgaggagagtcaagattgaaaaactacaggagatggttctcaaggggcagcgactgcctcaggccctcgcacccctgcctccaaggctgcccgagctggcaccgaccgccccattgccctatccggcacctgaggcttcagggcctcccgctgtggcaccacgcaggatacctcctcctcccccaccagttcccgctggcagactggctactccctttacggccgctatgtcatctggacaggccgtgccttaccccggactccagtgtccccctttacccccaagagttgggttgccaacccagcaaggatttagcagccagttcgtcagtccataccctccacctctacctcagcgaccgccacccaggcttcctcctcatcagcccggattcatactccagtag

SEQ ID NO: 246482 - DNA, 1068 bp, synthetic construct
  misc_feature 1..1068: note = Description of Artificial Sequence: Synthetic coding sequence
  source 1..1068: mol_type = other DNA
atggagacgctgaaagataagaccctgcaggagctcgaggagctccaaaacgacagcgaagctatcgatcagctggcgctggaaagccccgaagtgcaggatttgcagctggagcgcgagatggctttggcaacaaaccgttctctcgccgagagaaacctagaattccaggggcctctggaaatttcccgatccaatctctcggatcgctaccaggagttgaggaagctcgtggagcgctgccaggagcagaaagctaaactggagaagtttagcagcgccctgcaaccaggcacgcttctcgatttactgcaagtggagggtatgaagattgaagaggagtcagaggctatggctgagaaattcctcgaaggcgaagtgcccttggaaacatttttggaaaactttagctccatgagaatgctctctcatcttcgccgtgtgagggtcgaaaagttgcaagaggtcgtacgcaagcccagagccagccaggagctcgcaggggacgctcctccaccccgtccacccccaccagtgagacctgtaccccagggaacacctcctgtggttgaagagcagccacaaccgccattggctatgccaccctaccctctgccatattctccatctccctctctgcccgttggccctacagcccatggagccttaccacccgcaccatttcccgtggtgagtcaaccttcattctactccggacctctgggaccaacttaccccgcagcccagcttggcccaaggggcgctgctggctacagctggtctccgcagaggagcatgcctcccaggcctggctaccccggtacacccatgggtgctagcggacccggttatccgcttcgaggcggacgggctccatcccccggatacccacagcaaagtccctacccagccactgggggaaagcctccataccctatccagccgcagctcccctcctttccgggacagccacaaccctccgttccgctgcagcctccttacccgccagggccagctcctccttatggttttccccctccgccaggcccagcctggcctgggtactag

SEQ ID NO: 246483 - DNA, 447 bp, synthetic construct
  misc_feature 1..447: note = Description of Artificial Sequence: Synthetic coding sequence
  source 1..447: mol_type = other DNA
atggagacactaaaagataaaaccttgcaggagctcgaggagcttcagaacgattcagaagccatcgatcagttagctctggagagccccgaagtccaggatctgcaactggagagggagatggcactggccactaaccggagcctcgcagaaagaaaccttgagttccaaggccctctcgagatatctcgaagcaacttgtctgaccgctaccaggaattgcggaagttggtcgagcgttgccaggaacagaaagctaagctggaaaaattttcatctgctctgcaacccggaactctgctggatctactccaagtggaaggaatgaaaatcgaagaagaatccgaggccatggctgagaagtttttggagggcgaagtcccccttgaaacctttctagaaaatttctcatcaatgcgaatgctctctcacctgcgcagagtgtag

SEQ ID NO: 246484 - DNA, 969 bp, synthetic construct
  misc_feature 1..969: note = Description of Artificial Sequence: Synthetic coding sequence
  source 1..969: mol_type = other DNA
atggagaccctgaaggacaagacgcttcaggaactcgaggagttgcagaacgactccgaagccatcgatcagctcgccctcgagtctccagaggtccaggacctgcagctggaacgcgaaatggcgctggccactaatcgatcactggcagaaagaaacttagaattccagggccctttggagatcagccgaagcaacctcagtgataggtatcaggaactgcgcaagttagtggagcgctgtcaggaacaaaaagcgaagctcgaaaagttctcctctgctttgcagccgggaactttactcgacctcctccaagtggaagggatgaagatcgaggaagagtccgaagctatggctgagaagttcttggagggggaggtacccctggagaccttcttggaaaatttctcatccatgcgaatgctctctcatctgcgccgagtccgcgtcgagaaactccaggaggtggtgcgaaaaccaagggcctcccaggagttggcaggtgacgccccacctcctcggccaccccctcccgtcagacccgtaccccaaggcaccccccctgtcgtcgaggaacagccccaacccccactggccatgccaccttatcccttgccgtactccccatccccgagcttgcctgtggggcctactgctcacggtgccctccccccagcgccatttcccgtggtgtcgcagccatctttttactccggacccctcggtccaacgtacccagcagctcagctaggaccacgaggcgcagcaggatattcgtggagccctcaaagaagcatgccaccccgacctgggtatccaggaactcctatgggagcatctggcccaggatatccactacgaggaggaagagctccatctcctggttatcctcagcaatccccctaccccgcaactgggggaaaaccgccttaccccattcaaccacagctccctttcagcctctgttag

SEQ ID NO: 246485 - DNA, 756 bp, synthetic construct
  misc_feature 1..756: note = Description of Artificial Sequence: Synthetic coding sequence
  source 1..756: mol_type = other DNA
atgtacagagctagggccgctagagccggtcccgaacccggatcccccggacgattcggcatcctgagtactgggcagctgcgcgacctattgcaggacgagcctaaacttgaccgcatcgtgagactgtcacgcaaattccaaggcttgcagctagagcgggaggcctgtcttgcctctaactatgctctggctaaagaaaacctggccctgcgcccacggctggagatgggacgcgcagcactggcgatcaagtaccaggaactccgggaagtcgctgagaactgtgctgacaagcttcagcggctggaagaatctatgcaccgatggtccccccactgcgctcttggttggttacaggcagagttggaagaggccgagcaggaggcagaggagcagatggagcagcttttgctgggcgaacagtcactggaggccttcctcccggcatttcagcgtggtcgggcattggcccacctgcggcgaacacaggccgagaagttgcaagaactgctgcgacgtagagaaagatccgcacagccagcaccaacaagcgccgctgacccaccaaaatcctttccagcagccgctgtgctccccacgggcgcagcaagaggccctcccgcagtccccaggtccttgccacctctagattctagacctgtgcccccactgaaagggtcgcccggatgtccactgggccctgcccctctgttgtcaccaagaccaagccagcctgaaccaccgcatcgctag

SEQ ID NO: 246486 - DNA, 2628 bp, synthetic construct
  misc_feature 1..2628: note = Description of Artificial Sequence: Synthetic coding sequence
  source 1..2628: mol_type = other DNA
atgcatgatgcttttgagcctgtcccaattctagaaaaattgcctctgcagattgactgcttagccgcatgggaagagtggttactagtgggcaccaagcaaggccacctactcctctaccgcatcagaaaggacgtcggctgcaatcggtttgaggttacacttgagaaatctaacaaaaacttcagcaaaaagatacagcagattcacgtcgtatcacagtttaagattctcgtttcactgcttgaaaacaatatttacgtgcatgatctacttaccttccaacagatcacaaccgtcagtaaggccaagggcgctagcttgttcacatgcgatctgcagcacacagagacaggagaagaggtcctgagaatgtgtgtggccgtaaagaagaaactgcaactatacttttggaaagatcgggaattccatgaactccagggagacttctcggtgccagatgtgcccaagagcatggcctggtgcgagaatagcatctgcgtagggtttaagagggactattacttgattcgcgtggacggtaagggatcaattaaagagttattcccaacaggaaaacagctggagccgctggtagcgccattggccgacggcaaagtggcagtcggacaagacgacctgactgtcgtactcaatgaagaggggatctgcacccaaaaatgtgccctgaactggaccgacattccggtagccatggagcatcagccaccctatataatagccgtgctaccaagatacgttgagatccggacgttcgaacctaggctgctggtacagtcaattgaactgcagcgcccacgcttcataacctctggaggtagcaacattatttatgtggcatctaaccacttcgtgtggagactgattcctgtgcctatggctactcagatccagcagctgttgcaggataaacagttcgaactggcactgcaactggccgagatgaaggatgattccgacagcgagaagcagcagcagattcaccatataaagaatctgtacgcattcaatctcttttgtcaaaaaagatttgatgagagcatgcaagtattcgctaagttaggtacagatcccacacacgtgatggggctataccccgacctcttgcctacagactatcgcaagcagctccagtacccaaatccactgcctgttctctcgggggctgaactggagaaagcccacctggccctgatagactacctgactcagaaaaggagtcagttggtgaagaagctgaacgattccgatcaccagagcagtacatcccctctaatggaggggacgcctaccatcaaaagtaaaaagaaactgctgcagatcattgacaccaccttgctgaaatgttatttgcatactaatgtggcacttgtcgctccactgctccgcttagaaaacaatcattgtcatattgaggaatctgagcatgtcctgaaaaaagctcataagtacagcgaactgattattctctatgaaaaaaagggcctgcacgagaaagcccttcaggtcctggtcgaccagagcaaaaaagcgaacagccccctgaaaggtcatgagaggacggtgcaatacctgcaacacctaggcacagagaatttgcaccttattttctcttatagcgtgtgggtactgcgggacttccccgaggatgggctgaaaatttttactgaagacctgcccgaagtggaatctctgcccagagacagagtgcttggcttcctgatcgagaactttaagggccttgcaatcccctacttggagcacattattcacgtctgggaagaaactggatccaggttccacaattgccttattcagctgtactgcgagaaggtgcagggactcatgaaagagtatctgttgagctttcccgcaggcaagacacccgtgcctgcaggggaagaggagggcgagctgggcgaatataggcagaagctactgatgttcttagagatttcaagctactacgacccaggccgactaatttgcgacttcccctttgacggcctgttagaggaacgtgcactgctcctggggaggatgggaaagcacgagcaggccctttttatctatgtgcacattctgaaggacacacggatggcagaagaatattgtcataagcattacgaccggaacaaagatggcaataaagacgtttacctgagtctgctccgtatgtatctcagccccccttctatccattgtctgggacctatcaagctcgaactgttggaacctaaggccaaccttcaggcagccttgcaggtgctcgagctgcatcacagcaaattggatactacaaaagctcttaacctgctgccagcgaacactcagattaacgatatcaggatctttctggagaaagtgttggaagaaaatgctcagaagaagaggttcaatcaagttttgaaaaacctgctgcacgcggagttcttgcgcgttcaggaggagaggatactgcaccaacaggtcaagtgtattatcacggaggagaaagtgtgcatggtgtgcaagaaaaagatcgggaactctgcatttgctcgctacccgaatggcgtggtcgtacattatttttgttcaaaagaggtaaatccagctgacacatag

SEQ ID NO: 246487 - DNA, 2661 bp, synthetic construct
  misc_feature 1..2661: note = Description of Artificial Sequence: Synthetic coding sequence
  source 1..2661: mol_type = other DNA
atgcatgacgcatttgaacccgtcccaatcctggagaaactgccactccaaatagattgtctagcagcttgggaggaatggttattggtcggaactaaacagggtcatcttctgctctaccggattagaaaggacgtggtgccggctgatgtggcttcacccgagagcggttcttgtaaccgcttcgaagtcacgctggagaaatccaacaaaaactttagcaaaaagatccagcagattcacgtggtgtcgcagttcaagatcctggtctccctgctcgagaacaatatctatgtgcacgacctgctgacctttcagcagattactaccgtgtctaaggctaaaggggcttcactcttcacctgcgatctgcagcacaccgagactggtgaagaagtgctacggatgtgcgtcgccgtcaagaagaaactgcagctgtatttttggaaggacagagagttccacgagctgcagggggacttctctgtgcccgatgtcccaaagagtatggcatggtgcgagaatagcatatgcgtgggatttaaaagagactattaccttatccgcgttgacggaaagggctccattaaggaattgttccctactggcaagcagctggagcccttggttgctcccttagctgatggcaaggtggcagtcggacaggatgacttgaccgtggttcttaacgaggaggggatctgtacacagaaatgtgccctcaattggaccgacatacccgtcgctatggagcatcagcccccatacatcattgctgttctacccaggtatgttgagatccgcacattcgagcccagacttctggtccagtcaatagaactgcagcgccctcggttcatcacctccggagggtccaatattatctacgtggcctccaaccatttcgtgtggcgactgataccagtaccaatggctactcaaatccaacagctcctgcaggataagcagtttgaactggccctgcagttagctgaaatgaaggacgactccgactctgaaaaacagcagcagattcatcacataaaaaacctgtacgcctttaatttgttctgtcagaagcggtttgacgaatcaatgcaggtgttcgcaaagctcgggactgatccaacacatgtaatgggcttatacccagacttgcttcccactgattacaggaaacagctgcaatatcccaacccccttccggtcctgtccggagccgagctggagaaggcccatctggccctcatcgattatctcactcaaaagagatcacagctggtgaaaaagctgaatgacagcgatcatcaaagttcgacatccccgcttatggagggcacaccaacaatcaaatcaaagaagaaactgctgcagatcattgacactaccctgcttaagtgctacctgcacacaaacgtggcccttgtggccccattactgcgcctggagaataaccattgccatatcgaagagtcagagcatgttctgaagaaggcacataaatatagcgaacttattatactgtacgaaaaaaaaggactgcacgaaaaggctctgcaggtactggtagatcagagcaagaaagccaattcccccttgaaaggtcatgagcggaccgtgcagtacctgcaacacctcggcaccgagaatctgcatttaattttttcttactcggtgtgggtattgagagacttccccgaagatggactgaagatcttcactgaggatctgcccgaggttgaaagtctgccacgcgacagagtgctggggtttcttatcgaaaacttcaagggattggcgatcccatacctggaacacattatccacgtatgggaagagaccggctcaaggttccacaactgtctgattcaactctattgcgaaaaggtccaagggctgatgaaggagtacctcctatcattccctgctggcaagactcccgttcccgctggcgaagaggagggcgagctgggtgagtatcggcagaagctgctgatgtttctagagattagcagctactatgatccaggaaggctcatttgcgactttccttttgacggccttctggaggaacgggctctgctgctgggacgcatgggtaaacatgagcaggccctatttatctacgtgcatattctcaaagacacccgtatggccgaggaatattgccacaagcattacgacaggaacaaggatggaaacaaggatgtgtacctgagcttgctcaggatgtacctgtctccgccttcgatccactgtttgggacccatcaagctggaactactggaaccgaaggctaatctgcaggctgctttacaagtgctcgagctgcaccattccaagttagatacaaccaaagctctaaacctgctgcctgcaaacacgcagattaacgatatccgcattttcctggaaaaagttctagaggagaatgcccagaagaaacgctttaatcaggttctcaaaaatctgctccacgctgagttcttaagggtgcaggaggaaagaatcctgcaccagcaggtcaaatgcattattaccgaggagaaagtctgcatggtttgcaagaaaaagattggtaactctgccttcgctcgataccccaacggagtagtcgttcactatttctgttccaaggaggtgaaccctgcggacacttag

SEQ ID NO: 246488 - DNA, 1314 bp, synthetic construct
  misc_feature 1..1314: note = Description of Artificial Sequence: Synthetic coding sequence
  source 1..1314: mol_type = other DNA
atgacaacaagtactctgcagaaggcgatcgacctggtgactaaggccaccgaagaagacaaggccaagaattatgaagaagccttacgattataccagcatgccgtagagtatttcctgcacgctattaagtacgaagctcactctgacaaagctaaggagtccattagagccaaatgcgtacaatatcttgatagagcagagaagctcaaggattacctcagatccaaagagaaacacggtaagaagcccgtgaaggagaaccagagcgaagggaaaggtagcgatagtgacagcgaaggcgacaaccccgaaaagaaaaagttgcaagaacagctgatgggcgcagtagtgatggagaaacccaatatacgctggaatgacgttgcgggtctggagggagcaaaggaggcactcaaagaggcagtcatacttcccataaagttcccccacctgtttacagggaaacggacaccatggagaggtatcctgctattcggcccaccgggtaccgggaaatcttacttggcgaaagctgtcgcaaccgaggccaacaattcaaccttcttctctgtgagtagctcagatctgatgtccaaatggctcggagaatctgaaaagctggtgaaaaatcttttcgagcttgccagacaacataagccatctatcatattcatcgacgaagtggactccctgtgtggtagccgcaacgaaaacgaatcggaggcggctcgtaggattaagactgaatttctcgtacagatgcagggtgtgggcaataataatgacggaacccttgttctaggagccacaaacatcccttgggtgttggacagcgctataaggcgtaggtttgaaaaaagaatctacattcccttacctgaggaagctgcgcgtgctcagatgttccgcctacacctgggatctactcctcacaatctgactgacgcgaatatacacgagttggccaggaagacggaggggtactcaggcgcagacataagcatcatcgttagggattcactaatgcagccagtacggaaggtacaaagtgcaactcattttaaaaaggtgtgcggaccctctcgtaccaatccaagtatgatgatagatgacctcctgaccccttgttctcctggagacccaggtgccatggagatgacatggatggatgttcctggggataagctgctcgaaccggtggtgtgtatgagcgacatgctgagatctttagctacaacgcggccaacagttaacgctgacgatctgttaaaggtcaaaaagttctccgaggatttcgggcaagaatcctag

SEQ ID NO: 246489 - DNA, 1335 bp, synthetic construct
  misc_feature 1..1335: note = Description of Artificial Sequence: Synthetic coding sequence
  source 1..1335: mol_type = other DNA
atgtcttccacctctcccaatcttcagaaagctatcgatcttgcgtccaaagccgcacaggaagataaagctggaaattacgaagaggccctgcagctgtatcaacacgccgtgcagtacttcctacacgtggtcaaatatgaggcccagggtgataaggccaaacaaagtatccgagctaagtgcaccgagtatctggaccgggctgaaaagctgaaagagtatctgaaaaataaggagaaaaaagcacaaaaacccgtgaaggaaggccagcctagtcctgctgatgagaaggggaacgactcggacggagagggcgagtcagacgatccagagaaaaagaagctgcagaaccagctgcaaggggcaattgtgatcgagaggcccaacgtaaagtggagtgatgtggccggattggagggagcgaaagaggcgctcaaagaggccgtgatcctgcccatcaaatttccacaccttttcaccggtaaacggacaccttggcgcggaatcctgctcttcgggccaccaggaacagggaagtcctatctggctaaggccgtggctacagaggccaataattccacattcttctctatatcctcctccgacctggttagcaaatggcttggggaatccgaaaaattggtcaagaacctctttcagcttgccagagagaacaagccttcgattatcttcattgacgaaatcgactccttgtgcggctcgcgatcagagaacgagagtgaagctgccagaaggattaaaaccgaattcctcgtgcagatgcagggtgtaggcgtcgacaacgatggcattcttgtgctgggggctactaacatcccttgggtgctggacagtgcaatcaggcggagattcgagaaacgcatctatatcccactgcccgagcctcacgcccgtgccgctatgtttaaattacatctcggaacgacccaaaattcattaactgaggcggattttagagagcttgggcgaaaaacagatggctacagcggggcagacatctccataatcgtgcgcgacgcattaatgcagcctgttcggaaagtgcaatcagccacccacttcaagaaggtgcgcggtccctcccgcgctgatccaaaccaccttgttgatgatctgttgactccttgttcccccggagatcccggagccatagagatgacatggatggatgtcccaggggacaagttgctggagcccgtcgtgagcatgtcggacatgctgagaagcttgtccaatacaaaaccaacggtcaacgagcatgatctgcttaaactcaagaaattcacggaggactttggccaggagggctag

SEQ ID NO: 246490 - DNA, 630 bp, synthetic construct
  misc_feature 1..630: note = Description of Artificial Sequence: Synthetic coding sequence
  source 1..630: mol_type = other DNA
atggctgaggcagaagaacaggaaaccgggtcattagaagaatccaccgacgagtccgaggaagaggagagcgaggaggagcctaaactgaagtacgagcgcttgtccaatggggtcacggagattctgcagaaggacgctgctagctgtatgactgtgcacgataaattcctcgcgctcggtactcattacggcaaagtatacctgctagatgtccaaggcaatattacacagaagtttgatgtatcgcccgttaaaatcaaccagatttcgcttgacgagtcaggagagcatatgggcgtgtgtagtgaggatgggaaagttcaggtgtttggtctctacagcggagaggagttccacgagacttttgattgccctatcaaaatcattgctgtgcatcctcatttcgtgaggtcatcctgtaagcagttcgtgacaggtgggaaaaagctgttgctgtttgagcggagttggatgaaccggtggaagtccgcggtccttcacgagggcgaaggcaatatcagatccgtgaaatggagagggcatttgatcgcttgggccaacaacatgagtaagaagcccgaagcatggcgagtcgcgaaaaagatgaagtcatacctcaataactag

SEQ ID NO: 246491 - DNA, 2565 bp, synthetic construct
  misc_feature 1..2565: note = Description of Artificial Sequence: Synthetic coding sequence
  source 1..2565: mol_type = other DNA
atggctgaggcagaagaacaggagacgggtagccttgaagaaagcacagatgaaagtgaggaggaggagtccgaggaggagccaaagctgaaatacgagcgattgtctaacggcgtgaccgagatccttcaaaaagacgctgcctcctgcatgaccgtccatgacaagtttcttgcactcgggactcactacggtaaggtttatcttttggacgtgcaggggaacataactcagaagttcgatgtatctcccgtcaaaatcaaccaaattagcctggacgagtctggagaacatatgggagtgtgctccgaggatggcaaggtgcaggtattcggcttgtactctggcgaagagtttcacgagacatttgactgtcctatcaaaataattgcggtgcaccctcactttgttaggagttcctgcaaacaatttgtgacaggaggtaagaaattgctgctgttcgagaggtcttggatgaataggtggaagagtgccgtgcttcatgaaggtgaaggaaacataagatccgtcaagtggcgcggacacctgattgcttgggccaataacatgggggttaaaatcttcgatattataagcaagcagcgcataacaaacgtgcccagagatgatatcagcctgaggcccgatatgtatccctgttctctgtgctggaaggacaatgtaacactcattatagggtgggggactagcgtcaaggtttgcagcgtgaaggaacgccacgcatctgaaatgagggatttgcccagccgctacgtggaaattgtcagccagtttgagaccgaattctacatatcaggacttgccccattgtgtgatcagctggtcgtgctgagctatgtgaaagagatctctgagaaaactgaaagggagtattgtgcaagacctcgcctcgatatcatccaacctctttctgagacctgcgaggagatttcgtcagacgccttaaccgttcgaggtttccaagaaaatgagtgtagggactaccacctagaatatagtgagggcgagtcactgttttacatagtttcaccacgtgatgtagtagtggcaaaggagagggaccaggatgaccacatcgactggctgcttgagaagaagaaatacgaggaggccctgatggccgctgaaatctcccagaaaaacataaaacgtcacaaaatcctcgatatcgggctggcatatattaatcacctggtcgaacggggtgattacgacatcgcggctcgaaagtgccagaagatattgggcaaaaatgcggctctgtgggaatacgaggtgtacaaatttaaagaaatcgggcagctgaaggcgataagtccgtacctccctcgaggagacccagtcctgaagcctctaatatatgagatgatcctgcacgagtttcttgagtcggactatgaggggttcgcaactctgattagagagtggccaggggatctgtataacaactctgtcattgtccaggcagtgcgagaccatctgaagaaagactcccagaataagacacttttaaagacattagcagaactttacacctatgataagaactatgggaatgccctcgagatttacttgacactccgtcacaaagatgtcttccagctcatacataaacataatctgttcagtagcatcaaggacaagatagtgttattgatggatttcgattctgaaaaggcggttgatatgctgctggacaatgaggataagatttccatcaagaaggtggtggaggaactcgaggatcggcctgaactccaacacgtgtaccttcacaagctctttaaacgtgaccatcataagggtcagaggtatcatgagaaacaaatctctttgtatgccgagtacgaccgtccaaacctgctcccgttcctgagggattccactcactgccccctcgagaaggctttggagatatgccagcagagaaacttcgtggaagagacagtttacctactgagtcggatgggaaatagcagatccgccctaaaaatgatcatggaggaactgcacgacgtagataaagcgatcgaattcgctaaggaacaggatgatggagagctgtgggaggacttaattttgtattcaattgataaacccccttttataaccggtctgctcaacaatatcggcacacatgtggatccgattttgctcatccaccggatcaaagaagggatggaaattcccaacctgagagactccctcgtcaagatcttacaggattataatctacagatcttgcttcgcgagggatgcaagaagattttagtcgctgacagcctttccctactgaagaaaatgcacagaactcagatgaagggcgtgttagtcgatgaagaaaatatttgtgagagttgtctttcccctatcttaccgagcgacgcagccaaacccttttccgtggtggtgttccactgtaggcacatgtttcacaaggaatgcctccctatgcctagtatgaattctgccgcacagttttgtaatatctgctctgccaagaataggggtcccggatcagccatcctcgaaatgaaaaaatag

SEQ ID NO: 246492 - DNA, 2490 bp, synthetic construct
  misc_feature 1..2490: note = Description of Artificial Sequence: Synthetic coding sequence
  source 1..2490: mol_type = other DNA
atggctgaggcggaggaacaggagaccgggtccttggaggagtcaaccgacgagagcgaggaggaggaatctgaggaagagccgaaactcaagtacgagaggctgtccaatggtgttacagaaatattgcaaaaggatgccgcatcgtgtatgaccgttcatgacaagttcttagctctagggacgcattacgggaaggtgtatctgcttgatgtccaggggaacatcacacagaaatttgatgtagtgcaggtatttgggctgtatagtggagaggagttccacgaaactttcgactgccccatcaaaattatagcagttcacccacacttcgtcaggtctagctgcaagcagttcgttacaggtgggaagaagcttttgctgtttgaacgctcctggatgaatagatggaagtccgcggtactacatgagggggagggtaatatcagatctgtgaagtggcgcggacacttaattgcctgggcaaacaatatgggcgtgaaaatcttcgacatcatttcaaagcaaagaatcacaaacgttcctagagatgacatctcattgcgcccagacatgtacccttgcagtctgtgctggaaagacaacgtgaccttgattattggctgggggaccagtgttaaagtgtgttcagtgaaggagcgccacgcctcggagatgcgagacctccccagccgatacgtggagattgttagccagttcgagaccgagttctacatcagcgggctagctccgctttgcgatcagctggttgtgttgtcttatgtaaaagaaataagcgagaaaacagaaagagaatattgcgctcgtcctcggctggatattatccagcccctgtccgagacctgtgaggagatctctagtgacgctcttactgtgcgcggattccaggaaaatgagtgccgggattaccaccttgaatactcggagggcgagtccttattctatattgtgagtccaagggacgtcgtcgtcgccaaggagcgcgaccaggacgaccatattgactggcttttggaaaagaaaaagtatgaggaggcactgatggcagcggagatatcccagaagaacataaaaaggcacaaaatcctggatatcgggttggcctacataaatcacttggtggagaggggagattacgacatagccgctcggaagtgccaaaagattctgggcaagaacgcagcactgtgggagtatgaggtttacaaatttaaagaaatcggccagctcaaggcaattagcccttatctgccccgtggagaccccgtgctgaaaccactcatctatgagatgatactgcatgaatttttagagtccgactatgaaggctttgccaccctcattcgggagtggcctggggatctctacaacaatagcgtgatcgtgcaagcagtcagagatcacctcaaaaaggactcccaaaacaaaacactccttaagactcttgccgaactttatacatatgataaaaactacggcaatgcgttggagatttacctgacactgagacataaggacgtgttccagctgatccataaacacaacctcttcagttccataaaggacaagattgtgcttttgatggactttgatagtgaaaaagccgttgacatgcttctggacaatgaagataagatctccattaaaaaggtcgtcgaggagctggaagataggcctgagttacaacatgtctatctgcacaagctattcaagagggaccaccataaagggcagagatatcacgaaaagcagatctctttgtacgctgaatacgataggcctaatctactgccgtttttgagggactcaactcattgccccctggagaaagccctggaaatttgtcagcaacgcaatttcgtagaagagaccgtgtatctcctctcccggatgggtaactcaaggagcgctctgaaaatgatcatggaagaactgcatgatgtggataaggccatcgaattcgccaaagaacaggatgacggagagctatgggaagacctgattttatactccattgataagccaccattcattaccgggctcttgaacaatattggaactcatgttgacccgattctcctgattcatagaatcaaggagggtatggaaatcccaaatctcagggactcactggtcaaaattttgcaggactataatctccagatcctcctgcgcgaagggtgtaaaaaaatcctggtggccgactccctgagtttactcaagaaaatgcaccgcacccagatgaaaggcgtcctggtggatgaggagaacatctgtgagtcatgtctgagcccaatcctgccctcagatgcagcaaagccttttagtgttgtggttttccactgcagacacatgttccacaaggaatgtcttcccatgccatctatgaacagcgctgcccagttttgcaacatttgctctgcgaagaacagaggacccggatctgcgatcctggagatgaaaaagtag

SEQ ID NO: 246493 - DNA, 1617 bp, synthetic construct
  misc_feature 1..1617: note = Description of Artificial Sequence: Synthetic coding sequence
  source 1..1617: mol_type = other DNA
atggtgtacacacagtccgagatcttgcaaaaggaggtatatttgtttgagcggatcgatagtcagaaccgggaaatcatgaaacacctgaaagctatctgtttccttagacccacaaaggagaacgtggactacatcatccaagaattgcggcgacccaagtacacaatttacttcatatatttcagcaatgtgatctctaagtctgacgtgaagtcccttgccgaagccgacgaacaggaagtcgttgcagaggtgcagcaggtgattactaaggaatacgagctgtttgagtttcgtaggactgaggttccacccttgctccttatcctggatcggtgtgacgacgccatcacaccactgcttaaccagtggacataccaagctatggtacacgagctgctgggaattaataataatagaatcgatctgtcgagagtaccgggtatcagcaaagatctgagggaagtggtgctgagcgcggagaacgacgagttttatgcgaataatatgtacctgaatttcgccgagatcggctcaaacattaagaacttaatggaggactttcagaaaaagaaaccgaaagagcaacagaaacttgagtcaatcgctgatatgaaggcatttgtcgagaactatccacagtttaaaaagatgtcggggacagtgtcaaagcacgtgactgtggtgggagaactgtctaggctggtcagcgagcgaaatctgcttgaagtgagtgaggtcgaacaagaattggcctgtcagaacgaccacagtagcgccctgcagaacattaagcggctgctgcagaaccccaaggtcacagaatttgatgcagctcggttggtcatgctctatgctctgcactacgagcgccactcatctaactctctgcccggactcatgatggatctaaggaacaagggcgtgagcgagaaataccgcaagctggtctccgctgtggtcgaatacggcggaaagagggtgcgagggtccgacctgttttcaccaaaggacgcggtcgcgattactaaacagtttttgaaaggcctcaagggagtggaaaatgtatatactcagcatcagccattcctgcatgaaacgctcgaccacctgatcaaaggacggcttaaagaaaatctatatccttacctgggaccctctacactgagagaccggcctcaggatattatcgtgttcgtgatcggcggagctacctacgaggaggccctcaccgtctataatttaaacagaaccactccaggcgtgaggattgtgctcggtggaaccacagtgcataacactaaaagggatggcgtgtccctctgttctcccgcatggtttaggacgccgggactcaagaggagtaccaggctctctctccccaaatgctgggactactcattccctagagggtctagcggattttggactgcacagcccaagcagggggaactgtcatctcatattaaagtttcagagcagaagatgaaacggtggcttggagaggggcactcatttctgtcctgccctcattacagattcagtcttcttaacaaaggagtgggcgaacagctgtgggtgctgtgttggctgcttgagttaatttccagatag

SEQ ID NO: 246494 - DNA, 1713 bp, synthetic construct
  misc_feature 1..1713: note = Description of Artificial Sequence: Synthetic coding sequence
  source 1..1713: mol_type = other DNA
atgaatgtggtattcgccgtgaaacagtacatcagtaagatgattgaggactccgggcctggaatgaaggtccttttaatggacaaagagactaccggtatcgtttctatggtttatacacagtcggaaattctacagaaggaggtctatctgtttgagcgcatagacagccaaaacagggagattatgaagcatcttaaagctatctgcttcctgagacccaccaaggagaatgtcgactatatcattcaggaattacggagaccaaaatacactatctacttcatttatttcagcaacgtgatctctaagtccgacgtgaagagtctcgcagaagctgacgagcaggaagtggtggccgaggttcaggaattttatggggactatatcgccgtaaatcctcacctgttctcactgaatattctcggatgttgtcagggaaggaattgggaccctgcccagcttagtagaacaactcagggccttacagccctgcttctgagccttaagaagtgtcctatgatcagataccagctcagctccgaagctgccaaaagattagcagagtgtgtgaaacaggtcatcaccaaggaatacgagctgttcgaatttaggaggaccgaggtgcccccattgttgttgattctagaccgctgtgatgacgcaatcaccccactgcttaatcagtggacttaccaggcaatggtgcatgaactccttggcattaacaacaaccggattgatctctcccgggttcctggcatctccaaggatctgcgtgaggtggtgctcagcgcagaaaacgacgaattctatgccaataacatgtacttgaattttgcggaaatcggatcaaatataaagaatttgatggaagatttccaaaagaaaaagccgaaggaacaacagaagcttgagagtatcgcagacatgaaggcttttgtagaaaactaccctcagttcaaaaagatgtcaggaaccgtatcaaaacacgtcactgtggtgggagagctgagtcgactagtctcagaacgcaatctgttagaggttagcgaggtcgaacaagagctggcctgccagaacgatcacagctcagctttgcagaatattaagcgactattgcagaatcctaaggttacagagttcgacgccgcacggctggtcatgctttatgccctgcactatgagaggcattcctctaacagcctcccaggcctgatgatggacttaaggaataaaggggtgagcgagaagtacaggaagctagtgagcgctgtagtagaatacggtggaaaaagagtccggggatccgatctgttcagccccaaagacgcagtggccattacaaagcagttcctcaaaggcctgaaaggcgtggaaaatgtttacactcagcaccagccattcttacacgaaacacttgaccacctgattaagggaagacttaaagagaatctctatccttaccttggcccttccaccctgagagataggccacaggatataattgtgttcgtcatcggaggtgctacttacgaggaagccctcacagtctataacctcaaccgaaccacaccaggtgttcgtattgtccttggaggcacaaccgtgcataacaccaaatcattcttagaggaggtccttgcctccgggctccattcaaggagcaaagagagctcccaggtgacatcccgatccgcgtcaaggcggtag

SEQ ID NO: 246495 - DNA, 951 bp, synthetic construct
  misc_feature 1..951: note = Description of Artificial Sequence: Synthetic coding sequence
  source 1..951: mol_type = other DNA
atgaacgtggtgtttgccgtcaaacaatacatttccaaaatgatcgaagacagcggaccaggtatgaaggtgctcctgatggacaaagagaccaccggcatagtcagcatggtgtatactcaaagcgaaatcttgcaaaaagaagtatatctgttcgagaggattgattcccagaatagggagatcatgaaacacctgaaagcaatttgctttttgcggccaactaaggagaacgtcgattacattatccaggagttacgcaggcctaaatatacgatttactttatttacttcagcaacgtgattagtaagtccgacgtaaagtcactggcggaggctgacgagcaggaggtggtcgccgaggtgcagcaggttatcacaaaagaatacgagttgtttgaatttcggagaactgaggtgccgccactacttctcattctggaccgatgcgatgatgcgattactccactgctgaatcaatggacctaccaggccatggtccacgagctgcttggaatcaacaacaataggatcgacctgtcacgcgtccccggaatatctaaagatctgcgagaggtggtgctgtccgcggagaacgacgaattttacgccaacaatatgtatctgaattttgccgaaatcggatcgaatatcaagaacctgatggaagactttcagaaaaaaaagccgaaggaacaacagaagctagaatcaatcgcagatatgaaggcatttgttgagaattaccctcagttcaaaaaaatgtccggaacagttagcaagcacgttaccgtggtgggtgagctcagtaggctggtgagcgagcggaacttactggaggtgtccgaggtcgaacaggaactggcctgtcagaacgatcactcttccgcgctgcagaatattaagcggctgttgcagaacccaaaagtgaccgaatttgacgctgcttag

SEQ ID NO: 246496 - DNA, 1305 bp, synthetic construct
  misc_feature 1..1305: note = Description of Artificial Sequence: Synthetic coding sequence
  source 1..1305: mol_type = other DNA
atgaacgtggtattcgccgtcaagcagtacatctctaaaatgatagaggatagcggtcccggtatgaaggtactactgatggacaaagagactactggcatcgtctctatggtttacacccagtccgagatcttacaaaaggaggtgtatctgtttgagaggatcgactcgcagaatcgcgaaatcatgaaacatctcaaggccatctgtttcttgcgcccaaccaaggaaaacgtggattatattattcaagaacttcgtcgccctaaatacactatatatttcatttacttctcaaacgtcatatctaagagcgatgttaagtcactagctgaagcagatgagcaggaagtcgtcgccgaggttcagcaagttattaccaaggaatatgagctcttcgagtttcgacgaacagaggttccaccactcttgctaatactggatcgctgtgacgacgcgataacgcctctgctcaatcagtggacataccaggctatggtgcacgaacttctaggcattaataacaaccggattgatctctcccgcgttcccggtatatctaaggacttaagagaggtcgtacttagtgccgaaaacgacgagttctacgccaataacatgtacctgaatttcgctgagattggcagcaacatcaagaacctgatggaggactttcagaaaaaaaagccaaaggaacaacagaagttggaaagcattgctgacatgaaagcattcgtcgaaaactatccccagttcaagaagatgtccggcactgtttccaaacacgtcactgtggtgggagagctgtcgcgactggtatctgagcggaatttgctcgaagtatcagaagtagagcaagagctcgcctgccagaatgaccactcatcagccttacagaatatcaaacgattgcttcaaaatcccaaggtgacagaattcgatgctgccaggcttgtcatgctctacgcactacactacgagcgacattcctcaaattcgctgcccggtctgatgatggaccttagaaacaaaggggtcagcgagaaatacaggaaactggtgagtgccgtcgtcgagtacggaggcaaaagagtaagggggagtgacctcttttcgccaaaagacgcagtggctattactaagcagtttctcaaaggcctcaaaggggtggagaacgtttatacccagcatcagccattcctgcatgaaactctggaccacctaattaaagggagactcaaggagaatctttacccctatttgggaccatccacgttgcgggacaggattgcctcctgtctgtag

SEQ ID NO: 246497 - DNA, 1338 bp, synthetic construct
  misc_feature 1..1338: note = Description of Artificial Sequence: Synthetic coding sequence
  source 1..1338: mol_type = other DNA
atgaacgtcgtgtttgcagttaatccgcacctattttcgctgaatatcctgggttgttgtcagggtcgaaactgggatcctgctcagctgtctcgcacaacccaaggcttgacagctttactcctgagtctgaagaagtgtccaatgatcagatatcagctgagcagcgaggccgctaagaggctggccgagtgtgtgaaacaagtaattactaaagaatacgagcttttcgagttccgacgtaccgaggttcccccattgcttctgatactggaccggtgtgacgacgctattacaccattactcaaccagtggacatatcaggccatggtacatgagctgcttggcatcaataacaaccgaatagatcttagtcgggttccagggatcagtaaagatttacgggaggtcgtgctgtccgccgagaacgacgagttttacgccaataatatgtacttgaattttgcagagataggatctaacattaagaacctgatggaagacttccagaaaaaaaaacctaaagaacagcagaaactggagagcatagctgacatgaaggccttcgtggagaactacccccagtttaaaaagatgtcggggaccgtatccaagcacgtgacagtagtgggcgagctgtctaggttggtgtctgagcggaacttacttgaggtgagtgaagtagagcaggagctcgcctgtcaaaacgatcactcttcagctctccaaaatattaaacggctcctgcaaaacccaaaagtaacagaatttgatgcagcacgtttagtgatgctgtatgccctgcactacgaaagacactccagcaactctctgcctgggctgatgatggatttgaggaacaagggggtaagtgaaaagtatcggaaacttgttagcgctgtagttgagtatggtggtaaacgggtgcggggttccgatcttttcagccccaaagatgcagtagcaattactaagcagtttctaaaaggactgaagggagtagaaaacgtttacactcaacaccaacccttcttgcatgagactctagaccatttaatcaaaggcagacttaaagagaatctttatccctacctgggccctagcactctcagggatcggcctcaggacatcatcgtgttcgtgattggaggcgcaacgtatgaggaggcactgacagtttataatctcaaccgcactacacccggtgtgcgcattgtgctgggaggaactacagttcataacacaaaatcctttctcgaggaggttttggcttctggattgcatagccgttccaaggagtcatctcaagtgacctccagatctgctagtcggcgatag

SEQ ID NO: 246498 - DNA, 1128 bp, synthetic construct
  misc_feature 1..1128: note = Description of Artificial Sequence: Synthetic coding sequence
  source 1..1128: mol_type = other DNA
atgtcccttgccggtggcagagctcccaggaaaactgctgggaatcgcttgtcgggactacttgaagctgaggaagaagacgaattctatcagacaacctatggcggtttcacagaggagtcaggggacgacgagtatcagggagatcagtccgacaccgaggacgaggtggattccgatttcgatatcgacgagggcgacgaaccatcctctgacggcgaagccgaggaacccagacgtaaaaggcgcgttgtcactaaagcctacaaagagcctctaaaaagcctgaggccaagaaaggtgaacacccccgcaggatccagtcagaaagcgagggaggaaaaggcactcctacccctcgaattacaggatgatggctctgactctagaaaatccatgcgtcaatccacggccgagcacacccgacagacctttcttcgcgttcaggagcgacaggggcagtcgaggcgacggaagggccctcactgcgagcgcccactgactcaggaagagttgctccgggaggccaaaatcaccgaggaactgaacctgagatcattggagacctatgaaagactggaagccgataagaagaagcaggtacataagaaacgcaagtgccctggcccaatcataacataccattccgttactgtccctctcgtcggagagcctggccctaaggaggagaatgtcgacatcgagggttctttatgtttcagcttgtcttttgtgctgaggcttgatccggcaccttcagtatccgccttgacaccacatgctgggaccggccctgtgaatcctcccgctagatgctctaggaccttcatcacgttttcagatgatgccaccttcgaggagtggtttccacagggtaggccgccaaaagttcccgtgcgcgaagtgtgcccagtgacacacagacccgctctctatagagatcctgttaccgacataccctacgccaccgccagagcattcaaaatcatcagagaggcatataagaaatatatcacagcccatggtctgcccccaaccgcttcagcattaggtcccggaccccctccaccagagccactgcctggttctggtccgagggcccttaggcagaagatcgtcatcaagtag

SEQ ID NO: 246499 - DNA, 1095 bp, synthetic construct
  misc_feature 1..1095: note = Description of Artificial Sequence: Synthetic coding sequence
  source 1..1095: mol_type = other DNA
atgagcctggccggtggaagagctcccagaaaaacagctggcaacaggcttagcgggctgttggaagccgaagaggaggatgaattttaccagacgacatacggaggctttaccgaagaatccggcgacgacgagtatcagggagaccagagcgacacagaggatgaagtcgacagtgattttgacattgacgagggcgacgaaccctcaagcgacggggaggccgaagaacctagacgaaagcggcgtgtggttaccaaggcctataaggagcccttgaagtctctgcggcctcgcaaggtgaatacgccagctggttcctcccaaaaagccagagaagagaaagccctgttgcccttagagctgcaagatgacgggtctgactctaggaagtccatgagacagtcaactgccgagcatacacgtcaaacgtttttgcgagtgcaggagcgtcaaggccaatcgagacggagaaagggtccccactgtgaacggcctttaacccaggaagagctcttacgggaagctaagattacggaagagctgaatctccgttccctggagacttatgaacggctggaggcagacaagaagaaacaggtgcataagaaacggaagtgcccaggcccaattattacataccactccgttaccgtcccactcgtgggggaacctgggcctaaggaagagaacgttgatatagagggtctggacccggcaccgtcagttagcgcgttaacacctcacgcaggcactgggcctgtgaacccacccgctcgttgcagtcggacatttattacattctccgatgatgccacgttcgaagagtggttcccccagggcagaccaccaaaagttcccgtgcgggaggtctgtcctgtgacccatagacctgctctttacagggatcctgtaacagacatcccatatgccaccgctagagcctttaaaattattcgggaagcatataagaagtatataaccgcccacgggttgcctcccaccgcttcagccctgggcccaggcccaccgccaccggagccgctgcccggatcgggcccacgcgctttaaggcagaagatcgttattaagtag

SEQ ID NO: 246500 - DNA, 1221 bp, synthetic construct
  misc_feature 1..1221: note = Description of Artificial Sequence: Synthetic coding sequence
  source 1..1221: mol_type = other DNA
atggcggagaacggcaagaattgtgaccaaaggcgggtcgccatgaataaagaacatcataatggcaactttacagacccatcatccgtgaatgagaagaagagacgagagagggaggagcgacagaatattgtgctgtggcgccaacctctgatcaccctacagtatttcagcttagagatcttagttattctgaaagagtggacaagcaaattgtggcataggcagtctatagtcgtctcatttctccttttgctcgcagtccttatagccacatactacgtagaaggcgtccatcagcaatacgtgcagagaatcgagaagcagtttctgctgtatgcgtactggattgggcttggcattttgtctagcgttggattgggcactggcttgcatacctttctgctttacctggggcctcacatcgcatcagtcaccctggctgcttacgaatgtaattctgtgaactttcccgagcccccatacccagatcagatcatctgccctgacgaggaagggacagaaggcacaatttcactgtggtcgatcatttcaaaggtgagaatcgaggcctgtatgtgggggatcggtaccgctattggcgagctccctccctactttatggccagggccgctcgattatccggagcagaacccgacgacgaggagtaccaggagttcgaagagatgcttgaacatgctgaatccgcacaggatttcgcttcgcgagctaagttggccgtacagaagcttgtgcagaaagtgggcttctttgggattttagcctgcgctagtattccaaatccattgtttgacctggcaggaatcacatgtggacattttctggtacctttctggacattcttcggcgcaacactgattggaaaggcgattatcaaaatgcacattcaaaagatatttgtcatcattactttctccaagcacattgtagagcaaatggtggcctttatcggagctgtccctgggattgggcctagtctgcagaagccattccaggaatacttggaggctcagcgtcagaagctgcaccacaaaagtgaaatgggcacaccccagggagagaactggctgtcttggatgttcgagaaattggtggttgtcatggtgtgttactttattctcagtatcatcaactccatggctcagtcatatgccaagcggatccagcagcgtctgaacagcgaggagaagactaagtag

SEQ ID NO: 246501 - DNA, 930 bp, synthetic construct
  misc_feature 1..930: note = Description of Artificial Sequence: Synthetic coding sequence
  source 1..930: mol_type = other DNA
atggatttaaaatatgttcaaagaattgagaagcaattcttgctgtatgcctactggataggactcggtatcctctcctcagtcggactggggacaggcctgcacaccttcctgctgtacctgggcccacacatcgcgtctgtgacacttgctgcttatgagtgtaattctgtaaattttcccgaacctccatatcccgaccagattatctgcccggatgaggagggaacagaaggtacaatctctctgtggagcattatctctaaagtgcggattgaagcatgtatgtggggtatcggtacagccataggagaattacccccatactttatggcacgcgctgcacgactctccggcgcagaaccagacgacgaggagtaccaggagtttgaagagatgctcgagcacgcggaaagcgcgcaggactttgccagcagagccaagttggcggtacagaaactggttcaaaaggtgggtttctttggaatcctggcatgcgcttccattcccaaccccctgttcgacctggccggtattacatgcgggcactttctcgttcctttttggacattttttggcgctacacttattgggaaggccataattaagatgcacatccagaagatcttcgttattatcacatttagcaaacacattgtggaacagatggtggctttcatcggcgctgtccctggcattgggccttcccttcagaaaccgtttcaggagtatctggaggcccagcgccagaagttacaccacaaatccgaaatggggactcctcagggcgaaaattggcttagttggatgttcgaaaaacttgtagtcgttatggtctgttactttatcctgagcatcataaattcgatggcgcaaagctacgccaagcgaattcagcagcgactgaacagtgaagaaaagaccaaatag

SEQ ID NO: 246502 - DNA, 819 bp, synthetic construct
  misc_feature 1..819: note = Description of Artificial Sequence: Synthetic coding sequence
  source 1..819: mol_type = other DNA
atggacctgaagggaccccatatcgccagcgttaccctggctgcttacgaatgtaattctgtgaacttccctgaaccgccttatcctgaccagataatctgtcccgatgaggagggcacagaaggcacaatttccctgtggagcataatatcgaaagtcaggatcgaagcatgtatgtggggaatcgggaccgctatcggagaactgcctccctattttatggctagggctgccagactctcaggggcagaacccgatgacgaagaataccaggagttcgaggagatgctggagcatgctgaatccgctcaggatttcgcgagtcgtgctaagctggccgtccagaagctcgtgcagaaagttggttttttcggaatccttgcttgcgcctcaatccccaatccccttttcgacctggccggtatcacatgtggccacttccttgtcccgttctggacgttctttggcgctactctgataggaaaagccatcatcaagatgcacattcagaaaatctttgttatcataaccttttcaaaacatatcgtggagcagatggtggccttcattggcgctgtgccaggtattggacctagcctgcagaagccatttcaagagtacctggaagctcaacgccagaagctgcatcacaaaagcgaaatgggaacaccccagggcgagaattggctcagttggatgtttgagaagctcgtggtggtcatggtgtgttacttcatattgtctatcatcaattcgatggcccagagctacgctaaacgcatccagcagcgattaaattccgaggagaaaacaaagtag

SEQ ID NO: 246503 - DNA, 645 bp, synthetic construct
  misc_feature 1..645: note = Description of Artificial Sequence: Synthetic coding sequence
  source 1..645: mol_type = other DNA
atgtggggcattgggaccgccatcggggaactacctccctacttcatggctcgagctgccaggctgtcaggtgccgagccagacgacgaagagtatcaagaattcgaagaaatgttggaacacgcagaatccgctcaggacttcgcatcacgggcaaaactcgccgtgcagaagctcgttcagaaagtgggatttttcgggatactggcctgtgcatccatccccaaccctctgtttgatctagcgggtatcacttgcgggcatttcctggttcccttttggaccttcttcggggcaacactgatcggcaaagcaatcatcaagatgcacattcaaaagatcttcgtcatcataacgttttcaaaacatattgtggagcaaatggtcgccttcattggggcagtaccgggtataggtccttcgctacagaagccatttcaggagtatctggaagcacagcgacagaaactgcaccacaaatctgagatgggcactccacagggcgaaaactggttgagttggatgttcgagaagctcgttgtggtaatggtttgttatttcatcctctcaattatcaacagcatggcgcagagctatgcgaaacgtatccaacagaggctgaacagcgaggaaaaaacaaaatag

SEQ ID NO: 246504 - DNA, 1053 bp, synthetic construct
  misc_feature 1..1053: note = Description of Artificial Sequence: Synthetic coding sequence
  source 1..1053: mol_type = other DNA
atggctgagaatggcaaaaattgtgaccagagacgtgtcgccatgaataaggagcatcataatgggaacttcacagatccatcttccgtgaatgaaaagaagcggagagaacgggaggaacgtcagaacatagtgctgtggcggcaaccattgatcactctgcagtatttctctctcgaaattctggtgatcctcaaagaatggacttctaagctctggcacagacaaagcattgtggtttctttcttactgctgctagcagttctgattgcgacttattatgtcgagggcgtgcatcagcagtatgtccaacgtattgaaaagcagttcctgctctacgcctactggatcggcctcggcatactgagcagcgtgggcttggggaccgggctccatacctttttactttacctggggatcggcaccgcaatcggcgaattgccaccatacttcatggccagggccgctcgcttaagtggcgctgaaccagatgatgaggagtaccaggaattcgaggagatgctggaacacgctgagtccgcacaggacttcgcaagcagagccaagctggcagtgcagaagctcgtgcaaaaagtgggctttttcgggattctcgcatgtgcatccattcccaatcccctgtttgacctggccggaatcacctgtggtcactttctcgtgcccttctggaccttctttggggcaacactgattggcaaagctataattaagatgcatattcagaaaatcttcgttatcatcaccttctccaagcatatcgttgagcagatggtagcatttatcggcgcagtaccaggcatcggaccgtctctgcagaagcctttccaggagtatttagaggctcaacggcagaagttgcaccataagtccgaaatgggtacaccacaaggggaaaactggctgagctggatgttcgagaaactggtcgtagtgatggtgtgttatttcatcttaagcattattaactccatggcccagagctacgctaagcggatccagcagcgtcttaactccgaggagaagacaaaatag

SEQ ID NO: 246505 - DNA, 1443 bp, synthetic construct
  misc_feature 1..1443: note = Description of Artificial Sequence: Synthetic coding sequence
  source 1..1443: mol_type = other DNA
atgtccgatgtagcgatcgtgaaggagggttggctgcataagcggggagagtatatcaaaacctggaggccccgatacttccttctgaagaatgacgggacgtttattggttacaaggagcgcccacaggatgttgaccagagggaggcacctctcaacaatttctcggtggctcagtgccagctgatgaagacagagcgccctcgcccaaacaccttcatcattcgctgtttgcagtggaccaccgtaatagaacggactttccacgtggagaccccggaggaaagggaggagtggaccactgcaatacaaacagtggctgatggactgaagaaacaggaggaggaagagatggactttcgaagcggctccccaagtgataattctggggctgaagagatggaggtgagcctggcaaagcccaagcacagggtgaccatgaatgaattcgaatatctcaagctcttggggaaaggcacgttcggcaaggtcatccttgtgaaagagaaggccactggcagatattatgctatgaagatcctgaagaaggaggttatcgtggccaaggacgaggtggcccacacactgacggaaaatagagtgcttcagaatagtcgtcatcctttcctgaccgccttgaaatatagctttcagacccacgatcggctctgttttgtgatggagtatgccaatgggggtgaactttttttccacctatcaagggaaagagtgttctcggaagacagggcaaggttttatggagcagagatagtgtctgcactggactacctccacagcgagaagaacgtggtttatcgtgacctgaaactggaaaatctgatgctggacaaggacggccatatcaagataacagacttcggactctgtaaagagggcatcaaagacggcgctaccatgaagactttctgcggcacaccggagtacctcgcacccgaggttctggaagacaacgactacggaagagctgtggactggtggggcttgggcgttgtgatgtacgagatgatgtgcggcaggctgccattttataaccaagatcacgaaaaactgtttgaactcatcctgatggaagaaatcaggttccctcgaacattaggcccagaagccaaaagtctcctgagcggactgctaaaaaaagaccctaagcaacggctgggtggtggcagcgaggacgcaaaggagatcatgcagcaccggttctttgctgggattgtctggcagcatgtatatgagaagaagttgagtccaccttttaagcctcaagtgacttccgagactgacacaagatactttgacgaagaattcactgcccagatgattaccattacccccccagaccaggatgactccatggagtgcgtagacagcgagcggagacctcactttccccaattcagttacagtgcctctgggaccgcttag

SEQ ID NO: 246506 - DNA, 1443 bp, synthetic construct
  misc_feature 1..1443: note = Description of Artificial Sequence: Synthetic coding sequence
  source 1..1443: mol_type = other DNA
atgtccgacgtcgcaatcgtcaaggagggctggctacacaagcgaggagaatatataaaaacatggcgacctcggtacttcctgcttaaaaatgacgggacgttcattggctacaaggagcggcctcaggatgtagatcagagagaggccccactgaataattttagcgtggcccagtgccagcttatgaaaacagagagaccaagacctaacacatttattattcggtgtctgcagtggactaccgtgattgagcgcacttttcatgtggaaacccctgaagagagagaggaatggactacagcaattcagactgtcgcggacggcctgaagaagcaagaggaggaggagatggacttccgatccggctcacccagcgacaacagcggggctgaagagatggaggtgtcgctcgccaagcccaagcatcgagtcacaatgaacgaattcgaatatttaaagctgctgggtaaggggacatttggaaaagtgatcctggtgaaggaaaaggccaccggacggtactacgcgatgaaaatactcaagaaagaggttatcgtggccaaggatgaagtggctcatacactaacagagaatcgcgtgctacagaatagccggcatcctttcctaaccgcactcaagtacagcttccagacacatgatagactctgttttgtgatggagtacgcaaatggtggtgaactcttttttcatctctcaagagaacgcgtgttcagtgaagatagagctagattctatggagctgaaatagtgtctgccttggattacctgcacagtgaaaagaacgtcgtctaccgggatctgaaactcgagaacctcatgctggataaagacggccatattaagattactgactttggcctttgcaaagaggggattaaagatggcgctacaatgaaaacgttttgcggcacgcccgagtatctggctccagaggttttagaagacaatgattatggtagggcagtagactggtggggcctcggagtcgtaatgtatgaaatgatgtgcggaagacttcctttctataaccaggatcacgagaagctattcgaactgatattaatggaagagataagattccctcgcaccttgggccctgaagcaaagagcctgttgtcaggacttttgaagaaagatccgaagcagcgcctgggaggaggatcagaggatgccaaggagattatgcagcataggttttttgccggaatcgtgtggcagcacgtgtacgaaaaaaagctgagtcccccattcaagccccaggtgacaagtgaaactgacacccggtattttgacgaggaatttacggcccaaatgatcactatcacacctccagatcaagacgactcaatggaatgcgttgactccgaaagaaggccccatttccctcagttttcgtactctgcaagtggaacagcttag

SEQ ID NO: 246507 - DNA, 1257 bp, synthetic construct
  misc_feature 1..1257: note = Description of Artificial Sequence: Synthetic coding sequence
  source 1..1257: mol_type = other DNA
atgaagacggaaagacccaggcccaacacgttcatcatccgttgcttgcagtggaccacagtaatcgaaagaacgtttcacgttgaaacacctgaagagagggaggaatggacaacggcaatacagacagttgcggatggtctgaagaagcaggaagaggaggaaatggattttcggtccggatcaccctcggataattccggcgctgaggagatggaagtttccctggctaaacccaaacatagagttacgatgaatgagtttgaataccttaagctactgggcaaaggaacatttgggaaggtgattctggtcaaagagaaggccaccggtcggtactacgcaatgaaaatcctgaaaaaagaggtgatcgtggcaaaggacgaggtcgcccacaccctgaccgaaaatagagtactccagaactcacggcatcctttcctcactgccttaaagtattcatttcaaacccacgaccgtctctgttttgttatggagtacgccaatggcggtgagctcttctttcacctgagtagggagagggtatttagtgaggatagagccaggttttatggggcagaaatagtcagtgctctagactacctgcatagtgagaagaacgtcgtgtaccgggatttaaagttggaaaatttaatgttggacaaagatggacacatcaagattacagactttggcctatgtaaggaggggatcaaggatggcgcaacgatgaagacattttgcgggactcctgagtacctggcacccgaggtcctggaggacaacgattacggtcgggctgtcgactggtggggcctgggcgtagtaatgtatgaaatgatgtgtggtagacttcccttctataaccaagatcacgagaaactgttcgagctgatcctgatggaagagattcgttttccccgaaccttagggccagaggccaaaagcctgctgtcaggactactgaagaaggatcctaagcaacgacttggaggcggaagtgaagacgcaaaagaaatcatgcaacataggttctttgcaggaatcgtctggcagcacgtgtacgaaaaaaagctttcacccccattcaaacctcaggtcaccagtgaaacagataccaggtatttcgacgaagaattcactgcacaaatgattacaattacgcctccggatcaggatgattcaatggaatgtgtggattccgagcggaggccccacttcccccagtttagctactccgcaagcggtactgcctag

SEQ ID NO: 246508 - DNA, 1443 bp, synthetic construct
  misc_feature 1..1443: note = Description of Artificial Sequence: Synthetic coding sequence
  source 1..1443: mol_type = other DNA
atgagcgatgtcgcgatagtgaaggagggatggttgcataagagaggcgagtacatcaaaacatggcggcctcgctactttttgctcaagaacgatgggacgtttattgggtacaaggaacgcccacaggacgtcgaccagagagaggctcccttgaataacttttccgtggcccagtgtcagctcatgaagaccgaacggccacggccaaatacatttattatccggtgccttcagtggacgacagtgattgagcgaacgtttcatgtggagacacccgaggaaagggaagagtggacaacagcaatccagaccgtagccgacggcctgaaaaaacaggaggaagaagagatggatttccgctccggatcacctagcgataactccggggcagaagaaatggaagtctccctagccaagccaaagcaccgggtgacaatgaacgagttcgaatacctgaaattgctcgggaaggggacattcggtaaggtgattctggtgaaagaaaaggctaccggcaggtattacgccatgaaaatactcaagaaggaggttatagtggcaaaagatgaagtggctcatactttaactgagaacagagtcctgcagaactcacgccaccctttcctgaccgccctcaaatacagttttcagacacacgaccggttgtgtttcgtaatggagtacgctaacgggggagagctgttttttcatctgagcagagaaagagtgttttcggaagaccgagcccgtttctatggggctgaaattgtgtccgcactcgactatctccacagcgaaaagaatgtggtctatcgcgacctcaagctggagaatttaatgcttgacaaggatgggcacataaaaattacagacttcggactttgtaaggaggggataaaggatggcgctacgatgaagaccttctgtggtactcctgaatacttggctcctgaagtccttgaggacaacgattacggacgcgcagtagattggtggggccttggggtggttatgtatgaaatgatgtgcggccgtctgcccttctacaaccaagatcatgaaaaattatttgaacttatcctgatggaagaaattcgatttccaaggacgttggggcctgaggcaaaatccctgctgagcggactgctgaaaaaggatccgaagcagcgattgggaggcggatcagaggatgccaaagagattatgcagcaccgctttttcgctggtattgtctggcagcatgtgtacgaaaaaaaactctcacctcccttcaaaccacaggtgacctctgaaacggacacgcgatatttcgatgaggaatttactgctcagatgatcactataacgccacctgaccaggacgacagcatggagtgcgtggacagtgaacggaggcctcatttccctcagttttcttactctgctagcggcaccgcctag

SEQ ID NO: 246509 - DNA, 1443 bp, synthetic construct
  misc_feature 1..1443: note = Description of Artificial Sequence: Synthetic coding sequence
  source 1..1443: mol_type = other DNA
atgtcagacgtggccattgtgaaggagggttggctgcacaagcggggtgagtatatcaaaacatggagacctaggtattttctgcttaagaatgacgggacatttattggatacaaggagaggccgcaagatgtggaccagagagaagcccctctgaacaactttagcgtggcccagtgccagttaatgaaaacagaaagacccagacctaacactttcataatccgatgtctgcagtggacaactgtcattgagaggacatttcacgtcgagacaccagaggagagagaagagtggaccactgctatacagacagtcgccgacggccttaagaaacaggaagaggaagagatggacttcagaagcggctcaccttccgataattccggcgctgaagagatggaggtttctttggctaaacccaagcatcgtgtgactatgaatgaatttgagtatctgaagctgcttgggaagggcacattcggcaaagtgattctcgttaaagagaaggctacgggcaggtactacgcaatgaagatcctgaaaaaggaggtcatcgtagctaaagacgaggtggcgcatacacttacagagaatagggtgttacaaaacagcaggcacccctttctgactgcgctgaagtacagcttccagacccacgatcggctttgcttcgtaatggaatacgcaaatggaggtgaactgttttttcacctgtcccgcgaaagggtcttcagcgaggatcgtgcccgattttatggggctgaaatcgtgtcagctttagactacctgcactcagaaaagaacgtggtgtaccgggatctgaaactggagaacctaatgctggacaaggacgggcatatcaaaatcactgactttggcctgtgcaaagagggcattaaagatggtgctaccatgaaaactttctgtggaacaccagaataccttgccccagaagtcttggaagataatgactatgggagggccgttgactggtggggactcggcgtggtcatgtacgaaatgatgtgtggcagacttcccttctacaaccaggaccacgagaagttgttcgagctgatcctcatggaggagatccggttccctcggactctcggtccagaagccaagagtctgctgagtgggctcttaaaaaaagaccctaaacaacggctgggaggcggatcagaggatgctaaagaaatcatgcagcaccggttctttgccggtattgtctggcaacacgtctacgagaagaagctgagtccacccttcaagccccaggtgacttctgaaaccgacaccagatatttcgacgaggagtttacagctcagatgatcactataacccccccagatcaggatgatagcatggagtgcgtcgatagcgagcgcaggccccactttcctcagttttcatacagtgcttcaggtacagcttag

SEQ ID NO: 246510 - DNA, 1443 bp, synthetic construct
  misc_feature 1..1443: note = Description of Artificial Sequence: Synthetic coding sequence
  source 1..1443: mol_type = other DNA
atgtccgacgtcgcaatagtcaaagaaggctggcttcacaaacgcggagaatacattaagacctggcgaccgcgttatttcctcctgaaaaacgatgggacattcattggctacaaggaaaggccccaggatgtggaccagcgggaggcaccactgaataacttcagcgtggctcaatgtcagctgatgaaaaccgagcggcctagaccaaacacttttatcatcagatgtctgcagtggaccactgtgatcgaacgaaccttccacgtcgaaacacctgaggaaagagaggaatggacaaccgccatccagactgtcgcagatggcctgaaaaagcaggaagaagaggaaatggacttccgatccggctctccgtcagacaatagtggagcagaggagatggaggtgtctctggctaagcccaaacaccgtgtgaccatgaatgagtttgagtatctgaaactgctcggcaaaggtacttttggcaaagtgatcctggtgaaagaaaaggcaacagggcgatactacgccatgaagatcttgaagaaggaagttatcgtggccaaggacgaggtggcccacacgttgactgaaaatcgggtgctgcagaattctagacatcctttcctcactgcattaaagtactcatttcagacgcatgatagactttgcttcgtgatggagtacgcaaacgggggagagctgttctttcacttatcgcgggaaagggtcttcagcgaagatcgtgccaggttctatggggcagagatcgtgtcagccctggattatctacatagcgagaaaaacgtggtttaccgcgacttgaagctggaaaacctgatgctggataaggacggacacattaagattaccgactttgggctctgtaaggaaggaataaaggacggagccactatgaaaacattttgcggcactcctgagtacctcgctcctgaagtcctggaagataacgactatggcagggctgtcgattggtggggattaggggtcgtaatgtatgaaatgatgtgtggcaggctcccattttataatcaggatcatgagaaacttttcgaactgatccttatggaggaaatcagatttccaagaactcttggacctgaggccaagtcacttttatccgggctgttaaagaaagaccccaagcagagactggggggtggcagcgaagacgccaaagagattatgcagcatcgattctttgctggtattgtctggcagcacgtgtatgaaaagaagcttagtcctccctttaagccacaagtgacttcggagaccgatacacgatatttcgacgaagagttcaccgctcaaatgattaccatcactccgcctgatcaagacgactccatggagtgcgttgatagcgagcgaaggccgcacttccctcaattctcctactctgcttctggcaccgcctag

SEQ ID NO: 246511 - DNA, 279 bp, synthetic construct
  misc_feature 1..279: note = Description of Artificial Sequence: Synthetic coding sequence
  source 1..279: mol_type = other DNA
atgagcgatgtggccatcgttaaggaaggctggttgcacaaaagaggcgagtacatcaagacatggaggcctaggtatttcctactgaaaaatgatggcacgtttatcggatacaaagagcggccacaggatgtcgatcaaagagaggctcctctgaataattttagcgtggctcagtgtcagcttatgaaaaccgagcggccacgccctaatacctttattatccggtgcttacaatggaccacagtcattgagagaaccttccacgttgagacgtag

SEQ ID NO: 246512 - DNA, 2421 bp, synthetic construct
  misc_feature 1..2421: note = Description of Artificial Sequence: Synthetic coding sequence
  source 1..2421: mol_type = other DNA
atggcttctggcgcagattccaagggagacgacctatcgacagcaattttaaagcaaaagaaccgccctaatcgtctgatcgtggatgaggccataaatgaagacaactccgtagtttcccttagccagcccaaaatggatgagcttcagctgtttcggggtgacactgtgctcttgaagggaaaaaagagacgcgaagccgtttgtatcgtgctgtccgatgacacatgcagcgatgagaaaattagaatgaacagggtcgtccggaataacctgagggtgcgtctgggtgacgtgatatccatccagccttgccctgatgtcaaatacgggaagagaatccacgtcctgccaatcgacgacactgtggagggcatcaccggcaacctttttgaggtttatctgaagccttacttcctggaggcatacagacccatcaggaaaggcgatattttccttgtgagagggggaatgagagctgtcgagtttaaggtcgttgaaaccgacccctcgccctattgcattgtggcaccagacacagttattcattgcgagggcgagcccattaaaagggaagatgaggaggagagcttgaacgaggtgggttatgatgatattgggggatgtcggaagcagctggcgcagatcaaagaaatggtcgagcttccactgcgtcatccagctttatttaaggcaattggagtcaaacctccaagaggcatcctattgtatggtcctcctgggaccggcaagacgcttattgccagggcagtagctaacgagacaggagctttcttctttcttattaacggaccagaaataatgtccaaactcgcaggtgaatctgagtccaacctgaggaaagccttcgaggaggcggaaaagaatgcaccagccattatcttcatcgacgaactggacgcaatcgcaccaaagcgagaaaagacccatggggaagtagagcgcaggattgtatcacagctcctgactttgatggacgggctgaagcaacgcgctcatgtgatagttatggcagcaaccaacaggcccaacagtatcgaccctgccctcagacggtttggcagattcgaccgcgaggttgatatcgggatcccagacgctaccggtcggctcgagatcctacagatacacacaaaaaatatgaaactcgctgacgatgtcgacttggagcaggtggccaatgagacccatgggcatgtgggggcagacctagccgcactgtgttctgaggcagctctccaagccatcaggaaaaaaatggacctgatcgacctggaagacgagactattgacgcagaagtgatgaatagccttgcagtcacaatggatgatttcaggtgggcactcagccaatccaatccaagcgctctcagggaaacggtagttgaggttcctcaagtgacctgggaggatatagggggactcgaagacgtaaaaagggagctgcaggagctcgtgcagtaccccgtcgagcatccggacaagtttttaaaatttggcatgacaccatctaagggagttctgttctacggccctcctgggtgtggaaagacgctcctggccaaggctattgctaacgagtgtcaggccaatttcatttctattaagggccctgaactcctaaccatgtggttcggcgaaagcgaggctaatgtccgggagatcttcgataaagcccgtcaggcggctccttgcgtgttatttttcgatgagcttgatagcattgctaaggccaggggtggtaatatcggcgacggcggaggagccgctgacagggtaattaaccagatacttacagagatggatggcatgagcaccaaaaaaaacgtgttcataatcggtgccaccaacaggcccgatatcattgacccggcaattctcaggcctggcagactggaccagctgatctacattcctctgcccgatgagaagtctagggtggctatactgaaagctaatctccggaaatctcctgtggctaaggatgtcgacctagaatttctcgcaaaaatgactaacgggttttccggggctgacttgactgaaatatgccaacgcgcatgcaagcttgcaatcagggaaagtattgaatctgagatcaggcgggagcgggagaggcagactaatccaagcgccatggaggtggaagaagatgatcctgtcccggaaattcggagggaccacttcgaggaagccatgcgctttgccaggcgctctgtgtctgacaacgacatcaggaagtatgagatgttcgcacaaacattgcagcaaagtagaggttttgggtccttccgctttccatccggcaaccagggcggagccggtccctctcagggatctggtggcggtacaggtggctctgtatacaccgaagacaatgatgatgacctttacggctag

SEQ ID NO: 246513 - DNA, 3669 bp, synthetic construct
  misc_feature 1..3669: note = Description of Artificial Sequence: Synthetic coding sequence
  source 1..3669: mol_type = other DNA
atgtctcaaccgcctccgcctccaccccctctgcccccaccgcctccaccaccagaggctccacagactcccagctcactggctagcgctgctgcgtcaggaggattgttgaaacggagggatcgacgcatcctgtccggtagttgccccgacccgaagtgccaggctcgattattcttcccagcttctggaagtgtcagtatcgaatgtaccgagtgtggccagagacacgaacagcagcagctcctcggcgtggaggaggttacggacccagacgtggtcctgcataatctcctcaggaatgcgttattgggcgtcaccggggcacccaaaaagaacactgagctggtgaaggtgatgggcctctcaaattaccattgcaagctgctgagcccgattctggccagatacgggatggacaaacagactggacgcgctaagctgttgagggacatgaaccagggggaactgttcgattgtgccctgttaggagatcgggctttcctgatcgagcctgagcatgtgaataccgtgggatatgggaaggacagatccggcagtcttttatatcttcacgataccttagaagatataaagcgcgcaaacaaatcccaggagtgcctgattccggttcacgttgatggagatggacattgtctagtgcatgcagtgtctcgcgctttagtaggtagggagctgttctggcacgcccttagagagaatctgaaacagcatttccaacagcaccttgcacgttatcaagccctgtttcatgattttattgacgccgctgagtgggaggatatcattaatgaatgcgatcctcttttcgtgccaccagagggcgtccccctaggcttacggaatatccatatcttcgggctggccaatgttctgcatagacccatcattctgctggacagtctctctggtatgcgctccagcggcgattacagcgccaccttcttaccaggcctgattccagctgagaaatgtacggggaaggacggacacctgaacaagcctatatgtatagcctggtcttcctctggcagaaaccattacatacctctggtcggcattaagggagccgctttgccgaaattgcctatgaatctgcttcccaaagcgtggggggttccccaggatttgatcaagaaatacatcaaactcgaggaggatggcggttgtgtaataggaggcgaccgaagtttgcaggacaaatacctgttgagacttgtcgccgcaatggaggaggtctttatggataagcacggcatccatccttctttggtggctgacgtccaccagtatttttacagacgtacaggcgtgatcggggtgcaacccgaggaggtgaccgcagcggctaagaaagcagttatggataatagactgcataaatgcctcctgtgtggcgctctctccgagttacatgtgccccctgagtggctggctccaggaggaaaactgtacaacctggctaaatctacccacggtcaactgcgaactgataagaattattccttccccctcaacaacctcgtatgctcgtatgacagtgtgaaggacgtcctggtgcctgactacggaatgagcaaccttaccgcttgcaattggtgtcatggaacctctgttcgcaaagttcggggagatggaagcatcgtgtatcttgacggggatcgaaccaacagccgcagcaccggcggaaagtgcgggtgtgggtttaaacacttttgggacggaaaagagtatgacaacctccctgaggcctttcccataactctggagtggggcggaagagtggttcgagaaactgtatactggttccagtatgaatccgatagttcactgaacagcaacgtatatgacgtggcgatgaagttggtgacaaaacactttccaggggagttcggctctgagattctcgtgcagaaggttgttcacacgattctgcaccagaccgcaaagaagaaccccgacgactacacacccgtgaacatagacggtgcgcatgcccagagagtaggggacgtgcaaggtcaggaatccgaatcacagctgcccacaaaaatcatcctcaccggccagaagactaagacccttcacaaagaggaactaaatatgagcaaaactgaacgcactattcaacagaatataacagagcaggcctctgttatgcagaaacgaaaaactgagaaattgaaacaagaacaaaaaggacagccaaggaccgtatcaccgtcgactatccgtgacgggccatcctctgcccctgctacccccacaaaggctccctactccccgaccaccagcaaagagaagaagatcagaatcacaaccaatgacggtcgccagagcatggttactctgaaatcctctacaacctttttcgagttgcaggagagcatagcacgcgagtttaatatccccccttacctgcaatgcatccggtatggtttccctcccaaagaactcatgccgcctcaagccggtatggagaaggagcctgtgccactccagcacggcgaccgcatcaccatcgagattctgaaaagcaaggccgaaggagggcagtctgctgccgcacatagcgcccataccgtgaagcaagaggacattgccgtcactggaaaactttcctcaaaggagcttcaggagcaggccgagaaggaaatgtatagcttgtgtctgttggccacgctgatgggcgaggacgtctggtcatacgccaaagggcttcctcatatgtttcagcagggaggggtcttttactccattatgaagaagactatgggtatggccgatggtaagcactgcacattccctcatctccctgggaagacctttgtctacaacgcctccgaagaccggctggagttgtgcgtggatgccgcagggcacttcccaataggccctgacgtggaagacttagtcaaagaagccgtaagccaggtgagagccgaagcaaccacaaggtcgagggagagcagcccatcccatggcctcttgaagctgggcagtggcggtgtcgtgaaaaagaagtcggaacagctacacaacgtcacggcctttcaggggaaagggcactcgctgggtaccgcttctggtaacccccatctggatcccagggccagggaaaccagtgtggtaagaaaacacaacaccggcacagactttagcaattcatctactaaaacagaaccctcagtgttcaccgcttcctcatccaactctgaattgattcggattgcccctggcgtagtcaccatgagggatggtcgtcaactcgatcccgacctggttgaagcacagcgcaaaaaattgcaggagatggtatctagtatccaagccagcatggatcgtcacttgcgagatcaatccactgagcaaagtccgagtgatctgccgcagaggaagactgaagtcgtctcttcctcggctaagtcagggtccctccaaactgggttgccagagagctttccactgacagggggtacggagaacttaaacactgaaaccacagatggttgtgtggcagacgccctgggcgctgcgttcgcgaccaggtccaaagctcagcgagggaactctgttgaggaactcgaggagatggattcccaggatgcagagatgacaaacactaccgagccaatggaccactcgtag

SEQ ID NO: 246514 - DNA, 3381 bp, synthetic construct
  misc_feature 1..3381: note = Description of Artificial Sequence: Synthetic coding sequence
  source 1..3381: mol_type = other DNA
atggaacccaatgattctacctcaacagccgtcgaggaacccgactcacttgaagtcctggttaagaccctcgattcccaaaccaggacttttatcgtcggcgcacagatgaatgtgaaggagtttaaggagcacattgccgcatctgtgtctatccccagtgaaaaacagaggttaatataccaggggagggtcctgcaggacgataagaaactacaggaatacaacgtgggcggaaaagtcatccacctcgtggaaagggcccctccccagacacacttgcctagtggcgcatcatcaggtaccgggtctgcaagcgctacgcatggaggcggtagcccaccaggtactcggggtccgggtgcttcagtacatgacaggaacgcaaattcatacgtcatggtgggaacattcaacctcccttctgatggttccgccgtcgacgtccatatcaacatggagcaggcccctatccaatcagaacccagagtgcgactggtcatggctcagcatatgatccgagacatccagaccctcttgtcacggatggagtgtcgagggggacctcagccacagcacagtcagccccctcctcagcccccagccgtcacccccgaaccagtggctctttcctctcaaacgagtgagcccgtggaatctgaggcccctcctagagaacccatggaggccgaagaggttgaggaaagagcacctgctcagaacccggaactcacgccaggcccagcaccagccggacctacaccagcaccagaaacgaacgccccaaatcatccctccccagcagagtatgtagaggtcttacaggagctgcagcgattagagtcacggttacagcctttcttgcagcggtattatgaggtgctcggagctgccgctactacagattataataacaatcacgaaggccgagaagaggatcagcgtctcataaatcttgtgggggagagtctgagactgctggggaatacctttgttgccctgagcgacctgcgctgcaatctcgcctgcacaccaccacggcatctgcatgtggttaggccaatgtcccactacacaactccaatggtgctgcagcaagctgccatacctatacagatcaatgtgggtacaacagtgacaatgaccggaaacggaacaaggccgccacccacccccaatgctgaggccccacctcctggcccaggccaggccagttctgttgcaccaagttctaccaatgtggaaagtagcgccgagggggctccccctcccggacctgcccctcctccagctacctctcaccctcgtgtgatccgtatcagccatcagtctgttgagcctgtagtgatgatgcatatgaatatccaggatagtgggacccagcctggtggagttcccagcgctcccaccggcccattgggcccaccgggacatggacagactctcggtcagcaggtccctggtttccccaccgctcctacccgggtcgtgattgctagacctacacccccacaggccaggccttcacaccccggaggacctcccgtgtctggaactctccaaggcgctgggctgggcaccaacgccagcctggctcagatggtgtccggactggtcggccagttgctgatgcaacctgtgttagttgcgcagggaacgccgggaatggcacctcccccagcccctgctacagcaagtgcctcagctggcactacaaatactgccacaactgctggacccgcaccaggcggtcctgcccagcctccacccaccccacagccctccatggcagatctccagttctcacagcttctggggaacctgctgggcccagccggtcccggagccggaggtagcggagtcgcttctcctacaatcacggtggccatgccaggcgtgcccgcattccttcagggtatgacagatttccttcaagccacccagaccgccccaccgccacctccgcctcctccccctcctccccctgctcccgagcagcagacaatgccaccccctggaagtccgtctggcggtgctggatctcctggcggattgggcttagaatctttgtcacccgagttcttcacgagcgtcgtgcagggtgttttgtcaagcctgctaggcagcctgggagccagggcagggtctagcgagagtatcgccgcatttattcagagactcagtggatcatctaacatatttgaacccggtgccgacggggcactcggttttttcggggctctgctctccctcctgtgccagaacttctctatggtggacgtcgtgatgctcctgcatgggcatttccagccactgcagaggctgcagccccagctgcggtctttcttccatcaacactatctagggggtcaagaaccaacacctagtaatatcaggatggccactcacacacttataaccgggctggaggagtacgtgcgcgagtcatttagtctggttcaggttcaacctggcgtggatataatcagaaccaaccttgagttcttgcaggaacaatttaacagcatcgcggcacacgtcctccattgtaccgacagtgggttcggagccagattgttagagctgtgcaatcagggtttgtttgagtgcctcgctctgaatttgcattgtttaggcggacaacagatggaactggctgccgtgattaatggtaggatcagaaggatgagcaggggcgtcaaccccagtctcgtgtcctggcttacaactatgatggggctcagattacaagtggtgctggagcatatgcccgttggccctgatgccatcctgagatatgttaggcgggtgggggatcccccacagcccttgcccgaggagccgatggaagttcagggagctgaacgtgcttctcctgagccccagagagagaacgcgtcccctgcccctgggacaacagctgaggaggctatgtctaggggccctccccctgccccagaaggcggaagtcgagatgaacaggacggagcttcagcggaaactgagccttgggccgctgcagtgccaccggagtgggtcccaatcatccagcaggatatccagtcccagcggaaagtgaaaccgcaaccccctctgtccgatgcctacctgtccggaatgccggctaaacgtcgcaaaaccatgcagggtgagggtccccagctcctgctcagtgaagctgttagccgtgccgctaaagccgcaggggcaagacctctgaccagtcccgagtcactgagccgcgatctcgaggcaccggaggtgcaggagagctacagacaacagctcaggagcgacattcagaagcggctccaggaagaccctaactatagtccacagagattccccaatgcccaacgggcttttgccgacgacccgtag

SEQ ID NO: 246515 - DNA, 3795 bp, synthetic construct
  misc_feature 1..3795: note = Description of Artificial Sequence: Synthetic coding sequence
  source 1..3795: mol_type = other DNA
atgtccacattgtacgtctccccacaccccgatgcttttccctctctccgggcactgatcgccgcaaggtacggagaggcaggagaaggcccaggatgggggggtgcccacccccgaatctgcctccaaccaccacccaccagccgaacacccttccccccaccacgactcccggcactggaacagggccctgggggattgtgggtttggggggcaactgcagtcgctcagctgctgtggcccgctggtctgggaggtcccggtggtagcagggctgcggtgctggttcaacagtgggtcagctatgctgatactgagcttatccctgccgcttgtggagccacgctgccggctctcggcctaaggagcagcgcacaagatccgcaagccgtgctgggcgctttgggccgtgcgctctctccactcgaagagtggctccggttacacacctatcttgccggagaggcacctacgctggcagacttagcagccgtgacggccctgcttttgccttttcgctacgtcctcgatccacctgcccgacggatctggaacaacgtgacaaggtggtttgtgacttgtgtccggcaacccgagttccgggcagtgttgggcgaggtggtcctctattccggcgcacggcctctgagtcaccaaccaggaccggaagcaccagccctgcctaaaactgcggctcagctgaagaaagaggcaaagaagcgcgagaaactcgagaagtttcagcagaagcaaaaaattcagcagcagcaaccacccccaggagagaagaaacccaagccggaaaaaagggagaagcgcgatcctggggtgattacttacgatctcccgacacctcctggcgagaaaaaggacgtgtcgggcccaatgcccgacagctactcacctagatacgtggaagccgcatggtacccctggtgggagcagcaggggttctttaagcccgagtacggccgacctaacgtttccgctgctaacccgaggggcgtcttcatgatgtgcatccctccccctaatgtaaccggaagcctccatcttggccatgcgttaacgaatgccattcaggatagtcttacgagatggcatcggatgcggggtgaaactaccctctggaatccaggttgtgaccacgcagggattgcaactcaggtggtggtggaaaagaaactatggcgtgagcaggggctttcacggcatcaactgggaagggaagcattcttgcaggaggtatggaaatggaaggaagaaaaaggtgatcggatctaccaccagctgaagaagctgggctcctcattggattgggacagggcgtgtttcaccatggatcccaagttatctgccgctgttacggaggctttcgtcagactacacgaagaaggtatcatatatcgcagtacccgactcgtcaactggagttgcacactaaactctgccatctccgatatagaagttgacaagaaggagctcacaggcaggactctcctgtccgttcccggatacaaggagaaagttgaattcggagtgctcgttagctttgcctacaaagtccaggggtccgattcagatgaggaggtcgttgttgcgaccacacgcatcgagacaatgctgggagacgtggccgttgccgtgcaccccaaggacacccggtaccagcatctaaagggtaaaaacgttatccatccctttttgtctcgatccctgccaattgtgtttgacgaatttgtggacatggactttggaaccggagcagtaaaaataacccccgctcatgaccagaacgattatgaagtcggacagcggcacggactggaggccattagcattatggattcccgcggagccctgattaacgttccgcctccctttctgggccttccaaggttcgaagctcgcaaagccgtgctggtggcgctgaaagagcgagggctgtttcgagggattgaggataatccaatggtggtgcctctatgtaaccgaagcaaagatgtggtggaaccgttgctgcgacctcagtggtacgtgcgctgcggggaaatggcccaggcagcgtcagccgctgtgacccggggagatctgcggattctgcccgaggctcaccaacggacatggcacgcatggatggataatatacgtgagtggtgtatctcacggcagctatggtgggggcataggattcctgcttattttgtgaccgtctccgacccagcggtgcctcccggtgaagatccagacgggagatattgggtcagcgggcgtaacgaggctgaggcgagggagaaagcagccaaggagttcggcgtgtctcctgacaagatcagccttcagcaggacgaggatgtgctcgatacgtggttcagctctggcctcttcccactgtctatccttggctggcccaatcagagtgaggatttgtcagtattctaccccggaaccctattggagaccgggcatgacatcctgtttttctgggtggctcggatggtgatgctcgggctgaagctgaccggacgcctgcccttccgtgaggtctacctgcacgccattgtccgcgatgctcatgggaggaagatgtctaagagcttaggcaatgttattgaccccttagacgtaatctatggcatttccctccaaggactccacaatcaactgctgaatagtaaccttgacccctctgaggtggagaaggccaaggaagggcagaaagccgatttccctgcaggcattccagaatgtggaacagacgctctgagatttggcctttgcgcttatatgagccaaggtcgcgacatcaaccttgatgttaataggattctgggataccgccacttttgcaacaaattgtggaacgctaccaaatttgcactgcgcggtcttgggaagggcttcgtgccttcaccaacttcccagcctggtggacatgaatccctggtcgaccggtggatacgaagccgcttgaccgaagcggttcgactctctaaccaaggatttcaggcatacgactttcccgctgtaactaccgcccagtacagtttctggctgtacgagttatgtgatgtttatctcgaatgcctgaagcccgtattgaacggtgttgaccaggtcgccgctgagtgcgccaggcagacgctgtacacttgcctggatgtgggcctgcgcctgctcagtccatttatgccattcgtaactgaagagttgttccaaagattacctcggagaatgccccaggccccaccttctctctgcgtgacgccctaccctgagcccagcgagtgttcctggaaggacccagaggctgaggcggctctggaattggccctgtccatcacccgagccgttaggagccttcgagccgattataacctgactcgaatccgccctgactgttttcttgaagtggcggatgaggcaacaggggctctggcgtccgcagtcagtgggtatgtacaggccttagcttccgcaggcgtagtcgccgtgttggcccttggcgctcccgctcctcaaggctgtgccgttgccctcgccagtgaccgttgtagcatacatcttcaactgcaaggcctagtggacccagctcgtgagttaggcaagctgcaggcaaaacgggtggaggcccagagacaggcacagcggctgagagagcgtcgcgcagcatccggctatccagtcaaagtgccactggaggtgcaggaggcggacgaggcaaaactgcagcagaccgaagctgaactgcgtaaagtcgacgaagcaatagcactcttccagaagatgctgtag

SEQ ID NO: 246516 - DNA, 525 bp, synthetic construct
  misc_feature 1..525: note = Description of Artificial Sequence: Synthetic coding sequence
  source 1..525: mol_type = other DNA
atgtccactttatacgtctccccacatcctgatgctttcccatccctgagagccctgatcgctgccaggtacggggaggcaggtgagggtcctgggtggggcggagcacatcccaggatctgcctccagccaccacccacatcccggacaagcttcccacccccacggctgccagccttagagcagggacccggaggtctttgggtgtggggtgctacggctgtggcccaactcctctggcccgcaggactgggcggtcctggtggctcaagggcagctgtgctggttcagcaatgggtgtcttacgccgacactgagttaatccccgctgcctgtggcgctactctccccgcactggggctgcggtcctccgcccaggacccccaggccgtgttaggagctctcggaagggccctctccccgctggaggagtggcttcggctacatacctacctagctggtgaggccccaaccctcgctgatctggctgccgttacggctcttcttttaccttttcggtactag

SEQ ID NO: 246517 - DNA, 525 bp, synthetic construct
  misc_feature 1..525: note = Description of Artificial Sequence: Synthetic coding sequence
  source 1..525: mol_type = other DNA
atgtcaactttgtatgtgtctcctcatcctgacgcctttcccagtcttcgggcattgattgctgctagatacggcgaggctggcgaaggccctgggtggggcggagcccatccacggatatgcctgcagcctcctccgacttccagaacctccttccccccaccacggctgcctgctctggagcaaggcccaggcggactatgggtgtggggggcaaccgctgttgcacagctcctttggccagccggattgggcggaccagggggatctagagctgccgtgctcgtgcagcagtgggtgtcttacgctgataccgagctgattcccgctgcttgtggggctactctgcctgcgctgggcttaaggagcagtgcacaagaccctcaggccgtcctcggagccctgggaagagctctcagccctctggaggaatggctgcggctccatacataccttgccggtgaggcaccaacccttgcagatcttgcggcagtgaccgctctcctactgccttttcggtattag

SEQ ID NO: 246518 - DNA, 867 bp, synthetic construct
  misc_feature 1..867: note = Description of Artificial Sequence: Synthetic coding sequence
  source 1..867: mol_type = other DNA
taaaaggagaggggtctgtttcgcggaattgaggataatcctatggttgttcctctctgtaaccgctccaaagacgtcgtcgaacccctgctgcgcccacagtgggagtggtgcatttcacgccagctctggtggggccacagaatacctgcctatttcgtgacagtctccgatcccgcagtacctcctggagaggaccctgatgggcgatactgggtgtcaggccgtaatgaggcagaagctcgggaaaaagctgctaaggaatttggagtgagtcctgacaagattagtctacaacaggacgaggacgtactggacacatggttttccagcggactttttcctctctctattctaggatggccgaaccaaagcgaggacctatcagtcttttatcccggaactctgctggagaccggacatgatattttgttcttttgggtagcccgaatggttatgctgggcctgaaactgaccggacgactccccttccgcgaggtttacttgcatgcaattgtaagggacgctcacgggcgtaagatgagcaagagtctgggcaatgtcatcgatccactcgatgtgatctacggaatcagcttgcaaggacttcataaccaactgctgaacagcaatttagaccccagtgaggtggaaaaggctaaggaagggcagaaagcggatttccctgccggaattcctgagtgcggaaccgacgctctgcgctttggactgtgtgcctatatgagtcagggaagagacataaacctggatgtaaacaggattctcggataccggcacttctgcaacaagttatggaacgcaaccaagttcgcactgagaggcctagggaagggtttcgtgccatag

SEQ ID NO: 246519 - DNA, 3795 bp, synthetic construct
  misc_feature 1..3795: note = Description of Artificial Sequence: Synthetic coding sequence
  source 1..3795: mol_type = other DNA
atgagcaccttgtatgtgtccccacacccggacgccttccccagtctccgggcacttatagccgctcgctatggtgaggcaggcgaaggcccaggctggggaggagcacacccacgaatctgcctccagccccctccgacgagccgcacctcttttcctcctcccagactgccggctctggaacaaggacccggagggctgtgggtttggggcgctacagctgttgcccagctcctgtggccggcaggtctcggaggtcctggcggatcacgcgctgcagtgttagtgcagcagtgggtgagctacgctgacacagaactgatcccagctgcatgcggggcaacgctgcctgcacttggcctgaggtcgtcagctcaggacccgcaggctgtcttgggcgctcttggaagggcactgtctccgctcgaagagtggttgcgcctccatacctacctggcgggtgaagcaccgactctggcagatcttgccgcagtcacagctttgctactgcctttccggtacgtgctcgaccccccagcacgcaggatctggaacaatgtgacccgctggtttgtcacttgcgtcagacagcccgagttcagagccgtgttgggcgaggttgtgctgtatagtggagcgcgaccactgagccatcaaccgggtcccgaggcccctgctttgcccaaaaccgccgctcagttgaagaaggaggcaaagaagcgggagaagctggaaaaattccagcagaagcagaaaattcagcagcagcaaccgccacctggtgagaaaaagcccaaacctgagaaacgggagaagcgcgatcccggtgtgatcacatatgacctacccacccctcccggagaaaagaaggatgttagcggaccaatgcctgacagttactctcccaggtacgtggaggcagcttggtatccatggtgggagcagcaggggttttttaagcctgaatatggtaggcccaacgtgtctgctgctaaccccaggggtgttttcatgatgtgtattccccctcctaacgtgacgggtagtctgcacctaggccacgccctgaccaatgctatacaggactctctcacacgctggcaccgaatgcgcggtgaaaccactctgtggaatccgggttgcgatcacgccggtatcgcaactcaggtcgtcgtggagaagaagctatggcgcgagcaaggactcagcaggcaccagcttggcagggaagccttcttgcaggaggtttggaaatggaaagaggagaaaggggataggatatatcaccagctgaagaagcttggctctagcctagattgggacagagcctgctttactatggatcctaagctgagcgccgctgtcaccgaagcctttgtaagactccatgaggagggaatcatctaccggagtactcggttagttaactggagctgcaccctgaacagtgctatttcagacatcgaggttgacaaaaaagagctcactggacgcacgttgctgagcgttccaggctacaaggagaaggtggaatttggcgtcctggtctcgtttgcgtacaaggtacagggatcggactcagatgaagaagtagttgtggctactactcggatcgagactatgctgggtgacgtggcggtcgctgtgcatcctaaggacacacggtatcagcatttaaaagggaagaacgtgatccacccattcctgagtaggtcactccccatagtgttcgacgaatttgtcgatatggattttggtactggcgctgtgaagattaccccagcacacgaccagaacgattacgaagttgggcagaggcacggattagaagcaataagcatcatggacagccgcggagccctcatcaacgtcccccctcccttcttgggactgcccaggtttgaggcccgtaaggctgtgttggtcgccctgaaagagaggggactgttcaggggcattgaagataaccccatggtagtgccactgtgcaacagatctaaggacgtggtggagccgcttctgcggcctcagtggtacgttcggtgtggtgagatggcccaggctgcctccgcagccgtgactaggggggacctgcgcatactgccagaagcgcatcagcggacctggcatgcctggatggacaatatccgcgagtggtgcatctccaggcagttgtggtgggggcacagaatccctgcttacttcgtcacagtatccgacccagcagttccacctggggaagaccccgatggacggtactgggtttcagggcgtaacgaggccgaggctagagagaaggccgctaaagaatttggagtcagtccggacaagatctcacttcagcaggacgaagatgtcctggacacctggttctccagtggcctcttcccactcagtatcctaggctggccaaaccagtcagaggacctgagcgtgttttatcccggtacgctgctcgagactgggcatgatatcctgttcttctgggtcgccaggatggtgatgttgggcctgaagttgacgggccgtctccccttccgagaggtatacctccatgcgatagtcagggacgcccatggaaggaagatgtctaaaagcctcggtaacgtgattgatcccttggatgtgatctatggaatttccctgcagggcctgcataaccagctacttaactctaacctagaccccagcgaggtggaaaaggcgaaagaggggcagaaagcagactttcccgctggcatcccagaatgcggaactgacgctctaaggttcggcctgtgtgcgtacatgagtcaggggagggatatcaacctggacgtgaaccggatcctgggctaccgacatttctgcaacaaactgtggaatgctacgaaattcgccctccggggtctggggaaagggtttgttccatcccccacctcccagccagggggacacgagtcactcgttgatcgctggatcaggtcccgcctgaccgaggcagtccggttgtctaaccaaggtttccaggcatatgacttcccagcagtgactaccgcacagtatagcttctggctgtacgaactgtgtgacgtatatcttgagtgtttgaagcctgtattaaatggcgtcgatcaggtggccgcagaatgcgcgaggcagaccctgtatacgtgcctggatgtagggttgcgactactctcacctttcatgcctttcgttacagaagagctgtttcagcgcttgcctcgccgaatgcctcaagcacctcctagcctgtgtgtgacaccgtaccccgagccctcagaatgctcttggaaagacccagaggcggaagctgccctggagttggccctctcaataaccagggccgtacgctccctccgagcggattataacctcactaggattaggcccgactgcttccttgaggtggcggatgaggccaccggcgctttggcgagtgcagtgagtggatatgtgcaagctctggccagcgcaggtgtcgtggccgtgctggctctgggggctcccgcaccacagggatgcgccgttgcgctggcctcagatcggtgtagtatccacctacaattgcaaggtttggttgatcctgcgagagagctcgggaaactccaggcaaaacgtgtcgaggcacagagacaagctcagcgcctgcgggagcggagagccgcaagcggataccctgtaaaagtgcctttagaagtacaggaagccgacgaggccaagctccaacagacagaagcggagctgagaaaagttgatgaggcgatcgcattatttcagaagatgctgtag

SEQ ID NO: 246520 - DNA, 1101 bp, synthetic construct
  misc_feature 1..1101: note = Description of Artificial Sequence: Synthetic coding sequence
  source 1..1101: mol_type = other DNA
atgagcacactgtacgtgtctcctcatccggatgcattcccctctctgagagctctcatcgcagccaggtacggagaagctggtgaaggcccaggctggggcggtgcacacccccgaatctgcctgcaacctcctccaaccagcagaaccccttttcctcctcctcgtctccccgctttggaacaggggccagggggactgtgggtgtggggcgcaacggccgtcgcccaactgctgtggccggctggtctcggaggtcctgggggaagtcgggctgcggtgctggttcaacaatgggtctcctacgccgacacagagctgatcccagcagcctgtggggctactttacccgctctcggactacggagcagtgctcaggatccacaggccgtcctgggtgccctgggacgggctctgtcccctctcgaggagtggctgaggctccatacgtatttggccggtgaagcacctacgctggctgacctagccgcagttaccgccctgcttctccccttcaggtacgtcttggatcctcccgctagacgcatctggaacaacgtaaccagatggttcgtaacatgcgttaggcagccggaatttagggcggtattaggtgaggtggtcctttattcaggagcacgcccactgtcacaccagcctggacccgaggccccagccttacctaaaactgccgctcaattgaaaaaagaagccaagaaacgtgaaaagctggaaaagttccagcagaagcagaaaatacagcagcagcagcctccccctggggaaaagaagcctaagcctgaaaagagggaaaaaagagatcctggcgtgatcacatacgacctccctacccccccaggcgagaagaaggatgtttccggcccaatgcccgactcctattccccacggtacgtggaagcagcctggtacccctggtgggagcagcagggcttctttaaacctgagtacgggagacctaatgtatctgccgctaaccctaggggggtgttcatgatgtgcatcccccctcccaatgtgaccggatcactccacttgggacacgctctgactaatgcaatccaggactcactgacccgctag

SEQ ID NO: 246521 - DNA, 525 bp, synthetic construct
  misc_feature 1..525: note = Description of Artificial Sequence: Synthetic coding sequence
  source 1..525: mol_type = other DNA
atgagtacactctacgtctcaccacatccagatgcctttccttcccttagggcgctgatagcagccaggtatggcgaggccggtgagggcccaggatgggggggagctcatccaaggatttgtctgcaaccccctcctacgtcccgcacaccatttccacctcccagactgcctgcattggagcagggaccgggagggctgtgggtgtggggcgctaccgccgtggctcaactactgtggccagcgggactcggagggcctggcggttcacgcgcagctgtattagtgcaacagtgggtcagttatgcagataccgagctgatccccgctgcttgcggggcaactctaccggctctgggtctgaggtcgtctgcgcaagacccccaggccgtcttgggtgctcttggtcgagccctctctcccttggaggagtggctgcgcctgcacacatacctggccggagaggccccaactttagctgatctcgcggctgttaccgcgttgctgttgccattcaggtactag

SEQ ID NO: 246522 - DNA, 3552 bp, synthetic construct
  misc_feature 1..3552: note = Description of Artificial Sequence: Synthetic coding sequence
  source 1..3552: mol_type = other DNA
tgagggctgggtggccctggaggatcacgtgccgctgtactagtacagcaatgggtgagctacgccgacaccgaactgatacccgcagcgtgcggagctacactgccagccctggggctaagatctagtgctcaggaccctcaggcagtgctcggagcacttggacgggcattgtcccctcttgaggagtggctacgccttcatacctacctagccggagaagcacctacactcgctgacctggctgctgtgaccgccctcttactgccttttcgctatgtcctggaccctccagcacgcagaatttggaataacgtgaccagatggttcgtgacgtgcgtgagacagccggagtttcgtgctgtgctgggggaggtggtcctgtattcaggcgcaaggcccctgtcccatcaaccaggcccagaggctccggctttaccgaaaaccgctgcccaactgaagaaagaggccaaaaagcgcgagaaactagaaaagtttcagcagaagcagaagatccagcaacagcagccaccacccggagaaaagaaacctaaacctgagaagagagagaagagagaccctggcgttatcacatatgatctgcccactcctcctggcgagaagaaagacgttagtgggcctatgcccgactcctattcgccaaggtacgtggaggcagcctggtacccctggtgggaacagcaaggcttcttcaagccagaatacgggaggcccaatgtgagtgccgctaaccctagaggcgtgttcatgatgtgcatcccgcctcctaatgtcacgggcagtctacatctgggccatgcattaactaacgcaatccaagactccctgactcgctggcataggatgcggggagaaaccacgctatggaaccccggttgcgatcatgctggaatcgccacccaagtcgtggtggagaaaaagctgtggagagaacagggcttgtcccgtcatcaattaggaagagaagcctttctgcaagaagtgtggaagtggaaggaggaaaagggagatcgtatctatcatcaacttaaaaaacttggtagcagcctggattgggaccgggcatgcttcacaatggatccgaagttgtccgcggctgtcacagaggccttcgttagactgcacgaagaagggatcatctacaggtcaactagattggtgaactggtcttgcacgctgaattctgctatctctgacattgaagtcgataagaaagagctgacaggcagaactcttctcagcgtgcccggttacaaggagaaggtggagttcggagtcttagtctcttttgcgtacaaggtgcaagggtccgattcagatgaggaggtagtggttgctaccacacggatcgagacaatgttgggcgatgtggcggtggctgtacaccccaaagatacgcgttatcaacatctcaaagggaaaaacgtcattcaccctttcctgagtaggtctcttcctatcgttttcgacgagttcgtggacatggattttggcacaggcgcagtcaaaatcacaccagcccatgaccagaatgactatgaagtggggcagcgccacggactcgaggccatttccatcatggatagtagaggggcactcatcaatgtgccacctcccttcctcggcttaccccgtttcgaggcccgtaaagctgtgttagtcgccctgaaggagagaggactgttcagaggtatcgaagacaatcctatggtcgtccctctgtgtaatagatctaaggacgttgtagagcccctgcttcggccacagtggtacgtgcgatgtggcgaaatggcgcaggcggctagtgctgctgtgacacggggtgacctacgtatcttgcctgaggcgcaccaacgcacatggcacgcttggatggataacatacgtgagtggtgtatctccagacagctatggtggggccaccgtatccccgcttacttcgtgacagttagcgaccctgctgtgccgccaggggaggatcccgatggcagatattgggtgtcgggtcgaaatgaggcggaagccagagagaaagccgctaaggaattcggcgtttctcccgacaagattagtttgcagcaggatgaggacgtcctcgatacctggttttcctccggacttttcccccttagtatccttggatggccaaaccagagtgaagacctgtcagtgttctaccccggaacactactcgagaccgggcatgacattctgttcttttgggtcgctcggatggtgatgctgggtctcaaactgacagggaggctgcccttcagagaggtctacttgcatgccattgtccgggacgcccacggtagaaagatgagtaaatcccttgggaatgtgatcgatcccctggacgtcatctatggaatctcactgcaggggctccacaaccaactgttgaactcaaatctggacccgtctgaggtcgagaaagctaaggagggccagaaggcagatttcccggctggcattccagagtgtggcacggatgccctacgctttggcctctgcgcttatatgtcacagggcagagatatcaatctggatgtgaatagaatactcgggtacaggcacttttgtaacaaactctggaatgccaccaaatttgcactgcggggactcggcaaggggttcgtcccaagccctacaagccagcccggaggtcacgagtcattggtggatagatggatcaggtcgcggttgaccgaggcagttaggctgtccaaccagggttttcaggcctacgatttccccgctgtcacaaccgcacagtattctttttggttatacgagttgtgcgacgtgtacctcgagtgcttgaaacccgtgctcaacggagtggaccaggtagcagcagagtgcgcaaggcagaccttgtatacatgtctggatgtgggtcttaggcttctgtcgccttttatgccctttgtgaccgaggaactgttccagcggctccctcgccgtatgccacaggcgcctccaagcctgtgcgtgacgccctatccagaacctagcgagtgctcttggaaagatcctgaggctgaggctgccttggaactcgctctatccattacccgggcagttagatcacttcgggctgattacaatctgacccgaatacgcccagattgctttttagaggtcgccgatgaggctacaggagctttagcttccgcagtaagtggctatgtgcaggccttggctagtgccggtgttgtggccgtgctggctctgggggctcccgcaccacagggatgcgcagtggcattggcctctgatcggtgctctatccacctgcagctgcagggcttggtagatccggcacgcgagttggggaaactgcaggctaaaagagtggaagctcaacgccaggcccagaggttgcgcgaaagacgcgctgccagcggttatcccgtgaaagtccctctggaagtacaagaggccgacgaagctaagctgcaacaaaccgaagcggaactccgcaaggtagatgaagccattgctctgtttcagaagatgctctag

SEQ ID NO: 246523 - DNA, 525 bp, synthetic construct
  misc_feature 1..525: note = Description of Artificial Sequence: Synthetic coding sequence
  source 1..525: mol_type = other DNA
atgagtacactttacgtgtcacctcaccccgatgcttttccatccctgcgtgcactcatcgccgcaaggtacggtgaagcgggagagggcccaggctggggtggagcccatccaaggatctgtctccaacctcctcccactagccgcacacccttcccgcctcccagattaccggctctggagcaaggtcctggcggtctgtgggtttggggcgcaacagcggtggcacaactgctgtggcctgcaggtttgggaggtccaggcggttctcgagcagccgttctggtacaacagtgggtaagctacgccgacactgaactaatacctgctgcttgtggagccacactgcccgctttaggattacgcagcagcgcacaagatccccaggccgtgttgggggcactcggacgtgctctatcccccctggaggaatggttgagactgcacacatatctggcaggcgaggccccaacattggcagacctggcggctgtgacagcccttctcctcccattccgctattag

SEQ ID NO: 246524 - DNA, 867 bp, synthetic construct
  misc_feature 1..867: note = Description of Artificial Sequence: Synthetic coding sequence
  source 1..867: mol_type = other DNA
tgaaaggagaggggactttttaggggaatcgaggacaaccctatggtggtgccactgtgcaatcgatcgaaggacgtggtcgaacccctcctccgtcctcagtgggagtggtgcatcagtaggcagttgtggtgggggcacaggattccagcctacttcgtcacagtgtctgacccggcagttccaccaggggaggatccagacggccgttactgggtctccggacggaacgaagccgaggcaagggagaaagctgccaaagagtttggtgtgagccctgacaaaatttctcttcagcaggacgaggatgttctggacacctggttctcctctgggcttttccccttgagcattctcggctggcctaatcagtccgaggacctcagcgtgttttatccaggtactctgctcgaaactggacacgatatactctttttctgggtggcgcgtatggtgatgctagggttaaagcttaccggaaggcttcctttccgcgaagtataccttcacgcaattgtgagagatgcccatggcaggaaaatgtccaaatccctggggaacgtcatagaccctctggacgtgatttacggcatctccctgcaaggcctgcacaatcagctgctgaattcaaacctcgatcctagcgaagttgaaaaagctaaggagggacagaaggctgattttcctgccggaatccccgaatgcggtaccgatgccctacgctttgggctgtgcgcttacatgagccaggggcgtgacataaacctagatgtgaacaggattttgggctacagacacttctgtaataagttatggaacgccactaaattcgccctgcgcggtctaggaaaagggtttgttccctag

SEQ ID NO: 246525 - DNA, 525 bp, synthetic construct
  misc_feature 1..525: note = Description of Artificial Sequence: Synthetic coding sequence
  source 1..525: mol_type = other DNA
atgagtaccctgtatgtttccccccatccagatgcgttcccgtctctgcgagctcttatcgcagcacgttatggagaggcaggagaaggaccgggatggggcggagctcatcctcgcatctgtttgcaaccccctcctactagccgcacgcctttcccgccacccaggcttcccgctctggagcaggggcctgggggactttgggtctggggagccacagctgttgctcagctgctgtggcccgcagggctgggtgggccaggcggatcaagggcagcagtgttggtgcagcagtgggtctcctatgcggataccgagttaattcccgcagcttgtggcgctaccttacccgcattaggcctgcgctctagcgcacaggaccctcaagccgtcctcggcgcactggggagagctctgagcccactggaggaatggctgcgtctgcacacatacctggccggagaggcacccaccctcgctgacctggcagcggtgacagctttactgctaccttttcgctattag

SEQ ID NO: 246526 - DNA, 867 bp, synthetic construct
  misc_feature 1..867: note = Description of Artificial Sequence: Synthetic coding sequence
  source 1..867: mol_type = other DNA
tgaaaggaaagggggctgtttaggggtatagaagataaccccatggtagtgcctctttgcaaccgaagcaaagatgttgtggagcctctgctgcggccacagtgggagtggtgtataagccgccagctctggtgggggcatcgcatcccagcctacttcgtaactgtttccgatcctgccgtgccacctggagaagaccctgatggacggtactgggtgtccggaagaaatgaggctgaggcacgggagaaagccgcaaaagagtttggagtgtcacccgataagattagtctgcaacaggatgaggatgtgttagacacttggttttctagcgggctgtttccgctctctattttgggctggcctaatcagtctgaagacctgtcagtgttctatccgggaaccctcctcgaaacgggccatgacattttgtttttttgggtggctcggatggtgatgctggggctcaaattgaccgggaggctgcctttcagggaggtttaccttcatgccattgttcgcgacgcccatggtcgaaaaatgagtaaatccctgggcaacgtgattgaccccctcgatgtgatctacggcattagcctgcagggattgcacaaccagttgctcaattccaacctcgatcctagcgaggttgaaaaggccaaagaaggacaaaaagctgattttcccgcaggaatacccgaatgcggaaccgatgcactccgctttggactgtgcgcatatatgtcccaggggagggacattaacttagacgtcaacaggattctgggctatcgccatttctgcaacaaattatggaacgccactaaatttgccctgcgtgggctcgggaaaggctttgtgccatag

SEQ ID NO: 246527 - DNA, 867 bp, synthetic construct
  misc_feature 1..867: note = Description of Artificial Sequence: Synthetic coding sequence
  source 1..867: mol_type = other DNA
tgaaaggaacgagggttattccggggaattgaagacaatcccatggtggtccctctctgtaataggtcaaaggatgtggtggagccgttgctgagaccccaatgggaatggtgtattagccgacagctgtggtggggccacaggataccggcttacttcgtgaccgtcagcgaccccgcagtgcccccaggtgaggatccggatgggagatattgggtgtcagggagaaacgaagctgaagctcgggaaaaagctgccaaggaattcggggtgtcccctgataaaatcagcctacagcaggacgaggacgtcctggacacctggttctcttcgggtctcttcccactgtctattttgggttggccaaaccagtcagaggatctaagtgtcttttaccctggtactctcttggaaacaggacatgacattctgtttttctgggtggctagaatggtgatgctaggcttaaagctgacaggcagactacctttcagagaggtctatctccacgcaatcgtgagagatgcccatggtcggaagatgagtaaatctttggggaatgtgatagaccccttggatgtgatatatggcatctctttacaggggctacacaatcagctgttaaactctaatttagaccccagcgaagtcgagaaagcgaaggaaggacagaaagccgattttcccgctgggatcccagagtgtggcaccgacgcactgaggtttggactctgcgcgtacatgtcacaaggcagagacattaacctggatgtgaataggatccttgggtatagacatttctgcaacaagttatggaatgcaacaaagtttgcacttaggggtttaggtaaaggctttgtcccttag

SEQ ID NO: 246528 - DNA, 3795 bp, synthetic construct
  misc_feature 1..3795: note = Description of Artificial Sequence: Synthetic coding sequence
  source 1..3795: mol_type = other DNA
atgtcgacgctgtacgtttcaccccatccggatgcattcccatccctcagggccctgattgccgctagatatggcgaggccggtgaaggtccaggctggggcggagctcatcctcgcatatgcttgcagcctcctccaacatcacgaacaagttttccccctcctcggttgccagcgctcgaacagggtcctggcggactttgggtgtggggagccacagccgtggcacagcttctttggcctgccggattgggaggccctgggggaagccgcgctgctgtcctggttcaacagtgggtcagttatgcagacactgagctcataccagctgcttgcggcgctactctacctgccctggggctgcgcagcagtgctcaggacccccaagcagttttgggcgcacttggacgggcactgtctcccctggaagagtggctcaggctccacacgtatctcgcaggtgaagcccctacactagctgatctcgccgctgtgaccgccttattattgccttttcggtacgtgcttgatccgccagccaggaggatatggaataatgtgactagatggttcgtgacatgtgttagacagccagagtttcgagcggtgctgggcgaagtcgtcctttactctggcgctcgaccgctctctcatcagccaggacctgaggcccctgcgctgcccaagaccgctgcgcaactcaagaaggaagctaaaaagcgggagaagctcgaaaaattccagcaaaaacaaaaaatccagcagcagcagccaccacccggtgagaagaagcctaagccggagaagagggagaagcgggacccaggagttatcacctacgacctgcctacccctcccggagagaaaaaggacgtgtcagggccaatgcccgactcttacagccccaggtacgtggaagcagcttggtacccttggtgggaacagcagggcttctttaagcctgaatatggacggcctaacgtgagtgcagccaacccccgtggcgtgttcatgatgtgtatccctccacctaacgtgacaggcagcctgcatctcggtcacgctctgactaatgctattcaggattccctgaccaggtggcaccggatgcgaggcgaaacaacgctttggaaccccggttgcgatcacgccggtattgcaactcaggtggtagtggaaaaaaaactctggcgtgagcagggactaagcaggcaccagctaggcagagaagcctttcttcaggaggtttggaagtggaaagaggaaaaaggagatcggatttaccatcagctcaagaagcttgggagtagcttggattgggaccgtgcctgctttactatggacccgaaactgtcggctgccgttacggaagccttcgtgaggctacacgaggaaggcataatctatagatccaccaggctggtgaactggtcttgcacactcaacagcgccataagcgatattgaagtagacaagaaagagttgacaggcaggaccctgctgtcagttcctggttacaaggagaaagtagaattcggagtactcgtgtcttttgcttacaaggtgcagggatcagacagcgatgaagaagtcgtcgttgccacaacacgcatagagacaatgctgggcgacgtcgcagtagcagtgcaccccaaagacacgcgataccagcacctgaaaggaaagaacgttattcatccctttctttcccggtccttgcccatcgtgttcgatgagttcgtcgacatggatttcggaactggtgcagtgaaaataacacccgctcacgaccagaacgattacgaggtaggtcagagacacggcttagaagccattagcattatggacagtaggggcgctctgattaatgtgccgcctccgttcctcggcctacctcgcttcgaagcgcgtaaggccgtgcttgtggctttaaaggagagaggcctctttcggggtatcgaagacaaccccatggtcgtccctctgtgcaacaggagcaaggatgtggtggaacctttactgcggcctcagtggtacgtccgttgcggagagatggcacaggccgcaagtgcagccgtgactaggggcgatctgaggatcctccccgaggcgcaccagcgcacatggcacgcctggatggataacatcagggagtggtgtataagtcggcagctgtggtgggggcacagaatcccggcatattttgtcacggtgtccgaccctgccgtgccccctggcgaggaccctgacgggaggtattgggttagtggacggaatgaagcagaggcccgagaaaaggctgcaaaagagttcggcgtgtccccggataagatatcactgcagcaggatgaagacgtgctggatacgtggttttccagtggccttttccccctatctatactgggctggcctaatcagtcagaggatttgagcgtattttatcccggaaccttactggaaactggccacgacatactgtttttctgggtcgcccgaatggtcatgcttggccttaaactgaccggtagattaccgttccgcgaggtctaccttcacgccatcgtccgggatgctcacggaaggaaaatgagcaaatccctgggcaacgtcattgatcctctcgacgttatatatggcatatctttgcagggactccataatcagctgctgaattccaacctcgatccaagtgaagtcgagaaggccaaagaagggcagaaggcagattttcccgctgggattccagaatgtggtactgacgctctaagattcggcctttgcgcgtacatgtcccagggcagggatattaatctggatgtgaatcgcatccttggttaccgccacttttgcaataaactgtggaatgctaccaagttcgctctacgtgggctggggaaaggcttcgttccctctcccacttcacaaccgggtgggcacgagtccttagtggatcgatggattcggtccaggttgacggaggctgtccgactgtctaatcaggggttccaggcctacgacttcccagccgttaccaccgctcaatattccttttggctttacgaactgtgtgatgtgtacctcgagtgtctgaagccagtgctcaacggagtagatcaggtggcagccgaatgcgccaggcagaccttatatacttgcctcgatgttggactcaggctgctgtcacccttcatgccgtttgttacagaggagttgtttcaacgcctgccccgacggatgccccaggctcctccctccctgtgcgttacaccatatcccgagccatccgagtgctcttggaaggacccagaagcagaggccgcactggagctggcattgagtattaccagggctgtgcgcagtctgcgggctgactataacttaactaggattaggcccgattgctttcttgaagttgctgacgaggctaccggagcactggcttccgccgtctccggctatgtacaggccctagcgagtgcaggtgttgtggccgtgttagccctgggagcacccgctccgcaggggtgtgccgtggctcttgcaagcgaccgctgttctatacatttgcagcttcagggtctggtcgatcccgcaagagaactgggcaaactgcaagccaaaagagtggaggcccagagacaggcccagagattgagggaaagacgggctgctagcggatatcctgtgaaggtgccattggaggtacaggaggccgacgaggccaagctacagcagacagaagcggagctgaggaaagtggacgaagctatcgccttgttccagaagatgctgtag

SEQ ID NO: 246529 - DNA, 525 bp, synthetic construct
  misc_feature 1..525: note = Description of Artificial Sequence: Synthetic coding sequence
  source 1..525: mol_type = other DNA
atgagcactctgtatgtctcaccccatcctgacgctttcccaagtctgagggccctgattgctgcgcgttacggagaggccggtgagggaccaggttggggaggcgctcacccacggatctgcttgcagccgcctcctacgtcccggactccttttcctccccctagactccctgcattagaacaggggccagggggactctgggtgtggggtgcaacagcagtggcccagctgctctggccagccggactgggcggaccaggagggagccgagcagccgttttggtccagcagtgggtgagctacgcagataccgaactgatcccggctgcctgcggtgctactttgccggctctgggtctgagaagctcagctcaggatccacaggccgttttgggcgcactcggcagggctttgagcccacttgaagagtggcttcgcctgcatacttatctggctggcgaagctcccacactggccgacttggctgctgtgacagccctgctgttacccttcagatactag

SEQ ID NO: 246530 - DNA, 894 bp, synthetic construct
  misc_feature 1..894: note = Description of Artificial Sequence: Synthetic coding sequence
  source 1..894: mol_type = other DNA
atgccggactcttatagcccacgctacgtggaggctgcttggtatccctggtgggaacaacagggattcttcaaacccgaatatgggcgtccgaacgtctctgctgccaatccgagaggtgttttcatgatgtgtatcccgccacccaacgtcacaggtagtctgcacctcggtcatgcacttaccaacgcaatacaggattcgctgactcggtggcatcggatgaggggggaaaccaccttgtggaaccccggatgcgaccacgctggaatcgccacacaagtggttgtagaaaaaaaattgtggagggagcaaggcctgagcagacatcagctgggacgcgaagcattcctgcaggaggtttggaaatggaaggaagaaaagggggacaggatttaccaccagctgaagaagttgggctctagtttggattgggatcgtgcatgcttcactatggatcccaagctttcagccgcagtcaccgaggccttcgtccgtttgcatgaagagggcatcatctatcgctctaccaggctggtgaactggtcatgtaccctgaattccgccataagcgacatagaggtcgataagaaagagcttacagggaggactttgctgtctgtgcccggatacaaggaaaaggtggaatttggggtgctggtgtcttttgcatataaggtgcaaggtagcgactctgacgaggaggtggtcgttgccacgacccggatcgaaaccatgttaggcgacgtcgccgtcgctgttcaccccaaggatactagataccaacatctcaaggggaagaatgtgattcaccccttcctgtcaaggtccctgcccatcgtgttcgacgaattcgtcgacatggacttcggaactggacccgcacaggtatag

SEQ ID NO: 246531 - DNA, 867 bp, synthetic construct
  misc_feature 1..867: note = Description of Artificial Sequence: Synthetic coding sequence
  source 1..867: mol_type = other DNA
tagaaggaaagagggttgttcaggggcattgaggataacccgatggtcgttcccctgtgtaatcggagcaaggacgtggttgagccactcctgcgccctcagtgggaatggtgcatatctagacagctgtggtggggccaccgcatacccgcttattttgtgactgtgtctgaccctgcagtcccacctggggaagaccccgatggccgatactgggtctccgggcgaaatgaggcagaagcccgagagaaggccgcaaaagagttcggtgtgtcaccagataaaatctcattgcaacaggacgaggacgtgttggacacttggttttccagtgggctgttccctctttccatcttaggatggccaaaccagagcgaagacctgtcggtattctaccccggtacgcttttggagacaggccatgacattttgttcttctgggtggccagaatggtcatgctgggactgaaacttaccgggaggttgcccttccgcgaggtgtatctgcatgccattgtgcgagatgcccacgggcgtaaaatgagcaagagcctcgggaatgtaatagacccactcgacgtaatctatggcatttcattgcagggcctgcacaaccagctgcttaacagcaacttggatccttcagaagtagaaaaagctaaggagggccagaaagctgattttcccgctgggattccagagtgtggtacggacgctctgcggttcggcttgtgtgcttatatgtctcagggcagagatattaacctggatgtcaatcgcatcctcgggtacagacatttctgcaacaagttgtggaacgccacaaaatttgccctgaggggcttaggaaagggcttcgttccctag

SEQ ID NO: 246532 - DNA, 867 bp, synthetic construct
  misc_feature 1..867: note = Description of Artificial Sequence: Synthetic coding sequence
  source 1..867: mol_type = other DNA
tagaaagaaagggggctgtttcgaggaatagaggataaccccatggtggtcccactttgcaatcgcagcaaagatgtggtggaacctctgctcagaccccaatgggagtggtgcatcagtagacagctatggtgggggcacaggattcctgcctatttcgtaactgtatcagacccagctgtgcccccaggcgaggatccagatggtagatactgggtgtccggcagaaacgaggcggaagctcgggagaaggcggcaaaagagtttggcgtgagccccgacaaaatttctttgcagcaggatgaggacgtgcttgatacatggttttcttctggattattccccctcagcatcttaggatggccgaaccaatcagaagatttgagcgtgttttaccccggtacattactggagacaggccacgacattctgttcttctgggtcgccagaatggttatgctgggtctcaagcttacaggcagactcccctttagagaagtttatctgcatgctatcgtgcgcgacgcgcacggcagaaagatgtcaaagagtttaggaaacgtgatcgatccccttgacgtgatctacggcatcagtcttcagggccttcacaatcagctcctcaacagcaatctggacccatcggaagtagagaaggccaaggaaggacagaaagccgactttcccgctggcataccggaatgtggaaccgatgccctgcgattcggcctatgtgcgtacatgtcacaaggacgtgatataaacctggatgtgaacagaatccttgggtatcggcacttctgtaataaactctggaacgcaaccaaatttgccctccgcggacttggtaaagggtttgtgccttag

SEQ ID NO: 246533 - DNA, 288 bp, synthetic construct
  misc_feature 1..288: note = Description of Artificial Sequence: Synthetic coding sequence
  source 1..288: mol_type = other DNA
tagcccgcaggcctcgggggtcccggaggcagtcgcgcagccgtactggtacagcagtgggtctcttatgcggataccgagttgataccagccgcatgcggagcaactctgcctgctctaggcctgcggtctagcgcgcaggatccccaggcggtgttgggggctcttggacgtgcactttctcccctggaggagtggctgcgtcttcacacgtatctggcaggggaggcaccaaccttggccgaccttgcagccgtgaccgccttgctcctaccctttcgttattag

SEQ ID NO: 246534 - DNA, 3795 bp, synthetic construct
  misc_feature 1..3795: note = Description of Artificial Sequence: Synthetic coding sequence
  source 1..3795: mol_type = other DNA
atgtccacactctatgtgtccccccaccccgacgcctttcccagcctcagggccctgatagcggctaggtacggagaggccggagagggtccaggctggggtggcgcacatcctaggatctgcttgcaacctccacccacctcacgcaccccgtttcctcctcctcgcttacccgcattggaacagggcccaggtgggctctgggtatggggcgctaccgctgtggcccagctgctatggcctgccggtttagggggtcctgggggatcacgtgcagccgtgctagtgcagcaatgggtgagttatgcagacactgagttaatccccgcagcctgtggtgcgacccttcccgcactgggtcttcggagtagtgctcaggatccacaggccgtattgggggcattggggagagcactgtctccgttggaagaatggctgcggcttcatacctaccttgctggtgaagcccctaccctcgccgatcttgccgcagtgacagcgctcttgctccccttcagatacgtgcttgatcctccagccaggagaatatggaataacgtgactcggtggtttgtgacttgcgttaggcagcctgagttccgcgctgtgcttggagaggttgttctgtattccggtgcccgacctctcagccatcagcccggacccgaggccccagctctgcccaagaccgcagcccaattgaaaaaggaggctaagaagcgggagaaactggaaaagtttcagcaaaagcagaaaatacaacagcagcagcctccacctggagagaaaaaaccgaagcctgaaaagcgggagaagagagacccgggtgtcattacttatgacctccccacacctcctggggaaaagaaagacgtgagcggcccaatgcctgactcttattcccccaggtacgtggaagctgcttggtacccatggtgggagcagcagggattcttcaagcccgagtatggacgcccaaacgtgagcgctgccaatcccagaggagtcttcatgatgtgtataccacccccaaatgtgacgggctctctgcatctgggacacgctctgaccaatgccattcaggactccctgactcgctggcaccgcatgcggggagagactacgctgtggaatcccggatgtgatcatgcagggattgcaactcaggtggtggtggagaagaagttatggcgggaacaagggctttcccgtcatcagctgggacgggaggcatttcttcaggaggtttggaagtggaaggaagagaagggcgaccggatctaccatcagctgaaaaagctgggctcatcgctagactgggaccgtgcatgtttcaccatggatccaaaacttagtgcagctgtgaccgaggcctttgtacgtctgcacgaggaaggaatcatttaccgcagcacccgtctggttaactggagctgtaccttgaactcagccatcagcgacatagaggtagacaagaaagagctcaccggtcggaccttactgtccgtgccaggatataaagaaaaagttgagttcggcgtgctggtgagttttgcgtacaaggttcaggggtctgacagcgacgaagaagtggttgttgccaccacccgcatcgaaactatgttgggtgatgtggccgttgcagtccatcctaaggacacaagatatcagcacctgaagggtaaaaacgtcatacatcccttcctgtccaggagcctgcctattgtatttgatgaatttgtcgacatggattttggtaccggggcagtcaagattacccctgcccatgatcagaatgactatgaggtaggccagaggcatggacttgaggcaattagcattatggatagtaggggagcgctcatcaacgttcctccacctttcttaggcctgccccgattcgaagcaagaaaagcagtcctggttgccctgaaggaaaggggactgtttcgtgggattgaagacaacccaatggtcgtgcccctgtgcaatagaagcaaagatgtagtggaaccgttgctccggccacagtggtatgtgaggtgtggggaaatggcccaggctgcttctgctgccgtgacaagaggcgacctaagaattttgccagaggctcaccagaggacatggcatgcttggatggataatattcgggaatggtgcatctcacgccagctctggtgggggcaccgcatcccagcatacttcgtcactgttagcgatcctgctgtgccccctggcgaggaccctgatggccgttactgggtaagcggccgaaatgaagcagaggcacgagagaaggcagccaaggagttcggcgtgtctccggacaagatttcactgcagcaggacgaggacgtcctggatacctggtttagttctggcctttttcccctgagtatcctgggatggccaaatcagtctgaggatctttctgttttttacccaggaacactcctagagaccggtcatgacatactgttcttctgggtggccagaatggtcatgctgggcctgaaactgacagggaggctgccgtttagggaggtttacctgcacgccatcgtgcgtgacgctcatggacggaagatgtccaaatccctgggaaacgtcattgatccactggacgtgatttacggtatctccctgcaaggcctgcataatcagctgttgaactcgaacttggatccttcggaggtagagaaggccaaggagggacaaaaggctgacttccccgcagggatacctgagtgtgggactgacgccctgagatttggtctgtgcgcctatatgtctcagggcagggacattaacctcgacgtgaacaggattcttggctatcgtcacttttgtaacaaactctggaacgcgacaaagtttgctctccggggactcggcaagggattcgtcccttccccaactagccagccgggaggtcatgaaagcctggtcgatcggtggatccgtagccgcctgacagaggccgtgaggttgagcaaccagggctttcaggcgtacgacttccctgccgtgactactgcccagtactctttttggctttacgaattgtgtgatgtctatttagaatgcctgaagccagtactgaacggggttgaccaggttgcagcagagtgtgccaggcagactctatacacctgcttagacgtcggactgcggcttttatcgccattcatgcctttcgttacagaagagctgtttcagagattacccaggaggatgcctcaagctcctccatccctgtgtgtgactccttacccggagcccagtgagtgtagctggaaagaccctgaagcggaggccgctctggaattggctctcagcataacgagggcagtgcgtagtcttagggccgattataacctgacgcgcatccgcccagactgcttcctggaggttgcagatgaagccactggggcattggccagcgcagtgagcggctatgtgcaggctctggcatcggcaggggtcgtggccgtgctggcgctgggagcccctgccccacaagggtgcgcagtggcccttgccagtgaccgatgctctattcatctgcaactccagggattagttgatcccgcaagggagttgggcaaactccaggccaagagagtggaagcccaaaggcaggctcaacgactgcgggaaagaagagccgcttctgggtaccccgtgaaggtgcccctcgaggtgcaagaggctgacgaagccaaactgcagcagaccgaggcagagctcagaaaagtcgacgaagctatcgcccttttccaaaagatgctttag

SEQ ID NO: 246535 - DNA, 2031 bp, synthetic construct
  misc_feature 1..2031: note = Description of Artificial Sequence: Synthetic coding sequence
  source 1..2031: mol_type = other DNA
atgtcaacactttatgtgtccccacacccagacgctttccctagcctgcgtgctttgattgcggctagatacggggaagcgggagaagggccaggctgggggggagcccatccacgaatctgtaggctgcctagattcgaggccaggaaggccgtgctcgtggcactcaaagaaagggggctgttccggggaatcgaggataatcctatggtcgtgcctctatgtaataggagtaaggacgtggtggaacccttgttacgcccacaatggtatgtgcgttgtggcgagatggcccaggctgcctccgccgcagtgacacggggtgatctgaggattctgccagaggcccaccaaaggacttggcacgcgtggatggataacatacgggagtggtgcatctcgcggcagctgtggtggggccatcggattcctgcgtatttcgtgactgtgagcgatcctgcagtgcctccaggggaggaccccgatggaaggtactgggtatctggaagaaacgaggccgaggcgcgagaaaaggcagctaaagagttcggcgtgtccccagataagatttcactgcaacaggacgaagacgtgctggacacctggttcagctccggcctgtttcctctgagcattctggggtggccaaatcagtccgaggatttgtccgtattctaccctggtaccctcctggagactgggcacgacatcctgttcttctgggttgcccgaatggttatgttggggctgaagttgactggcagactgccattccgggaggtttacctgcatgccatcgtgcgagatgcacatggacgaaagatgagcaaatcgctcgggaatgtcattgatcccctggacgtgatatatgggatctccctccagggcctgcataatcagctcctcaactctaacctggatccatcagaggtggagaaagcgaaggagggccagaaggccgatttcccagcagggattccagagtgcggcacagatgctctcaggtttggcctctgtgcatacatgtcgcaaggacgcgatattaatcttgatgtgaacaggatccttgggtaccgacacttttgcaacaagttgtggaacgccacgaagtttgccctgagaggtctgggtaaaggcttcgtgcccagcccaactagtcaacctgggggtcacgagtcactggtcgatcgatggatccgctcacgactcacggaggccgtgcgcctatctaaccagggcttccaggcatatgatttccctgcagtcaccacagctcaatatagcttttggctttacgagttgtgcgacgtctacctggaatgcctgaagccagtgctgaacggcgtggaccaggtcgcagcagagtgcgctagacagacactgtacacctgcctggatgtggggcttcgcctactgtcaccctttatgcccttcgtcaccgaagaattattccaacgactgcctagacgtatgcctcaggcgcctccctccttatgcgtcacgccctatcctgagcctagcgagtgctcttggaaggatcccgaggccgaggcagcacttgaattggcgctgtctataactagggccgtgcgaagtctacgggctgactataacctgacccgcatcagacctgattgtttcctggaagtggctgacgaggccaccggagcactggcatcagccgtttccgggtacgtgcaagccctggcttcagctggagtcgtcgccgtgcttgcactgggagctcccgcacctcaggggtgtgcagtggccctggcatcagataggtgcagcatacatctgcagctgcagggcctcgtggatccagctcgagaactgggcaagctgcaggccaaaagggtggaggcacagagacaagctcagcgtttgcgggaacgcagggctgcatcgggctacccagtcaaagttcccctggaagtgcaggaagctgatgaagccaagctgcagcagacggaggcagagctgcggaaagtcgacgaagctatcgctctgttccaaaagatgctgtag

SEQ ID NO: 246536 - DNA, 2031 bp, synthetic construct
  misc_feature 1..2031: note = Description of Artificial Sequence: Synthetic coding sequence
  source 1..2031: mol_type = other DNA
atgagcacattatacgtttccccgcaccccgacgcgttcccaagtctgcgagcactgatcgccgctaggtatggcgaagccggagagggacccggttggggcggagcccacccgaggatatgccgccttccacggtttgaggctaggaaggctgtcctcgtcgcgctgaaggaacgaggcttatttcggggtattgaagataaccccatggtcgtccccctgtgcaatagaagcaaggatgtggtcgagcccttgttgcggccacagtggtacgtcaggtgtggcgagatggctcaggcagctagcgcagcagtcacccgcggtgatcttcgcatcttaccagaggcccaccagaggacatggcatgcctggatggataatatccgggaatggtgcatttctcggcagctgtggtggggccacaggatccccgcatactttgtcacggtatcagacccggctgtgccacctggggaagatccagatggtagatactgggtcagcggccgaaatgaagctgaagcaagagaaaaggcagccaaggagttcggggtatctccagacaaaatcagtctacagcaggacgaagacgtgctggatacatggttctccagcggtttgtttccgctctcgatcttaggctggccaaaccagagcgaagatctgtccgttttctaccccggaacccttctagagaccggacacgacattctcttcttctgggtcgcacgcatggttatgcttggcctgaagctgaccggtcgattaccattccgtgaagtatacctgcacgctattgtccgggacgcacacggacgaaaaatgtccaaatccctgggtaacgtgattgatcctcttgacgtaatttacggtatttcactgcagggactgcacaatcaactccttaattctaacctggaccccagtgaggttgagaaagcaaaggaaggccagaaagcggactttcctgccggtatacccgaatgtggcaccgacgctctcagattcggcttgtgtgcatacatgtctcaaggtagagatattaatctggatgtgaatcgaattcttggttaccggcacttttgtaataaactctggaacgccactaaattcgcacttaggggactgggcaaaggctttgtccccagtcctacttcacaaccagggggacatgagagcctggtagatagatggatccgctccaggctaacggaagctgtgcgacttagcaatcagggattccaggcttacgattttccagccgtcactacagcccaatactctttctggctgtatgagttatgcgacgtgtatctcgagtgcttaaaaccagttctgaatggggtggatcaagtcgcagccgagtgcgccagacagacattatatacctgcttggatgtggggctccgattgctgtccccgttcatgccgttcgtaactgaggagctcttccagagactgcctaggagaatgccgcaagcccctccttccctgtgtgttaccccatacccagaaccatccgagtgctcatggaaagatcccgaggcggaggccgcactggagctagccctcagcatcacaagagcagtgaggtccctccgagcggactacaacttgacccgaattcggcctgactgctttctggaagttgctgacgaagctacgggtgctctggcctcagcagtgagcggttacgtgcaggccttggctagcgccggagttgtcgcagttctggctctgggtgccccagctccccaggggtgcgcagtggcgctggccagcgatcgttgcagtattcacctgcagctgcaaggcttagtggacccagcccgtgagctcgggaaacttcaggccaagcgggtggaggcgcaacgccaagcccaaagacttcgggaacgaagggccgctagtgggtatcccgtgaaggtccccctggaggtccaggaggccgacgaggctaagctccaacaaaccgaagccgagctgcggaaagtggacgaggccattgctctctttcagaaaatgttgtag

SEQ ID NO: 246537 - DNA, 894 bp, synthetic construct
  misc_feature 1..894: note = Description of Artificial Sequence: Synthetic coding sequence
  source 1..894: mol_type = other DNA
atgccagattcatattccccacgctatgtggaggccgcttggtacccctggtgggaacagcagggcttttttaaacctgagtacggtcgacccaatgtttctgccgcaaatccacgcggtgtatttatgatgtgcattccaccaccaaacgttactggcagtctgcatctaggccacgcgctgactaacgccattcaggatagcctcacccggtggcaccgcatgcgtggcgagactactttgtggaacccaggttgcgaccatgcgggtatagcgacacaggtagtggtggaaaaaaagttatggcgcgagcagggattaagcagacaccaacttggtagggaggcctttctacaggaggtgtggaaatggaaggaggagaagggtgaccgaatctatcatcaattaaaaaaacttggtagcagcctggactgggaccgagcctgcttcacaatggatcctaaactgagtgctgcagtcacagaagcattcgttaggctgcacgaggagggcattatttaccgttcaactcgcttggtcaactggtcctgcactctgaattcagccatttctgatatagaggtcgataaaaaggagctgaccggtcgtactctgctctccgtgcctggatacaaagagaaggttgagttcggagtgctggtcagtttcgcgtacaaagtccaggggagtgactccgacgaggaagttgttgtggctaccacgcggatcgagacaatgctgggagatgtggcggttgctgttcatcctaaagacactcgataccagcatctgaaaggcaagaatgtgattcaccccttcctgtcaagatcactgccaatagtgtttgatgaattcgtggacatggacttcggcacggggcctgcccaggtgtag

SEQ ID NO: 246538 - DNA, 894 bp, synthetic construct
  misc_feature 1..894: note = Description of Artificial Sequence: Synthetic coding sequence
  source 1..894: mol_type = other DNA
atgccagactcatacagtccaagatatgtggaggcagcctggtacccatggtgggagcagcaaggctttttcaaacctgagtacggcagacctaacgtctccgcggctaatcctaggggtgtgttcatgatgtgcatacctcccccaaatgtcaccgggagcctacatctaggtcacgccctgaccaacgctattcaagattctctaactagatggcaccgcatgcggggtgagaccaccttgtggaatccgggatgcgaccacgccggtatcgccacccaagtagttgtagagaagaagttgtggcgggagcagggactctctagacaccagttaggccgtgaggcctttctccaggaagtttggaagtggaaggaggaaaaaggagaccggatttaccatcaactgaaaaaattgggatctagcttggattgggaccgcgcttgcttcacaatggatcccaagctgtcggccgctgtgacagaagccttcgtccgcttacacgaagagggtattatttaccgttctacccgccttgtcaattggagttgcacccttaattcagcaattagcgacatcgaagtcgacaagaaagaactgaccggaaggacactgctttccgtgcccggatacaaagagaaggtggagttcggtgttcttgtgtcattcgcttacaaggttcaagggagcgactctgacgaggaagtagtggtagctaccacgcgcatcgagaccatgctcggcgatgttgcagtagcggtgcaccctaaagatactcgatatcagcaccttaagggaaagaacgttattcaccccttcctgtcccggagccttcccatcgtttttgatgaatttgttgacatggacttcggaacaggccctgcacaggtgtag

SEQ ID NO: 246539 - DNA, 894 bp, synthetic construct
  misc_feature 1..894: note = Description of Artificial Sequence: Synthetic coding sequence
  source 1..894: mol_type = other DNA
atgccggattcatatagcccgcgatacgtcgaagctgcctggtacccatggtgggagcaacagggttttttcaagccagaatacgggagacccaacgtttcggctgcgaatcccaggggtgtctttatgatgtgtatccccccaccaaacgtcacaggcagcctgcatttgggtcatgcactgacaaatgccatccaggacagcctgactcgttggcatcgcatgaggggggagaccaccctgtggaaccctggctgcgaccacgcaggaatagctacccaggtggtggtggagaagaagttgtggcgcgagcagggattgtccagacaccagctgggcagggaagcattcttacaggaggtctggaagtggaaggaggagaagggagatcggatctatcatcagctgaagaagctcggctcttccctggattgggacagagcatgtttcaccatggacccaaagctctccgccgcagtgaccgaagcattcgtcaggctgcatgaagagggcatcatctaccgatcgactagactggtaaactggagctgtacccttaattctgctatttcagacatagaagtcgataaaaaggagctgaccggccgaactttgctgtcagtcccaggctacaaagagaaagtcgagttcggagtgctcgtgagctttgcatacaaagtgcagggaagcgactctgacgaggaggttgttgtggctactacaagaatcgagaccatgctcggggatgtcgcggtggcagtgcatcccaaggatactaggtaccagcatctgaagggaaagaacgttattcacccattcttatcccgctctttgccaatcgtgtttgacgagttcgtggacatggacttcgggaccggtcccgcacaggtgtag

SEQ ID NO: 246540 - DNA, 2031 bp, synthetic construct
  misc_feature 1..2031: note = Description of Artificial Sequence: Synthetic coding sequence
  source 1..2031: mol_type = other DNA
atgtccactttatatgtttcacctcatcccgatgcttttccatcccttcgcgcattgatcgccgcacggtatggcgaggcaggcgaaggtccgggttgggggggagcccacccaaggatttgcaggctacccagattcgaagcacgtaaggcagtgttagtggccctgaaagaacggggtctttttcggggaattgaagacaacccgatggtcgtacccttgtgcaacaggagcaaggatgttgttgaaccattgttaagacctcaatggtacgtgcgatgcggggagatggcacaggcagcaagcgccgctgtaacacgtggcgatctgagaattctgcccgaagcccatcaacgaacttggcacgcttggatggataacatccgggagtggtgtatcagcaggcagctatggtgggggcatagaatccccgcatattttgtgactgtgtccgatcccgctgttcctcccggagaggacccagacggtcggtactgggtgagtggaagaaacgaagcagaagctagagaaaaggccgctaaagaattcggcgtgtctccagacaaaatcagccttcaacaggatgaagatgtccttgatacgtggttctcctctgggcttttcccactgtcaattcttggatggcccaaccagagtgaagacctgtcagtcttttatcccggtacactgttagagaccggccatgacattctgttcttctgggtggcacgcatggtgatgcttggcctcaagctgaccgggcgactgccatttcgagaagtgtatctgcacgcgattgtacgagacgcccacggcagaaaaatgtccaaaagtctagggaacgtgatagatccactcgacgttatctacggtatatcacttcaaggcctgcataaccaactgttaaattccaatctcgaccctagtgaggtagagaaagccaaagaaggacaaaaggcagattttcctgcaggaatccctgaatgtggaacagacgctctccggttcggtctttgcgcctacatgagtcaggggagggatataaatctggatgtcaataggatcctgggctaccgccatttctgtaacaagctgtggaacgcaaccaagtttgctctgagaggtctcggcaaaggtttcgtaccgtcccccaccagccagccaggaggccacgagtcgcttgttgatcgatggatccgctcacgtctgacagaagccgtgaggctaagcaaccagggctttcaggcctatgatttccctgccgttacaaccgcccagtattctttttggctgtatgagctctgtgatgtgtacctcgaatgcctcaaaccggtgttgaatggcgtggaccaagtggccgcagagtgtgcccgtcaaaccctgtacacatgtcttgatgtaggtctccgtctgttaagtccctttatgccctttgtgaccgaggagctgttccagcggctgccaaggagaatgcctcaggcaccccctagcctgtgcgtcaccccgtaccctgaacccagcgaatgctcttggaaggaccccgaggcagaagccgcactggagctggctttgtccatcacccgggcagtgagaagcctacgcgctgactacaacctgacacgcatcagacccgattgtttcttggaagtggccgatgaggccacgggtgccctcgcctcagctgtatccgggtatgtccaggctctcgcctctgccggagtcgtggctgtgctggctctcggcgcaccagctccccagggttgcgctgtggccttggcaagcgaccgctgcagtatacacctacagctacaggggctcgttgaccccgcaagagagttaggtaagttgcaagccaaacgggtggaggcacaacgccaggcacagagattgagagagcggagagccgcttctgggtacccagtgaaggtgccacttgaagttcaagaggcggatgaagccaagctccaacagacagaggcagagttgcgtaaagtagatgaggcaatcgccctgttccagaagatgctgtag

SEQ ID NO: 246541 - DNA, 2031 bp, synthetic construct
  misc_feature 1..2031: note = Description of Artificial Sequence: Synthetic coding sequence
  source 1..2031: mol_type = other DNA
atgtcaactttgtacgtctccccgcaccccgatgctttcccttccttacgtgctctgatcgctgccagatatggggaggcaggagaagggccaggttggggaggggcacacccacgcatatgtcggcttccaaggtttgaggcacgtaaggccgtgctcgtggcccttaaagagcggggtctatttagaggcatagaagataatcctatggtggtccccctgtgcaaccgaagcaaagacgtcgtcgaaccacttctacggcctcagtggtatgtgagatgcggcgagatggcccaggccgcttctgccgctgtgacgcgcggagacctccgcatactgcctgaggcccaccagcggacttggcacgcttggatggataacatccgtgaatggtgcattagtcgacagctttggtgggggcataggatccctgcttatttcgtgacagtttccgatcccgctgttcccccaggtgaggatcccgacggccgatattgggtgagcggcagaaatgaggcagaggcccgagaaaaagctgccaaagaattcggcgtttctcctgacaaaatttctctgcagcaggacgaggatgtccttgacacttggttctccagcggcttatttcctctgtctatcctcggctggcccaatcaaagcgaggatctgtctgtcttctacccaggcacactgctcgagaccggacacgatattctgttcttctgggtggcccgaatggtgatgttgggactaaaattgaccggacggcttccctttcgggaagtgtacctacatgctatcgtgagagacgcccacggcaggaaaatgtccaaaagcctggggaacgtcatcgacccattggatgtcatatatggaatttctttacagggacttcacaatcagctgctcaattccaatttggatccctcggaagtcgaaaaggctaaggaggggcagaaggccgattttcccgcagggatacctgaatgtggtaccgacgccctgcgattcgggctgtgtgcttacatgtcccaaggccgtgatatcaacctagatgtaaaccgcatattaggctataggcacttctgtaataagctctggaatgccaccaaatttgctttgaggggcctgggcaagggattcgtgccttccccgactagccagcctggcggacacgagtcgctggttgacaggtggattaggagtagactgaccgaagcagtgagactgagtaaccaggggttccaggcgtatgatttccccgctgtaactactgctcagtactcattctggctctacgagctgtgtgatgtttatctggagtgtcttaagccagtcctgaatggtgttgaccaggttgccgcagagtgcgctcggcagacactctacacctgtctggacgtaggcctgcgattgctgtcacctttcatgccgttcgtaaccgaagagctgttccaaaggctgcccaggcgcatgccccaagccccaccttccctatgcgtaactccctatccagagccaagcgaatgctcctggaaggatcccgaagccgaggccgctcttgagctagcgttgtctataacaagagccgtacggagtctccgcgcagattacaaccttacaaggatcagacccgactgcttcctcgaggtagctgacgaggcaacaggcgctctcgcctcagctgtgtccggttatgtgcaggccctggccagtgccggagtggttgctgtgctggcactgggcgctcccgcaccccaaggatgtgcagtcgccctggccagtgataggtgttctattcacctgcaacttcaaggcttggtggatcctgccagagagctgggcaaactccaggccaagagagtggaagctcaacgacaagcacagcgactgcgggagcggagggctgctagcggttatccagtgaaggtgcctcttgaggtccaggaagccgacgaggcgaaactgcagcaaaccgaagccgagctgagaaaggttgacgaagctatagcactgttccagaaaatgttgtag

SEQ ID NO: 246542 - DNA, 894 bp, synthetic construct
  misc_feature 1..894: note = Description of Artificial Sequence: Synthetic coding sequence
  source 1..894: mol_type = other DNA
atgccggacagctactctccaaggtacgtcgaggctgcatggtatccatggtgggagcagcagggcttcttcaagccagaatacggtcgacccaacgtcagtgctgccaatcccagaggggtgtttatgatgtgtatccccccaccaaatgtgactggaagtttgcacctgggacatgccctcacaaacgcaattcaggactcactaactcggtggcataggatgcgtggcgagacgactttatggaatccaggatgtgaccatgccggtatcgcaacgcaagtggtggttgagaaaaagctctggcgcgagcaaggcctctctcgacaccagctggggagagaggcatttctccaagaggtgtggaaatggaaagaggagaagggagaccgaatctatcatcagctgaaaaagttggggtcgtctttggattgggaccgggcatgttttacgatggaccctaagcttagcgctgctgtcaccgaagcgtttgtgcgtttgcatgaggaagggatcatataccggtcaacccgcctggtcaactggtcttgcactcttaactcggcaatctccgacattgaggttgacaaaaaagaactgaccgggaggactctccttagcgtgcctgggtacaaggagaaggtagagtttggtgtgttagtgagtttcgcttacaaagtccaaggatccgactccgacgaggaagtggtggtggctactacacgcattgagacaatgctaggcgatgtcgccgtggcggtgcatcctaaagacacacgctaccagcatttgaagggcaagaatgtgatccacccatttctgtctcgctccctcccgattgtattcgatgagttcgtcgatatggatttcggtacagggcctgcccaggtatag

SEQ ID NO: 246543 - DNA, 3192 bp, synthetic construct
  misc_feature 1..3192: note = Description of Artificial Sequence: Synthetic coding sequence
  source 1..3192: mol_type = other DNA
atgccacaccttcccctcgcgtcctttcggccaccgttttggggcttgagacatagcagaggcctaccacgatttcactctgtgtctacccagtctgaaccgcacgggtctcctatctctaggcggaatagggaagccaaacagaagaggttgagggagaaacaagccacactggaggctgaaatcgctggcgagtccaaatcccctgctgaatcaatcaaagcttggaggccaaaggaactagttctttacgagatccctacgaagccaggggaaaaaaaagacgtgtcaggcccactgccaccggcttattccccgcgttatgttgaggccgcttggtatccttggtgggtgagagaaggcttttttaaaccagaataccaggctagactgccgcaggccacgggagagaccttctctatgtgtatcccgcctcccaatgtgaccgggtccctgcatatagggcatgccctgacagtggctattcaagatgctctggtccgctggcaccggatgagaggcgaccaggtgctctgggtccccggttctgatcacgccggtatcgccacacaggcggtggtcgaaaagcagctctggaaggaacggggagtcaggaggcacgagctgtcacgggaggctttcttaagggaggtctggcagtggaaagaagctaagggaggcgagatttgtgaacaattgagagcccttggcgcatcacttgactgggaccgcgaatgttttacaatggatgtagggtcgagtgttgcggttaccgaagccttcgtccggctgtataaagccggattgttgtatcggaatcaccagctcgtaaattggtcgtgtgccttgcggtcagccattagcgacattgaggtggaaaaccgacccctacctggccatacgcagctccgactgcccggttgtccgacaccagtctcctttgggttgctattttcagtggcttttccagttgatggggaaccagatgccgaagtggtcgtaggtacgacaagaccagagacactgccaggggacgtggcagtcgcagttcaccccgatgattctagatatacacacctgcacggcagacagctgagacaccccctgatgggccagcccctgcccctgatcaccgactatgccgttcagccccatgtgggtactggagcagtgaaagtcacacctgcgcattccccagcagatgctgaaatgggggctcggcatggtctttccccattgaatgtgatcgctgaagacggcacaatgacttccctatgtggggattggctgcagggcctgcatcgctttgtggctcgagagaaaataatgtcggtcctgtcagaatggggcttgtttcgaggattgcagaaccaccctatggtgcttccaatctgttccaggtcaggcgacgtgatcgagtacctactcaaaaatcagtggtttgtgcgttgccaagagatgggagctcgggcagccaaagccgtggagagtggggcactagagctctcaccttccttccaccagaaaaattggcagcattggtttagccacatcggagactggtgtgttagtaggcagctctggtggggtcaccaaattccagcgtatctcgtggtggaggatcacgcgcagggcgaggaagattgctgggtggttggtagaagtgaagcggaggcgcgtgaagtggccgctgagttaacgggcagaccaggcgcagaattaactctcgaaagagacccagatgtcctggacacctggtttagcagcgccttattcccattctccgcgttgggctggccacaggagactcctgacctagctaggttctatcccttgtcattgttggagacaggtagtgacctgttgctgttctgggtggggcgtatggtgatgttaggcacacagttaaccggtcagctgccattcagtaaagtattacttcatcccatggtacgggacaggcagggccgaaaaatgtctaaatctctgggtaacgtcctagacccaagggacatcattagcggcgtcgagatgcaggtcttgcaggagaagctgaggtcagggaaccttgaccccgctgagttggcaatagtggcagccgctcagaagaaggactttcctcacggcattccagagtgcggcactgacgcactgcgcttcacgctgtgctctcacggcgtccaggccggagacctgcacctgtccgtgtctgaagtacagtcatgcagacatttttgtaataagatttggaacgcccttcggttcatcctgaacgccctgggggagaaatttgtgccccagcccgctgaagagctatcacctagcagccccatggatgcatggatcctgagtagattagcactggcagcacaagagtgcgagcggggttttttgactcgcgagttgtctttggtaacgcacgccttacatcacttctggctccataacctctgcgatgtgtacttggaggctgtgaagcccgtcctttggcattcccccagacctttagggcctccacaggtgctgttttcatgcgctgacctggggctgcgcctgctggccccacttatgccattcttggccgaagagctgtggcagagacttcctcctagacccggatgtcccccagctccgagcatcagcgtggcaccttatccaagcgcctgcagtctggaacattggcgtcagcccgagttggaacggcgttttagtagggtgcaggaggtggtgcaggtcctgcgcgcactgcgagcaacctaccagttaacaaaggctcgcccaagggtcctacttcagtcgtccgagccaggagaccaaggcctctttgaggcctttctcgaaccactgggaaccctgggttactgcggagctgtgggacttttgccaccaggagccgcagctccctctggttgggcgcaggctccattgagtgacaccgcccaggtttacatggagctgcagggcctagtggatcctcaaatccagctcccgctgcttgccgctagacgatacaagttacagaagcagctggacagccttacagcccgtacccccagcgagggtgaagccggtactcagaggcagcagaagttgtctagtcttcagctcgaactgtctaaactggataaggctgccagccacttgcgacagctaatggacgagccccctgcacctggcagccccgagctgtag

SEQ ID NO: 246544 - DNA, 774 bp, synthetic construct
  misc_feature 1..774: note = Description of Artificial Sequence: Synthetic coding sequence
  source 1..774: mol_type = other DNA
atgccacacctacccttggcttctttccgccctccgttctggggactgcgtcactcacgtggactgccgcgtttccattcagtctccacccagtctgagcctcacggaagtccaatctctcgaaggaaccgtgaggcaaagcagaagagactgcgcgaaaaacaagccactctcgaggcggagatcgccggagaaagtaagtcccccgcagagtctatcaaagcatggcggcctaaagagttggttctgtatgagattcctacgaagcctggagagaagaaagacgtgagtggaccattgccgccagcgtattccccacgctacgtggaggctgcttggtatccttggtgggtgcgggaaggctttttcaaacccgagtatcaggctcgcttaccgcaagctaccggcgaaaccttttcaatgtgtattccacccccaaatgtcactgggagcctccacattggccacgccctgactgtggcaattcaggacgcactcgtacgctggcaccgaatgcgaggcgaccaggtactgtgggtaccaggaagtgatcatgcagggatcgccacccaggcggtcgtggaaaaacagctttggaaagagcgtggcgtgaggcggcatgagctgtctcgagaagcgtttttacgcgaagtatggcagtggaaagaggcgaaaggaggggagatctgcgagcagttaagagctcttggcgctagtttggattgggatagggttttttaccacgggtgttggctcctgtccggttgcgactag

SEQ ID NO: 246545 - DNA, 3192 bp, synthetic construct
  misc_feature 1..3192: note = Description of Artificial Sequence: Synthetic coding sequence
  source 1..3192: mol_type = other DNA
atgcctcacctgcctctcgcatccttccgcccacccttctggggactacgtcatagccgcggtctgcccaggttccactcagtttcaacccagagcgaaccccacggatcacctatcagcagacggaatcgcgaggccaagcaaaaaagactcagggagaaacaggctacccttgaagccgagatcgcgggagagtcaaagagcccagctgagtcaattaaagcttggcgccctaaagagttagtcctgtacgaaattccaacaaagccaggggaaaaaaaagatgtgagcggtcctttgccccctgcctatagtcctcgatatgtggaagcagcttggtacccgtggtgggtcagggagggcttctttaaacccgaatatcaggccagactgccccaggccacaggagaaactttctcaatgtgtatcccaccccctaatgtgaccggtagcctgcatatcggccacgctttgaccgtggccattcaggatgctctcgtgcgatggcatcgcatgcgcggagaccaagtgctgtgggtgcccggatctgatcacgctgggattgctactcaggccgtggtggaaaagcagctgtggaaggaacggggagtcaggagacacgagctgagccgagaggccttccttagagaagtgtggcagtggaaagaggcgaagggcggtgagatttgcgagcagttaagagcattaggcgctagcctcgactgggacagagaatgttttacgatggacgttgggagctcagtggctgtcactgaagcttttgtcagactttacaaagcaggactgctgtatagaaaccaccagctggtgaactggtcctgcgctctgcgctccgctatcagtgatattgaagtggaaaatcgtccactgcctggccatacacagctgaggctgcctggttgccctacgcccgtgtccttcggtttgcttttttctgttgcctttcctgttgacggcgaaccagacgcagaggtagtggtcggaactacccgcccagaaactttgcctggagacgtcgcagtggctgtccatccagacgatagtagatacacccatcttcatggccgacagctgcgtcatccactaatgggtcagccgttacccctgattacagactatgcagtgcaaccacacgtcggtaccggcgctgtgaaagtgacacccgctcactccccagcagacgccgaaatgggggcacgccacggcctcagcccacttaacgtgatcgcggaggatgggacgatgacaagcctatgtggcgactggctccagggtctacatcgtttcgttgctcgagagaagattatgtctgtgctgagcgagtgggggctgtttagaggactgcagaatcatccaatggtcctgcctatttgctctcggtccggggatgtcatcgaatacctactgaagaatcaatggtttgtgaggtgtcaggaaatgggggcacgcgctgccaaagctgtcgaaagcggcgcactggagctgagcccctcattccatcaaaaaaactggcaacactggttttcccatattggcgattggtgcgtgtcgagacaattgtggtggggccaccagatcccagcatacctggtggttgaggaccatgctcagggcgaggaagactgctgggtggtcggcaggagcgaagccgaggctagagaagtggccgctgagttgacggggagaccaggcgctgagctgacacttgagcgcgatcccgacgtccttgacacctggttctcctccgctctcttccccttctctgccttgggctggccgcaggaaactcccgatctagctaggttctaccctctttctctgctcgaaaccggtagcgatttgctgctgttctgggtcggcaggatggtcatgctcgggactcagttaacggggcagttacctttctccaaggttctgcttcatcccatggtgagggatcgccagggccgaaagatgagcaagtccctcggcaatgtacttgatcccagagacataatctcgggcgtggagatgcaagttctacaggagaagctgaggagtggcaaccttgacccggctgaacttgcgatagtcgccgctgcacagaagaaagatttccctcatggcatacctgaatgtggcactgacgcactgcgattcacactatgctctcatggagtccaggctggcgatttacacctttctgtgtcggaggtccagagctgccgccacttctgcaacaaaatctggaacgcactgcgttttatcctaaatgcattaggtgaaaaattcgtgccgcagcctgccgaagagctctctcccagcagccccatggacgcatggattttgagcagacttgccttagctgctcaagagtgcgagcgcggattcctgactcgcgagctgtctctagtcacccacgcattgcaccatttctggctgcacaatctttgcgacgtgtacctcgaggcagtgaagccagtgttatggcactcgcctagacccctgggccctccacaggtcctgttcagctgtgccgacttaggcctaagactgttggccccactgatgcccttcctagctgaggagctttggcagaggcttcctcctcgacccggatgtccacccgcaccatccattagcgtagccccatacccctccgcttgctccctggagcactggcggcaacccgaacttgaacggagattttcacgggtacaggaggtggttcaggttctgcgggcactgcgagctacttaccagctgacaaaagcacgaccacgggtgctgttgcagagctcagaaccgggtgaccagggactgttcgaggccttcttggagcctctgggcacccttggttattgtggggctgtggggttactgccccctggagccgcagctcctagtgggtgggctcaggctccattgtctgataccgcccaggtttatatggagttgcaggggctggtcgacccacagatccaattaccactcctagcagcccgtaggtataagcttcagaagcagctggattcacttacagcacgcacacctagcgaaggcgaagccggaactcaaagacaacagaagttaagtagccttcagctggaactgtccaaactggataaggctgcgagtcacctgcgacaactcatggatgagccccctgcgcctgggagccccgagctgtag

SEQ ID NO: 246546 - DNA, 348 bp, synthetic construct
  misc_feature 1..348: note = Description of Artificial Sequence: Synthetic coding sequence
  source 1..348: mol_type = other DNA
atgccccacctgcctcttgcgagcttcagacctcctttctggggcttaagacactcccgtggactgcctaggttccactcagttagcacccagtccgaaccccatggctccccaatttcacgaaggaaccgcgaagcaaaacaaaagagactccgcgaaaaacaggccacactggaagccgaaatcgccggtgaaagtaaatcgccggcagaatctattaaagcttggagacctaaggagcttgtgttatacgaaattcctacaaagcccggtgagaaaaaagatgtatccggaccactcccacctgcctacagccccagatatgtggaagctgcctggtacccatag

SEQ ID NO: 246547 - DNA, 981 bp, synthetic construct
  misc_feature 1..981: note = Description of Artificial Sequence: Synthetic coding sequence
  source 1..981: mol_type = other DNA
atgccccacctgccccttgcctcatttaggcctcccttctggggtctgcgacattccagaggcctccccaggtttcacagcgtgtctacccagtctgagcctcatgggtccccgattagcaggaggaaccgcgaagccaagcagaagaggctgagggaaaagcaggccactctagaagccgagatagccggagaatctaaatcgcccgcagaatctataaaagcttggcgccctaaggagctggtcctgtacgagatcccaaccaagccaggagagaagaaagatgtgtccggacctttacccccagcctattctccaaggtatgtggaagccgcatggtacccgtggtgggtgcgggagggttttttcaagccagagtaccaggctagattgccccaggctaccggtgagacattctctatgtgcatacctccgccaaatgtaacaggctccctccatataggccatgcactgacagtggctatccaggatgccctcgtgcggtggcacaggatgagaggagatcaagtcctgtgggttcctggctcagaccacgccggaatcgcgacacaggccgtggttgaaaagcagttgtggaaggagagaggagtgcgtcgacacgagctgtctagagaggccttcctgagggaggtctggcagtggaaggaagcaaagggcggagaaatatgcgagcagctgcgcgcactaggggcatcattagactgggaccgcgagtgttttactatggatgtcggttctagcgtggctgtgacagaggcttttgttaggctgtataaggctggcttgctgtaccggaaccaccagcttgtaaattggtcatgtgcactgaggtcagctattagcgatattgaagtggaaaacagacctctgccaggtcacacacagctgagactccccggatgccccacgcctgttagcttcgggcttttattctctgttgcatttcccgtcgacggctag

SEQ ID NO: 246548 - DNA, 3282 bp, synthetic construct
  misc_feature 1..3282: note = Description of Artificial Sequence: Synthetic coding sequence
  source 1..3282: mol_type = other DNA
atgggaggcaaggcttggcccaggagggcggtgggcacagccggaggtccctgcgcggaacaaatttcagcgccattccagacattgctgatgccccatctgccactggcctcatttcggccacctttttggggcctcaggcactctcgtggtcttccccgattccacagcgtcagcacccagtccgagcctcatggatccccgatctccagaaggaaccgcgaagcaaagcagaagcgactccgggaaaaacaggccactttggaagcagagattgccggagaaagcaaaagtccagccgaatcaataaaggcatggcgaccaaaggagcttgtcctatacgagatccctaccaaacctggcgaaaaaaaagatgtttctggccctctccctcccgcatatagtcctcgctacgttgaagctgcctggtacccctggtgggtgagagaagggtttttcaaacccgaataccaggcgaggttgccgcaggcaacaggggagacattctctatgtgcattccccctcccaatgtcaccgggtccctgcacattggacatgccctaaccgttgctatccaggacgcacttgtgcggtggcacaggatgcgcggagatcaagtgctgtgggtgcctggctccgatcacgctggcattgccactcaggccgtcgtagaaaaacagctctggaaggagagaggagtgagaagacatgagcttagcagagaagcctttctgcgggaagtgtggcagtggaaggaagccaaaggaggagagatttgcgagcaactgcgagccttgggagcaagtcttgattgggatagagagtgcttcacgatggacgtgggttcatctgtggctgtgacagaggccttcgtgcggctgtataaggccggacttctttataggaatcatcaattggttaactggtcctgtgccctcaggtctgcgattagcgacattgaagtcgaaaacagaccactgcccggacacacacaactccgcctgccaggctgtccgacccctgtttcattcgggttgttattcagtgttgcattcccagtggatggggagcctgacgctgaagtggtggtgggaaccaccaggccagagaccctacctggagacgttgctgtcgccgtccatcccgacgactctagatatacccacctgcacgggaggcagctgcgtcaccctctcatgggccagcccttgcccctcatcaccgattacgcagttcaacctcatgtgggaactggtgcagttaaggtcactcccgcacactctccagcagatgcagagatgggcgctaggcacggcctttcccctttgaatgtgatcgctgaggacggtaccatgaccagtctgtgcggggattggctccagggcctccatcggtttgtggctagagaaaaaatcatgtccgtgttaagcgagtggggactgttccgtggcctgcagaaccaccccatggtactcccgatatgcagtcgctccggggatgtgatcgagtatctgctgaaaaaccagtggtttgttcgatgtcaggagatgggcgcaagagccgcaaaagcagtggagagcggcgcactcgagctctccccgagttttcatcagaagaactggcagcactggttcagtcacattggtgattggtgcgtcagtaggcaactatggtggggacaccagattcccgcttacctcgtcgtcgaggaccatgcccagggcgaagaggattgttgggtcgtgggtagatctgaggccgaagctagggaagttgcggctgagctcactggcaggcctggcgcagaactgaccctagaaagggaccccgacgtgctggacacgtggtttagttcagctctctttcccttttctgcccttgggtggccacaggagacaccggacttagctcgattctaccctctgagtttgctggaaacaggcagcgatctgttattattctgggtcggaaggatggtaatgcttggcactcagctgacaggccaactgccattcagcaaagtcctgttacacccaatggttagagaccgacagggacgcaagatgagtaagagtctgggaaatgttttggatccacgagacattatttcaggagtcgagatgcaagtcctgcaagaaaagctccggagcggaaatttagatcccgcagagctcgcgattgtggccgcagcacagaaaaaggacttcccacatgggattcctgaatgtgggaccgacgcattgaggttcacactctgcagtcatggcgttcaagccggagatcttcatctcagcgtctcagaggtgcagtcatgccggcacttctgcaataagatatggaacgctctgcggttcatcctgaacgcactcggggagaagttcgtcccccagccagcggaggaactgtccccctctagtccaatggatgcatggatcctgagccgcctcgcactcgccgctcaagagtgtgagaggggatttctgactagagagctctccctggtgacccatgcactgcatcacttctggttgcataacctgtgtgacgtgtatcttgaggcagtaaagccagtgttgtggcactcgcctcgccctctgggaccccctcaagttctgttcagctgcgctgatctaggcctgcgactgctggcaccgctaatgcctttcttggctgaagagctttggcaaaggctgccaccaaggcccggatgcccacccgcaccgagcatttcggtcgctccttacccctctgcatgctcattagagcactggcgccagcctgagctggagagacgcttttcccgtgtgcaggaggttgtgcaggtcctaagggctttacgcgcaacctaccagcttacaaaagctcgtccacgcgtcctcttgcagtcctcagaacccggagaccagggcctatttgaggcgtttctcgagcctctcggtactctggggtactgtggggctgtgggtctgttaccacctggggcagccgctcccagcggttgggctcaggcacccttgagcgacacagcacaggtgtacatggagctgcagggacttgtggaccctcagatccagctcccactgctcgccgcacgcagatataagctccaaaaacaattagatagtttgaccgcgcgtaccccatccgaaggtgaggcaggaactcaacggcagcagaaactcagttccctccaactggaattgtcaaagctggataaggccgctagtcacctcaggcaactcatggatgagccaccggctcctggctctcctgagctgtag

SEQ ID NO: 246549 - DNA, 2772 bp, synthetic construct
  misc_feature 1..2772: note = Description of Artificial Sequence: Synthetic coding sequence
  source 1..2772: mol_type = other DNA
atgtgcatccccccacccaacgttacaggctccctgcacatcgggcatgccctgaccgtcgccattcaggacgcactggttaggtggcaccggatgaggggcgatcaggtgctctgggtccccggtagtgaccacgccggaattgctactcaggccgtggtggagaagcaactgtggaaggaacgcggtgtccgaagacacgaattgagtcgggaagcatttttgcgtgaggtgtggcaatggaaggaggctaagggaggggagatctgcgaacagctccgcgctctcggagcctcactggactgggaccgtgagtgtttcacgatggacgttgggtcgtctgtggccgtgaccgaagctttcgtgagactatacaaggccggactgctgtacagaaaccatcagctggttaattggtcatgcgccctgcggagcgcaatttccgatatcgaagtagagaaccggcctctgcctggtcatactcagttgaggctgcccggatgcccaacccctgtgtcatttggtttgctgtttagcgtggcctttcccgttgatggcgagccggacgcagaagttgtcgtaggcactacacgtcccgaaaccctccctggcgatgtcgctgttgctgtgcacccggatgactcccgttatacacacttacacggccgacagctgcgtcacccactgatggggcagccgctgcctctcattacagactatgccgtacagccacatgtcggcaccggcgctgtgaaggtaactcccgcacactcacctgccgacgcggagatgggggctcgtcacggcctgagccccctcaacgtgatcgcggaggatggtacaatgaccagcctttgcggcgactggctacagggcctgcaccgctttgtggcgagagagaagattatgagcgttctgagcgagtgggggctcttcaggggattgcagaaccaccctatggtgctgccaatctgcagtagaagtggcgacgtcattgagtacctgttgaagaaccagtggttcgtgcgctgtcaggaaatgggagcccgagccgctaaggcggttgagtctggcgctcttgagctctccccctctttccaccagaaaaattggcagcattggtttagtcatataggggattggtgcgtcagccgacaactgtggtgggggcaccagatccccgcatacttagtggtggaagatcacgcccagggcgaagaggactgttgggtagtgggacggtctgaagcggaggccagggaagtggccgcagagctgacgggccgacccggagcagagctcactttggagagagaccccgacgtattagatacctggttcagctccgccctcttcccctttagcgccttaggatggccccaggagaccccagaccttgcgcgattttaccccctcagcctgttggaaaccggcagcgatctattactgttttgggtgggaagaatggtcatgttaggcacccagctgacagggcagcttccctttagcaaggttctgctgcatccaatggtcagagataggcaagggcgtaagatgtcgaagagtcttggaaacgtgctggatccgagagacattatcagtggggttgagatgcaagtgcttcaagagaaactgcgcagcggcaacttagacccagccgaacttgcaatcgtggccgctgctcagaaaaaagacttccctcatgggatccccgaatgtggaaccgatgccctgaggtttactctctgcagtcatggtgttcaggccggtgatctgcatctcagcgtgtctgaagtgcagtcttgccgacacttctgtaacaagatctggaacgctctgaggttcattctcaatgccctcggcgagaagttcgtcccacaacccgctgaggagctttcccccagtagcccaatggacgcctggatactttcacggctcgcgctcgccgcacaggagtgcgagcgtggctttctgacacgggagctgagcctggtgacgcatgctctgcatcatttttggctgcataacctgtgcgatgtgtatctggaagccgtgaagcctgtgctctggcactcaccgaggcctctgggcccaccacaggtgctgttctcatgcgcagacttgggtcttaggctactggccccactcatgccttttttggctgaagagctttggcagaggctgcctccaaggcccggatgtcctcccgcaccgtcaatttcagtggcgccttacccatcagcctgctctctggaacactggaggcagcctgaactcgaaaggagattcagcagggtccaggaagtggtccaggttttacgagctctgagagctacataccaattgaccaaggctaggccacgggtgttgctgcaatctagtgaaccgggtgaccaaggactgtttgaggccttcctggaacccctcggcactctgggctactgcggggcagtgggactgctgcccccaggcgcagcagccccatcagggtgggcccaggcacctctaagcgacactgctcaggtgtacatggaattacaggggttagttgatccacagatccaactgccattgctggccgctcgcagatacaaactccagaaacagctggactcactcacagcgaggactccttcggagggggaggctggcacgcagaggcaacagaagttatccagtctccagctcgagctcagcaagctcgataaggctgcaagtcacttgcggcagctcatggatgagccccctgcacccggatcacctgagctgtag

SEQ ID NO: 246550 - DNA, 885 bp, synthetic construct
  misc_feature 1..885: note = Description of Artificial Sequence: Synthetic coding sequence
  source 1..885: mol_type = other DNA
atggcaagcgcaagcggtgcaatggccaagcacgaacaaattctggtactagatccacccaccgatttgaaattcaaaggaccttttactgacgtcgttaccactaatctgaaactgaggaacccgagtgaccgcaaggtgtgttttaaagtcaaaactacagccccacgtcgctattgcgtccgtcccaactctggtatcattgatcccggaagcaccgtgacggtttctgtgatgctgcagccatttgactacgacccaaatgagaagtccaagcacaagtttatggtgcagacaatctttgctcctcccaatacgagtgacatggaagcagtgtggaaggaggcaaagccagatgagctgatggacagcaaactgcgctgcgtgtttgagatgcctaacgaaaatgacaagctgggcattacccctccgggtaatgcacccactgttacaagtatgtcttctatcaataacaccgtggctacccctgctagctatcacaccaaagatgacccacgcggactaagcgtgttaaagcaagaaaaacaaaagaatgacatggaaccatcaaaagccgtccctttgaatgcgtcgaagcaggacggacccatgccaaaaccacatagtgtttcactaaacgatacagagacaaggaagctcatggaagagtgtaaacgactccagggcgaaatgatgaaactaagtgaagagaaccggcaccttcgtgatgagggcctccgactgcggaaagtcgcacatagcgacaaacctggaagcacctccacggcatcgtttagggacaacgtgacttcccctctgccctccttgttggtggtgattgcagccattttcattgggttttttctggggaagttcattctgtag

SEQ ID NO: 246551 - DNA, 750 bp, synthetic construct
  misc_feature 1..750: note = Description of Artificial Sequence: Synthetic coding sequence
  source 1..750: mol_type = other DNA
atggcatccgcatcaggggcaatggctaaacatgagcagatcctggtgctcgatccacctacggatctgaaatttaagggaccttttacggatgtggtgactacaaatctgaaattacgcaaccctagcgaccgcaaggtttgttttaaggtgaagacgacagcccctcggagatactgtgtgcgccctaactcggggattatcgatcctgggtcgactgttacagtatcggtgatgctccagccatttgactatgatccgaacgagaaatccaagcacaaatttatggtgcagactattttcgctccacctaacacttctgatatggaggccgtctggaaagaagctaaaccggacgaacttatggactccaaactccgctgcgtgtttgagatgccaaacgagaatgacaaactgaacgacatggaaccatctaaagctgtgccattgaacgcatccaagcaggatggacctatgcctaaaccccattctgtgagtctaaatgatacagagacacggaagctgatggaggagtgtaagagactgcagggcgagatgatgaaactctcggaggagaacaggcacctccgcgacgaagggctgcggcttcgtaaggtcgcccacagcgataaaccaggatccaccagtaccgcttcttttcgggacaacgtgacctctcccctcccgagtctgctcgtcgtgattgcagctattttcatcggcttttttctcggaaagttcatactttag

SEQ ID NO: 246552 - DNA, 300 bp, synthetic construct
  misc_feature 1..300: note = Description of Artificial Sequence: Synthetic coding sequence
  source 1..300: mol_type = other DNA
atggccaaggtagaacaggttctgtccttagagcctcagcatgagctcaagttcaggggaccttttacggacgttgtcacgacaaatctgaagctgggaaatcctaccgatagaaacgtttgcttcaaggtgaagactactgcccctaggcgttattgcgtgcgtcccaactctggtatcatcgacgctggcgcaagcatcaacgtgtcaggacgacggtggactgcggacgaagaggactcggccgaacaacagccacatttctcgatctctccgaattgggaagggaggcgcccttag

SEQ ID NO: 246553 - DNA, 732 bp, synthetic construct
  misc_feature 1..732: note = Description of Artificial Sequence: Synthetic coding sequence
  source 1..732: mol_type = other DNA
atggcaaaagtcgagcaggtgctgtctttagagcctcagcacgagttaaagttccgcggtccttttacggacgtggtcaccacaaatctgaaattgggcaacccaacggaccgcaatgtgtgttttaaagtcaagacgacagctccacgcagatactgcgtgcggcctaatagcggaatcatagacgcaggtgcctccattaatgtgagtgttatgctgcagccatttgactatgaccccaacgaaaagagtaagcataaattcatggtacagagtatgttcgccccaaccgatactagtgatatggaggccgtatggaaggaggcaaaacccgaggacttgatggattcaaaactgcgctgcgtgtttgaacttccggcagaaaatgataaaccccacgacgtggagatcaacaaaatcatatctaccacggcatctaagacggaaacaccaattgtaagcaagagtctgtcctcctcattagacgatacggaggtaaagaaggtcatggaggaatgtaagcggttgcagggggaggtgcagaggctcagagaagaaaacaagcaatttaaggaggaagacggcttgagaatgagaaagaccgtccagtccaacagccctataagtgctctggcccctactggtaaagaggaaggcctaagcactaggcttctggctctcgtggtgttgtttttcatagtgggtgtgatcatcggcaaaattgccctctag

SEQ ID NO: 246554 - DNA, 1575 bp, synthetic construct
  misc_feature 1..1575: note = Description of Artificial Sequence: Synthetic coding sequence
  source 1..1575: mol_type = other DNA
atggataccgaatctacatatagtggttattcttattattcatcccactccaagaagtcccaccggcagggcgaaagaacgcgggagcgtcacaagagtccccgaaataaagacggccgaggttctgaaaagagtgtgacgatccagcctcccacaggtgaacctttactgggaaatgactcaactcgcaccgaagaagtgcaggacgacaattggggggaaaccacgacggcaattaccgggacaagcgagcactccatttcccaggaagatatcgcacggatctctaaagatatggaggattctgtaggcttggactgcaaacgctacctggggctaaccgtggcctcttttctcggcctacttgtattcctaactcctatcgcgttcattctcctacccccaattctttggagggacgaactggaaccctgcggaacaatctgcgagggactttttatcagtatggcctttaaactcttaatcttgcttatcggtacctgggcgttgttcttccggaagaggcgagcagatatgccacgggtgttcgtttttagagccttactgctggtgctgattttcctctttgtggtgtcctattggctgttctacggggtgcggatactggactctcgggataggaattaccaggggattgtgcagtacgccgtgagcctggtggatgctctgctcttcatacactacctggccatcgttctgcttgagctgcgccagctccagcctatgttcacccttcaagtggtgagaagcacagacggagagtctcgtttctattcgttgggccatctgtccattcagagagctgctctggtggttttagagaactactacaaggatttcacgatctataaccccaatttgctcacggcctctaaatttagggcagcaaaacatatggccggacttaaagtatataacgttgatggaccttccaacaacgctactggtcaatctagggccatgattgctgctgcggcaaggaggcgggatagttctcacaatgagctatactatgaggaggcggagcatgaacgcagggtaaaaaagaggaaagccagactggttgtggcggtcgaggaagcctttatccacatacagagactccaagctgaagagcaacagaaggccccaggagaggtgatggaccccagggaagccgctcaggccatctttccatctatggcgagggccttacagaagtacctccgcattacaaggcagcagaattaccattcaatggaaagcatcttgcagcacctcgctttctgtataaccaatggtatgacccccaaggccttcttagaacgatacctttcagccggacctactttacagtacgataaagaccgttggctctctactcagtggcgattggtctctgatgaggctgttaccaacgggcttcgagatggaatcgttttcgtcctgaaatgcctggatttcagtttggtggtgaatgtgaagaagattccattcattatcctgtcagaggaattcatagaccccaagagtcacaaattcgttttacgcctgcagtcagagacatccgtatag

SEQ ID NO: 246555 - DNA, 1575 bp, synthetic construct
  misc_feature 1..1575: note = Description of Artificial Sequence: Synthetic coding sequence
  source 1..1575: mol_type = other DNA
atggacaccgagtccacttactccggctactcctactactccagccacagtaagaaaagtcatagacagggggagcgtactagggagcggcacaaatcacccagaaacaaagacgggcgagggagtgagaaaagcgtgacgatccagccccctaccggcgaacccctgctcgggaatgacagtacacgtactgaggaggtgcaagatgataactggggcgagaccaccaccgccatcaccggcacaagtgaacactcaatttcacaggaggacatcgctcggatatccaaggacatggaggacagcgtcgggctcgactgtaaacgctacttgggcctgacagtggcgtcgtttctcggactgctggtctttctcaccccaatcgcgttcattctgctgccacccatcttgtggagagacgaattggaaccctgcggaacgatttgcgaaggcctgttcatcagcatggcttttaagctgctaattctactgataggcacgtgggccctatttttcagaaagcgccgtgcagacatgcctcgtgtttttgttttccgggcactactgttggtgctcatttttctttttgtggtgtcctactggctgttttacggtgtgcgtattctggacagcagagatcgtaattatcagggcatcgtgcaatacgctgtgagtctagtcgatgccttactcttcattcattaccttgcaatcgtcctgctggaactgaggcagctacagccaatgttcaccctgcaggtggtgagaagcactgatggtgaaagcaggttctactctttagggcatttatccatccagcgggctgccctcgtggtactcgaaaactattacaaagattttacgatctataatccgaacctattaacggctagcaagttccgcgctgccaagcacatggcgggtttgaaggtttacaatgtggacggtccttcaaataatgctactgggcaaagcagagctatgatagcagcagccgctagaagacgcgacagctcccacaacgagctgtactatgaagaagctgaacacgagaggcgggtcaaaaagcggaaggctaggctggtggtggccgtcgaagaggccttcatccatatccagcgactgcaagcagaagaacagcaaaaggctcctggagaggtcatggatccgagggaagctgcacaggctatctttccatcaatggcacgagctctgcagaaatacctgagaattactcgtcagcaaaactatcatagcatggaaagcatcttacagcacctagccttttgtattaccaacggaatgacgcccaaagctttcttggaacggtacctctctgccggaccaacactccagtacgataaggatcggtggctaagtacacagtggaggttggtcagtgacgaggcggtgactaacggacttcgtgacggaatcgtgttcgtactgaagtgtcttgatttcagcctggtggttaacgtcaaaaagataccatttatcatcctctcggaggagttcatcgaccctaaatctcacaaattcgtcctgagactgcagagcgagacaagtgtgtag

SEQ ID NO: 246556 - DNA, 1575 bp, synthetic construct
  misc_feature 1..1575: note = Description of Artificial Sequence: Synthetic coding sequence
  source 1..1575: mol_type = other DNA
atggataccgagtccacctattctggctattcctattactcttcccactcaaaaaaaagccaccggcagggcgagaggacccgggagcgtcacaagtccccacggaacaaggatggcagaggttcggagaagtcagtcacgattcaaccgccaacaggagaacctttactggggaatgactcaactaggactgaagaggttcaggatgataactggggagaaacgacaaccgctatcacgggtaccagtgagcacagtattagccaggaggacatcgcacgaattagcaaagacatggaagattccgtggggcttgactgcaagcggtatttgggtctgaccgtggcctcctttctgggtctactcgtgttcctgacacctatagcttttattttgctacctcctattctgtggagagatgaactagaaccctgcggaactatttgcgagggtctttttatctcgatggccttcaaactgctgattctgttaatcggaacctgggctctcttctttagaaaacgccgagctgacatgcctagagtatttgtctttcgagcgctgttgctagtactaattttcctgtttgtggtgtcatattggctcttttatggggtccggatattggattctcgagatagaaactatcagggaattgtgcaatacgccgtgagcctcgtggacgctctactgtttatacactacctggcaattgtcttgctcgagctcaggcagcttcaacccatgtttactttacaggttgtgcgctcaaccgacggggaaagccgcttctactccctgggacatctcagcatccagcgagccgctctggtcgtgttggaaaactattataaggacttcacgatctataatcccaatttgctgacggcctcgaaattcagggcagctaaacatatggccggactgaaagtctacaatgtagacggccctagtaataacgccaccggccagagtagagccatgatagccgctgccgctcggcgtcgcgacagcagtcataacgaactgtactatgaagaagccgagcacgaaaggcgcgtcaagaaacgtaaggccagattggtggtggccgtagaggaggcgttcatccacatacaacggctccaggcagaggaacagcagaaggcccctggggaggttatggaccccagagaagcagctcaggcaatcttcccttctatggctcgggctttacagaagtacttgcgaataacgagacagcaaaactatcactccatggaaagcatcctgcagcatctcgctttctgcatcactaacgggatgactcccaaagcgtttttggaaaggtacctttctgccggtcctacgctccaatacgataaagaccgctggctctcaacccagtggcgtctcgtctcggatgaagcagtgacaaatggccttagagacggcatcgtttttgtgctcaaatgccttgatttttcgttggtcgtgaatgtcaagaagatccccttcatcatcctaagtgaagaatttatcgatcccaagtctcataagtttgttttgcgcctgcagtcggaaacatcagtttag

SEQ ID NO: 246557 - DNA, 1569 bp, synthetic construct
  misc_feature 1..1569: note = Description of Artificial Sequence: Synthetic coding sequence
  source 1..1569: mol_type = other DNA
atggacaccgagagtacatatagtggctattcgtattacagctcacatagtaagaagagccataggcaaggcgaacgcacgagagagaggcataagagcccacggaataaagacggacgaggatcagaaaagtcggtgaccatccagccacctacaggggaacccctcctcggaaacgatagtacccgcaccgaggaggatgataactggggcgaaacaacaacggcaatcaccgggacaagtgagcacagtatatctcaggaggatattgccaggatctccaaggatatggaggattcagtcggtcttgactgtaagaggtacttaggactcacggttgcttcatttctcggcctgctggtctttctgacccccatcgctttcatcctgcttccacctatcctttggcgggatgagctggagccatgcgggacaatttgtgagggcctatttatctcgatggcctttaaacttctgattctgttgattgggacctgggctctcttctttcggaaaagacgggctgacatgcctagggtgttcgtcttcagggctcttttgctcgtgctcatcttcctcttcgtggtgagctactggctgttctatggggtgcggatactggatagccgggatagaaattaccagggaatagttcaatacgcagtgagcttggtcgatgccctattattcatccattatctggcgatagtcctattggagctgcgccagctgcagcctatgttcacccttcaggtcgtgagatcaacagacggagagtcaaggttctactccctgggacacctgtcgatccagagagcagccttagttgtactggagaattactataaagactttactatctataatccgaacctactcaccgcttctaagtttcgcgcagctaaacacatggccggtctcaaagtatacaacgttgatggcccaagtaataatgctaccggacagtctcgagccatgatcgctgccgctgctcgacgtcgcgatagcagtcacaatgagttgtattacgaggaggctgaacacgagcgaagagtgaagaagcgcaaggcccgtttggtggtggcagttgaggaagccttcatccatattcaacgcctgcaggccgaggaacagcagaaggcacccggtgaggtgatggatcccagggaagcggctcaagcaatcttccccagtatggcgagggcacttcagaagtacctgcggattaccaggcaacaaaattatcatagcatggaatctatcctgcaacacctagccttctgcattactaatggcatgactcccaaggcgttcctggaacgctacctgtctgcgggtcctacactgcagtacgacaaggaccgctggctgtcaacccagtggaggttagtctctgatgaggccgtgacaaatgggctcagggatggaatcgtctttgtactcaagtgcttggacttctcactagttgtgaacgtaaagaaaattcccttcatcattcttagtgaggaatttatcgacccaaagtcgcacaaatttgtgctgagactgcaatccgaaaccagtgtgtag

SEQ ID NO: 246558 - DNA, 1566 bp, synthetic construct
  misc_feature 1..1566: note = Description of Artificial Sequence: Synthetic coding sequence
  source 1..1566: mol_type = other DNA
atggatactgagtctcagtactcaggctactcctataagagcggtcactcacgctctagcagaaaacacagggatcggcgagaccggcacagaagtaaatctagagatggcggtaggggggataaaagcgtgacaattcaggcgccaggcgaacccctgttagacaatgaatcaactcggggagacgagcgggacgataactggggtgagaccacaacagtagtgactggtacttcggagcattccatcagccacgacgatttgacacgtatcgcgaaggacatggaagactcagtgcctctcgactgttccaggcatttgggggtagcagccggtgccacattagccctcctcagctttttgacccccctggcttttcttctcttacctccactcctttggcgcgaagagcttgagccttgcggtactgcatgcgagggactcttcatatcagtcgccttcaagctgctgattttgctactcggaagttgggctctattctttcgcaggcctaaggccagtctgcctagggtattcgtgctgagggctctgctgatggttttggtgttcctgctggttgtctcctactggctgttctacggagtgcgaatactggacgctcgcgaaaggagctatcagggagtagtgcagttcgcggtgtcactcgtggacgcgctgctattcgttcactacctggctgtggtgctcctagagttgcgccaactccagcctcagtttacactgaaggtcgtgagatcaacagacggcgcttccagattctacaacgtcggacatctgagcatacaacgggtggctgtgtggatactcgagaagtattatcacgatttccccgtatataaccccgcactcctgaacctccccaagagcgtgcttgcgaaaaaggtgagtggcttcaaggtttactccctaggagaagagaacagcacgaacaactccaccggccagtccagggcagttatagcagctgccgcaaggcgcagagacaactcgcataatgagtactattacgaggaggccgagcacgaacgcagagttaggaagaggagagcgaggctggtcgtggctgtggaggaggcgtttacccatatcaaacggctacaggaggaggagcagaagaatcctagggaagttatggatccgcgagaagcagcacaggctatcttcgcctctatggctagagccatgcagaaatatctgcgcaccacaaagcagcaaccttaccacaccatggagagcatacttcagcatctagagttttgcattactcatgacatgaccccaaaggcttttttagaaagatacctcgctgctggccctacaatccagtaccacaaggaacgttggctcgcaaagcaatggacgttggtgtcggaggagcctgtgacaaatggacttaaggacggaattgtattcctgctcaaacgacaggacttttctttggtggtctctacaaagaaggtgccattcttcaagctaagtgaagagtttgtagacccaaaatcacacaaatttgtaatgcgccttcagtcagaaactagcgtgtag

SEQ ID NO: 246559 - DNA, 1542 bp, synthetic construct
  misc_feature 1..1542: note = Description of Artificial Sequence: Synthetic coding sequence
  source 1..1542: mol_type = other DNA
atgactacgcaactgccggcatatgtcgctattcttctcttctacgtctcccgagccagttgtcaggatacctttacagccgctgtatatgagcacgctgccattctgccaaatgctaccctgacccccgtctccagagaagaagcactggccttaatgaacagaaacttggacatactggaaggcgctatcacgtctgccgctgatcagggagctcatattatcgttacaccagaagatgccatatacgggtggaattttaaccgtgattcactctacccttacctggaggatatccctgaccctgaggtaaactggatcccatgtaataaccgaaacagattcggacagacgccagtgcaagagcgactctcgtgtcttgcgaagaataactctatctacgtcgtcgcaaatattggagataagaaaccttgcgacacatcagacccacagtgcccacctgatggacggtaccaatataatactgacgtggtatttgactctcaggggaagcttgtggcacggtaccataagcagaatctatttatgggcgagaatcagttcaatgtgcctaaggaaccagagatcgtgacctttaacacaacatttggctcatttggtatatttacatgtttcgacatcctgttccacgacccagcagtcaccttggtcaaggattttcatgttgacacaatagtgttcccgacggcctggatgaatgtcctcccacatctgagtgctgtagagtttcacagcgcgtgggccatgggtatgcgtgtaaatttcttggccagcaatatccattatccctctaagaagatgaccggaagtgggatttatgcccctaactctagtagagcttttcattatgacatgaagaccgaagaaggcaagctcctgctctcacagctggactctcatccatcccactccgccgtcgtgaactggacgagttacgcctctagcatagaggccctgtcctcaggaaacaaggagtttaagggtaccgtcttttttgatgagttcacctttgtaaagctgactggtgtcgccggaaattataccgtctgccagaaggatttgtgctgtcacctgtcctataagatgtccgaaaacatcccaaacgaagtgtacgcactgggtgccttcgatgggctccacacagtggaaggcaggtattacttgcagatctgcaccctgttaaaatgcaaaacaactaacttgaacacatgcggagacagcgcggagaccgcatcgacccgcttcgagatgttctctttgtctgggacctttggtacccaatacgtcttcccggaagttctgctgtctgagaatcagctggcccctggcgaatttcaggtctcgacagatgggcgattgttctctctgaagcccactagcggccctgtgctgactgtaactctgttcggcaggctgtatgaaaaggactgggcttcgaacgccagttccgggttgaccgctcaggccaggattatcatgctaatcgttatagcccctatcgtgtgctcactatcatggtag

SEQ ID NO: 246560 - DNA, 1563 bp, synthetic construct
  misc_feature 1..1563: note = Description of Artificial Sequence: Synthetic coding sequence
  source 1..1563: mol_type = other DNA
atggttacctcctccttccctattagtgttgccgtctttgcactgatcactctgcaggtggggacccaagactcttttatcgcagccgtttacgaacacgcggtaattctacccaataaaaccgagacaccagtctcccaagaagatgctcttaacttgatgaatgagaatatcgacatactggaaacagctataaagcaggccgctgaacagggagcgagaattatcgtgacgccagaggatgccctgtacggatggaagttcactagagagacagttttcccctacctggaagacattcctgaccctcaggtcaactggataccatgccaggacccacacaggttcggacacaccccagtgcaggcaagattatcatgcctcgccaaggataattccatttatgtgctggcaaaccttggggacaagaagccatgtaattccagggacagtacttgcccacccaatggatattttcagtataatacgaatgtggtttataacacggagggtaaactcgtcgccaggtaccacaagtaccacttatactctgagccccagttcaacgtgcctgaaaagcctgagctcgttacatttaacaccgcattcggaagattcggaattttcacctgtttcgatattttcttctatgatcccggagtgaccctagttaaagactttcacgtcgacacaatcctgttccctaccgcctggatgaatgtactgcccttactcaccgccatcgagttccatagcgcctgggctatggggatgggggttaacctcttggtcgcaaatacccaccatgtttccttaaatatgactggctctgggatctatgctcccaatggccctaaagtttatcactatgatatgaaaaccgaactcggaaagttgctcctgtccgaagtggatagccatcccttgagcagtcttgcttatcctacagcggtgaattggaacgcctatgcaacaacgattaagccctttccggtgcaaaagaacaccttccgcggatttatatctcgagacggcttcaattttacagaactattcgaaaatgcaggaaatctcaccgtgtgtcaaaaagagctctgctgtcacctatcctatcgaatgctgcagaaggaggagaacgaagtctacgtcctgggagccttcacagggctgcatggcaggcggaggcgggagtactggcaggtgtgtacgttgctgaaatgcaagacaactaatctgaccacatgcggcaggccagtggagacagcctcaacaaggtttgagatgttcagcctgtcagggacctttgggaccgaatacgtgttcccagaagtgctgctgaccgagattcacctgtcaccgggtaagttcgaagtcctgaaagatgggagactggtgaataaaaatggctctagcggtccaatcctcacagtgagcctgtttggcaggtggtacactaaagactctctctactcttcatgtgggacaagtaattctgccataacctatttactgatttttatcctgttgatgattattgccttgcagaatatagtgatgctttag

SEQ ID NO: 246561 - DNA, 501 bp, synthetic construct
  misc_feature 1..501: note = Description of Artificial Sequence: Synthetic coding sequence
  source 1..501: mol_type = other DNA
atggtcacttcttcatttcccattagcgttgctgtctttgcgctgatcacccttcaggtaggtacccaggattcctttatcgccgcagtgtacgagcacgcggtaattttgccgaataagactgagaccccagtttcccaggaagacgcgttaaatctcatgaacgaaaacatagacattctggagacagcaatcaagcaggctgcggaacagggggctcgcattatagtgaccccagaggatgctctctatggttggaagttcactagagagaccgtgttcccctacctggaggacattccagacccacaggttaactggatcccatgccaggaccctcatcgttttggacatacgcccgttcaggccagacttagttgtctggcaaaagacaatagcatttatgtgttggctaacctcggagataagaaaccatgcaattcaagggactccacgtgtcccccaaatggctatttccagtataatacaaacgtggtttag

SEQ ID NO: 246562 - DNA, 1404 bp, synthetic construct
  misc_feature 1..1404: note = Description of Artificial Sequence: Synthetic coding sequence
  source 1..1404: mol_type = other DNA
atgaatgaaaacatagacatccttgagacagccataaagcaggcagcagaacagggtgcacggattattgtgacgcctgaggacgctctgtacgggtggaagttcaccagggaaacggtctttccctatctggaggatattcctgaccctcaggttaactggattccttgtcaggatccacacaggtttggccatactcctgttcaagcgagattgtcgtgtctggcaaaagacaattctatctacgtgctcgccaacctaggggataaaaaaccctgcaattctcgggatagcacctgccctccgaatgggtacttccaatacaacactaacgttgtttacaacactgaaggcaaattagtcgcacggtaccacaaataccatctttactcggaaccccaattcaacgttcctgagaagcctgaactggtcacatttaatactgcctttggtagattcgggatttttacatgcttcgatatttttttctacgatccaggcgtgacactggtgaaggactttcacgtcgacaccatcctattccctaccgcctggatgaatgtactgccattattgacagccatcgaatttcattccgcctgggcaatgggtatgggcgtcaaccttctcgtggccaatacccaccacgtgagtcttaatatgaccggcagtggaatctacgccccaaacggacctaaggtctaccattacgacatgaagaccgagctcggtaagctgttactgtcagaagtcgacagccacccactttccagtctggcctacccaaccgccgttaactggaacgcttatgcgactaccatcaagcctttcccggtgcagaagaatacatttagaggctttatctcccgagacggatttaattttacagagctgttcgaaaatgctggtaatcttaccgtatgtcagaaagagctgtgctgtcacctgtcttaccgaatgctgcaaaaagaagagaacgaggtgtacgtgttgggggcttttaccggtctccacgggcgacgccgacgggaatactggcaggtttgcactctcttgaagtgcaagaccacaaatctcacaacttgcggcagaccggtagagaccgcctcaacaaggttcgagatgttttctttgtctggtacatttggcaccgaatatgtgttccctgaggttctgcttactgagatacatttgtcccccggtaagtttgaagtcctgaaagacggacggttagttaataagaacggctcttccggtcccatcttgacggtttctctatttgggcgatggtacaccaaggattccctgtatagttcctgcggtacatccaactcagccattacgtatctcctgatcttcatccttctcatgatcattgccttgcagaacatcgtcatgctctag

SEQ ID NO: 246563 - DNA, 309 bp, synthetic construct
  misc_feature 1..309: note = Description of Artificial Sequence: Synthetic coding sequence
  source 1..309: mol_type = other DNA
atgaacgagaacatcgacatattggagacagccatcaaacaggccgctgagcaaggagccagaattatcgtaacccctgaagacgcactgtacgggtggaaatttaccagggagaccgtttttccttatctggaggacatacctgatcctcaagtaaactggatcccctgccaggacccacaccggtttggccacactcctgtccaagcgaggctttcctgcctggccaaggataactcgatttacgtgctggcaaatctgggagacaaaaaaccttgtaactccagagacagtacttgcccaccttag

SEQ ID NO: 246564 - DNA, 306 bp, synthetic construct
  misc_feature 1..306: note = Description of Artificial Sequence: Synthetic coding sequence
  source 1..306: mol_type = other DNA
atggtgacaagtagctttccaatctctgtggccgtgttcgccttaattacactacaggtcggcacccaggattcgttcatcgcagccgtgtacgaacacgcagttatcctccccaataaaactgagacccctgtgagtcaggaggacgccctcaacctgatgaacgagaacattgacatattggaaactgcaatcaagcaggcggcagaacagggagcaagaattattgtaacaccagaagatgccttgtacgggtggaagttcacgagagagaccgttttcccttatctcgaagatatcccttag

SEQ ID NO: 246565 - DNA, 2931 bp, synthetic construct
  misc_feature 1..2931: note = Description of Artificial Sequence: Synthetic coding sequence
  source 1..2931: mol_type = other DNA
atggaggagcggaagcacgagacaatgaacccagcccatgtcctgtttgataggtttgtgcaggcaactacatgcaagggcaccctcaaggcctttcaggagctgtgcgatcacctcgagttgaagcctaaagactacagaagcttctaccataaactgaagtccaagctgaattactggaaagctaaagccctatgggctaaactggataagcgtggcagtcacaaagactacaaaaagggcaaagcctgcaccaacactaagtgcctcataatcggcgcaggcccttgtggtcttagaaccgccatcgacctcagcctactcggtgccaaagttgtcgtcattgagaaacgggatgccttcagtagaaataacgtcctgcatttgtggccctttactattcacgatctgcgtggccttggtgcgaagaaattctacgggaagttctgtgccggtgccatcgaccacatttctattcgacagctccagttaatcttacttaaagtggcgctgatcctgggaattgagatccacgtaaatgtagagtttcaggggctcatacaaccccctgaggaccaggaaaacgagaggatcgggtggcgcgctctcgtgcaccccaagacccacccagtgagcgagtacgagttcgaggtcattataggtggcgatgggcgacggaataccctggaaggattccggaggaaggagtttcgcggtaaacttgccatagctatcacagctaacttcatcaaccgaaacacaacggcggaagcaaaggtagaggaaatctcaggggtagcttttatcttcaaccagaaatttttccaggaactgagagaggctaccggcatcgacctcgagaacatcgtgtactacaaagacgacacacactattttgtgatgacagccaaaaaacagtctctgctggataaaggcgttatcctccacgactatgcagacaccgaactgctcctaagcagggagaacgtcgatcaagaagccttgctctcatacgcaagagaggcggctgatttctcaacccagcaacagttgccaagcttggactttgcaataaaccactacggtcaaccagacgttgccatgtttgactttacttgcatgtacgcctccgagaacgctgcgctcgtgcgtgagcagaacggtcaccagctcctcgttgccctcgtgggtgactccctgctggagcccttctggcccatggggactggcatcgctcgaggcttcttagccgctatggactctgcctggatggtcagatcctggagcttggggacgagccccctggaagtcctagccgagcgcgagagcatctatcgcctcctgcctcagactaccccagagaacgtcagcaagaactttagccagtactccattgaccccgtaactcggtacccaaatataaatgtcaactttcttagaccatcacaagtgcggcatctgtacgatacaggcgaaactaaggatatccacctggagatggagtctctcgtgaatagccgcaccactcccaagctgacccggaatgagtctgtcgcaagatcttcaaaactgctgggctggtgccaacgacagaccgatggatacgccggagtgaacgtgaccgacttgaccatgtcctggaaatcagggctggctctttgtgcaatcatccacagatacagaccagacttaatcgacttcgattccctcgacgagcaaaatgtcgagaagaataatcagctcgcgttcgacatcgcagaaaaggaactggggatcagccccattatgacggggaaagagatggcgtcagtcggtgagcctgacaaactctcaatggtcatgtacttaacccagttttacgaaatgtttaaagattctctgcctagttcagacaccctcgatctaaatgctgaggagaaggccgtgctaatcgctagcacgcgaagtcccatctcctttctctccaagctgggacagacgatttcaagaaagcgctctcctaaggataagaaagaaaaggacctcgatggcgctggcaaaaggagaaaaacaagccagtcagaggaagaagaggcacctcgagggcatagaggggaacgtccgactctagtttccacattaaccgatcgtcggatggacgttgctgtgggtaatcaaaataaggtaaagtatatggcaacccagttgttggctaagtttgaagaaaacgcgccagcccaaagtatcgggattaggaggcagctgacgcaagaacgaggagcaagtcagccatcctgttgcctgcccggtcaggtcaggcctgccccaactccaaggtggaagcagggctccatgaaaaaggaatttccacagaatcttggcggaagcgacacatgttacttttgccagaaacgcgtttacgttatggagcgcctgtctgctgaaggcaagttctttcatagaagttgctttaaatgcgaatactgcgctaccactcttcgcctgagtgcttacgcctacgacatcgaggatgggaaattctattgtaaaccccactactgctacagactgtccgggtatgcacaaagaaagaggcctgcggtagctcctctttccggtaaggaggctaagggtcccctccaagacggcgctaccactgacgccaatggaagggccaatgcagtggcctcctctaccgagcgcacgcctggcagcggcgtgaatggtctggaagaaccaagcattgccaagagactgcgcggtacacctgaacggatcgaactggagaattatagactctcccttcggcaggctgaggctctgcaggaggtgcccgaagaaacccaggcagagcataacctaagctccgtacttgacaccggcgctgaggaagacgtagcctctcgatctgccaggcgtgctgcaggacggccacctgccacgagaccctag

SEQ ID NO: 246566 - DNA, 825 bp, synthetic construct
  misc_feature 1..825: note = Description of Artificial Sequence: Synthetic coding sequence
  source 1..825: mol_type = other DNA
atgatcatcagtcacttcccgaagtgcgtcgccgtgtttgccttgctcgccctctccgtcggcgcactcgacacctttatagctgccgtgtacgaacatgctgtgatcctaccgaatcgaacagagaccccagtgagtaaagaagaagccttgctactcatgaacaaaaatatcgacgttctggagaaggccgtgaaattagccgctaagcagggagcccatatcattgttactcctgaagatggaatctatggctggatattcaccagagagtcaatctacccctaccttgaagacattcctgatcccggagtcaattggatcccctgtcgcgacccatggcggtttggcaacacaccggtccaacagcgcttatcatgtcttgccaaggacaattctatctatgtggttgctaacatcggcgataagaagccctgtaacgcgtccgactcacagtgccccccagacggtagatatcagtacaacaccgacgtcgtgtttgactcccaaggaaaactgcttgctaggtaccataagtacaatctgttcgcccctgagatccaattcgacttccctaaggatagcgaactggtgactttcgacactccttttggcaaatttggcatttttacgtgttttgacatattttcacacgaccccgcagtggtggtggtcgacgaattccagctcaccgccttctctacaccgcagcacggtaccactagatgcccttcttccagattgtttccctccattcagcacgggcctaggccatgggagagtatttacctcctgcagatccctactactcctgcctgtacctag

SEQ ID NO: 246567 - DNA, 444 bp, synthetic construct
  misc_feature 1..444: note = Description of Artificial Sequence: Synthetic coding sequence
  source 1..444: mol_type = other DNA
atgattatcagccatttccctaaatgcgttgctgtgtttgccctgttagccctgtcagttggcgcactggatacctttattgcagctgtgtacgagcacgccgtgatactcccaaaccggaccgagaccccagtcagtaaggaagaagcattgctgctgatgaataagaatatcgacgtgctggagaaggccgttaagctcgccgctaagcagggcgctcacattatcgtaactcctgaggacggcatatacggttggatcttcactcgtgaaagtatatacccttatctggaggatattcccgatcccggagtgaattggataccctgccgggacccttggcgcaaatccaagaaaatgaatgagccggtgtcaaaagaactctgttatcactgccacagcgagtgcaatcagtatgggcagtggaaactgtaccggacctag

SEQ ID NO: 246568 - DNA, 624 bp, synthetic construct
  misc_feature 1..624: note = Description of Artificial Sequence: Synthetic coding sequence
  source 1..624: mol_type = other DNA
atgatcatttcacactttcctaaatgtgtggccgtcttcgcactgcttgccctgtcggtgggcgcactcgacacttttatagctgccgtatacgagcacgccgtgatcctgccaaacagaacagaaacacctgtcagtaaggaggaggctttgctcttgatgaataaaaatatcgatgtgctcgaaaaagccgtgaaacttgccgctaagcaaggggcacatataatagtgactccggaagacggaatatatggatggattttcacaagagagagcatctacccttatttggaagacatcccagaccccggtgtgaattggataccctgtcgcgatccgtggcgctttgggaatactcctgtccagcagcggctaagttgtcttgcaaaagacaactccatctatgtggtcgccaatatcggcgacaagaaaccgtgcaacgcgtcggattcccagtgtcctcctgacggacgctatcaatacaacacagatgtagttttcgactcacagggcaaactgctcgccaggtaccataagggagtcgaaagtaccccgcaaaagcaaagccgttgcactacaatgacctggaaacagcgggtggtctcctgttgctatcagaattag

SEQ ID NO: 246569 - DNA, 561 bp, synthetic construct
  misc_feature 1..561: note = Description of Artificial Sequence: Synthetic coding sequence
  source 1..561: mol_type = other DNA
atgtcccctaagccaagagccagtggacccccagccaaggccaccgaggccggaaagcgcaagagtagctcccagcccagccccagtgatcctaagaaaaagaccaccaaagtggctaagaagggaaaagcagtgaggcgtggacggagaggtaagaaaggagcagcaaccaaaatggctgctgttaccgccccagaggccgagagcgcgcctgccgctcccggacccagcgaccaaccttcccaggagctgcctcagcatgagcttccgccagaagaaccggttagtgagggcacacagcacgatccgctgtcccaggaagcagaattggaggaaccattatcacaagagtctgaagtggaagagccactgtcccaggaatctcaagtagaagaacccctgtctcaggagagtgaagtggaagagcccttaagccaggaatcccaggttgaagagcctctgagtcaggagtcggaaatggaggaacccctgtcgcaggagagccaggtcgaggagcccccaagccaggagagtgaaatggaggaacttcccagcgtctag

SEQ ID NO: 246570 - DNA, 621 bp, synthetic construct
  misc_feature 1..621: note = Description of Artificial Sequence: Synthetic coding sequence
  source 1..621: mol_type = other DNA
atgtcaccaaagcctcgcgcatctgggccaccggcaaaagccactgaggcaggaaaacggaaatcctcctctcaacccagcccctccgatcctaagaaaaagacaactaaagtggcgaagaagggaaaggctgtacgaaggggacggcgaggcaaaaaaggcgctgctacaaaaatggcagcagtgactgctcctgaagcagagtccgcccctgcagcgccaggaccatccgaccagccatcccaggagctgccccagcatgaactccccccagaggagcccgtttctgaggggacacaacatgaccctctctcccaagaggctgaattggaagagcccctgagtcaagaatccgaggtagaggagcctctgtctcaagaatctcaggtggaggaaccgctgagtcaagaatctgaagtggaggaacccctatcacaagaatctcaggtggaggaacctctgtcccaagagtccgaggttgaagagccattgagccaggagtcccaggtagaagagcctctgtctcaggagtccgaaatggaagaaccgctttctcaggagtctcaggtggaggagccaccctcccaggagtctgagatggaggagctgccttccgtttag

SEQ ID NO: 246571 - DNA, 420 bp, synthetic construct
  misc_feature 1..420: note = Description of Artificial Sequence: Synthetic coding sequence
  source 1..420: mol_type = other DNA
atgtctccgaaaccacgggcaagcgggcctccggctaaggcaactgaggcagggaaaaggaagagttcgtcacagcctagcccaagcgaccccaagaaaaaaacaacaaaggtagcaaagaaaggaaaggcggtgcggagggggaggaggggaaaaaaaggcgctgccacgaaaatggcagccgtgacagcacccgaagcggagtctgcccctgcggctccaggaccctcagaccagccctcccaggagctgccccagcatgagctcccacctgaagagcccgtaagtgaagggactcagcatgaccctcttagtcaggaatcagaggttgaagagcccctctcccaggagtccgaggtagaggagccgttgactgtctggatggctagtttttcccccgtgagcgagtccacggactag

SEQ ID NO: 246572 - DNA, 561 bp, synthetic construct
  misc_feature 1..561: note = Description of Artificial Sequence: Synthetic coding sequence
  source 1..561: mol_type = other DNA
atgagtcctaaaccccgtgcctccgggcctcctgcaaaagccacggaagccggaaagcggaagtctagctcccagccctctccatctgatcccaaaaagaaaaccactaaggtggctaagaagggtaaggcagtgcggcgtgggaggagaggcaagaagggagcggctaccaagatggctgcggtgaccgcacccgaagccgagtcaggccctgccgctccaggtcccagcgaccagccgtctcaagagcttcctcagcacgagctgccccctgaggagcctgtgtccgaaggcacccagcacgaccctcttagccaagagtccgagctggaagagccgctcagtcaggagagcgaggtggaggagccactttcccaggagagtcaggtagaggaacctctctcccaggaatcagaagtcgaggagcctctgagccaggagagccaagttgaggagccgctatcccaggagagtgaagtcgaagagcccctcagccaggaaagccaggtggaagaaccgctgagccaggagtctgaaatggaggagctgccatccgtctag

SEQ ID NO: 246573 - DNA, 501 bp, synthetic construct
  misc_feature 1..501: note = Description of Artificial Sequence: Synthetic coding sequence
  source 1..501: mol_type = other DNA
atgtccccgaagccccgtgcttctgggcctcctgccaaagccacagaggcaggcaagcgaaagtcatcctcccaacctagcccatcagaccccaagaagaagacaaccaaggtggccaaaaaagggaaggccgtcagaagaggccgtcggggtaaaaaaggagcagccacaaagatggcggcagttactgcccctgaggcggagagcggtccggctgctcccggaccaagtgatcagccctcccaagaactgccgcagcacgaactgcccccagaggaacccgtgtcggaggggacacagcacgatcctctctcccaggagtccgaactggaggaacctctgagtcaggaatcagaggttgaggaacctttgtcacaggagtctcaggtcgaagagcctctgtcgcaggaaagtgaggttgaggagcccctgtcacaggaaagtcaggttgaggagccactgtcacaggaatcagaaatggaagagctgcctagtgtttag

SEQ ID NO: 246574 - DNA, 378 bp, synthetic construct
  misc_feature 1..378: note = Description of Artificial Sequence: Synthetic coding sequence
  source 1..378: mol_type = other DNA
atgagcccaaaaccaagagcatccggcccacctgccaaagcgactgaggccggaaagaggaagtcttcttcgcagccatcaccctcagatccaaagaaaaaaactaccaaagtggccaaaaagggcaaagcagttcgccgtgggaggcgcggaaaaaaaggtgccgcaacaaagatggcagcagtgaccgctccggaagccgagagcggccctgccgcacccggaccttcagatcagccctcacaggagcttcctcagcatgagctcccccctgaagagcctgtgtcggagggaacacagcatgatcctctctcgcaggagagcgaactcgaggaacccctctctcaggagcgccctgcaacacctctgagtccctag

SEQ ID NO: 246575 - DNA, 378 bp, synthetic construct
  misc_feature 1..378: note = Description of Artificial Sequence: Synthetic coding sequence
  source 1..378: mol_type = other DNA
atgtcacctaaaccgagggcttctggccctcccgcaaaggctaaagagaccggaaaacgtaagtcgtcatcgcagccttctccatcaggcccaaaaaaaaaaacgacaaaagtggctgagaaaggggaagccgtaagagggggtcgcagaggtaaaaagggcgctgctacaaagatggctgccgtcaccgcacccgaagctgagtcaggaccagctgctccaggtccttcagaccagcctagtcaagagcttccacaacatgaacttcctcctgaagaacctgtgtctgaggggactcagcacgaccctcttagtcaggaaagtgaattggaagagcccttatcgaaaggcagacctagcactcccctctcgccatag

SEQ ID NO: 246576 - DNA, 2220 bp, synthetic construct
  misc_feature 1..2220: note = Description of Artificial Sequence: Synthetic coding sequence
  source 1..2220: mol_type = other DNA
atgcccggaaaaatggtagtcatcctgggagcttcgaacatcctttggatcatgttcgcagccagccaggcctttaaaatcgaaacaacccccgagagccgttatttggcccagatcggggatagcgtcagtctgacctgtagcacgaccgggtgtgagtcacccttctttagctggaggacacaaattgattcaccactgaatggcaaggttacaaacgagggaaccacttccaccttgaccatgaacccagtgagtttcggtaacgaacactcttacctgtgcactgcaacatgtgagagcagaaaattagaaaagggaatccaggtcgagatatattcttttcctaaggaccccgagatccacttgtctggtcccttggaggcaggcaagccaatcactgtgaaatgctccgtggccgatgtctatcccttcgatcgcctcgaaatagatcttctgaaaggtgaccacctgatgaagtcacaggagttcctggaggatgctgataggaaatcactggagactaaaagcctggaagtgaccttcacccccgttatcgaagacattggcaaagtccttgtatgtagggctaagctgcatatagatgagatggattccgtgcctacagttcgacaggctgtcaaggagctccaggtctatataagcccaaaaaacaccgtaatctccgtgaatccctcaaccaagctacaagagggagggtcggtgacgatgacctgctcatccgagggtctacccgctccagaaatcttctggtccaaaaagctggacaatggcaacctgcagcatctgtcaggcaatgccaccctcaccttgatagcaatgagaatggaagacagcgggatctatgtgtgtgaaggggtaaatctaataggcaaaaacagaaaggaagtcgagttaatcgtacaggaaaagccctttaccgtggaaatttcccccggacccagaatagcagcccagattggcgatagtgtcatgctgacatgctccgtgatgggctgcgaatctcctagtttctcatggcgcacacagattgactcccctctgagcgggaaggtgcggtctgaaggtaccaatagcacattaacactcagccctgtttcatttgagaatgagcattcttatctatgcacggtgacctgcgggcataagaaactggaaaaaggaatccaggttgaattgtactcgttcccacgcgacccagagatagagatgtctggtggtctggtgaacggcagctccgtgactgtgtcctgtaaggtaccctccgtctatccactcgatcgtttagaaatcgaactgctcaaaggcgagactatcctggagaatatagagttcctcgaggatacagatatgaagtcgcttgagaacaaatcacttgaaatgaccttcatcccgacaatagaggatactgggaaggcactggtttgccaggccaagctccatatcgatgatatggagtttgagccaaaacaacgacagagtacacagactctgtatgttaacgtagccccaagggatactactgttctggtgtccccaagctctatccttgaagaggggtcctccgtaaatatgacatgcctatctcaaggcttccccgctccaaagatattgtggtcacgccagctgcctaatggcgagctacagcctcttagtgagaacgccaccctcacactgatctctaccaaaatggaagatagtggcgtgtacttgtgcgagggcatcaaccaggccggacgcagccgtaaagaagtggaactaattattcaggtaactccgaaggatatcaaactcacagcatttccatctgagtctgtgaaggaaggagacacagtaatcataagctgtacatgtgggaatgtgcccgaaacttggattatcctcaaaaagaaagccgagacgggcgataccgttctgaaaagcattgatggcgcatacaccatccgaaaagctcaattgaaagacgcaggagtgtacgagtgtgaatcaaagaacaaggttggctcccaactccggtccctgacccttgatgtgcagggacgcgagaataacaaggactattttagccctgagctcctggtcctgtacttcgccagctccctcatcatcccagcgatcggcatgattatctacttcgcacggaaagctaacatgaagggctcttattccctggtggaagcccaaaagtcaaaggtgtag

SEQ ID NO: 246577 - DNA, 1944 bp, synthetic construct
  misc_feature 1..1944: note = Description of Artificial Sequence: Synthetic coding sequence
  source 1..1944: mol_type = other DNA
atgcccggaaagatggtggtgatactgggggctagtaatatactctggattatgttcgctgcctcacaggccttcaagattgagacgacccctgagtcccggtacctggcacagatcggcgactccgtgtcactgacttgctcaacaaccggttgcgagtctccattctttagctggagaacgcagatcgacagcccactcaatgggaaggtgaccaacgaagggaccaccagcaccctgaccatgaatcccgtcagctttggcaatgaacattcttatctctgcaccgccacctgtgaatccagaaagttagagaaagggattcaggttgagatttacagcttcccgaaagatccagaaatacacctctccggaccactcgaggccggaaagcccattacggtgaagtgctccgtggctgacgtctatccattcgatcggttagagatcgacctgctgaaaggagaccaccttatgaagtctcaggagttccttgaggatgcagacagaaagagtttggaaacaaaatcgcttgaagtcactttcacaccggtaattgaggacattgggaaggttcttgtgtgcagggctaagctgcatattgatgagatggattcagttccaacggtccgtcaggcagtgaaagagcttcaggtgtacatttcaccaaagaatactgtgatttcagtcaacccatctactaaattacaagagggagggtctgtgaccatgacttgctccagtgaggggctccccgctccggagatcttttggagtaaaaagctggacaacggtaatctgcagcaccttagtgggaatgccaccttaaccctgatcgccatgcggatggaagactctggcatttatgtatgtgaaggcgtgaatctcattggcaagaaccgaaaagaagttgaactgattgtgcaggcttttcctagggaccctgaaatcgagatgtctggtggactggtgaatggatcttccgtgaccgtgagctgtaaagtgccgagcgtgtatcccctggatcggctggagatagaactgctgaagggcgaaacgatcctggaaaacattgaattcctggaggataccgatatgaagagcctagaaaacaagagtttagagatgaccttcatccctaccattgaggacaccggcaaagctttggtgtgtcaagctaaactacatatcgacgatatggaattcgagccaaagcagaggcagtccacacaaactctatatgtcaacgtggcacccagggacacaaccgtgctggtgagcccctcatctatattggaggagggatctagcgttaacatgacctgtcttagtcaagggttccctgctcccaagatcctgtggtctcggcaactccccaatggtgaactgcagcccctcagtgagaatgccacgttgacattgatctctaccaagatggaggatagcggcgtatatctctgtgaggggatcaaccaggcaggtcgcagtcggaaggaagtggagctgattattcaggtgacccctaaagacatcaagctgaccgccttcccttcggaatccgtgaaagagggggacaccgtgatcatcagttgtacatgcgggaacgtacccgagacatggataatcctgaagaagaaggccgagacgggcgacacggtattgaagtccatagacggggcatatacaatacggaaggcccagctgaaggacgctggcgtctacgaatgcgaatccaagaataaagtaggcagccagcttcgcagtcttaccctcgacgtacagggacgggagaataataaggattacttttcaccagaactgctggtgctctatttcgccagctccttaatcattcctgccattgggatgatcatttattttgccaggaaggcgaacatgaaggggagctactctttagtggaggcccagaagtctaaggtctag

SEQ ID NO: 246578 - DNA, 1623 bp, synthetic construct
  misc_feature 1..1623: note = Description of Artificial Sequence: Synthetic coding sequence
  source 1..1623: mol_type = other DNA
atgccaggcaagatggttgttatcctcggtgcctccaacatactctggatcatgtttgcagcttctcaggcgtttaagatagagactacacccgaatcaagatatctggctcagattggggactccgttagcttgacatgtagcaccaccgggtgtgagtccccctttttctcctggagaacacagatcgattctcccctcaacggtaaggtgacaaatgaaggcacaacgtctaccctgaccatgaatcccgtcagttttggcaacgagcattcttatttgtgtacggccacctgcgaatccagaaaactggagaaaggtattcaggtagaaatttacagcttcccaaaggacccagaaatccatctcagtggacctctggaagcgggtaagcctattacggtgaaatgcagcgttgccgatgtgtacccctttgaccgcctggagatcgatctgctcaagggtgaccacctcatgaagagtcaggaatttctcgaagacgccgataggaagagccttgaaaccaagtccctcgaggtgacgttcactccagtcattgaagacatcggcaaggtacttgtgtgccgcgcaaagctgcatatcgatgaaatggacagcgttccgacagttcgccaggcggttaaagaactgcaggtgtatatttcccccaaaaatactgtcatctcagtgaaccccagcactaaactgcaggaaggcggaagtgtgaccatgacctgcagtagtgagggactgcccgctcctgaaatattctggtctaagaagcttgataatggcaacctccagcacctgtccggtaatgcaactttaacactgattgctatgaggatggaagattcaggcatatatgtatgtgagggggtgaacctgataggaaagaatcgcaaggaagtggaactaatcgtgcaggtggcgcctcgcgacacgacagtccttgtgtccccttcttcaattctcgaggaaggctcgtctgtgaacatgacttgtctttcccaaggctttcccgcaccgaaaattctgtggagccgtcagttacctaacggggagctgcagcccctgtccgagaacgcgaccctcacactgatctccaccaagatggaagactcgggcgtgtacctgtgcgaggggatcaaccaggcaggcagaagcagaaaggaagtcgagctcatcattcaggtgaccccaaaggatatcaaactgacagcttttccaagcgaatcagtcaaggagggagacactgtcattatctcgtgcacgtgtgggaatgtgcccgaaacttggattatcctgaagaaaaaggcagaaacgggagacactgtgctcaaaagcatcgacggagcctatacgatccggaaggcccagcttaaggacgccggagtctatgagtgtgaaagcaaaaataaggtgggctcgcagctgcgatcgctcactctggatgtgcaggggagagaaaataataaagactacttttctccggagctgttggtgctctactttgcctcatcactcattatcccagctattggcatgattatctatttcgccagaaaagcaaatatgaaaggttcttacagtctggtcgaggcccagaagtcaaaggtgtag

SEQ ID NO: 246579 - DNA, 2034 bp, synthetic construct
  misc_feature 1..2034: note = Description of Artificial Sequence: Synthetic coding sequence
  source 1..2034: mol_type = other DNA
atgcccggtaagatggtggtgattttaggtgccagtaacattctttggataatgtttgccgcttcccaagcgttcaagattgagaccacacctgagtcgagatacctcgcccagataggagattccgtctcgttgacatgttctacaaccggaagctttcctaaagatccggaaatccacttgtcaggacctttggaggctggaaagccaattacagtgaagtgttcggtggcagatgtgtatcccttcgatcgcttagaaatcgatctccttaaaggagaccacctcatgaaaagccaagagttccttgaggatgcggacaggaagtccctggaaacaaagagcctggaagttaccttcacccctgtcatcgaggatatcggcaaagtcctggtgtgcagagccaagctgcacatcgacgaaatggatagcgtacccacagtgcgccaggctgtgaaagagcttcaggtgtatatttcccccaaaaacaccgttatctcggttaatccttccaccaagctgcaggagggcggttccgtgactatgacttgttcaagcgagggactcccagcccctgaaatcttctggagcaagaagctggataacggcaaccttcaacacctgtccgggaacgccaccctcactctgatcgcaatgcggatggaggactcaggtatttacgtgtgcgagggagtgaacctgatcggcaagaataggaaagaggtcgagttaatcgttcaggagaagcccttcacggtcgaaatctcacctggcccacggattgctgcacaaattggcgattctgttatgctgacttgctccgtgatgggctgcgagtctccgagcttttcctggcgcacacagatcgactctcccctctctggcaaggtacggtccgagggcactaactcaaccctgactctctcccccgtgtcgtttgaaaacgaacattcttatttatgcacagtgacctgtggacataagaagctagaaaaagggatccaagttgagctctactcattccctcgcgatccggagatagagatgtctggcggactcgtcaatggaagcagcgtgacagtcagctgtaaagtgccctccgtttacccactggaccgcctggaaatcgagctgttgaagggagaaaccatcctcgagaatatcgagttccttgaggatacggacatgaagtctttagaaaacaagagcctggagatgacgtttattccaacaattgaggacaccggtaaagccttagtttgccaagccaaactgcacattgacgacatggagttcgaaccaaaacagagacaatctactcaaacactgtatgtgaacgtggctcctcgtgacactacagtcctagtaagcccgtcctcgatcctggaggagggttcttccgtcaacatgacctgtctgtcccaggggtttccggctcctaagattctttggagtcgccagctgcccaatggagaactgcagcctctgagcgagaatgctactctgaccctcatcagcacaaaaatggaggacagtggggtctacctttgcgagggcattaatcaagcgggtcggagccgcaaagaggtggaactgattatccaggtgactcccaaggacattaaactcactgccttcccgtcggaatctgtgaaggaaggagatacagtgatcattagttgtacctgcggaaatgttcctgagacatggataatactaaaaaagaaggctgagacaggcgacactgtgttgaagtcgatcgatggagcttatacgatcaggaaggcacagctgaaggacgcgggagtttatgagtgtgaatcaaaaaacaaggtgggctcacagctccgatcgttgactcttgatgtccagggccgtgaaaataataaggattacttttcccccgaactgctcgtgctatatttcgccagtagtctgattatacctgctattggaatgattatttattttgctcgaaaggcgaacatgaaagggtcctactctctagtcgaggcccagaaaagcaaagtttag

SEQ ID NO: 246580 - DNA, 1566 bp, synthetic construct
  misc_feature 1..1566: note = Description of Artificial Sequence: Synthetic coding sequence
  source 1..1566: mol_type = other DNA
atggaggcgaactggacggccttcttgtttcaggcacatgaagctagtcaccaccagcagcaggccgctcagaactcgctcctgcctttactgtctagtgcagtcgagccacccgaccaaaaaccgttgctccccatccccatcacacaaaagcctcagggagcacctgagactctgaaggatgcaattggaatcaagaaggagaaacccaaaacttccttcgtatgtacctattgcagtaaggcatttcgcgattcctaccacctaaggcgtcatgaatcctgtcataccggcataaagctggtctctcgcccaaagaaaactcctaccaccgtcgtacctttgatttcaaccattgcgggagatagttccagaacgagcctagtaagtaccattgccggaatcctttctaccgtgacgaccagctcaagcggcactaatccttcttccagcgcttccaccacagcaatgcctgtcacccaaagcgttaaaaagccatctaagccagtaaaaaaaaatcacgcttgcgagatgtgcggcaaggccttcagggacgtctaccatctgaacaggcataagttgagccactccgacgaaaagccattcgaatgtccaatctgcaatcagaggttcaagcggaaagacagaatgacctaccacgtgcgttcgcatgaagggggaataacaaagccctatacctgctcagtatgcggcaaggggttcagccggccagaccacttgtcctgccatgtcaagcacgtgcattctacagaacggccattcaagtgtcagacctgcacagccgcattcgccacaaaagaccggctgcgcacacacatggtaagacacgaaggcaaggtgagttgtaacatttgtggcaaactactgagcgccgcatatatcacaagccatctgaagacccacggacagagccaaagtataaactgcaacacttgcaaacaggggatcagcaagacatgcatgtccgaagagactagcaaccagaagcaacaacagcagcagcagcagcagcagcagcagcagcagcaacagcagcagcagcacgtaacttcatggccgggaaagcaagttgaaaccctgagattgtgggaggaggccgtgaaagcccgaaagaaggaagccgctaatctatgtcagactagcacagccgctacgactcccgtcactttgactacccccttctctatcacctcctctgtgtcaagcggcacaatgtcaaatcctgtgacagtggccgctgcaatgtctatgaggtcaccggtgaacgtgtcctccgcagtcaatatcacttcaccaatgaacatcggacatcccgtaacaatcacctcgcccctgtccatgacctcacccctcacactgactacccccgtgaatctgcccaccccagtgacggctccggtgaatattgctcaccctgtaactattacatcccctatgaatctgccaacccccatgacgctggcagcaccccttaatattgctatgcggccagtggaaagcatgccgtttctacctcaggccctgccaacctcacctccttggtag

SEQ ID NO: 246581 - DNA, 1566 bp, synthetic construct
  misc_feature 1..1566: note = Description of Artificial Sequence: Synthetic coding sequence
  source 1..1566: mol_type = other DNA
atggaagccaattggaccgccttcctgttccaggcccatgaagcttcacatcaccaacagcaggctgctcagaattccttgcttccactcctgtcaagtgctgtggaacctcccgaccagaagcccctgctgccaattcctatcacgcaaaaaccacagggagcacccgagacccttaaggatgctattggaataaaaaaagagaagcctaagacttcatttgtatgcacttactgtagtaaggccttccgtgattcctaccacctgaggaggcatgagagttgtcataccggaatcaaactggtgtccaggcctaaaaagactcctaccaccgtggtgccacttatcagcacaatcgccggagacagctccaggacaagtctggtttctaccatagccggaatactgtccaccgtgactacgagttctagcgggacgaatcctagtagttccgcgagtactaccgcgatgcccgtcactcagtctgtgaagaagccgtcaaagccggtgaagaaaaatcacgcgtgtgagatgtgcggcaaagcttttcgcgacgtgtaccacctgaaccggcacaagttgtcgcatagcgacgagaaacctttcgagtgccctatctgcaatcagagatttaaaagaaaggacagaatgacctaccatgtgcgctcccatgagggaggcatcacgaaaccgtatacatgcagtgtatgcggtaaagggttcagccgccctgatcacctaagctgtcacgtgaagcacgtccattcaacagaaagaccattcaagtgtcagacgtgcactgcagcctttgcaacaaaggacagactgagaacgcacatggtgcggcacgaaggcaaggtgtcttgcaacatctgtggtaagttgctgtctgccgcttacatcacaagccatctcaaaacacatggacagagtcagtccataaactgcaatacatgtaagcaaggcatcagtaagacttgcatgtcggaagagacgagcaatcaaaagcagcagcagcagcagcaacagcaacaacagcagcaacagcagcaacagcagcagcatgtgaccagctggcctggcaagcaggttgagactctgcgactgtgggaggaggctgtcaaggccagaaaaaaggaggcagccaacctctgccagacctctaccgctgcgaccaccccagtaaccctgaccacgcccttctctattacctcctcagtcagttctggcacaatgagtaaccctgtaaccgttgcagccgctatgtccatgaggtccccagtcaacgtctcctctgctgtcaatatcacaagtccaatgaacataggacaccctgtcacaatcaccagtcctctgtccatgacaagtccattgacactgacaacccccgtgaatctacctaccccagtaaccgcgccagttaacatcgcccaccccgtgaccattacatctcccatgaacttaccaacacccatgacactcgctgcgcctctaaacatcgccatgcggccagtggaaagtatgcccttcctcccgcaagctcttccaacaagtcctccatggtag

SEQ ID NO: 246582 - DNA, 1374 bp, synthetic construct
  misc_feature 1..1374: note = Description of Artificial Sequence: Synthetic coding sequence
  source 1..1374: mol_type = other DNA
atgcggccaccctcacctctccccgctaggtggctgtgtgtactggccggtgccttagcttgggccctgggccctgccggaggccaggctgccagactgcaggaggagtgtgattatgtgcaaatgattgaggtgcagcataagcagtgtttggaagaggctcagctggaaaacgagacaattggctgctcaaagatgtgggacaacctgacgtgctggccagccaccccacgaggccaggttgtggtccttgcctgccccctgattttcaaactgttctcctcgatacaagggagaaatgtcagccgcagctgcaccgatgaaggctggacccatctcgaaccaggcccttacccaatcgcctgtgggctggatgacaaggcagccagtctggatgagcaacagacaatgttttatgggagcgtcaaaacaggttatacaatcggatacggtctgagcctggccactctgctggtcgcaacagctattctgtctctgttcagaaagttgcattgcacccgcaattatattcatatgcacctgttcatttcttttatcctgcgcgcagctgcagtcttcatcaaagacctagccctcttcgatagtggcgagtctgaccagtgttcagaaggcagtgtaggctgtaaggctgcaatggtcttttttcagtactgcgtgatggcaaacttcttctggctcctggttgaaggcctatatctgtatacgcttttagccgtgagcttcttctctgaacgcaaatatttctggggctacatactgataggctggggggtgccatcaacattcaccatggtgtggaccatcgctcgtatacattttgaagattacggctgctgggacaccatcaacagtagcctttggtggatcattaaaggaccaattttgaccagcatcctggtcaactttatcttgtttatttgcatcattaggattctgctgcaaaaactgcgcccacccgatattcgaaaatcggatagctctccttactctcgcctcgcacggagcacgttgctactgattcctctcttcggcgttcattatataatgttcgcattcttcccagataattttaagcccgaagttaaaatggtctttgaactggtggtggggtccttccagggttttgtagttgccattctctattgttttctgaacggggaagtccaagccgaactccgaaggaagtggcgacggtggcatctgcagggagtgttaggatggaacccaaagtacaggcatccctctgggggatcaaacggagcgacctgttcaacccaggtgtctatgcttactcgagtctccccaggggcacggagatcctcatccttccaggctgaagtgtctctcgtgtag

SEQ ID NO: 246583 - DNA, 1251 bp, synthetic construct
  misc_feature 1..1251: note = Description of Artificial Sequence: Synthetic coding sequence
  source 1..1251: mol_type = other DNA
atgatcgaggtccaacataaacagtgccttgaggaggcccagttggaaaacgaaaccatcggatgctcaaaaatgtgggataacttaacatgttggcctgccacacctcgtggacaagttgtggtccttgcttgtcccctgatatttaaattattctctagcattcagggacgtaatgtgtcccgatcctgtaccgatgaaggttggacccacctggaacctgggccttacccaatcgcatgtgggctcgatgataaagcagctagcctggatgagcagcagacaatgttctatggctcggtgaagacagggtataccatcggttacggcctctccttggccactttgctggtcgccaccgccattctgtccctcttcaggaaactgcattgtactagaaattatatccatatgcatcttttcatctcattcattctaagagccgcagcagtgtttattaaagatctggccctattcgattcaggggaaagtgatcagtgctccgagggttccgtggggtgcaaggctgccatggtgttcttccagtattgcgtaatggctaactttttctggttgctggtggagggcctgtacctgtataccctgcttgccgtcagcttttttagtgaacgtaagtacttctgggggtatatcctgattggttggggggtgccatccactttcaccatggtgtggactatcgccaggatccacttcgaggactacggctgctgggatacgattaattccagtctgtggtggatcattaagggtccaattttaacatccatcttggtcaacttcatcctgttcatttgtatcattaggattttattacagaaactgcggcctcctgatatccgaaagtctgatagttcgccatacagtcgcctggctcgctctacgctgctgctcattcctctgtttggcgtgcactatattatgtttgcatttttccctgacaattttaaaccagaggtgaagatggtctttgagctggtcgtcggctcttttcaagggttcgtggtggccattctgtactgttttcttaatggggaagtacaggcagagctgcgcaggaaatggcgacggtggcacctccagggcgtgttaggttggaacccgaagtatcggcatccgagcggcggatccaatggagctacatgttctactcaggtctctatgctgactcgagtgagccccggagccagaagaagctccagctttcaggctgaagtgagcctggtatag

SEQ ID NO: 246584 - DNA, 744 bp, synthetic construct
  misc_feature 1..744: note = Description of Artificial Sequence: Synthetic coding sequence
  source 1..744: mol_type = other DNA
atgactcgacagagggtctggatgcgatgggctgtgaggcagccatggtcattctctaacatcgtgagctggctcacttcatccggctgctggtggagggcaagcacttgcacaccttgtctgccttctccaagttccttgtctggctctacaagcggtggcgtgccgtcaactttcaccatggtatggaccatcgctcgaattcacttcgaagattacggatgctgggacaccattaatagctcgctatggtggattatcaaaggaccaatcctgacaagtatcctggtgaatttcatcctcttcatttgtattatccgcatcctcctccagaaactgcgtcccccagacattcgaaaatctgattcatctccatactctcggctggcaagatctactcttctgctgatcccattgttcggtgtccactatattatgtttgcgtttttcccggacaactttaaaccagaggtgaaaatggtgtttgagctcgtggttggctcctttcaggggttcgtggtggcaattctgtactgcttcttgaacggcgaagtgcaagccgaactgcgccgtaagtggaggagatggcacctacagggagttctcggctggaacccaaagtatagacatccatctgggggttctaatggagctacctgcagtacacaggtctcaatgttgacgcgcgtgtcccccggtgctcgtcgatcaagttcattccaggctgaagtgagcctggtttag

SEQ ID NO: 246585 - DNA, 1230 bp, synthetic construct
  misc_feature 1..1230: note = Description of Artificial Sequence: Synthetic coding sequence
  source 1..1230: mol_type = other DNA
atgcgtgctggacggaggcctcggctgggcccatgggcaggtggctgctctaaaatgtgggacaatctgacttgttggccggcaacacccagggggcaggtggttgtcctagcctgccccctcatttttaaattgttttcctcgattcagggccgaaatgtgtctcggtcatgcacagatgagggctggacgcacttggaaccagggccttatcccattgcttgcggacttgacgacaaagcagcatccctggatgaacagacgatgttctatggctctgtgaaaacagggtataccatcggctacggcttgtcattggctaccctcctggtggccacggctattttgagcctcttcaggaagctccactgtacacgcaactacatccacatgcatttatttatcagcttcattttgcgcgcagcggctgtatttatcaaagatctggcgctttttgactcaggcgaatccgatcagtgtagcgaaggctccgtaggttgcaaggccgcaatggtcttttttcagtattgcgttatggcaaattttttttggctgctcgtggaaggtctgtacctatatacactgttagccgtttctttcttctctgagcgtaaatatttttggggttatatcctgatcgggtggggagtgccctcaacttttactatggtgtggactatcgccaggattcatttcgaggattacggttgttgggacacaattaatagtagcctgtggtggattatcaagggtcccatactgacaagcattctcgtgaattttatactcttcatctgtataatcagaatcctgcttcagaaactccgcccaccagatatccgaaagtccgactcttctccatactccagactcgcgagatccacccttctgctgatacctctgtttggcgttcactatatcatgtttgccttctttccggacaattttaagccggaggtcaagatggtatttgagctcgtcgtcggctcctttcagggattcgtggttgcaattctctattgcttcctgaatggcgaggttcaggcagagctgaggagaaagtggcggcgatggcatctccagggcgtcctgggatggaatccaaagtacagacacccaagtggcggtagcaatggggcaacctgctctacgcaggtgtcaatgctaactcgcgttagccccggagcccgtaggagctcctcctttcaggccgaagtgagcctggtgtag

SEQ ID NO: 246586 - DNA, 1317 bp, synthetic construct
  misc_feature 1..1317: note = Description of Artificial Sequence: Synthetic coding sequence
  source 1..1317: mol_type = other DNA
atgcggactctgcttcctcctgccctcctgacatgttggctcctcgctcctgtaaactcaatccacccggaatgtcgatttcatttggaaatacaggaggaagagaccaagtgcgccgaacttctgcgctcccagaccgagaaacacaaagcctgcagcggcgtgtgggataatatcacttgctggcgcccagctaatgtgggggagaccgttaccgtgccctgccccaaagtgttctccaatttttatagcaaggcagggaacattagtaaaaactgtactagcgatggatggtcggagacgtttcctgacttcgtggacgcctgtggatacagcgatccagaggacgaaagcaagattacattttatatcttggttaaagctatctacacccttggatatagcgtgtccttgatgagccttgccacgggaagcatcattctctgtctctttcggaagcttcactgtacacgtaactacatccacttgaatctgtttctgtcgttcattcttcgtgccattagcgtgctagttaaggacgacgtgctgtattcgagtagcgggacattgcactgccccgatcaaccaagcagttgggtgggatgcaagttgtccctagtctttttacagtattgtatcatggccaacttcttttggctgcttgtcgaaggattataccttcatacattgctggtggccatgctcccacccaggagatgtttcctggcttatctgctgattggttggggcctgcccacggtctgcatcggtgcatggacggccgctagactctatcttgaggatactggttgttgggatacgaacgaccatagtgttccttggtgggtcatccggatacccattttaatttcaatcatcgtgaacttcgtccttttcattagcatcattcggatcctcctgcagaaactgacttcacctgatgtgggcggtaacgaccagagccagtacaaacggctcgccaaaagcaccctcctgttgattccactgtttggggttcactatatggtgttcgctgtgtttccgatctctatttcctccaagtatcaaattctcttcgaactgtgcctggggtcgttccaaggcctggtcgtggccgttctgtattgcttcctgaacagcgaggtccagtgtgagttgaagcgaaaatggcgctcgaggtgtccgacccctagcgcctcccgggattatcgggtttgcgggtcctcattcagcagaaacgggtctgagggcgctctccagttccacaggggaagtcgagcacagagttttttgcagacggagacttcagtgatttag

SEQ ID NO: 246587 - DNA, 1269 bp, synthetic construct
  misc_feature 1..1269: note = Description of Artificial Sequence: Synthetic coding sequence
  source 1..1269: mol_type = other DNA
atgcccctttgggaggccccatctgaccaccctgctaatccgccagctacccttcagggtcatacaagcctgcctggttgccaggaagaaccagccagagatccacagtctgggttgccacagataacatccgagtcttctagcttctctgagggcagcctgcccagttggtcatccggtccagctggagcaaagctaaacgcctctcacgagggcatcgggtcgtcgagcgatgggaacggcgactctaaagcggcaaccgagagggtcgtttcggcaatggatacagttagaaggaaacacccagagatcacgttttatattctggttaaggcaatctacacactgggttacagcgtctcactgatgtccctcgctaccgggtccattattctgtgcttgtttcggaagctccattgcacccgaaattatattcatctgaacctattcctctccttcattctccgagcaattagcgtgctcgtgaaagatgacgtattgtattcatcgagtgggacactgcactgcccagatcagccatcttcttgggttggctgcaagctgtctttggtttttctgcagtactgcatcatggccaactttttttggctccttgttgaaggtctgtacctgcataccctgctggttgcgatgttaccaccacgaagatgctttttggcctacctgctcattgggtgggggttgcccaccgtttgtatcggcgcatggactgccgcacggctgtatctggaggacaccggctgttgggatactaacgatcattctgtaccctggtgggtcataagaattcccatcctgatctctattatcgtcaactttgtgcttttcatcagtatcatccgaattctgctacagaaactcacctctcctgatgttggaggcaatgaccaatctcaatataaaagactagcaaagtcaacgcttttactaatccctctctttggcgtccattacatggtcttcgccgtttttcccattagcatcagtagcaaataccagattttattcgagttgtgccttggatcatttcaaggactggttgttgctgtactttattgcttccttaactcagaggttcagtgcgaacttaaacgtaagtggagaagccgctgcccaacgccttccgcctcccgcgattaccgagtgtgtggctcttccttctcccgaaacggatcagaaggtgctctccagttccaccgaggttctagggcgcaaagctttctgcaaacggagacgtctgttatctag

SEQ ID NO: 246588 - DNA, 234 bp, synthetic construct
  misc_feature 1..234: note = Description of Artificial Sequence: Synthetic coding sequence
  source 1..234: mol_type = other DNA
atgcgcacactgttaccaccggcactactgacctgttggcttctggcccctgttaacagtatccatcctgagtgtagattccatctggagatccaggaagaggagactaagtgcgccgaactgttgcgctcacagactgaaaagcacaaaggccatacaaagggtttcattcttatacacgccggaggcctcaagcgtatactcgatcctcacacatatcccctggccccatag

SEQ ID NO: 246589 - DNA, 2022 bp, synthetic construct
  misc_feature 1..2022: note = Description of Artificial Sequence: Synthetic coding sequence
  source 1..2022: mol_type = other DNA
atgtgctcacgagtgcccctgctgttgccacttctgctgttgctggcccttggcccaggcgttcagggctgcccaagcggatgccaatgctctcaaccccagacagtgttctgcacagctagacaagggactaccgttcccagggatgtacctcctgacacagtcggcttatatgtgtttgaaaatggcataacaatgctggacgctggaagcttcgccggactgcctgggctgcagctgctagacttgtctcagaaccaaattgcatctttgccctcaggggtctttcagccattggccaatctctccaacctcgacttgacggcgaatagacttcatgaaataacaaatgagactttccggggtttgagaaggctggaacgactgtacctgggtaagaaccgaatacgacacattcagcccggagcattcgacaccctcgacagactgctggaactgaaactccaggacaacgaactgcgcgcactgccgcctctgcgactccctaggctgctgctcctggatctgagccataattccttgcttgccctggagcccggtatcttggatacagccaacgtagaggccctccggctagccggactgggcctgcagcagctggatgagggattatttagtcggcttcgcaatctccacgaccttgatgtgtctgacaaccagttggagcgtgtgccgccagtgatcagagggctgcggggactgacccggctcaggctcgccggtaatactcggattgcacagctgcggcctgaagacctagcgggtctggccgcactccaggaactggacgtttcaaatctgagtctccaagcactccctggggatttgagcggcctgttcccgaggctgagactcttagccgcagcgaggaacccgttcaactgcgtttgtccgctctcttggttcgggccttgggtccgggaatctcacgtgactctggcttctcccgaggagacccgctgtcactttccccctaaaaacgctggtagacttttactggagctggattatgctgatttcggatgcccggctactactacaacggccacagtgcctactaccagaccagtggttcgggaacctactgccctttcctccagtctagcacccacctggttgtcgccaactgagcccgctacagaggccccatctcccccaagtacagcgcctcctactgttggtcctgtaccccagccgcaggactgtccaccttcgacttgcttaaatggaggcacttgtcatctaggtactaggcaccacctggcgtgcctatgccccgagggatttacaggcctttactgtgagtctcagatgggccagggtacccgcccatcaccaacgcctgtgactcctcggcctccaaggagtttgaccctgggaatagagcccgtcagcccaacaagtctgcgtgtgggcctgcagagatatctccagggcagttcggtgcagctgcggagcttacgcctcacataccgtaacctgtcagggcctgacaagcgactggtaaccctcaggctccctgctagtctcgccgagtataccgtaacacagctgcgcccaaatgctacttactcagtgtgtgtgatgcctttgggtccagggagggtgccagagggcgaagaggcttgcggagaagcccataccccacctgccgtgcactccaaccatgctcccgttactcaggcacgcgaaggaaatctgcccctgttgatagccccagcacttgccgctgttctcctagccgctctggccgcagtgggagccgcatattgcgtccggaggggcagagcaatggctgcagccgctcaggataagggccaggtggggccaggggcaggcccactggagctggagggggtgaaggtgccactggaacccggacccaaggccaccgagggaggaggagaagcgctgccatcggggtcagaatgtgaggtgccccttatgggcttcccaggacctggactccagtcccccctgcacgcaaagccatatatatag

SEQ ID NO: 246590 - DNA, 2538 bp, synthetic construct
  misc_feature 1..2538: note = Description of Artificial Sequence: Synthetic coding sequence
  source 1..2538: mol_type = other DNA
atggagttatggaggcaatgcactcactggctgatccagtgccgtgtacttcctcccagtcatcgagtaacctgggatggagcgcaggtgtgcgagttggcccaggctctacgcgacggagttcttctttgtcagctcctcaacaacctgctaccccatgccattaaccttagggaggttaacctgcggccacagatgtcccagtttttgtgtctgaagaatattcggacattcctctcaacatgttgcgaaaagttcgggctcaaaaggtctgagttgtttgaggcgttcgacctgtttgatgtgcaagattttggaaaagtaatctatacactgtccgctctctcgtggaccccgatcgcgcagaacaggggaatcatgcccttcccaaccgaagaggaaagcgtgggagatgaggatatttattcaggtcttagcgatcagatcgatgacacagtcgaggaagatgaggatctgtacgattgtgtagaaaatgaggaagcagagggggacgagatttacgaggacctgatgcgctccgagcctgtatctatgcctccaaagatgacagaatacgataagcgatgctgctgcttgcgcgaaattcagcagacagaggaaaagtatacggacacactcgggtcaatccaacaacatttcctaaaaccgttgcaacggtttctgaagccacaggatatcgaaataatatttatcaacatagaggacttgctcagagttcacacacattttctcaaggagatgaaggaggcattgggcacccccggagctgcaaacttgtaccaggtcttcattaaatacaaagagaggttcttagtgtacggcagatattgctcgcaggtcgagagcgcatccaaacacctcgaccgcgttgcagctgccagggaggatgttcaaatgaaactcgaggagtgcagccagcgcgctaacaacgggaggttcaccctgcgggacctgctgatggttccaatgcagagggtgttaaaataccatctcctgctccaggaactcgtgaagcacacacaggaggccatggagaaggagaaccttaggctggctttagacgccatgcgggatttggcccagtgcgtcaacgaagtgaagagggataacgagaccctgcgtcagattacaaatttccagctttccattgaaaatctggatcaatccctggcccactacggacgcccaaagattgatggggagctgaaaattacttctgtggagagacgctccaagatggacagatatgccttcttacttgacaaggcactcctgatttgcaagcgccgaggcgactcttacgatctgaaggactttgtgaacctacacagttttcaggtgcgcgatgatagcagtggggatcgggataacaagaagtggtcccacatgtttctacttatcgaggaccaaggagctcaagggtatgagttgtttttcaagacccgtgaactcaaaaaaaagtggatggaacaatttgaaatggccatctccaacatatatcccgagaacgccactgctaatggacatgactttcagatgtttagcttcgaagaaactacttcatgcaaagcgtgtcagatgctcctccggggtaccttctatcaaggttatagatgccataggtgccgcgcatccgcccacaaggagtgtcttggtagagtgccaccttgcgggaggcacgggcaggacttccctggcactatgaagaaagataagttgcatcggcgtgctcaggataaaaagcgaaacgaactaggactcccaaaaatggaagtattccaggaatattatggtctcccaccccctccgggagcaatcggcccttttttaagactgaatcccggagatatcgtcgagctgacaaaggcagaagcagagcagaactggtgggaaggcagaaacaccagcaccaacgaaatcggctggttcccttgcaacagggtgaagccatatgtacatggccctcctcaggatctctctgtccacctgtggtacgctggtcctatggagcgtgccggagccgaatctatcctcgcaaatagatcggacggaacatttcttgtccgccagcgcgttaaggacgcggctgagttcgcgatatctataaaatataacgtcgaagtaaagcacatcaaaattatgacagctgagggattgtatcgcatcaccgagaaaaaggcgtttaggggccttacggaactggtggagttttaccagcagaactctctcaaagactgcttcaagtctttggatactactcttcagttccccttcaaagagcccgagaaacgaaccatctcccgtccagcagttggtagcactaaatactttggcacagcaaaagctaggtatgatttctgcgccagggatcggagcgaactgagcctcaaggaaggcgacatcatcaaaatccttaataaaaagggccaacaggggtggtggaggggtgagatttacggacgggtaggttggtttccggctaattacgtggaagaggactatagcgagtattgttag

SEQ ID NO: 246591 - DNA, 2247 bp, synthetic construct
  misc_feature 1..2247: note = Description of Artificial Sequence: Synthetic coding sequence
  source 1..2247: mol_type = other DNA
atgtctcagttcctgtgtctcaagaacattcggacctttctctccacatgctgtgagaagttcggattgaaacggtccgagcttttcgaggctttcgatttgtttgacgtacaggatttcggcaaagtgatatacaccttgagcgcccttagttggacccccatcgctcagaaccggggtattatgccctttccaaccgaggaggaatccgtgggcgacgaggatatttactccgggttgagtgatcagatcgacgacacagtggaagaggacgaggacctttacgattgcgtggagaacgaggaggctgaaggagatgagatttatgaggacctgatgaggagcgagcccgtgagtatgcctcatttcctcaaaccgctgcagcgtttcctgaagccccaggacattgagatcatatttatcaatattgaggacctgctgcgcgtacacactcacttcttaaaggaaatgaaagaggcactgggcacgcccggagcagcgaatctgtaccaggtgttcattaagtacaaagagcgcttccttgtttacggaaggtactgttcacaagtggagtctgcctctaaacatctcgatcgggtagcagccgctcgcgaggatgtgcaaatgaagctcgaagagtgctcacaacgggctaataacggtcgatttacgttgcgagacttgttgatggtcccgatgcagcgggtccttaaatatcatctactcctgcaggaactggtgaagcacacccaggaggcgatggaaaaggaaaatctgcggctcgccctcgatgccatgcgagatcttgcacagtgcgtaaatgaagtgaagcgagacaatgagacgctccgccagattactaattttcaattaagcattgaaaatttagaccagagcctagctcactacggtcggcctaagatcgacggggagctgaagattacaagcgtcgaaagacggagcaagatggaccgctacgcttttctgctcgacaaagccctgctaatttgtaaacgtcggggtgactcttacgacctcaaagatttcgtgaatttacactcttttcaggtgcgcgatgacagtagtggggatcgcgataacaagaagtggtctcatatgttcctcctaatcgaggaccagggtgcccaggggtacgagcttttcttcaaaactcgggagctgaagaagaagtggatggagcagttcgaaatggccatcagcaatatctacccagagaacgctaccgccaacggccacgatttccagatgttcagttttgaagagacaacttcctgtaaagcttgccagatgcttctgaggggcaccttctatcaaggataccggtgtcatcggtgccgcgcatctgctcacaaggagtgcctggggcgtgtgccgccttgcggtaggcacggacaagattttccgggaactatgaaaaaagacaagctgcaccggcgagctcaggataagaaacgaaatgagttaggacttcccaagatggaggtattccaggagtactacggtttgccaccgccacctggcgcaatcggcccttttctcaggcttaatcctggagatatcgttgaattgaccaaggcagaagcagagcagaactggtgggaagggcgaaacacatccacaaatgaaattgggtggttcccctgcaatcgggttaagccttatgtgcacgggccaccacaggatttgtctgtccacctgtggtacgccggtccaatggagcgagctggtgccgagtctattctagctaacagatcagacgggacctttttggttaggcaaagggtcaaggatgcagcagaatttgcaatcagcatcaaatacaatgtggaggtgaaacacattaaaattatgaccgccgaggggctctacaggattacagagaagaaggccttcaggggtctgactgaattggtggaattttatcaacagaatagcctcaaagattgctttaagagcctggacacaactctccagttcccatttaaggagcccgagaagcgaacaatctcaagaccggctgttggcagcacaaagtactttggcaccgctaaggcgagatacgacttctgcgccagggaccgcagtgaactctcactgaaggagggcgatattataaagatactcaacaaaaaaggtcagcaaggctggtggaggggtgaaatttacggcagggtgggatggtttcccgctaattacgtggaggaagactattccgagtattgttag

SEQ ID NO: 246592 - DNA, 2442 bp, synthetic construct
  misc_feature 1..2442: note = Description of Artificial Sequence: Synthetic coding sequence
  source 1..2442: mol_type = other DNA
atggagctgtggagacagtgtactcactggcttatccaatgccgcgtactcccgccttcacacagggtgacctgggatggagcacaggtttgtgagctcgcccaggcccttagagatggcgtccttctgtgccagttactcaataacctccttccccacgctatcaatcttagggaggttaatcttcgacctcagatgtcccagtttctgtgcctcaagaatatccgcacctttctgagcacttgttgcgaaaaatttggacttaaaaggtccgagctgttcgaagccttcgacttgttcgatgtgcaagatttcggaaaagtgatctacaccctgagcgccctatcctggactccaatcgctcagaaccgcggaattatgccattccccacagaggaggagagcgtgggggacgaggacatctactctggtctttcagatcagatcgacgataccgtcgaggaggacgaggatctctacgactgtgtcgaaaacgaggaggccgaaggcgatgaaatttacgaggacctgatgaggtctgaacctgtgtcaatgccacattttctcaagccgcttcaacggttcctgaaaccccaggacatcgagataatctttataaacattgaggacctccttcgggtacacactcactttcttaaggaaatgaaagaagctctcggcaccccgggagccgcaaacttgtaccaggtgttcataaagtacaaggagaggtttctggtttacggtcggtactgctcccaggttgaatcagcttccaaacaccttgaccgagtagctgcggctagagaggacgtccagatgaagctggaagagtgcagccagcgggcaaataacggcaggttcaccctgagggacttgcttatggtacctatgcaacgtgttctgaaataccacctgctcttacaggagctggtaaagcacacacaagaggccatggagaaagaaaacctgagactcgccctcgacgccatgagggacctagcccagtgcgtaaatgaggttaaacgagataatgagactctgaggcagatcaccaacttccagttatcgatagaaaatctggatcagtccctggcccattatggtcggcctaaaatcgacggggaacttaagattacttctgtggaaagaagatcaaagatggatagatacgctttcctgttggacaaagccctgctgatctgcaagcgcaggggggactcgtatgacctgaaggattttgtcaacctgcattctttccaggtgagagacgatagttcgggtgaccgtgacaacaagaagtggtcacatatgttcttgctcatcgaggaccagggggcacaaggctatgaactgttcttcaagacccgcgagctgaagaagaaatggatggaacaattcgagatggctatctcaaatatttaccctgagaacgctactgccaacggccatgacttccagatgttttcctttgaggagactacaagctgtaaggcctgtcaaatgctgctccggggaaccttttatcagggttatcgctgtcaccgctgcagagccagcgcccataaggaatgcctgggcagagtgccgccatgtggacgccatggccaggactttcccggtaccatgaaaaaggacaagctgcatcgtcgggctcaagacaagaagcgaaacgaattaggcctccctaaaatggaagtttttcaggaatattacggcctgcctccacctcctggggctattggtccatttctgagactgaaccccggagacatagttgaactcaccaaggccgaggctgagcagaattggtgggagggccgaaatacctctacaaacgagatcggatggtttccatgtaatcgagtaaagccctacgtgcacggacctcctcaagatctgagcgtccacctgtggtatgctggaccaatggaacgggctggggctgagtccatcctggctaaccggtccgacggcacatttctcgtgcgccagcgggtcaaagacgcagccgagtttgctatttctattaagtacaacgtggaggtcaagcatattaaaattatgaccgccgaagggctgtatcggattactgagaaaaaggcttttcgcggactaacggagctcgtcgagttctatcagcagaattctttgaaggactgttttaagtctctggacactacactgcaattcccttttaaggagccagaaaagagaactattagccggccagcagtcgggagtacgaaatattttggcacagccaaagctaggtatgacttttgtgctagagaccgcagcgagttatctctgaaagagggagacatcattaaaatcttgaacaagaaaggccaacaggggtggtggaggggagaaatatacggccgtgttgggtggttccctgccaattacgtggaggaagactattcagagtattgttag

SEQ ID NO: 246593 - DNA, 2538 bp, synthetic construct
  misc_feature 1..2538: note = Description of Artificial Sequence: Synthetic coding sequence
  source 1..2538: mol_type = other DNA
atggagctttggaggcagtgcacccattggctcatacagtgtagagtgcttccaccatctcaccgtgtgacatgggacggggcacaggtatgtgagctcgcgcaagcactgcgggacggggtcctcctgtgtcaattactgaacaatctcctgccacatgcgatcaacttgcgagaggtgaatttgaggcctcagatgtcgcagtttctttgcctgaaaaacataagaacttttctttcaacttgctgcgagaagttcggactcaaaagatctgagctcttcgaagccttcgatctgttcgatgttcaagactttggaaaagtgatctacactctgagcgcactatcctggacccctattgcccagaacagagggatcatgcctttcccgaccgaagaagagagtgttggggacgaggatatttactccggtcttagtgaccagattgatgacaccgtggaggaggacgaagatctgtatgattgtgttgaaaacgaagaagcagagggagatgagatttatgaagatttgatgaggtcagagccagtttccatgcccccaaaaatgacagagtacgacaaacgctgctgctgcctgagggaaatccagcaaacggaagaaaagtataccgatactttgggttccattcaacagcacttccttaagccactgcagcggttcctcaagcctcaggacattgagattattttcattaacatcgaggatttgttgagagtccacacccattttctgaaagaaatgaaggaagcgctcgggacccccggagctgccaatctgtatcaggttttcattaagtacaaggagcggtttctcgtctacggaagatattgttctcaggtggagtctgcctccaagcacctagacagggtggccgcagccagggaggatgtacaaatgaaactggaggaatgttcccagcgcgctaacaatgggagattcaccttacgggatctattgatggttccaatgcagagggtgctaaaatatcacctgttgctccaagaactcgtcaaacacacgcaggaagctatggagaaagagaatcttcgcctcgccctggatgcgatgagagacctggcacagtgtgtgaacgaagtgaagcgtgacaacgaaacgctcaggcagatcaccaacttccagttgtccattgaaaatttagatcagtctctcgctcattatggccgtcctaaaatcgacggcgagctgaagattacaagcgttgagaggaggtctaagatggacaggtacgcgttcttactagacaaggccttgttgatctgcaagaggcggggagactcttatgatctgaaggattttgtgaatctgcattcgtttcaggtccgcgatgactccagtggggacagagacaataaaaaatggtcccacatgtttctgttgatcgaggatcagggcgcacaagggtatgaattatttttcaagactcgcgagcttaaaaaaaagtggatggagcagttcgaaatggcaatcagcaacatctatcccgagaacgccaccgcaaatgggcatgacttccaaatgttctcgtttgaggaaacaacgagttgcaaagcctgtcagatgttgctccgcggaacgttctaccagggctaccggtgtcatcgttgccgagcctccgcacacaaagaatgccttggaagggttccaccgtgcggccgacatggccaggactttccaggcaccatgaaaaaggataagctccaccggagagcacaggacaagaaacggaatgaactggggttgcctaagatggaggtgttccaggagtactacgggttgcccccaccaccaggggcaatcggaccatttctgagactaaatccaggcgacatcgtggaattaaccaaagccgaagctgaacagaactggtgggaaggccgaaacacttccactaacgagatcggttggtttccctgcaatcgggttaagccatacgtgcatggcccaccccaggatttatctgtacacctctggtacgccggtccaatggagcgcgctggtgccgaaagcatccttgccaatcgcagcgacgggacttttctagtaaggcagcgcgtgaaggatgccgcagaatttgccattagcattaagtacaatgtggaggtgaagcacattaaaattatgacagccgagggcttgtacaggattactgagaagaaagcgtttcggggattaacagaactcgtcgagttctaccagcaaaactcactcaaggattgtttcaagtctctggacacaaccttgcagttcccatttaaggagcctgaaaaaagaactatctcccgcccagccgtcggctcaacgaagtattttggaacagctaaggctaggtatgatttttgtgctagagatcgctcagagctgagcctcaaagagggcgatatcataaagattcttaacaagaaagggcagcagggttggtggcgaggtgagatttacggcagggtgggatggttcccagctaactatgtcgaagaagattattccgaatattgctag

SEQ ID NO: 246594 - DNA, 2607 bp, synthetic construct
  misc_feature 1..2607: note = Description of Artificial Sequence: Synthetic coding sequence
  source 1..2607: mol_type = other DNA
atggagcagtggcgacagtgcggtcgatggttgatcgactgtaaagtcctgccacctaatcacagagtggtgtggccatcagccgtggtgttcgaccttgcccaggctctgagggatggtgtcctactttgtcagctactccataatttgagccccggatccatcgatctgaaggacataaacttccgccctcagatgtcacagttcctttgcctcaagaatatccgaactttcttgaaagtttgccatgataaattcggactcagaaattctgagcttttcgatcccttcgacctgtttgacgtgcgtgactttggtaaggtcatttctgccgtgagtagactgtcactgcactccattgcgcaaaataaggggatcaggcctttcccgtcagaagaaaccacagaaaatgatgatgacgtgtaccgatctctcgaggagttagcagacgagcacgacttgggcgaagatatttacgactgtgtgccgtgcgaggacggcggagatgacatctatgaggacataattaaagttgaggtacagcagcccatgaagatggggatgaccgaggatgacaaaagaaattgttgtctgctcgagattcaggaaaccgaggccaagtactaccggactctagaagacattgaaaagaattacatgtccccgcttagactggtgctctctcctgctgacatggctgcagtgtttatcaatctggaagaccttattaaagtgcatcatagctttctcagggcaatcgacgtgtcagtgatggtgggagggtcaaccctcgccaaggtatttctagatttcaaggaacggctactgatttatggcgagtactgttcccatatggagcacgcgcaaaatacacttaaccagctgctggcatcccgcgaagattttcgacaaaaagttgaggaatgcaccctgaaagttcaggacggaaagtttaagctgcaggacctcttggtggtccccatgcagagggtgctgaagtatcaccttttactcaaagagctgctctctcattccgcagagagacctgaacggcaacagttgaaagaggctctggaggccatgcaggacttggccatgtatatcaatgaggtaaaaagagataaagaaacgctccgcaaaatctccgagttccaaagtagcattgagaacctgcaggtaaagctggaggagttcggtcgcccaaagattgacggggaattgaaagtgagaagcatcgtgaatcataccaaacaggaccggtatctcttcttgtttgataaggtcgtgattgtgtgcaagcggaaaggatactcctacgagctgaaggaaatcatcgaactgctcttccataagatgacagatgatccaatgaataataaggacgtgaagaagtggagctacgggttttatctgatccatctgcagggaaagcagggatttcagttcttttgtaagacagaggatatgaagcgcaaatggatggaacagtttgaaatggctatgagtaacattaaaccagacaaggctaacgcaaatcatcatagcttccaaatgtatacttttgacaagacgactaactgcaaagcatgcaaaatgtttctccggggaactttttaccagggctacatgtgtacgaagtgcggcgtgggggcacacaaggagtgtttagaggtcatcccaccctgcaagtttcgcaccagtggagatagagacgcctccggggcaggcccagggccaaagatggtggctatgcaaaactaccatggtaaccccgctccacccggtaaacctgttcttacattccaaacaggagatgtactcgagctgctgcggggtgatcccgaatccccatggtgggagggcagacttgtgcagaccagaaaaagtggctattttcctagctcgagtgtaaagccatgccctgtggatggcaggccccctatttctcggcctccctcacgcgagattgattacactgcttacccttggtttgctggcaatatggagcgtcaacagaccgacaacctcctcaaatctcacgcaagcggtacatacttgattcgcgaacgccctgccgaagccgaaagattcgctattagcattaagtttaacgatgaagtcaaacacattaaggtagtggaaaaggacaactggattcatatcacagaagcaaagaagttcgactcacttctagagcttgtcgaatactatcagtgtcattccctcaaggagagtttcaagcagcttgacaccacactgaagtatccctataagtcccgagaacgctctgccagtagggcttcttccaggagccctgcgagttgtgccagttataacttctcctttctaagtccgcagggactgtcctttgctagtcagggcccatctgcgcctttctggagcgtgtttacccctcgagtcatcgggaccgcagtcgctcgctataacttcgcagctcgggacatgagagaattgagtttgagggagggtgatgtcgtcagaatttacagcagaataggaggggatcaagggtggtggaaaggggagacgaatgggaggattggctggttccctagtacctatgtggaagaagaagggattcagtag

SEQ ID NO: 246595 - DNA, 2637 bp, synthetic construct
  misc_feature 1..2637: note = Description of Artificial Sequence: Synthetic coding sequence
  source 1..2637: mol_type = other DNA
atggaacaatggcgccaatgtgggagatggctaattgactgtaaggtgcttcccccaaaccatcgagtggtgtggccatctgccgtggtgttcgaccttgctcaggcgctgagagacggagttctcctttgtcagctcttacataacctctcacctggctccatagatctcaaagatatcaactttcgtcctcagatgtctcagtttctgtgcttgaaaaatatcagaaccttcctgaaggtgtgccatgacaagttcggcctcagaaacagcgagctattcgatcctttcgatcttttcgatgttcgagacttcgggaaagtgataagcgctgtaagtcgactgagtctgcattctatcgcacaaaacaaaggtattaggccttttccatcagaggagacaacagagaatgacgatgacgtatatagatccttggaggagctggcagatgagcacgatctaggggaggacatttacgattgtgtaccttgtgaagatgggggagacgatatctatgaagacattataaaggtcgaggttcagcagccaatgataagatatatgcaaaagatgggaatgacagaggacgacaagaggaattgctgtctgctggaaatacaggaaactgaggcaaagtactatcggacactagaggatattgaaaaaaattacatgtcccccctacggctagtgttaagcccggctgacatggcagcagtattcatcaacctagaggacttgattaaagtgcaccactcattcttgagagctatcgatgtaagtgtaatggtagggggatcaaccctggccaaggtgttcctcgacttcaaagagcgtctgctgatctacggcgaatattgttctcatatggagcacgcccagaacaccctgaatcagctcctcgctagccgggaggatttccggcagaaggtcgaggaatgtacactgaaggtgcaggatggcaaattcaagctgcaagacttactggttgtccctatgcagcgcgtgctcaagtatcacctgctgttgaaggaacttctgtcacactcggcagagcgccctgaaaggcaacagctgaaggaggctctggaggccatgcaggatctggccatgtacataaacgaggttaagagagataaggagacgttgcgcaagatcagcgaatttcagtcaagtatcgaaaatttacaggtgaagcttgaggaatttgggcgaccgaagatcgacggcgagctgaaggtcaggagtatcgttaatcatactaagcaggaccgctatctgtttctgttcgacaaagtggtgatcgtctgcaaacgcaaggggtactcctacgagttaaaggagatcatcgagctattgttccataagatgacggacgatcccatgaataacaaggacgttaagaagagtcatgggaaaatgtggtcttacggcttttatctgatccaccttcaaggaaagcaggggtttcaatttttctgtaaaacagaggatatgaaacggaaatggatggaacagttcgagatggcgatgagcaacatcaagcctgataaagctaatgctaaccaccattctttccaaatgtatacatttgataagacaaccaactgcaaagcctgcaaaatgttcctaaggggcactttttatcagggatacatgtgcacaaaatgcggggttggggctcacaaggagtgtctggaggtgatccctccgtgcaagttcacatctcctgccgatctcgacgcttctggcgcaggtccagggcctaagatggtggccatgcagaactatcacgggaacccagcccctcctgggaagcccgtcctcacttttcagaccggcgatgtactcgagctgttgaggggggatccagagtccccctggtgggagggcagattggtccaaacgcgtaagtcagggtacttcccctcaagctctgtaaagccttgccctgtggacggacgaccaccaatttctcgacccccttcccgggaaatcgattacacggcatatccttggtttgctggtaacatggaacgccagcagactgataaccttcttaagtcacatgcatcaggtacatatctgatcagggaaagacccgctgaggccgagagatttgccatttccattaagtttaacgatgaggtgaagcatataaaagttgtggaaaaagataactggatccacattacggaggcaaaaaaattcgatagtctgcttgaactggtggagtattaccagtgccactcgttgaaagaatcattcaaacagctcgacactacactgaaatacccgtacaagtctcgtgagcgctctgcctcccgggcttcctctcggtccccagccagttgtgcctcctacaacttttcatttctgtcacctcaggggctctcatttgcttcacaaggcccatccgcccctttctggagtgtctttactcctcgtgtcatagggaccgcagtcgctcggtataacttcgcagccagagacatgcgggaactgagcttaagagagggcgatgttgtgcgtatctacagcaggattggaggcgatcagggatggtggaaaggtgagacaaacgggaggattggctggtttccctcaacatatgtggaagaagagggcatccaatag

SEQ ID NO: 246596 - DNA, 2607 bp, synthetic construct
  misc_feature 1..2607: note = Description of Artificial Sequence: Synthetic coding sequence
  source 1..2607: mol_type = other DNA
atggagcaatggaggcaatgtgggcgatggctgattgactgcaaggtgctccccccaaaccatcgggttgtatggccaagcgcggtggttttcgatctggcccaggcccttcgagatggcgtgcttctttgccaactccttcataatctctccccgggtagcatcgaccttaaagacattaatttcaggcctcagatgtctcagtttctgtgtctgaagaacatcaggaccttcctgaaggtgtgccatgacaaatttggactgagaaactccgaactgttcgacccatttgatctgttcgatgttcgtgacttcgggaaggtcatcagtgctgtgagtaggctcagtctgcactctatcgcacagaacaaagggatccgaccctttccgagtgaagaaaccactgagaacgatgatgacgtgtaccgtagtctcgaagaattggctgatgaacacgacttaggggaagacatttacgactgcgttccctgtgaagacggcggtgatgatatttacgaagacattatcaaagtcgaagtgcagcagccgatgaagatggggatgaccgaagacgacaagcggaactgctgcctgttggagatccaagagaccgaagccaaatattatcgcaccctggaggatatcgagaagaattatatgtctcctcttcggttggtcctctcaccggcagatatggctgccgtatttattaatctggaggacctgattaaggtgcaccactcctttctgcgagcaatcgatgtgtccgtgatggtcgggggttctacgctcgccaaagtttttctggattttaaagaaaggcttcttatttatggtgaatactgtagccacatggagcatgcccaaaacacccttaatcagctgctcgcaagccgggaggatttcaggcaaaaagtggaagagtgcaccctgaaggtacaggacgggaagtttaaactgcaggatctgcttgtggtccctatgcaacgggtactgaagtaccacctcctgctgaaagagttactgagtcacagcgccgagaggcccgaacggcagcagctgaaggaggcccttgaggcgatgcaagacctagccatgtatattaatgaggtgaagagagataaggaaacgctgaggaaaatttctgagtttcagtctagcatcgaaaatttgcaggttaagctggaagaattcggaaggcccaagatcgatggggagttgaaggtacgttcaatagttaatcacacaaagcaagacagatacctgtttctattcgataaggtggttatcgtttgtaagagaaaaggatatagctacgaactcaaagagatcatcgaactcctgttccacaaaatgacagacgatccaatgaacaacaaggacgtgaagaagtggagttatgggttttacctcatccaccttcaaggcaagcagggattccagttcttctgcaagaccgaagatatgaagcggaagtggatggagcagtttgagatggccatgagtaacataaagcccgacaaggctaacgctaatcatcattctttccagatgtatacatttgataaaactacgaactgtaaggcttgcaaaatgttcttgcgcggtacgttctatcaggggtacatgtgtacaaagtgcggtgtgggcgctcataaggagtgcttggaggtcattcctccttgtaaattcactagccctgcagatctggacgcttcgggtgcaggaccaggccctaagatggtcgccatgcagaactaccatggaaatcctgcgccaccagggaaacccgtactaactttccagaccggagacgtgctggagctccttaggggcgatcctgagtccccatggtgggagggaaggctggttcagacccgcaaaagcggctactttccgagctctagcgtgaagccctgtccagtcgacggacggccacccataagccggccacccagccgtgagattgactatacggcgtacccatggttcgccggtaatatggaaagacagcaaaccgacaacctcctgaaaagtcacgccagcggcacctatttaatcagagagcggccagctgaggccgagcgcttcgcaatttctatcaagtttaacgatgaagtaaaacacattaaagttgtggaaaaagataattggatccacatcacagaagccaaaaaattcgactctctactggaactggtcgagtactaccagtgtcacagcctaaaggaaagcttcaaacagctggacaccaccttgaaatacccttataagagcagggaaagaagtgcaagcagggcgagttcccgttctcccgcaagttgcgctagttataacttttcctttttgtctcctcaaggcctcagcttcgcctctcaaggccctagcgcccctttttggagtgtctttacaccacgagtaatcggcaccgctgtggcccgttataactttgcggctagagacatgagggagctttccttgcgagaaggcgacgtggtgcgcatctattccaggatcggcggagaccagggctggtggaaaggtgagactaacggcaggataggttggttcccctctacgtacgtggaggaggagggtattcagtag

SEQ ID NO: 246597 - DNA, 2520 bp, synthetic construct
  misc_feature 1..2520: note = Description of Artificial Sequence: Synthetic coding sequence
  source 1..2520: mol_type = other DNA
atggaacagtggcgacaatgtgggaggtggctgatcgactgtaaagtgctcccacctaatcatagagttgtgtggccttccgctgtagtgttcgacttagctcaggccctacgggacggcgtgttactatgccaactcctgcacaacctctcccctggttccatagacctgaaagacattaacttcagacctcagatgtctcaattcctgtgcttgaaaaacatccgaacttttctgaaggtgtgccatgataaatttggattgcggaacagcgagctgtttgatccgttcgacctctttgatgtcagggactttgggaaagtgatatcagcggtgagtcggctgtcactccatagtatcgcacaaaacaaaggaatccggccatttccttctgaagagacgacagaaaatgacgacgatgtatatagatctcttgaggagctggccgacgagcacgatctaggagaagatatctacgactgtgtcccctgtgaagacggcggtgacgacatctacgaggatattattaaggtcgaagttcagcaacccatgaaaatgggcatgaccgaggacgataagaggaattgttgtctcctggagattcaggagaccgaggccaaatattatcgcaccctggaggacatcgagaagaactatatgtcccccctaaggctggtactgtcccctgccgacatggcagccgtattcattaatttggaggacctgattaaggtccatcactccttcctgagagctattgacgtttctgtcatggtgggaggcagcacgttggcgaaggtgtttttggactttaaagaacgcctgctcatctacggagagtattgttctcatatggagcatgcccagaatactctgaatcagctcttggcgtcccgagaggactttcgccagaaggtggaggaatgcaccctgaaagtccaagacggaaagttcaaactgcaagacctcctcgttgtgccaatgcagcgcgtgctgaagtaccacctcctgctaaaggaacttctctcgcatagcgcagaacgccctgaacgtcagcaactgaaagaggctttggaagcgatgcaggaccttgctatgtatattaacgaagtcaaaagagataaagagaccctgaggaaaatcagcgaatttcagtcttcaatcgagaatcttcaagtcaagcttgaggagtttggcaggcctaagattgacggcgaattgaaggtgcgtagcatcgtgaaccataccaagcaggatagatatctgtttctattcgacaaagtggtgattgtgtgcaaaaggaaaggatactcctacgagctgaaagagatcatagagctccttttccataaaatgacggacgatccaatgaataataaagacgttaagaagtggtcatacggcttctaccttatccatctccagggcaaacagggttttcagtttttttgcaaaacagaagatatgaagcgaaaatggatggaacaattcgagatggcgatgagcaacatcaaacccgacaaggcgaacgctaaccatcactcttttcagatgtatacctttgataaaacaacaaattgcaaggcctgtaaaatgtttctcagaggtaccttttatcagggctacatgtgcaccaagtgcggagtgggagcccataaggaatgccttgaggtcattcccccatgtaagttcacatcccccgctgatctggatgcatcgggggctggccctggtccaaagatggtcgcaatgcagaattaccacggtaaccctgcaccgcctggaaagccggttctgaccttccagaccggcgatgtgctggagttgcttcggggagatccagagagtccttggtgggaggggcgactggttcagacacggaaaagcggctactttccctccagctcagtcaaaccttgcccagtcgatggacgcccacctatttctcgtcctccttctcgcgagattgattatacagcatatccctggttcgcgggtaatatggagaggcagcagaccgataatctgctgaagtcacatgccagcgggacctatttgatccgagagcgtcctgctgaagccgagcgttttgccatctccatcaagtttaacgacgaggtcaagcatattaaagtagtagaaaaagacaactggattcacattacagaagccaaaaagttcgacagcttgctcgagctggtggaatactatcagtgtcatagcttgaaagagagtttcaaacagttagacaccaccctcaagtacccttataaatccagggagaggagcgcgtctcgggcatcaagcaggtcaccggtgttcacaccccgtgtaatcggcaccgctgtcgccagatataatttcgcggcacgggacatgagggagctgagtcttagggaaggagacgtcgtgaggatctactcacggatcgggggagatcagggctggtggaaaggcgaaacaaatggacgcatcgggtggtttccgagtacatacgtggaggaagaagggattcagtag

SEQ ID NO: 246598 - DNA, 2544 bp, synthetic construct
  misc_feature 1..2544: note = Description of Artificial Sequence: Synthetic coding sequence
  source 1..2544: mol_type = other DNA
atggaaccttggaagcagtgcgcccagtggctcatccattgtaaagttctcccaaccaatcacagagttacatgggactccgcccaagtcttcgatctagcacagacattgagagacggggtgctcctgtgccagctgctgaacaatctgagagcacattctatcaacctgaaagaaattaacctgcgccctcaaatgagccagtttctttgtctcaaaaatattaggacttttctgaccgcctgctgtgagaccttcggaatgcgtaaaagcgaactgtttgaagcgttcgatctgtttgacgtgcgcgactttggcaaagtgattgagaccctgtcccgacttagtcggacgcccattgcacttgctacgggaatccggccattcccaacagaagagtctattaacgatgaggacatctacaagggactgcccgacctcattgatgagacgctggtagaagatgaggaagacctgtacgactgcgtctatggcgaagacgagggtggtgaggtctatgaagatctaatgaaggctgaggaagctcatcaaccaaagtgccctgagaacgatatccggagttgttgtctggcagaaatcaagcagacagaggagaagtataccgagacactggagtccatcgagaaatacttcatggccccacttaagcggttcctcacagcagctgagttcgacagcgtctttatcaacatccctgagctggtcaaattgcatcggaacctgatgcaggagattcatgatagcatcgtgaacaagaatgaccaaaacctctatcaggtttttattaactataaagaacgcttggtgatctacggccagtattgttctggagtcgagtctgccatatcctcactggattatatctccaaaactaaggaagacgtcaaacttaaactggaagaatgttcaaagagagctaacaatgggaagttcacgctccgagatctcctagtagtcccaatgcagagggtgctgaagtaccatctcctgctacaggaattggtcaaacacactactgaccccaccgagaaagcaaaccttaagctggccctcgatgccatgaaagatctagctcagtatgtcaatgaagtgaagagggacaatgagacactcagagagattaaacagttccagctgtcaatcgagaacctgaaccagcccgtgttgctttttggtaggcctcagggggatggagagatccggatcactactctggataaacataccaagcaagaacggcacatcttcctatttgacctagctgtcattgtgtgtaaacggaaaggcgacaattatgagatgaaggaaattatcgatttgcaacagtataaaattgccaataaccccacaacagacaaagagaataaaaaatggtcctacgggttttacctgatccatacgcaggggcagaacggccttgagttctactgcaaaactaaagatttgaaaaaaaagtggctggagcagttcgaaatggccctcagcaacatacggcctgactacgctgacagcaattttcacgattttaagatgcacacctttacccgggtaacgtcttgtaaggtgtgccagatgctccttaggggcactttctatcagggctacttgtgttttaaatgtggcgctagggcccataaggagtgcctggggagggtggacaattgcggcagggttaactctggtgagcaggggactctaaaattgcctgagaagagaaccaatggattaaggaggaccccaaagcaggtcgacccaggactaccgaagatgcaggtgatccgaaactacagcggaacaccacctcccgcactgcacgagggaccaccgctccagctgcaggcgggtgacacggttgaactgctcaagggcgacgctcatagcctcttttggcaggggcgtaatctcgcctctggtgaggtaggattctttccttccgatgctgtgaaaccttgcccatgtgtcccaaagccagtagactactcgtgtcagccctggtacgccggtgctatggagcgactccaggcagagaccgagctgataaacagagtgaattctacttatttggtgcgccatcgaactaaagagtccggtgagtatgccatttccatcaagtataataacgaagctaagcatatcaagatcctcacccgagatggcttctttcatattgccgaaaacagaaaatttaagtcactgatggagttagttgaatattacaagcaccatagtctgaaagagggctttagaaccttggacacaaccctacagttcccttacaaagagcccgagcacagtgcaggccagcgcggaaatagggccggaaactccttgctctcccctaaggtcctgggcattgcaattgccagatacgacttctgcgccagggatatgagagagctcagcctactaaaaggagatgttgtcaagatttacacaaaaatgagcgcgaacgggtggtggagaggggaggttaacggcagggtggggtggttcccctctacctatgtggaggaggacgagtag

SEQ ID NO: 246599 - DNA, 1671 bp, synthetic construct
  misc_feature 1..1671: note = Description of Artificial Sequence: Synthetic coding sequence
  source 1..1671: mol_type = other DNA
atgagtcagttcttatgcctgaaaaacataagaacattcctcacggcatgttgtgaaacttttggcatgagaaagtcagaactctttgaggcctttgatctatttgatgtccgggattttggaaaagtgatcgaaacgctcagtcggttgtcaagaacccccattgccctagccactggcatccgccctttccccactgaagaatcaatcaatgacgaagatatttataagggtctgcctgatcttatagatgagacacttgtagaagacgaggaggatctatatgattgtgtgtatggtgaggatgagggaggcgaggtctatgaggatctgatgaaagcggaagaagctcaccagcctaagtgcccggaaaacgatatcaggtcctgttgtttggctgagataaaacagacggaggaaaagtacacagagacactggagagcatagagaagtacttcatggcacccctaaaaagattcctcactgctgccgagtttgactctgtgtttatcaacatccctgagttggtgaagcttcatcggaacttaatgcaggagatacacgactcaattgttaataaaaacgaccagaacctgtaccaggttttcatcaactacaaagaacgccttgtgatctatggccagtactgctccggcgtagagtcagcaatcagtagtctagactacattagtaagaccaaagaggatgtgaaactgaagcttgaagaatgttccaagagggctaacaacggcaagtttaccctgagagatctgctagtagtcccaatgcagcgggttctcaagtaccacttacttctgcaagagctcgtaaagcacactacagaccccaccgaaaaggccaatctaaagttagctttggatgccatgaaggatcttgcccagtacgtcaatgaagtgaagcgggacaacgagactctcagggaaatcaaacagttccaactaagcattgaaaatctgaatcagcccgtgcttctcttcgggagacctcagggagatggcgaaattagaatcaccactctcgacaagcatactaaacaggagcgccatatatttctcttcgacctggccgttattgtgtgtaaacggaaaggagacaattatgagatgaaggagatcatcgacttgcagcagtacaagatcgctaataacccgactaccgacaaagaaaacaagaaatggagctacggtttctacctgattcatacccaaggtcagaatgggcttgagttttactgcaagacaaaggatttaaagaaaaaatggctcgagcagttcgagatggccctctctaacatcaggccagactatgcagacagcaatttccatgatttcaaaatgcatacatttacccgagtaacctcttgcaaagtatgccaaatgctgctgcgcggaacattctatcaggggtacctgtgttttaagtgtggcgctcgcgctcacaaggagtgccttggtcgggtcgacaattgtggccgagtgaactccggtgaacagggaaccttgaaactccctgaaaagaggaccaacggcctacgacgcacgcctaaacaagtggaccctgacgtcccctgcctgcttcacttcttcattagcatggcccctgccacaagatccatcgttaagtcccaaaagaagaataaaaagttttag

SEQ ID NO: 246600 - DNA, 864 bp, synthetic construct
  misc_feature 1..864: note = Description of Artificial Sequence: Synthetic coding sequence
  source 1..864: mol_type = other DNA
atgcccattttcacattccttagcgagcagggcacattgaagctccctgagaagcgaactaatggcctgcgcaggactcccaaacaggtggaccccggactgcccaaaatgcaggtcatccgcaactattcgggaacaccccctccagccctacatgaaggtcccccattacagttacaggctggagacactgtcgagctccttaaaggcgatgcacattccctgttttggcagggaaggaatttagctagcggcgaggtgggcttctttccgtctgatgctgtcaagccatgtccatgcgtccccaagccagtagattattcctgccagccctggtacgcaggcgcaatggaaaggttgcaggctgagaccgagttaattaatcgagtcaattccacctatctggtgaggcaccggaccaaagaaagcggagaatacgccatcagcattaaatacaacaatgaagctaagcacatcaagatccttacacgagatggtttctttcatattgccgagaataggaaatttaagagccttatggagctggtcgagtactataagcaccatagcctgaaggagggattcaggactctcgataccacactccagtttccctacaaggaacccgagcacagtgccggtcagcgcggaaatcgtgcaggaaacagccttctgtccccgaaggtgttgggcatcgcgatagccagatatgacttctgtgccagggatatgcgtgagctaagcttgctcaaaggcgacgtcgtgaagatttatactaagatgagtgcaaatggatggtggagaggagaggtcaacggccgagtgggctggtttccctccacttatgtagaggaggatgaatag

SEQ ID NO: 246601 - DNA, 2628 bp, synthetic construct
  misc_feature 1..2628: note = Description of Artificial Sequence: Synthetic coding sequence
  source 1..2628: mol_type = other DNA
atggagccctggaagcagtgtgctcagtggctgatccactgtaaggttctgccaacaaatcaccgcgtcacttgggattcagcccaggtatttgaccttgcccaaacattgagagatggggtccttctgtgccagctgcttaacaacctacgcgcacattccattaatctgaaagagatcaatttaaggccgcagatgagccaatttctgtgtttaaagaatataaggacttttttgacagcctgttgcgaaaccttcggcatgcggaagagcgagttgtttgaggcatttgacctgtttgacgtgcgcgactttggcaaagttatcgaaactttgtcgagactgagccgtaccccaattgccctcgctacagggatccgaccttttcctaccgaagaaagtatcaacgacgaagacatctataagggcttacccgacctgattgatgagactttggtcgaggatgaggaagatctgtatgactgcgtatacggtgaagatgaggggggtgaagtgtacgaggacctcatgaaggccgaagaggctcatcagcctaagtgccctgaaaacgacattcggtcttgctgcctcgccgagatcaagcagaccgaggaaaagtatactgaaacgctcgaaagcattgaaaaatacttcatggccccacttaagcgctttctgactgccgcagagttcgattccgtgtttatcaatattccggaactcgtgaagctgcaccggaacttgatgcaagaaatccacgactctatcgtcaacaaaaacgaccagaacctttaccaggtgtttatcaactacaaggaaagactggtgatctacgggcagtattgctcgggagtggaatctgctatctctagcttggattatatctcaaaaaccaaggaggatgtcaaattgaagctggaggagtgttctaagagagcaaacaacgggaagttcactcttagagacctgctggtggtccctatgcagcgcgtgctgaaataccacctgctgctacaggaattggttaaacataccaccgatccaacagagaaagctaacctcaagctcgcactggacgccatgaaagatctggctcaatatgtcaatgaagtgaaacgagacaacgaaactctacgcgagatcaaacagtttcaactgtcaattgagaatttaaaccagcctgtgctgctatttggacggccacagggcgatggggaaatcagaatcaccacacttgataaacacactaagcaggaacgccacatcttcctgtttgatctggctgtgatagtttgtaaacgcaagggggacaattacgaaatgaaagagatcattgatctccaacagtataaaatagctaataacccaaccaccgataaggagaataagaagtggtcatatggcttctacctgatccacacgcagggtcagaatgggctggagttctattgcaagactaaggaccttaagaagaaatggctggagcagttcgaaatggccctgagtaatattcggcctgactatgctgattcaaacttccatgacttcaagatgcatacgttcaccagagtgacgtcatgtaaggtgtgtcaaatgttactgcggggaaccttttaccagggctacctgtgttttaaatgtggggcaagagctcataaggaatgcctggggagggtggataattgtggacgagttaattcaggggagcaaggcacgctgaagctgcctgaaaaaaggacaaacggactccggagaactcccaagcaggtcgatccgggactgcccaagatgcaggtcattcgaaattattccgggacgcctcctcccgcactacatgagggaccccctctccagctgcaggctggggacacagttgagttactgaagggggatgcacactcccttttttggcagggcaggaaccttgcttcaggcgaagtcggattcttcccaagcgatgccgtaaaaccctgtccttgtgtaccgaaacccgtagactattcttgtcagccatggtacgcaggggcaatggagaggctacaggctgagactgagctgatcaatcgggtgaattccacctacctagtccggcaccgcacgaaagaatcaggtgagtatgcaatttcaataaagtataacaacgaggcgaagcacatcaagatcctaactcgtgatggtttctttcacatcgcagagaatcggaagttcaagtccctaatggagctggttgagtactataaacaccatagtctgaaggaggggtttagaaccctggacacaacactgcagtttccatacaaggagcccgagcacagtgcaggacaacgcggaaaccgggcaggcaactcaagcccgtccctcttctgtggtttctccttcgtaacacctccagactactcttttgtcccacctagcagcactcccttttggtccgtgttgtctcccaaagtcctgggcatcgccattgccagatatgatttctgcgcccgagacatgagagagctaagcctcttgaaaggagacgttgttaagatctacactaaaatgagtgccaatggttggtggcgcggtgaagtgaatggcagagttggctggttccccagtacttacgtggaagaggatgaatag

SEQ ID NO: 246602 - DNA, 756 bp, synthetic construct
  misc_feature 1..756: note = Description of Artificial Sequence: Synthetic coding sequence
  source 1..756: mol_type = other DNA
atgcaggtgatccgaaactacagcgggacccctcccccagccctgcacgaaggacctccactccagcttcaagccggagataccgtcgaactgctaaaaggagatgctcactcacttttttggcaaggtcgcaatctggcaagcggtgaggtaggctttttccctagcgatgccgttaagccctgtccttgtgtgcctaagccggtagactattcctgccaaccctggtatgcgggagccatggagaggctacaggcagaaactgagcttatcaacagggtgaactctacatatcttgtgagacacaggaccaaagaatccggcgagtatgctatctctattaagtacaacaatgaggctaagcatattaagatcctgacaagagacggattttttcacattgctgaaaaccggaagttcaaaagtctgatggagttggtcgagtactacaagcaccattccttaaaggagggttttcgaactcttgatacaaccctgcagttcccctataaagagccagagcactctgcaggacagaggggcaaccgcgctggcaatagcctattgtcccccaaggtgcttggtatagctattgccaggtacgatttttgtgccagagacatgcgggagctgtcccttctgaaaggcgacgtggtgaagatttacaccaagatgtcagcgaacggctggtggcgtggggaggtcaacggcagggtgggctggtttccgagtacttacgtcgaagaagacgaatag

SEQ ID NO: 246603 - DNA, 912 bp, synthetic construct
  misc_feature 1..912: note = Description of Artificial Sequence: Synthetic coding sequence
  source 1..912: mol_type = other DNA
atgtcttcagctcggtttgattcaagcgacaggagcgcctggtacatggggccagtgtctcgccaggaggcccagacacggttacaaggacaacgccacggcatgtttctggtgcgtgactcctcaacatgccccggtgattatgtgttgtctgtgtctgagaatagccgcgttagtcactacatcattaactccctaccgaaccgtaggttcaagatcggggatcaggaattcgaccacctgcccgctctgttagaattttataagattcattacctggatacaactaccctcattgagcctgcacctaggtacccaagccctcccatgggctcagtcagcgccccaaatctgccgacggctgaagataacctggaatacgttaggaccttatatgattttcccggaaatgatgctgaggatctgcccttcaaaaagggggaaatcttggtcatcatcgagaaaccagaggagcagtggtggtctgccagaaacaaggatggaagggtgggtatgatacctgtgccttatgttgaaaagctggtgaggagctccccgcatggcaagcacggaaacaggaactcgaactcttacggcattccagagccggcacatgcatacgcccagccgcagaccacaacaccgttgcctgctgtgtcaggctcccccggtgcggctataactcctctgccttcaactcagaacggaccagtgttcgcaaaggccattcaaaagagggtcccatgcgcgtatgataaaactgcattagctcttgaagtgggcgacatcgtcaaagtgacgcgaatgaacatcaacgggcaatgggagggggaagtcaatgggaggaagggactgtttcccttcacacacgtaaagatcttcgacccacaaaaccccgatgagaatgaatag

SEQ ID NO: 246604 - DNA, 912 bp, synthetic construct
  misc_feature 1..912: note = Description of Artificial Sequence: Synthetic coding sequence
  source 1..912: mol_type = other DNA
atgagctctgcaaggtttgactctagcgatagaagtgcctggtatatgggaccggtgtcgcgtcaggaggctcagactcggctccagggccagcgtcatggtatgtttctcgtccgggattctagcacttgcccaggagactacgtgctctccgtcagtgagaactcacgcgtgtcccactatattatcaactccctaccaaatcggagattcaaaattggagaccaggagtttgatcatctccctgcactgctcgaattctacaaaatccactacctggacaccaccaccctgatcgagcccgctccacggtatccgagcccacctatgggatccgtatccgcaccaaatcttcctaccgcggaggacaacctagagtatgtacggactttgtacgacttccccggaaacgacgctgaggatttgcccttcaagaaaggtgaaattctagttataattgaaaaacctgaggagcagtggtggtcagcccgaaacaaagacggccgagttgggatgattcctgtgccttatgtcgagaaattggtgaggagttcaccccacggcaagcacgggaaccggaactcaaatagttatggtatcccggagccagcccacgcttatgctcagcctcaaaccacaactcccctgccagcagtgtcaggaagccccggagctgctatcacccctctacccagcacccaaaacgggcctgtgttcgcgaaggcgattcagaagcgagtcccctgcgcttacgacaagaccgccctcgcactcgaggtgggcgacatcgttaaagtgacacggatgaacataaatggccagtgggagggcgaggtgaacgggagaaaggggttgtttccattcacgcatgttaagatctttgatccccagaatccagatgagaatgaatag

SEQ ID NO: 246605 - DNA, 3132 bp, synthetic construct
  misc_feature 1..3132: note = Description of Artificial Sequence: Synthetic coding sequence
  source 1..3132: mol_type = other DNA
atggagtttgtgagggcgctgtggttgggccttgcactggctctggggcctggctcagccggtggccacccacaaccctgcggcgtcctggcaagactggggggatctgttaggctcggcgctttgcttccgcgagcgccactcgctagggcacgcgcacgcgcagcactcgcccgagcagctcttgccccaagacttccgcacaatctaagcctcgagcttgtggtggccgcaccaccagcccgagatcctgcctccttgacacgagggctgtgccaggctctggtaccccctggtgtcgctgcccttttggcatttccagaggctagacctgagctgctgcagttacacttcctcgcagccgcaacagagacacctgtgctgtctttactgcgaagggaagcccgtgcgccattaggagctccaaatccgtttcacctccaactgcactgggcttcgcctctcgagaccctgctggacgtactcgttgccgtccttcaggcccacgcctgggaggatgtgggcctggctctgtgtagaacacaggatcccggaggcctggtcgcactctggacttcgcgggcaggtaggcctccccagctcgtgctcgatctctctagaagagacacaggggatgcgggattgcgggctcggctggctcccatggccgctccagtgggaggcgaagctcccgtccctgccgcagtgctgctgggatgcgatattgcaagagctaggcgcgttctggaggcagtgccgccaggacctcactggctcctggggaccccattaccacccaaagctctgccaaccgcaggcctccctcccggattgctggcacttggcgaagtggctaggcccccactcgaagccgctatacatgatattgtgcagttggtcgctcgagcccttggcagcgctgcacaggtccagccaaaaagggccctgctgccagcacccgtcaactgcggtgaccttcaacccgctgggccagagagcccagggaggttcttggccagattcctggcgaatacttcctttcagggccgaacggggccagtgtgggtgaccggctcttcacaggtccatatgagccgccattttaaggtgtggagcctacgaagagaccccaggggcgcaccggcttgggccaccgttggcagctggagagacggacaattagacctggaaccaggaggtgcgtcagctaggcctccacctcctcagggcgcacaggtttggcccaaactgcgggtagtgacactcctagaacacccattcgtttttgcccgagatcccgatgaggatgggcaatgccctgcaggtcaactctgtctggatcccggaacgaacgactcagctaccctggacgccctgtttgcggctctggccaacggtagcgcacctagggccctccgcaaatgttgttatggctattgcattgatctgctggagcgcttagccgaggatacgccttttgattttgaactctatctggtcggcgatggcaaatacggagccctccgcgatggcagatggactggcctggtgggggacctcttggctgggagagcacacatggccgtgacctcgttttctatcaactctgcacggtcccaggttgtagatttcacatctccgttcttttccacatcattgggaatcatggtgagggcacgggacaccgcaagtcctatcggtgcattcatgtggcccctgcattggtcaacttggctcggagtcttcgccgctctgcacctgactgccctgtttttaacggtgtatgaatggcgaagcccctatggcctgactcctcgcggtcggaacagatccactgttttctcttacagcagtgccttgaatctgtgctacgcaattcttttcagacgaactgtgtcttctaaaacaccgaagtgtccgaccgggcgacttctgatgaacttatgggcaattttctgcctcctggtcctctcttcttataccgccaatctggcagccgtgatggtgggcgacaaaacctttgaagaactctccggcatccatgatccaaagctccatcaccctgcgcaaggatttcggtttggcaccgtctgggagagctccgccgaagcatacatcaagaagtcattccccgatatgcacgctcacatgcggaggcactccgcccctaccacgcctagaggtgttgccatgctgaccagcgaccctccaaagctcaatgccttcattatggataagtcgctgttggactatgaggtgtcaatcgatgccgattgtaaactcctgacagttgggaagccgttcgccatagagggctatggcattggactcccccagaatagtcccttgaccagcaatttgagcgaattcatctcccgatataagagctccggctttatcgacctgcttcatgacaaatggtacaagatggtaccctgcggaaaacgggtatttgccgtgaccgaaactctgcagatgtcaatataccattttgctggcctgtttgtgttgctttgcctgggattaggttcagcattacttagcagtctgggtgagcacgcgttcttccgtcttgccctgccgcgtatccgcaagggcagcagactgcagtactggctgcatacttcacagaagattcatcgggcattgaatactgaaccaccagaagggagcaaagaggagacagcggaagcggagcctagcggtcctgaggttgagcaacagcagcagcagcaagaccagcccacagctccagaaggatggaagagggcaagaagagctgtcgacaaggagcgacgcgtgcgctttttgctcgaacccgcagtggtagtggcacctgaagccgacgccgaagccgaggcagcaccgagggagggaccagtttggctgtgttcgtacggccgacctccagctgctcgccctactggagctccccagcccggtgagctccaggaacttgagagacgtattgaggtggctcgtgaacgtctgcgacaggcactggttcgcagggggcagcttttggcacagcttggggactccgcaaggcatcggccaaggcgactgctgcaggccagagcggcacccgctgaggcgcctccacactctggcaggcctggatcccaggaatag

SEQ ID NO: 246606 - DNA, 2502 bp, synthetic construct
  misc_feature 1..2502: note = Description of Artificial Sequence: Synthetic coding sequence
  source 1..2502: mol_type = other DNA
atgcatcagctgtttaggctcgttctgggccagaaggatcttagtagagcaggcgaccttttttctctggacgactcggaaattgaggattctctgaccgaagcgttggagcaaattaaaataatcagcagttcttcagattaccagacaaataacaatgaccaggccgtggtcgagatatgtatcaccagaataacaacagctatcagggagaccgagtcaatcgagaaacacgccaaagcccttgtcggactttgggatagctgcctggaacacaacctgaggccctttggaaaagacgaggacacaccacacgccaagattgccagcgacattatgtcctgtatcctgcagaactacaatcggcctccggtcatggccctcgccattcctattgctgttaagttcttgcataggggtaataaagagctgtgtcgaaatatgtcaaactatctttctcttgccgctatcaccaaggccgacctccttgcagaccacactgaagtgatcgtgaagagtatcctgcagggaaatacaatgctcctgcgcgtgctccctgccgtttacgagaagcagccacaacctatcaacagacaccttacagagctgctggcactaatgagccagttggaacagccggagcagtatcatcttctgaggctgttacacgtcgcagctaaaaaaaaacaactcgaagttgtgcagaagtgcattccttttcttataggccacctaaaggatagcacacataatgatattattctgaacatcctcatcgaaatcgccgtgtatgagcccgttgccctgaatagcttcctgcctatgcttaaagagatcggcgagagattcccatatctcacaggacagatggccaggatctacggcgcagtggggcacgtcgatgaggagcgcgcaaggtcatgtctgacttatctagtgagccaactggccaatatggagcactcattccatcacattctgctgctagaaatcaagagcatcacagatacattcagttccattctggggccacagagcagggacatcttccgaatgagtaattcctttaccgcgatcgccaaattgttgaccagacaactcgaaaataccaaggctgggtcaggcagacggaaaatcagcactgaaattgagttccctgagaagctggaagaaaccaaactgatagtcaccgagaacgaggaccacgaaaaactccaagttaagatccaggccttcgaggacaaaatcaacgcaggcagcaatactccaggctctatccggcgatactccctcgggcaggtgtcaaaagaagagagaaagaacattaggtttaacaggagcaaatctttggcatttcacaccatgttaacaaagggcgtcggttccgatgatggagaggatgagaaccgcggagatatcccggcttcgataagcttgtccgaaattgacccattaggacaggggaatgacaagctgcctttcaagactgacacagaacggagccaactgggcgaaagttcggtttcctaccccaacatcatccatatcgactccgaaaatttgagcgaaacagttaaggagaattcacaagaggagactcccgagaccactgccagcccaatcgagtaccaagacaagttgtatcttcacctcaagaagaacttatcgaaagtgaaagcatacgcgatggagattggcaagaaaatacccgtgcccgatcagtgcacaatcgaagacactgttcgtagctgtgtagcaaagctgttcttcacgtgctccctgaagggacactattgtctctactctaagtctagcttcatcttaataagccaagagccccagccgtggatacagattatgtttctcttccaacagtctttatttcccgaacccctgtccatccagtcccattccgtccaattcctgcgggctctatgggagaagacacaggccggaggggctcacagctttgagactgcaatgatggagtcaacattccctcaacaaaaagatctcgatcaagtccagttgcacctggaggaggtgcgtttcttcgatgtcttcgggttctctgagaccgccggagcctggcagtgctttatgtgcaacaatcccgaaaaggccaccgtcgtgaatcaggatggccagccgcttatcgaagggaagttgaaagagaagcaggtgcgatggaaatttatcaaacggtggaaaacgcgttacttcaccctggctggtaaccagctgctttttcagaagggaaagtccaaggatgaccccgacgactgccccatagagctgtccaaagttcagtccgtgaaggctgtggcgaagaagcggagagacaggtctctcccacgggcttttgagatctttactgacaacaaaacatacgtgttcaaggcgaaagatgagaaaaatgcggaggaatggctgcagtgcatcaacgtggcagtggcacaggcaaaggagagggagtccagggaggtaaccacatacttgtag

SEQ ID NO: 246607 - DNA, 2502 bp, synthetic construct
  misc_feature 1..2502: note = Description of Artificial Sequence: Synthetic coding sequence
  source 1..2502: mol_type = other DNA
atgcatcaactttttcggctggtgctaggacagaaagacttatcccgcgctggcgacctgttcagtctagacgactcggagattgaggattcgctgaccgaggcgctcgaacaaataaagataatttcgagctcatccgactaccagacaaacaataatgatcaggctgttgtggaaatctgcatcactcgaatcacaactgccatcagggagacggagagcattgaaaaacatgccaaagcgctcgtcggcctatgggacagttgtcttgagcacaacttgcgtccattcggcaaggacgaagatactcctcatgccaaaattgcgagtgatatcatgtcgtgcattttgcaaaactacaaccgacctcctgtcatggccttagcaatccccattgcggtaaaattcttacacagaggaaacaaggagctgtgtcgcaatatgtctaactacctcagccttgctgctattactaaggctgatctattggcggaccatacagaagttatcgtgaaatccatcctccaggggaacacaatgctcttacgtgtgttgcctgctgtctacgaaaaacagcctcagccgattaaccggcacctgacggaactgttggccctgatgagccaactggagcagccggaacagtatcatctactaaggctgctccatgtcgctgcaaagaagaaacagttggaagtggtccagaaatgcatacccttcctgatcgggcacctgaaggattctacccataatgacatcatcctcaatatcctgatcgaaatcgctgtctatgagcccgtcgcccttaacagctttttaccgatgctgaaagaaatcggagagaggttcccctatctgaccggccagatggccaggatctacggggcagtgggccacgtagacgaggagcgggctcgtagctgtctgacgtacttggtcagccagctcgctaacatggagcatagcttccaccatattctgctgcttgaaataaaaagcattacagacactttctcctccatcttgggcccacagagcagggatatattcagaatgtcgaactcattcacagccattgccaaactactgacccgccagttggaaaacaccaaggcagggagtggacggaggaaaatctccaccgagattgaattcccggaaaagttagaagagaccaagctgatcgtgaccgaaaatgaggatcacgagaaactgcaggtgaaaattcaggcttttgaggataagattaatgccggttccaatacaccaggtagtattaggagatatagcctcgggcaagtgagcaaagaggagaggaaaaatattagattcaaccggtcaaaatctctggcatttcacaccatgctgaccaaaggggttggctccgacgatggcgaggatgagaaccggggagacattccagccagcatctccctgagcgagattgaccctctgggccaggggaacgataagctccccttcaaaacggataccgagaggtctcagctcggcgaaagctccgtgtcctaccctaatatcatccacattgactcagagaacctatccgaaaccgtcaaagaaaattcacaggaagaaactcctgagacgactgcatcaccgattgaatatcaggacaaattatatctacacttgaagaagaacttgtctaaagtcaaggcatacgctatggaaattggcaaaaaaattccagttcctgatcagtgtacaattgaggatacggtgaggagctgtgttgccaagctcttctttacctgcagtctgaaaggacactattgcctgtattctaaaagcagctttatcctcatctctcaggaacctcaaccatggatacagattatgtttcttttccagcagtccctgtttcctgaaccactcagcatacagtctcacagcgtacaattcctacgggctctgtgggagaaaacacaagcgggtggcgcacactccttcgaaaccgctatgatggaatctactttcccacagcagaaagatctggatcaggtgcaattacatctggaggaggtgaggttctttgatgttttcggttttagcgaaacagcaggcgcttggcagtgttttatgtgcaacaacccagaaaaagctaccgtggttaatcaagatggtcagcccttgattgagggcaagctcaaggagaaacaggttcgctggaaattcatcaagaggtggaagactagatatttcacactggccggaaaccagttgctgttccagaaaggcaaaagtaaggatgatcccgacgattgccctattgagctgtcgaaagtgcagagcgttaaagcagtggctaagaaacggagggataggtcccttcccagggcttttgaaatcttcactgacaataagacctatgtctttaaagctaaagacgagaagaacgcggaagagtggctgcagtgtatcaatgtggctgttgcccaagctaaggagcgcgagtcaagggaagttaccacgtacctgtag

SEQ ID NO: 246608 - DNA, 2367 bp, synthetic construct
  misc_feature 1..2367: note = Description of Artificial Sequence: Synthetic coding sequence
  source 1..2367: mol_type = other DNA
atgcaccaactcttccgcctggtgctgggccagaaggatctgtcacgggcaggagacctctttagtctcgacgattctgagattgaagattctctgactgaagcactcgagcagataaagatcatcagttcctcctcagattaccagaccaacaataacgaccaggccgtcgtggagatctgcatcacccggattaccacagctatcagggaaacagagtcaatcgagaagcacgctaaagccttggttggcctgtgggacagttgcctggaacacaacctgaggccgtttggtaaggacgaggatacacctcacgctaagattgcaagcgacatcatgtcttgtattctgcagaactataaccgaccgccagtcatggcattggccattccaatcgcagtcaagttcttgcatagaggcaacaaagaactgtgcaggaacatgagtaactatctgtcactcgccgcaatcactaaggccgacctgctcgcagatcacacggaagtcatagtgaaaagcatccttcagggaaatacgatgctactccgggtgctgcccgctgtctatgagaagcagccacaacccatcaacagacaccttaccgaactcttagccttaatgtcccagctggagcagccagaacaataccacttgcttcgcctgcttcacgttgccgctaaaaaaaagcaactggaagttgtccagaaatgtattccatttttgatcggacacctaaaggacagcactcacaacgacattatcttgaatatcctgatagaaattgcggtatacgagcccgtggccctcaattccttcttgccaatgctgaaagaaataggcgagcggttcccatatctgacaggtcaaatggccaggatttacggcgcagtaggtcacgttgacgaggagcgagccaggtcatgcttgacttacctggtcagccagttggctaatatggagcattcctttcatcacatcctgcttctagaaattaaatccatcacagataccttctcttccattctagggcctcagtccagggacatttttagaatgtctaattcgtttaccgctattgctaagctcctgaccagacagctggagaatacgaaggctggcagcggccgtcgcaaaatcagcacggagatcgagttccccgaaaagctggaggaaaccaagctcatagtgactgagaacgaagatcatgagaaattgcaggtcaaaatacaggcattcgaagacaaaataaatgcaggatccaatacgcctggatctattcgccgatatagtctcggccaggtcagcaaagaggagcggaaaaacataaggtttaaccgcagcaagtctctagcttttcatacaatgttaaccaaaggggtggggagcgacgatggagaagatgagaacagaggggatatccccgctagtatcagcctgtccgagattgaccctctcgggcaggggaacgataaactcccctttaaaactgataccgagcggtcacagttgggcgagtccagtgtgtcatatcccaacatcattcatattgactccgaaaacctgtcagaaaccgtgaaggagaatagccaggaggagacaccagaaacgacggcatcccctatcgaataccaagacaaactgtacttacacttgaagaagaacctgtccaaagtaaaggcctacgccatggagattgggaaaaaaattcccgttccagaccaatgtacaatcgaagacactgtgcgcagttgcgttgcaaagctcttcttcacttgcagtctgaagggtcattactgtttgtatagcaagtcttccttcatcctgatctctcaggagcctcaaccatggatccagattatgtttctttttcagcaagacttagatcaggtacagctgcacctggaggaggtgcgtttctttgatgtatttggttttagtgaaaccgcaggcgcatggcagtgtttcatgtgcaacaatcccgaaaaggcaacagtggtcaaccaggacggccagccactcattgagggaaagctgaaagaaaagcaggtccggtggaagtttattaagcgctggaaaactagatactttactctggctgggaaccaactgctgtttcagaagggaaaaagcaaggatgacccagacgactgtcccattgagctaagcaaggtgcaatctgtaaaggccgttgcaaaaaaacggagggatagatcactgcccagggccttcgagatcttcactgataacaagacatacgtgtttaaggcaaaggacgagaagaacgcagaagaatggttgcagtgcattaatgtggcggtggctcaggctaaagagagggagagtagagaggtcactacctacctctag

SEQ ID NO: 246609 - DNA, 192 bp, synthetic construct
  misc_feature 1..192: note = Description of Artificial Sequence: Synthetic coding sequence
  source 1..192: mol_type = other DNA
atgcatcaactattccgcctggtactagggcagaaagatctgtctcgcgcaggcgacctctttagccttgatgactctgaaatcgaggactccctgacagaggcattagaacagatcaagattatcagtagctcatctgactatcagaccaataacaacgatcaggccgttgtagaaatctgtatcacatag

SEQ ID NO: 246610 - DNA, 642 bp, synthetic construct
  misc_feature 1..642: note = Description of Artificial Sequence: Synthetic coding sequence
  source 1..642: mol_type = other DNA
atgcatcaactttttcggttggtccttggccagaaggacctcagtcgggctggcgatctcttttcgctggacgatagcgagatcgaagactctttgactgaagccctagaacagattaaaataatttctagcagcagcgactatcagaccaataacaatgatcaggccgtagtagaaatctgcatcacacgcatcacaaccgcgatccgagagactgagtccattgagaaacacgcaaaggccctggttgggctctgggacagttgccttgaacataacctgcgcccatttggaaaagatgaagatacccctcatgccaaaattgcatcagatatcatgtcttgcatactacagaactacaacagacctcccgtgatggcactggcaatcccgatcgctgtgaaattcctgcatagagggaataaggagttgtgtcgcaacatgtccaattatttgtccctggctgcaattactaaggctgatttattagcggatcacaccgaggtcattgtgaagagcattctgcaaggtatggtgcggaagctaagtcttggaacctgttttggccgatatctcaaggtcttctcaagttctatttacggcctgtgggaagccaggcccagggtgctggaagctaactag

SEQ ID NO: 246611 - DNA, 498 bp, synthetic construct
  misc_feature 1..498: note = Description of Artificial Sequence: Synthetic coding sequence
  source 1..498: mol_type = other DNA
atgcatcagctgttcaggctggttctcggccagaaagatctgtccagggccggagacctgttctccctggatgactccgagattgaagactcacttactgaggccctcgaacagatcaaaatcatttccagtagcagcgactatcagaccaacaacaacgatcaagctgttgtggaaatttgtattactcgcattactactgcaatacgtgaaactgaaagtatcgagaagcacgcgaaggctctggttggcctgtgggatagctgtctggagcacaacttgcggcctttcggcaaggatgaggatacaccacatgcgaagatagccagcgacatcatgagttgcatcctacaaaactataacaggccgcctgtaatggctcttgctatcccaatcgcagtgaagtttcttcaccgcggtaacaaggaactctgcagaaacatgagcaattatctctctctggccgcaattacaaaagctgacctgcttgccgactag

SEQ ID NO: 246612 - DNA, 168 bp, synthetic construct
  misc_feature 1..168: note = Description of Artificial Sequence: Synthetic coding sequence
  source 1..168: mol_type = other DNA
atgcaccaactgtttagacttgttttggggcaaaaagacctctcccgcgctggcgacttgttttctctggacgacagcgaaattgaggattcgttgaccgaagcgctggagcagatcaaaatcatttcctcaagttccgactaccagactaacaacaatgatcagtag

SEQ ID NO: 246613 - DNA, 642 bp, synthetic construct
  misc_feature 1..642: note = Description of Artificial Sequence: Synthetic coding sequence
  source 1..642: mol_type = other DNA
atgcaccaattattcagactcgttctaggacagaaggacctgagcagagcaggggacctcttcagtcttgatgacagtgaaattgaagacagcctgacagaggccctggagcaaatcaagattatcagtagctcttctgactaccagacaaataacaacgaccaggctgtcgttgaaatctgcatcacccgcattacaacagccataagggagacggagagtatcgagaagcatgctaaggccctggttggactctgggactcatgccttgagcataacctacgaccgtttggcaaggatgaggacacgccacatgctaagatcgccagcgatatcatgtcatgcatcttgcaaaattataataggccccctgtgatggctctcgcaattccaattgctgttaagtttcttcatcgaggtaacaaagagctttgtcgtaatatgtctaattacttgtccttagcagcgataacaaaagctgatctgttggcggaccatacagaggtaatcgtcaagagtatcctgcagggaatggtcaggaaactctccttaggtacatgttttggacggtacctgaaagtgttctccagctccatttacggtttatgggaggcaagaccccgagtgctcgaggccaattag

SEQ ID NO: 246614 - DNA, 534 bp, synthetic construct
  misc_feature 1..534: note = Description of Artificial Sequence: Synthetic coding sequence
  source 1..534: mol_type = other DNA
atgcatcagctgttccgtttggttctgggtcagaaggatctttctagggcgggagacttgttttctctagacgattccgagattgaggactcgctcacggaagccctggaacaaatcaaaattatcagttcatcatcggattaccagacaaataataacgatcaggccgtggtggaaatctgtattacgcgcataacaactgcaattcgtgagacggagagcattgagaagcatgccaaggcacttgttggcctttgggacagctgtcttgagcacaatctgcggccatttggcaaggacgaagatacacctcacgcaaagatcgcgtccgacatcatgtcctgtatacttcaaaattacaaccggccaccagtcatggcattagccattccgatcgcagtcaaatttctgcatcgtggcaataaagaactttgccgaaacatgtctaattacctctctctggcggcaataacaaaggcagatctcctcgctgatcacactgaggtgatcgtaaagagcatactccaagtgtag

SEQ ID NO: 246615 - DNA, 2367 bp, synthetic construct
  misc_feature 1..2367: note = Description of Artificial Sequence: Synthetic coding sequence
  source 1..2367: mol_type = other DNA
atgcaccagctgtttcgtctggtcctcgggcagaaggatctcagtcgagctggcgatctcttctcgttggacgactccgagatagaggactctttgacggaggcgttagagcaaataaaaattatctcatcatcgagcgattatcagactaacaataacgatcaggctgtagtggagatttgtatcacccggatcacaacagccatcagggaaacagaaagtattgagaagcacgccaaggccctagtcggtctttgggacagttgtctggaacacaacctacggccattcgggaaggacgaggacacacctcatgccaaaatcgcatctgacatcatgtcatgtatcctacaaaactataatcgacctccagtgatggcacttgcaatcccgatcgcagtgaaattcttgcaccgcggaaataaggagctttgccggaatatgagcaactacctatctttagccgctattaccaaagctgatttactggcagaccacacggaggtgatagtcaaatccattttgcagggaaacacaatgcttctcagagttttaccagccgtatatgagaagcagcctcagcccatcaatcggcacctaaccgagctcctggccttgatgtcccagttggagcagccagagcagtaccatctcctgcggcttttgcatgttgcagccaagaagaagcaactggaagtggttcagaaatgcatcccattcctcattggacaccttaaggactctacccataacgatatcattctgaacattctgatcgagatagccgtgtacgagccagtggcgcttaattcattcttaccaatgttgaaagagattggagaacgtttcccctacttaacaggccagatggcccgaatctacggggcagtgggccatgtggacgaggagagagccaggtcctgcctgacttacctggtgtcacagctagctaacatggagcacagcttccaccatattctcctcctggagatcaagtccatcacagataccttttcctcaatattgggccctcagagcagggatatctttagaatgtcgaactcctttacagctattgctaagttgctgactcggcaactggagaacactaaggccggaagcgggcgacgcaaaatttctacagaaattgagttccctgagaaattggaggagactaaactcatagtgactgagaatgaagatcacgagaaactgcaggtcaagatccaggccttcgaggataagataaacgcaggatctaacacacccggatctattagacgttactcactagggcaagtgagcaaagaggagagaaaaaatatcagatttaaccgctccaagtcattggcctttcataccatgctgaccaaaggagttggcagcgacgatggagaggacgagaaccgcggtgatatccctgcttccatatctcttagcgaaatcgaccccctgggtcaaggaaacgacaaactccctttcaaaactgatacagagcgatcacagttgggcgagagttcagtatcctacccaaatatcattcacatcgattctgaaaatctaagcgagaccgtgaaggaaaacagccaggaggagacacctgaaaccactgcctccccaattgagtatcaggacaagctgtatctccatctgaaaaaaaatctgagcaaggttaaagcttacgccatggagattggcaaaaagattccagtgccagaccagtgtacaatagaagacaccgtgcgcagttgtgtggcgaaactctttttcacttgttcactgaagggccattactgcttgtattctaaaagtagctttattctgatttcccaggagcctcagccttggatccagattatgttcctgtttcagcaggacctcgaccaggtccagttgcacttggaggaggtgcgattcttcgatgtttttggcttcagtgagacagctggcgcatggcagtgttttatgtgtaataacccggaaaaggccactgttgtgaaccaggacggtcaacccctgatcgagggcaaactgaaagaaaagcaagtccgatggaagtttatcaaacggtggaaaactcgatattttacactggctgggaaccaattacttttccaaaagggaaagtctaaggatgatcccgacgactgccccatcgaattgtcaaaggttcagtcggtcaaagcggtagcaaaaaagagacgggaccgatctctgccacgcgcatttgagatctttacagataacaaaacatacgtttttaaggctaaagatgagaagaacgccgaggaatggctgcagtgtatcaacgtcgccgtggcccaggctaaggagagggagtcacgtgaagttacaacttatctttag

SEQ ID NO: 246616 - DNA, 3768 bp, synthetic construct
  misc_feature 1..3768: note = Description of Artificial Sequence: Synthetic coding sequence
  source 1..3768: mol_type = other DNA
atggagcttgcggctctgtgcagatggggtctactactggccctgcttcctcctggagccgcaagcacgcaggtgtgcacaggaactgacatgaagcttcgcctgccagcttccccagagacacacctggatatgctccgccatctctaccaaggttgccaggtggtccagggtaatctggagctcacctatcttccaacaaatgcgtccttaagtttcctacaggatatacaggaggtgcagggctacgtgctgattgctcacaatcaggtccgccaggtgcccctccaaaggttgaggatcgtgaggggaacacaacttttcgaagataattacgcgcttgctgtcctggacaatggggaccctctgaataatacgaccccagtaactggagcaagcccaggcggactgcgagaactccagctgcgtagtctcactgaaatcttaaagggaggtgtgctgatacagagaaatccccaactgtgctatcaggatacgatactttggaaggatattttccacaagaacaatcaactcgcgcttacccttatcgatacaaatcgatcgcgcgcttgtcacccctgcagcccgatgtgcaaagggtcacgctgctggggggagtcttcagaggactgccagtccctgacccggacggtctgtgcagggggatgcgcaagatgcaaaggcccactccccacagactgctgccacgaacagtgcgccgcaggctgcacagggccaaaacacagtgattgcctggcctgtctgcactttaatcactccgggatttgtgagctgcactgccccgcactggtgacttataatactgatacattcgagagtatgcccaacccagaggggagatacaccttcggagcttcttgtgtgactgcctgcccttataactacctgtctaccgacgtgggatcctgtaccctagtttgtccgcttcacaaccaagaggtgaccgctgaggacggcacgcagaggtgcgagaagtgtagcaagccctgcgcccgagtgtgctatggactagggatggaacacctgagagaggtccgcgctgtgaccagcgctaatattcaagagtttgcagggtgtaagaaaatcttcgggtcgctcgccttcctgcccgagtcttttgacggagatcccgcttcaaacactgctcccctgcagcccgaacaacttcaggttttcgagactctggaggagattacggggtacttgtacatctccgcctggcccgatagtctgcccgacttgagtgtgtttcaaaatcttcaagtcattcgcggaagaatcctccacaatggagcttatagcctgaccctccaaggcttaggtatcagttggctgggcctgcggtctctccgggagcttggtagtggactagcacttatacaccataacacccacctctgttttgtccacaccgtgccatgggatcaattgtttcggaacccccatcaggcccttctccatacggcaaatagaccagaagacgagtgcgtgggcgagggcctggcatgccaccaactctgcgcaagggggcattgctgggggcctgggcctacccagtgtgtgaattgctcccagttcctcaggggccaggagtgcgtggaagaatgccgcgttctacaaggcctgcccagagagtacgtgaacgcaaggcactgcctgccctgtcatcccgaatgccagcctcaaaatggctcagtgacgtgctttggaccggaggctgaccagtgcgtcgcgtgtgcccattataaagatccgcctttttgtgtcgctcggtgtccttctggagtaaaacccgacctgtcatacatgccaatatggaagttcccggatgaggaaggagcctgccagccatgccccatcaattgcacccactcctgtgtggaccttgacgataagggttgccccgcagaacagcgggctagccccctcaccagcattatttcagccgttgtgggtatactcctggtggtggtgctgggggtggtgttcggtattctgatcaagcgccgtcagcaaaaaattcgcaagtacaccatgcgcaggcttctgcaggagacagagctggtcgagccattaaccccctctggcgctatgccaaaccaagctcagatgagaatcctgaaggagacagagctgcgtaaagtcaaggtgctcggctccggtgcattcggcaccgtttacaagggcatttggatccctgacggagaaaatgtcaaaatccccgtggccattaaagtactgagagagaacactagtcccaaagctaacaaagagatcttggatgaagcctacgtgatggctggcgttggctcaccttatgtgtctaggctgttgggcatctgcttgacctccacggtacaattggtcacccagcttatgccgtatggctgcctgctggaccatgtgagagagaatcggggacgccttggatcacaagacctgctgaattggtgcatgcagattgcgaaaggaatgtcttacctggaggacgttcgattagtccacagagacctggctgctcgcaacgtgttagtcaaaagtccgaatcacgtcaaaatcacagacttcggactcgcccgtctgttagacatagatgaaacggagtatcacgctgatggaggaaaagtccctatcaagtggatggcactcgaatcaatactgagaaggcgattcacacaccagtctgatgtttggtcgtacggagtgaccgtttgggaactcatgacctttggcgctaaaccatacgatggtattcccgcaagggagatacccgacctattagaaaagggagaacgactgcctcagccccctatttgtaccattgatgtatacatgatcatggtcaagtgctggatgattgactctgaatgcagaccccgttttagagagctggtttccgaatttagtagaatggccagggatcctcaacggttcgtagttattcagaacgaagatctgggcccagcgtctccactagactccactttctatcgttctcttctggaagacgacgatatgggtgacctcgtggacgccgaggaatatcttgtccctcagcagggcttcttctgtcctgatccggcacctggagccggagggatggtgcatcaccggcaccgatcatcgtctacgcgcagcggtggaggcgacctgaccttaggcctagagcctagcgaagaggaggcaccaagatcaccacttgctcccagcgagggcgctggctcggacgtcttcgacggagacctgggaatgggcgcagcgaagggcctgcagagcttgcccacacacgatccctcaccattacagcggtattctgaggaccccacagttccgctgcccagcgagacagatggttatgtcgctccactgacatgctcaccccagcccgagtacgttaaccagccagacgtccgcccacagccgccttcgcctcgggagggtcccctccccgcagctagacctgcgggagccaccctggaaaggcctaagacgctgtctccgggtaagaatggagtggtcaaagacgtgtttgcatttgggggtgccgttgagaaccccgaatatttgacgccacaagggggtgccgctccacagccgcacccaccacccgctttttcccctgcttttgataacctttattattgggaccaagatcctcctgagagaggcgctccgccttcaacctttaaagggacacccacagccgaaaacccagaatacctgggactcgacgtgcctgtctag

SEQ ID NO: 246617 - DNA, 3678 bp, synthetic construct
  misc_feature 1..3678: note = Description of Artificial Sequence: Synthetic coding sequence
  source 1..3678: mol_type = other DNA
atgaaactccgactccccgctagtccagaaacccatcttgatatgctgaggcacctgtatcaggggtgtcaggtcgttcagggaaaccttgagctcacatatctccctacaaacgccagcctgtctttcctgcaggacatccaggaagtgcagggctatgtgttaattgcccacaatcaagtacggcaggttccattacagcggttacggatagtaaggggcacccaactgttcgaagataattacgcactggcagtcctcgacaacggggacccattaaataacaccacacccgtcacaggagcttcgcctggcggactgagggagcttcagctgagatctctgacggagatccttaaaggaggcgtgctaatacagcgcaacccccagctctgttaccaggacacaatcttgtggaaggatatatttcacaagaataatcagctggcgctgacgctgatagatacgaacaggagtagagcttgccatccatgctctcccatgtgcaagggtagcagatgctggggagagagtagcgaagattgtcaatccctgaccaggacggtgtgtgcgggagggtgtgccagatgtaaaggaccattgcctaccgactgctgccatgagcagtgcgcagccggttgtactggtcccaagcacagtgactgtctcgcctgtctgcacttcaaccattccggaatatgcgagttgcactgccccgcactggtgacttataacaccgacacatttgagtcgatgcctaaccccgagggaaggtatacatttggtgcgagctgtgtgacggcctgcccctacaattacctcagtaccgacgtcgggtcctgcactctggtgtgccccctgcacaatcaggaggtaacggcggaggacggtacccagaggtgtgagaaatgctcaaagccttgcgctagagtttgttacggactggggatggaacacctgagggaggtacgcgctgtgacgagtgcaaacatacaggaattcgctggctgtaaaaagatctttggcagcctcgctttcctccccgaatcattcgatggggatcctgcaagcaacaccgcgcctcttcagccagagcagctgcaggtatttgagaccttagaggaaatcaccggctatttatatatatctgcgtggcctgacagcctgccagacctatcagtgttccaaaatcttcaggtcatccggggtcgcatcctacataatggggcttactcactcacccttcagggcctcggaatatcttggcttggcctgaggtccctccgggagctgggtagtggactggcacttattcatcacaacacacatctgtgctttgtgcatacggtaccttgggatcaactcttccggaacccccatcaagctctgctgcatactgccaatagacctgaggatgagtgtgtgggggaaggattggcatgccatcagctatgcgctcgcggtcactgttggggtcctgggcctacccagtgtgtcaactgttctcagtttctccgtggacaggagtgcgtggaagagtgcagggtcttacaggggctcccaagggagtatgtgaacgccaggcattgcttaccctgccatcctgagtgccagccccagaatggctctgtaacctgtttcggccctgaagccgaccagtgcgtggcttgcgcccactacaaggatcctcccttttgcgtggcgcgttgcccttccggagtgaaaccagatttgtcctacatgccgatctggaagttcccagatgaggagggagcctgtcagccctgccctattaattgcacccactcctgtgtggaccttgacgacaaggggtgtcctgccgagcagcgcgcatccccattgacctctatcatctcagctgtcgttggcattctgctagtcgtggtgttaggtgtggtgtttggaattctgattaagcggcgacagcagaaaattcgcaagtatacaatgcgcagactgctgcaggagacagaattagtggagccccttactccgtccggggcaatgcccaatcaggcacagatgcggattctcaaagagaccgaacttaggaaagtcaaagtcttaggctccggcgctttcggcactgtgtacaagggcatatggattcctgacggcgagaatgtgaagattcctgtcgctatcaaagtcctgagagagaacaccagcccaaaagccaacaaagagatcctcgacgaggcttacgtgatggccggagtggggagtccatatgtctcaagacttctaggaatttgcctgaccagcactgtgcagctggtgacacagctcatgccatacggttgcctcctggaccacgtgagagagaaccgaggtagattaggaagccaggatctgctcaactggtgtatgcagatagccaaaggcatgtcttatttggaagatgtgcggctggtccatcgcgaccttgctgccaggaatgtgctggtgaaaagtcccaatcacgtgaagattactgatttcggcctggccagattgctggacattgatgaaaccgagtatcatgctgatggcggaaaggtgcccattaaatggatggcactggagagcattctgcgccgacggttcacccaccagtccgatgtgtggtcttacggggtaactgtgtgggaactcatgacatttggagctaaaccatatgacgggatacctgctcgagagatacccgacttgctagagaaaggagagaggctgccacagccgccaatatgcaccattgatgtctatatgataatggtcaaatgctggatgattgattcagagtgcaggcctaggttccgggaactagtctccgagttttctcgaatggcacgggaccctcaaagattcgttgtgattcagaatgaggatctggggccagcctcccctcttgattccaccttctaccgctcactgttggaagacgacgacatgggtgacctagtcgacgccgaagaatacttggttccccagcaggggttcttctgccctgatcctgcaccaggagccggaggcatggttcatcaccgacaccgttcttcctccactcgcagcggagggggagatctgactctcggcctcgagccttcagaagaagaggcgccaaggagccccttggctcctagcgagggagcaggctcggatgtgtttgacggcgatctgggtatgggggctgcaaagggtctccaaagcctgcccacacacgatccatctcctcttcagagatacagcgaggacccaacggtccctttgccatccgaaaccgacggatacgtcgccccactgacatgcagcccccagcctgagtacgtaaatcagccggatgtccggcctcaaccacctagccccagagagggcccactgcccgctgcccgtcccgcaggggctaccctggagcggccaaagacactttcccccggaaaaaatggagtggtgaaagacgtttttgctttcggtggtgccgtggagaatcctgaatacctgactccacaggggggagctgcccctcagccgcatcccccacccgcattcagtcccgcttttgacaatctctactattgggatcaagatccccctgagcgtggcgctccccctagtacattcaaggggacccctaccgccgaaaatccggagtacctgggactggacgtgccggtctag

SEQ ID NO: 246618 - DNA, 2940 bp, synthetic construct
  misc_feature 1..2940: note = Description of Artificial Sequence: Synthetic coding sequence
  source 1..2940: mol_type = other DNA
atggagctggctgctctgtgtcgctgggggctgctgctggccctgctcccccctggtgccgcaagtactcaggataactacctttcaacagacgttggctcatgcacactagtatgcccccttcataatcaggaagtgaccgctgaggatgggacccagcgatgtgagaagtgcagtaaaccctgcgctcgtgtgtgctacggcctggggatggagcatttgcgcgaagtaagggcagtgaccagcgcaaatattcaggaatttgcgggatgcaagaaaatcttcggctctctcgcctttctgcctgaatcctttgatggcgaccctgcctctaataccgccccacttcagcccgaacaactccaggtgttcgagactctggaagagataaccggctacctgtatatttctgcttggcccgatagtctgcccgatctgtcagtctttcagaacctacaagttattcgcggacgcattctccacaacggggcttatagcctcaccttacagggcttaggcatcagctggttggggctgcggagtctgcgggaactgggaagtggactggctcttatccaccataacactcacctgtgctttgtgcacaccgtcccatgggaccagcttttcagaaatcctcaccaggcgctgttgcataccgcaaacaggccagaggacgagtgtgtcggtgagggtcttgcttgtcaccagctatgcgcaagaggacactgctgggggccaggcccaactcagtgcgtgaactgctcccaattcctgaggggccaagagtgtgtcgaggagtgccgggtgttacaagggctccctcgggagtacgtgaatgccagacactgtctgccctgtcaccccgaatgtcaaccacaaaacggctctgtgacatgctttggaccagaagccgatcagtgcgtggcatgtgctcactataaggatccccctttctgcgtggcgcgatgcccttcaggggtgaagcctgacctctcctacatgccaatttggaagttccctgatgaagagggcgcttgccaaccttgccccatcaattgtacccacagttgtgtggacctcgacgataagggctgccctgccgaacaacgcgcatctcctctcacctctattatctccgcggtggtggggatcctgcttgtggtcgtgttaggagttgtgttcggcatcctgattaagagacggcagcaaaagataaggaagtataccatgcgccgactgctgcaggaaaccgagcttgtggagccattgacaccgagcggggcaatgccaaaccaggcccagatgaggattctgaaggagactgaactcagaaaggtgaaggttctgggaagcggtgccttcggaaccgtctataaagggatatggattcccgatggagaaaacgtcaagattccggtcgccatcaaagtgctgagggagaatacctctccaaaggccaacaaagaaattcttgacgaagcttacgtgatggccggagtggggtccccatacgtgtcacgcttgctaggcatatgtctcacgagtaccgtacagctcgtgacacaattaatgccatatgggtgtctgctggaccacgtgcgggaaaaccgcggaaggcttggttcccaggatctactgaactggtgtatgcaaattgcaaaaggaatgtcctacctagaggatgttcgacttgtccatagggacctggccgcaagaaatgtcctcgtgaaaagccctaaccatgtgaagatcacagatttcggcctggccagactgcttgatatcgacgagacagagtaccatgcagatggaggaaaagttccaataaagtggatggccctcgaaagtattctccggcgacgcttcacccaccagagtgacgtttggtcgtacggagtgactgtgtgggagttgatgacattcggcgctaagccatatgatggcattccggctagagagatacctgatctgctggagaaaggcgagcgcctaccccagccgccaatatgtacaattgatgtctacatgatcatggtcaagtgttggatgatcgacagcgagtgtcgccctcgatttagggagttggtaagcgagtttagcagaatggccagagacccacagcggttcgtggtgatccagaatgaggatttaggaccagcctcccctctcgactccaccttctatcgctctctcttggaagacgatgacatgggggacctggtcgacgctgaagaatacctggtgccacagcagggatttttctgccccgatccagccccaggggcagggggaatggttcaccaccggcaccgatcttcatcaacaaggtctggcggaggggatctcaccctgggcctggagccctccgaagaagaggcacctagatccccactggctccatccgaaggcgctggtagtgatgtatttgacggcgacctgggcatgggcgcagctaaaggactgcagtccctgcccacgcatgacccatctcccctacagcgctactctgaggatcccaccgttccactgccaagcgaaaccgacgggtacgtggctcctttgacctgctccccacagcccgaatacgtgaaccagcctgacgtccggcctcagcctccgtcccctcgggaaggccctttacctgccgctagaccagccggagcaactcttgagagacccaaaactttgtctcccggtaagaacggagtagttaaggatgtgtttgcctttggtggtgcagtggagaaccccgagtacctgaccccccaggggggtgccgctccgcagccccaccccccacctgccttttcccccgcattcgacaacctctattattgggaccaagatccacccgagcgtggcgcacccccatccaccttcaaggggacgccgactgctgaaaaccctgagtatttagggctcgacgtaccagtctag

SEQ ID NO: 246619 - DNA, 1812 bp, synthetic construct
  misc_feature 1..1812: note = Description of Artificial Sequence: Synthetic coding sequence
  source 1..1812: mol_type = other DNA
atgaaactgcgcctcccagcctcgccagaaacacatctcgacatgctgcggcacctgtatcagggttgtcaggtggtccagggaaatctcgagctgacctacctccctaccaacgcatccctatcctttctgcaggacattcaggaggtgcaggggtacgtattgatcgctcataatcaggtccgccaggtccccctccagagactccgcatcgtgagagggacacagctgttcgaagacaactacgccctcgccgtcctcgataatggggatcccctgaacaacacaactccagttactggggcatcgccagggggtttaagagagctccaactgagatctctcaccgagattcttaaagggggagtgctgatccaaaggaatccacagctgtgctatcaagatacaattctgtggaaggacatatttcacaaaaataaccagctagcactgaccttaatcgataccaatcgcagtagagcatgtcacccatgcagcccaatgtgtaaaggctctagatgctggggagaaagcagtgaggattgccagtcactcacacggacggtgtgtgcaggcggttgtgctcgttgcaaagggcctctgcccaccgattgttgtcatgaacaatgcgcggctggctgtaccggaccaaagcatagcgattgcctggcctgtttacacttcaatcacagtggcatctgtgagctgcactgcccagcattggtgacttataacactgacacattcgagtctatgccaaaccccgagggtcgttacacttttggagcatcctgtgtcacagcgtgcccttacaactatctgagcacagacgtgggctcctgcacacttgtatgccccttacataaccaggaagtgacagccgaagacgggacacaacgatgcgagaaatgcagtaaaccttgcgccagagtgtgttatggtcttggaatggagcatctgagggaggtgagggccgttacctccgccaatatacaggagtttgctggatgcaaaaagatattcggcagcctggcattcctgcctgaaagttttgacggcgatcccgcttcaaacaccgccccactgcaaccggagcagttgcaagtgttcgagacccttgaggaaatcacaggctacctgtacatctccgcctggcctgacagcctacctgatttgagcgttttccagaatctgcaggtgatacgaggtcggattctgcacaacggtgcttatagccttacactgcagggccttggtatatcttggctgggcctacggtccctgcgcgagcttggctccggccttgctttgattcaccacaacactcacctgtgcttcgtgcatacagtgccctgggaccagctgtttcgcaatccacaccaggccctccttcacacagcaaatcgccctgaggacgaatgcgtgggcgaaggcctcgcttgtcaccagctctgcgccagaggacactgctgggggcctggccctactcagtgcgtaaattgttcccagtttctgcggggtcaggaatgtgtggaagagtgccgggtcctgcaggggttaccccgtgaatatgtcaacgctaggcactgcctcccttgtcatccagagtgtcagcctcaaaacggttccgtcacctgctttgggccagaggccgatcagtgcgtcgcctgtgcccactacaaggacccaccgttctgtgttgccaggtgtcccagcggcgttaagccagaccttagctacatgccaatctggaagttccctgatgaggagggggcatgtcagccttgtccgatcaactgcacccattcatag

SEQ ID NO: 246620 - DNA, 3678 bp, synthetic construct
  misc_feature 1..3678: note = Description of Artificial Sequence: Synthetic coding sequence
  source 1..3678: mol_type = other DNA
atgaaactcaggctgcccgcttcaccagaaactcacctggacatgctaaggcatctatatcagggatgccaggtggttcaggggaatctggaacttacctacctgccaacaaacgcaagtctgagttttctgcaagatattcaggaagtgcaaggatacgtactgattgcacacaaccaggtcaggcaggttcccctgcaaagactgcgaatagttagggggacccaattgttcgaggacaattacgcgctcgcagtactggacaacggtgacccgctaaacaatacaaccccagtaacaggagccagtcctgggggactgcgagagctgcagttaaggtccctcaccgagatcctaaagggtggcgtgctcatacagcggaacccccagttatgctatcaggacaccatattgtggaaggatatctttcacaagaacaatcagctggcgctcaccctgattgataccaaccgaagcagagcttgccatccctgtagccctatgtgcaaaggtagccgctgctggggtgagtctagcgaggattgtcaatccctgaccaggacggtgtgcgctggagggtgcgctaggtgtaaggggccactaccaaccgactgctgtcatgagcaatgcgccgcaggctgcaccggccctaaacattcagattgcttagcctgtctccacttcaaccactccggtatctgcgagttacactgtccagcattggtgacctacaacaccgacacctttgaatccatgccaaatccagaaggaagatacacctttggggcaagttgtgtgacagcatgtccatacaactacttatctacagacgtggggtcatgcaccctcgtgtgccctctgcacaatcaggaagtcacggctgaagacggcacccaacgctgcgaaaaatgcagtaagccatgtgcccgagtatgctatgggctaggcatggagcacctccgcgaggtacgggcagtaacatctgccaatatccaggaatttgctggctgcaaaaagatattcgggtccttggcattcctcccggaatccttcgacggggaccccgcaagtaatactgctcctcttcagcctgagcaacttcaggtgttcgaaacacttgaggagatcaccggctacctttacatttcagcttggcccgactcattgccagatctgagtgtctttcagaacctgcaggttatccggggtcggatattgcataacggagcatatagtctcactctgcagggcctgggtatctcatggttaggcctgcggagtctgagagagctcggcagcggcctagccctgattcaccacaatacgcatctgtgctttgtccacaccgttccctgggaccagctttttcgcaacccccatcaggctttgctccacaccgctaatcgcccagaggacgaatgcgttggcgaggggctggcgtgtcatcaactgtgtgccagaggccattgttgggggccaggccctacacaatgcgtgaactgcagccagttcctacgcggtcaggaatgtgtggaagagtgtagagtgctccagggtttgcctcgtgaatacgtcaatgcacgacactgtctgccctgtcatccggagtgccaaccccagaacggctccgtgacttgcttcggcccagaggccgaccagtgtgtagcatgcgctcattacaaggatcccccattctgtgtagccagatgccccagtggggtgaaacctgatctgtcctatatgccgatctggaagttcccagatgaggagggcgcttgccagccctgccctatcaattgcacgcattcatgcgttgacttagatgacaaaggatgccccgctgaacagcgggctagccctctgacttccataatcagcgcagtcgtcggcatactgcttgtggtggttttgggagtcgtgttcgggatcctgattaagcgacgccaacaaaaaattcgcaagtacaccatgcggagactcttgcaggaaaccgaactagtcgagccgctcacaccttccggggctatgccaaaccaagcccagatgcggattcttaaggagaccgagctgaggaaagtcaaagtactagggagcggggcatttggtacagtttacaaggggatatggatcccagacggtgagaacgtcaaaatcccagtggctattaaagtgctgcgcgaaaacacctcaccgaaggctaacaaggagatccttgacgaggcttacgtcatggccggtgtgggctctccttacgtgtccaggcttcttggcatctgcttgacatccactgttcagctcgtgacccagctgatgccctacggctgtctgttagatcacgttagagaaaatagggggcgactgggatcccaggatttactgaactggtgtatgcagatcgccaaaggaatgagttacttagaagatgttaggctggtccatagagatctcgccgctaggaacgtattagtgaaaagcccgaatcatgttaaaattaccgactttgggttggcgcgtcttctggacatagacgagactgaatatcatgctgatgggggtaaggtcccaatcaagtggatggctctggaatccattctgcggaggaggtttactcaccagtcagatgtctggtcatacggtgtgacagtgtgggagctgatgacctttggagctaagccgtacgacggcataccagccagagagatcccggatctcttggagaaaggcgaacggctaccccagccgcctatctgtacaatcgacgtctatatgattatggttaagtgctggatgatagactctgaatgccgtcctcggttcagggagttagtcagtgagtttagcagaatggctcgcgatcctcaacggttcgttgtcatccagaacgaggacctgggtccagcttcccctctggattccaccttctacagatcattactggaggatgacgacatgggggatctggtggacgccgaggaatacctcgttccccagcagggcttcttttgtcctgaccccgctcctggcgcaggcggtatggtccaccaccgacatcgcagtagctcgaccaggagcgggggaggcgacctgaccttgggtcttgagccctctgaggaggaagctccacggtccccactggctcctagcgaaggcgcaggtagcgacgtttttgatggagatttgggaatgggtgccgcaaaaggcctacagagtctgcccacccatgacccaagcccccttcagcgatattccgaagacccaactgtcccgctgcccagtgagactgacgggtacgtcgcacccctgacatgcagtccacagcctgagtacgtgaatcagcccgatgtaaggccccagcctccctccccacgggagggacccctgcccgctgcacggccagcgggtgccacacttgaacgtccaaagacactgtcccctggtaaaaacggagtcgttaaagacgtcttcgccttcgggggagctgtggaaaacccagagtatcttaccccacagggaggcgctgcccctcaaccccacccacctcccgcattctctcccgcattcgacaacttatattattgggatcaggatcccccagagaggggcgctcctccaagcacattcaagggtacgcccacggcagagaaccccgagtatcttggacttgatgttcctgtatag

SEQ ID NO: 246621 - DNA, 3723 bp, synthetic construct
  misc_feature 1..3723: note = Description of Artificial Sequence: Synthetic coding sequence
  source 1..3723: mol_type = other DNA
atgccaagaggtagttggaagccacaagtgtgcaccggcaccgacatgaaactgaggcttccagcctcccccgagacgcatcttgatatgctccgtcatctttaccaggggtgccaggtggtgcaaggaaacctggaactcacttacctgccaaccaatgcatcactgagttttctccaggacatacaggaagtacaggggtatgtgctgattgcacataatcaggtgcgccaggtgcccctccagaggctgaggattgttcgaggaacccaactcttcgaggacaattatgcgctggctgtgctggataacggggatccccttaacaacacaactccagtaacgggtgcatcaccgggagggttgagagagctccagctgcgctcactgacggagatactgaagggcggagtgctgattcagcggaacccgcagttgtgctatcaagacactatcctgtggaaggacatcttccacaaaaataatcagctcgcgcttacactcatagacaccaaccgcagcagggcatgccatccctgctcgcctatgtgcaagggaagccgttgctggggcgagtcctctgaggattgccagtcgctgaccaggacggtgtgcgccggaggatgtgctcggtgcaagggtccccttccgaccgactgttgccacgaacagtgcgccgcaggatgtacaggacccaagcattccgactgcctcgcctgcctgcactttaatcactccggtatttgcgagcttcactgtccagcattagtgacatataacaccgatacttttgagtcaatgccgaatccagaaggtcggtatacgttcggcgcttcttgcgtgactgcctgtccatataattacctatccaccgatgtgggcagttgtacactggtttgtcccctgcacaaccaagaagtgactgccgaggatggcacccagagatgtgaaaagtgttccaaaccttgcgcccgagtgtgctacggtcttgggatggaacacctacgagaggtacgcgcagtgacaagtgcgaatatccaagaattcgccggatgcaaaaagatttttggcagcctagccttcctgcctgagtcttttgatggagaccccgcatccaacactgcccctctgcagccggaacagctgcaggtgttcgaaactctggaggagattactggctacctgtacatcagtgcttggcccgacagtctgccagatctctcagtgtttcagaacctccaggtgatccggggacgcatcctgcataacggagcttattctctaacactccagggattgggcatctcttggctcggcctcaggtctctgcgtgagctgggctccggactggctctgatccaccataacactcacctgtgcttcgtccatacagttccatgggaccagctgttccgtaacccacatcaagctctcctgcacaccgcaaacagacctgaggacgaatgcgtaggagaggggctggcatgccaccagctgtgtgccaggggccactgctggggcccaggtcccacgcagtgcgtgaactgtagccagttcctgcggggacaggagtgcgtggaggaatgcagagttctccagggtttgcccagggagtacgtgaacgcacgccattgtctgccctgtcacccggagtgtcagccacaaaacggatcagtaacgtgtttcggtccagaggctgatcagtgcgtggcctgtgctcactataaagaccccccattttgtgtggcaaggtgcccatctggcgtgaagcccgatcttagctatatgcccatttggaaatttcctgatgaagagggcgcatgccagccttgtcccataaactgtacacactcttgtgtcgatttggatgacaagggatgccctgccgagcagcgggctagtccactgacctcgatcataagcgctgtagtgggcatcttgctggtcgtggtacttggggtcgtcttcggaatcctgatcaagcggcgacagcaaaaaattagaaaatacacaatgagaaggctgctgcaggaaaccgagctcgtggaaccactaactccgagcggagccatgccgaatcaggcgcaaatgcgcatattgaaggagaccgagctgcggaaagttaaggtcctggggagcggcgctttcggaactgtttacaaaggcatctggatcccagacggcgagaatgtgaaaattcctgttgcaataaaagtcttacgagagaacacatctcctaaagccaataaggagattctcgatgaggcttacgtgatggccggagttggttctccttatgtctctcgtcttctgggaatttgccttaccagtaccgtacaactggtaacacagctcatgccttatggttgcctcctggaccacgtgcgcgagaatcggggtcggctgggctctcaagatcttttgaactggtgcatgcagattgccaagggaatgagctatcttgaagatgtgcggttagtgcatcgagatttggcagcacgcaacgtcctcgtcaagagccctaatcacgtgaagataaccgacttcggtctggcaaggttgctggatatcgacgagacagagtatcacgccgacgggggtaaagtgccaattaaatggatggccttagaatctatcctcagacgcaggttcacccatcaaagcgacgtgtggtcgtatggagtgaccgtgtgggagctaatgacttttggtgcgaagccttacgatggaattccagcacgcgaaatccccgacctgctggaaaagggcgaaaggttacctcagccccctatttgtactatcgatgtgtatatgatcatggttaagtgctggatgatcgactctgagtgtaggcctagattccgagaattggtgagcgaatttagtcggatggccagagatccacagcggtttgtggtcattcaaaacgaggatctggggcctgctagcccactagacagtaccttttataggtctctgctggaagatgacgacatgggagaccttgtggacgcagaggaatatctggtgcctcaacagggattcttctgtcccgacccagcacccggagccggtggtatggttcaccatcgccatcgttctagcagtacaagatccggcggtggagacctcacactggggctcgagcccagcgaagaggaggccccacggtccccattggcaccgagtgaaggagctggcagtgacgtgttcgacggcgatctggggatgggagccgcaaagggtctacaatctttacccactcacgatccttcccctctgcagagatatagcgaggatcctaccgtgccactgccaagcgaaacggatgggtatgtggcaccattgacatgctccccgcagccagagtatgtcaatcaacccgacgtgagaccccagccccctagtccccgagaaggacccctccccgcagctcgacctgctggcgcaaccctagaacgccctaagacactgtcccctgggaagaatggcgtcgtcaaggatgtctttgccttcggcggtgctgtagaaaaccctgaatatcttacgccccaagggggtgctgccccacaaccccaccctcctccggcattttctcctgcattcgataacctctactactgggatcaagatcctcctgagcgcggtgcccctcccagcactttcaaggggacccccaccgccgagaatccagagtaccttggactcgacgtaccagtgtag

SEQ ID NO: 246622 - DNA, 2259 bp, synthetic construct
  misc_feature 1..2259: note = Description of Artificial Sequence: Synthetic coding sequence
  source 1..2259: mol_type = other DNA
atgggaacgtctgccctttgggccctctggctcctgttggctttatgctgggctcccagggagagcggcgctactggcacagggcgaaaagccaagtgtgaaccatcccagttccagtgcaccaacggtaggtgtatcaccctcctctggaaatgcgacggagacgaagattgcgtggacgggtccgacgagctcgactgtgcaccaccgacctgtggcgcacacgaattccaatgcagtacgtcaagctgtattccaatctcgtgggtatgtgacgatgacgccgactgctccgatcagagtgatgagtcactcgaacagtgcgggcgtcaacccgtgatccacactaaatgtcccgctagtgagattcagtgcggctcaggtgaatgtatccacaaaaagtggcgctgtgacggcgaccctgattgtaaggatggctccgatgaggtcaactgtccttcccggacctgtcggcctgatcagttcgagtgtgaagacgggtcgtgtatccatgggtcccggcaatgcaacgggataagagattgcgtggacgggagcgatgaagtgaattgcaagaacgtaaaccaatgcttgggcccaggaaagttcaaatgtcgctccggagaatgcatcgacatttcaaaagtctgcaaccaggagcaggactgccgggactggtcagacgaacccctgaaggagtgtcacatcaacgagtgccttgtgaataatggtggctgctcccatatttgtaaggatcttgttatcggctacgaatgcgattgcgcagcgggtttcgaactgattgataggaagacctgcggtgacatcgatgaatgtcaaaacccgggtatctgtagccagatctgtatcaatctaaaagggggttataaatgcgagtgctcgaggggataccaaatggacctagccacgggtgtgtgcaaagcggtggggaaggaaccttccctcatcttcactaatagaagggacatccgcaagatcgggcttgagcgaaaggaatacatccagcttgtggaacagctcaggaataccgtcgccctcgacgccgacatcgccgctcaaaagttgttttgggcagacctatcccaaaaagccatcttcagtgcctccatcgatgacaaggtcggcagacatgtgaaaatgatcgataatgtgtacaaccctgccgcaattgcggttgactgggtgtataaaaccatctactggaccgatgccgcatccaagactatttccgtggctaccctcgacgggactaagagaaaatttctgttcaacagtgatttacgggagcccgcttctattgcggtggatccactgagtggctttgtgtattggtctgattggggagaacccgctaagatcgagaaagcgggtatgaacggatttgataggagacccctagtgacagcagacatccagtggcccaatggcatcacgttggatttgataaaatcccgcctgtattggcttgactccaaactacatatgctgtcgtcagtggacctgaacggacaggaccggaggattgttctgaagagccttgaattcttagctcatcccctcgccttaactattttcgaggatcgcgtttattggatcgacggggagaatgaggccgtgtacggggcaaacaaattcacagggtcggaactcgcaacattggttaataatctgaatgacgcacaggacattattgtctaccatgagcttgtccagccctcagggaaaaattggtgtgaggaggacatggaaaacgggggttgcgagtacttgtgtctgcctgcaccccagattaatgatcactcccctaaatacacatgctcatgtcccagcggctataatgtggaggaaaacgggcgagattgccagtcaaccgccaccacagttacatattctgagacgaaagatactaataccactgagatatctgccacatcgggtttggtcccaggagggattaatgtcactactgccgtatctgaagtgagtgtaccgcctaaagggactagcgccgcatgggccattctgcctttgttgctattggttatggccgcagtgggtgggtaccttatgtggcgcaactggcagcacaagaatatgaagagcatgaatttcgataaccccgtgtatttgaaaacaacagaggaagatctgtcaattgatatcggtagacactctgctagtgtaggacacacctacccagcgattagcgtagttagtaccgacgatgacctggcttag

SEQ ID NO: 246623 - DNA, 522 bp, synthetic construct
  misc_feature 1..522: note = Description of Artificial Sequence: Synthetic coding sequence
  source 1..522: mol_type = other DNA
atgggaacttcggcactttgggccctgtggctactgcttgcactgtgttgggctccgcgtgaatctggcgctactggtaccggcaggaaagccaagtgcgagccgtctcagttccagtgcactaatggcaggtgcatcacactgttgtggaagtgtgatggagatgaggactgcgtagatggcagcgacgaaaaaaattgtgtaaagaaaacatgcgcggagtcggattttgtttgtaataacggccaatgcgtcccatctagatggaagtgcgacggggatccagactgtgaggatggatcagatgagtcacccgagcaatgtcggaacatcacctgctccccagatgagttcacttgctcgagtggcaggtgcatctctcggaactttgtgtgtaacggccaggatgactgtagcgacgggtcagacgagcttgactgtgctccacccacttgtggtgctcacgagtttcagtgctcgacgtctagctgcattccaatttcttgggtctgcgacgactag

SEQ ID NO: 246624 - DNA, 2538 bp, synthetic construct
  misc_feature 1..2538: note = Description of Artificial Sequence: Synthetic coding sequence
  source 1..2538: mol_type = other DNA
atgggcacttcagccctctgggccttgtggctgcttttagccttgtgctgggccccacgtgagagtggcgctactgggactgggagaaaggccaaatgtgagcccagccagttccagtgcacgaacggtaggtgtatcacccttctctggaagtgcgatggcgatgaggattgtgttgacgggtcagatgaaaagaactgtgttaagaaaacctgcgctgagtctgattttgtgtgcaacaatggacaatgcgtgcccagtcgatggaaatgcgacggtgatcccgattgcgaagatggatctgacgagagtcctgagcagtgccacatgcggacctgtcgcattcatgagatttcatgcggggctcacagtactcagtgtattccggtcagttggaggtgtgacggcgagaatgactgtgacagtggggaagatgaggaaaattgcggcaatattacttgcagcccagacgaatttacctgtagctccgggagatgtatcagccgcaatttcgtctgcaacggacaagacgattgctctgatggcagcgacgagctagattgtgcccctcctacttgtggggctcatgagttccaatgcagcacctcctcttgcatacccatctcctgggtgtgcgacgacgacgccgattgctctgatcaaagtgacgaaagcctcgagcagtgcggaaggcagcctgtgattcataccaaatgcccagccagcgaaatccaatgtgggtcgggagaatgcatccacaaaaagtggcggtgtgacggggatcccgactgtaaggatggctccgacgaggtgaattgcccttctcggacttgtagaccagaccagtttgagtgtgaagatgggtcttgtattcatggttcgcggcagtgtaatgggatccgcgattgtgttgacggaagtgacgaagtaaactgtaagaacgtgaatcagtgccttggaccaggaaaattcaaatgtaggagtggagagtgcatagatatatccaaggtctgcaatcaagaacaagactgccgcgactggtccgacgaacctctgaaagagtgccacattaatgagtgcttggtgaacaatggtggctgtagccacatatgtaaggacctggtgatcggctacgagtgcgattgcgcagctggcttcgagctcatcgacaggaagacatgtggagatatcgacgagtgccagaatcctggcatctgcagtcagatttgtataaaccttaaggggggatataaatgcgaatgcagtcgtggctaccagatggacctggccaccggcgtctgtaaggctgtgggcaaggaacctagccttatctttacaaatagaagagacattaggaagatcgggctggagcgaaaggaatatatccagctggtggagcaacttaggaatacagtggctctggacgcggacatagcagcccaaaagcttttctgggcagatttgagccaaaaagcaatatttagcgccagcattgatgataaagttgggaggcacgtaaaaatgattgacaatgtttataatcctgctgccattgcagtggactgggtgtataaaacgatctattggacagacgccgctagtaaaacaatctccgtggctactctggacggcacaaaacgaaaattcctatttaatagcgacctgcgcgaaccagccagcattgccgtggaccctctttccgggtttgtatactggagcgactggggagagcccgctaagatcgagaaggccggtatgaatggtttcgaccggcgacccctcgtgacagctgacatccagtggcccaatggcatcactctggatcttatcaagagtagactgtactggcttgattctaagctccacatgctgtcatccgtcgatctgaacggccaggaccgcaggattgtgcttaagagcctagaatttctagcgcatccactggccctcaccattttcgaggacagggtgtattggattgacggtgagaacgaagctgtgtatggtgccaataagttcactggatccgagctggccaccctagtgaataatctgaacgacgcacaggacatcatagtgtaccacgagctggtgcaacctagcgggaaaaactggtgtgaggaggacatggaaaatggtggatgcgaatatctctgcctgcccgcacctcagatcaatgatcactcgcctaagtatacatgcagctgtccaagtgggtacaacgtggaggagaatggcagggattgtcaaaggatcaacgttaccacggctgtgtcagaagtcagcgttccgcctaagggcacgtctgcagcctgggctatactccccctgctgctgttagtcatggccgcagttggtggctacctgatgtggcgaaactggcagcacaaaaacatgaaatctatgaatttcgataaccccgtctacttgaagaccactgaagaggacctgagcatcgatattggccgacacagcgcctcagtggggcatacatatcccgcaatttctgtagtcagcacagatgatgatctcgcctag

SEQ ID NO: 246625 - DNA, 2622 bp, synthetic construct
  misc_feature 1..2622: note = Description of Artificial Sequence: Synthetic coding sequence
  source 1..2622: mol_type = other DNA
atgggtacctccgctctatgggccctgtggcttctgctggctctctgctgggcacctagggagagcggggcaacaggaacgggacgtaaagcaaaatgtgaaccaagccaatttcaatgtactaatggacgttgtataactttactgtggaaatgcgatggggacgaggattgtgtcgatggttcggacgaaaaaaattgtgtgaaaaagacttgtgccgaatctgatttcgtctgtaataacggacagtgtgttcccagccggtggaagtgcgatggtgaccctgattgcgaagacggttcagatgaatcgcccgaacagtgccacatgcgtacttgccgaatacacgaaatttcatgtggggcacactctacgcagtgcataccagtcagttggagatgcgacggagaaaacgattgcgactccggagaagatgaggagaattgtggcaatattacatgtagcccagatgaattcacttgctcgagcggcaggtgtatatcccgcaactttgtgtgtaatgggcaggacgactgctctgacggaagcgatgagctggactgtgcccctccgacctgtggtgcacacgagttccaatgcagcacatccagctgcataccaattagttgggtgtgtgatgatgatgcagactgttccgaccagtccgatgagtctctggaacagtgtggccgtcagccagtcattcacaccaagtgtcctgcctctgagatacagtgcggtagcggcgagtgtatccataagaagtggcgatgtgatggcgacccagattgcaaggatggctcggacgaagttaactgcccttcccgcacttgccggccagaccagtttgagtgtgaggatgggtcatgcatccacgggtccagacaatgcaacggcatacgcgattgcgtggacggcagcgatgaggttaattgcaaaaatgtcaaccagtgcttgggccctgggaaatttaagtgcaggtcgggcgagtgcatcgacatatcaaaagtgtgtaatcaggagcaggattgtagagattggtcagacgagccgctcaaagagtgccacatcaacgagtgcctggtgaacaacgggggttgtagccatatttgcaaggacctggtcatcgggtatgagtgtgattgcgcagctggctttgaactcatcgaccggaagacctgtggcgatattgacgagtgccagaatccagggatttgtagccagatttgtatcaatctcaaaggtggctacaagtgtgagtgcagcagaggataccagatggatctcgcgactggcgtgtgcaaggccgtgggaaaggaaccctctctgatcttcaccaacaggcgggacattagaaagatcggccttgaacggaaagagtacatccagttggtcgaacaactgaggaataccgtggctctggatgcagatatcgccgctcaaaaacttttttgggcggacctcagccagaaagcaatttttagcgccagcattgatgataaagtgggcagacatgttaagatgattgataacgtatacaatccagctgccattgcggtcgattgggtttataaaactatttattggaccgacgccgctagcaaaaccataagcgtggccaccctggatgggactaagagaaagtttctattcaatagtgatttgcgtgagcccgcatccatcgccgtggaccctctgagtgggtttgtatattggtctgattggggggagcctgccaaaattgaaaaggcagggatgaatggattcgaccgcagacctttggtgacagcagatatccagtggccgaacggcatcaccctggatctgatcaaatcccggctgtactggctggacagtaagctgcacatgctttcgagcgtcgacctgaatggtcaggatagacgtatcgttttgaaatcactcgaattcctagctcaccctctagccttgacaatcttcgaggatcgagtgtattggattgacggagaaaacgaggccgtgtacggcgcaaataaatttaccgggagtgagcttgcgactctggtcaacaacctaaatgatgcccaggatattatcgtctatcacgagttggtgcagcccagtggaaaaaattggtgtgaggaggatatggagaacggaggctgtgagtacctgtgcctgccagcgcctcaaattaacgaccactctccgaagtatacttgctcttgcccctccgggtacaacgtggaagaaaatggaagggattgccagagtaccgctacaactgtgacttactccgaaaccaaggatacgaataccaccgagatatcagcgaccagcgggctggtccccggtggcatcaacgtgaccaccgcggtcagcgaggtgagtgttcccccaaaggggacatcagctgcctgggctatcttgccactcctgctccttgtcatggcagcagtaggcggttatttgatgtggaggaactggcaacacaagaacatgaagagcatgaatttcgataacccagtatacttaaaaacaacagaggaagacctgagtatcgatattggaaggcactcagcgtcagtggggcacacatacccagcaatcagtgtggtgagtacggatgatgatttggcctag

SEQ ID NO: 246626 - DNA, 729 bp, synthetic construct
  misc_feature 1..729: note = Description of Artificial Sequence: Synthetic coding sequence
  source 1..729: mol_type = other DNA
atgtctgatgagagggaggtggctgaggctgccacaggagaggacgcctctagtcccccacctaaaaccgaggccgcttctgatcctcagcatccagccgctagcgagggcgctgctgctgcagcagccagcccacctcttctgaggtgcctcgtgctgaccgggtttggaggttatgacaaggtaaagctgcaaagtcgtccagccgcacctccagccccagggccaggccaattgacactgagacttagagcatgcggcctaaattttgccgatttaatggctcgccagggcttgtacgatcgtttacctccgctaccggtgacgcccggaatggagggtgcgggagtggtcatagcggtaggcgaaggggtgtccgacagaaaagctggcgaccgcgtgatggtgctcaacagatctggcatgtggcaggaggaggttaccgtgcccagtgtacagaccttcctgatcccggaggcaatgacgttcgaggaagccgcagctttgcttgtgaattacatcacagcttatatggtactattcgatttcggcaatctccagccaggccactccgtcctcgtgcatatggcagctggcggtgtgggaatggctgcagttcaactaccttattccggcgagtgcgattctgtgcgaaacggcttaggtcagcaagctaggggtactgagggcgaatggggacatactagtcatcgcctatctcacgactag

SEQ ID NO: 246627 - DNA, 1182 bp, synthetic construct
  misc_feature 1..1182: note = Description of Artificial Sequence: Synthetic coding sequence
  source 1..1182: mol_type = other DNA
atgagtgatgaacgggaagtcgcagaagctgcaacaggcgaagatgccagttcgccccctcccaagacagaagccgcatccgaccctcagcaccctgcggcatccgagggggctgctgctgctgccgcatccccgccactgctccgctgcctggtactgacagggtttggcggttacgacaaggtgaagctgcaaagccgacccgcagctccacctgcccctggtccaggacagctgacactgcgcttgcgagcttgcggcttgaacttcgccgacctaatggccaggcagggactctacgaccgcctacctccccttcctgtgacccccggtatggaaggtgctggggtggtaatcgccgtgggcgaaggggtatccgacaggaaggcaggagaccgagtgatggtcctgaaccgaagcggaatgtggcaggaggaggtcactgtccccagcgtgcaaaccttcctgatccctgaggccatgacttttgaagaagccgctgccctgctcgttaactacattacagcttatatggttttatttgatttcggaaatctgcagccgggacactctgtcttagtacacatggcagccggaggcgtcggaatggcagccgtgcagctttgccgaactgtggagaacgtaaccgtctttggtactgcaagcgcctcgaagcacgaagcactcaaagaaaatggagtaacccaccccattgattatcatactacagactacgtagacgagatcaagaaaatctcccccaagggagtagatatagttatggatccattaggtggcagcgatactgctaagggctataacttacttaaaccaatgggtaaggtggttacctatggtatggcgaatcttcttacgggacctaaaagaaatctgatggcactagccagaacttggtggaaccagttcagcgtgaccgcattgcagctcctacaagcgaaccgagctgtgtgtgggttccacttgggctacttagacggcgaagtcgagttggtgtccggggtggtcgctcgcctgttagctctgtacaatcagggccatattaagccgcatattgattccgtatggccattcgagaaggttgctgatgccatgaaacagatgcaggaaaagaagaatgtagggaaagtcctgctggtgccaggcccagaaaaagagaattag

SEQ ID NO: 246628 - DNA, 780 bp, synthetic construct
  misc_feature 1..780: note = Description of Artificial Sequence: Synthetic coding sequence
  source 1..780: mol_type = other DNA
atggtgttaaatagaagcggaatgtggcaggaagaggttactgtcccaagtgtgcagactttcctgatcccagaagcaatgacgttcgaggaagctgcggcacttttggtgaactacattacagcctacatggttctgttcgacttcggtaatctacagccaggccattccgtactggtgcatatggctgccggaggtgtggggatggccgctgtccagctgtgtcgcacagttgaaaatgtgaccgtcttcggtactgcatccgcttcgaaacacgaagctctgaaagaaaatggcgtcacccaccctatcgattatcatactactgattacgtggatgagattaagaagataagtccgaaaggcgtagacatcgtcatggaccccctgggcggttctgatacagccaagggctacaacctgttaaagccaatgggaaaagtagtcacctatggtatggcaaatctgcttacaggccctaaacggaacttaatggctcttgcaagaacatggtggaatcagttcagcgtcaccgcactgcagttattgcaggctaatagggcggtttgtggattccacctgggttatctagatggagaggtggagcttgtctccggagtagtcgctcgactcctggctctctataaccagggacatattaagccgcatatcgacagcgtgtggccctttgagaaagttgcggacgcaatgaaacaaatgcaagagaagaaaaatgtcgggaaggtactcctggttccaggacctgagaaagagaactag

SEQ ID NO: 246629 - DNA, 903 bp, synthetic construct
  misc_feature 1..903: note = Description of Artificial Sequence: Synthetic coding sequence
  source 1..903: mol_type = other DNA
atggctagacaaggactttacgacagactgcctcccctgcctgtgactccaggaatggaaggggcaggcgtggttatagccgtcggggagggtgtgagcgaccggaaagcgggagacagagtgatggtcctgaacaggagcggcatgtggcaggaggaggtcaccgtgccatccgtgcagacttttctgataccagaagcaatgaccttcgaagaggccgcagccctccttgtcaattatatcaccgcctacatggtactcttcgacttcgggaatctccagcctggtcacagcgtcctggtgcatatggcagcaggcggagttggtatggcagccgtccagctgtgcagaacagtggaaaacgtcacagtgtttgggaccgcttccgcatccaagcacgaagccttgaaggagaatggcgttacacacccaatcgattaccacaccaccgactatgtagacgaaattaagaaaatcagtcctaaaggggtggacatcgtcatggatcctctgggcggatccgatacagccaaggggtacaacctattgaaaccgatggggaaggttgtaacatacggcatggccaaccttttaaccggcccaaaacggaaccttatggcattggccaggacctggtggaaccagttttccgtgacggctttacaattgctgcaagccaacagggctgtgtgcgggttccacctcggttacttggacggcgaagtagagttggtgagcggcgtggttgctcgcctcctcgctctctacaatcagggccatattaaacctcatatcgatagcgtctggccctttgagaaggtggcagacgccatgaaacagatgcaggagaaaaagaacgtcggaaaagtgctgctggtcccgggaccggagaaggaaaactag

SEQ ID NO: 246630 - DNA, 654 bp, synthetic construct
  misc_feature 1..654: note = Description of Artificial Sequence: Synthetic coding sequence
  source 1..654: mol_type = other DNA
atgtcaagcgatttcgaaggctatgaacaagatttcgcagtcttgacggccgagataacttctaaaattgcaagagtgcctcgcctgcctcccgacgagaagaagcaaatggtggctaacgtagaaaagcaactggaagaagccaaagagttacttgagcagatggacttagaggtccgcgagataccaccacagagccggggaatgtattctaatcgaatgaggagttataagcaagaaatgggcaaactggaaactgatttcaaacggtcccgaatagcctatagtgacgaagtgaggaatgagctgctgggcgacgatgggaattcctcggagaatcagagggcccatctcctggacaatacagagaggctggagcgatcaagtcggagactggaggcaggttaccagatcgccgtagagactgaacagattggccaagagatgctggagaatctatcccacgatagagagaaaatccaacgcgctcgggaaaggctgagagagactgacgcaaacctcgggaaaagtagccggatcttaacaggcatgctgagaagaatcatccagaaccggattcttctcgttatcctgggcataatcgtggtgattacgattcttatggctataacatttagcgtccgaagacactag

SEQ ID NO: 246631 - DNA, 612 bp, synthetic construct
  misc_feature 1..612: note = Description of Artificial Sequence: Synthetic coding sequence
  source 1..612: mol_type = other DNA
atgagctccgacttcgagggatatgagcaggatttcgcagtcctgaccgccgaaatcacttcgaagattgctcgtgttcctcgcctccccccagacgagaaaaagcagatggtcgccaacgtggagaagcagcttgaggaagcaaaggagctcctcgaacaaatggacctggaggtgcgcgagattcccccacagagcaggggtatgtactcaaatcgcatgcgtagttataaacaggagatgggtaaacttgagactgactttaaaagatcgcgtatagcctattccgacgaggtgcgtaacgaactcctcggcgacgatggaaacagttccgagaatcagcgcgctcacctcttggacaataccgaaagactagagcgatcctccagacgcctggaggctggctatcagattgctgtggagactgaacagatcggtcaggagatgctcgagaacttatcacatgatcgagaaaagatccagcgagccagagagaggttgagggagactgatgctaatctcggcaagagctcccgtatcctcaccggaatgctgaggcggggttgctctgttaagaagcagtgtaaccttagcctggcccctaaggcttag

SEQ ID NO: 246632 - DNA, 432 bp, synthetic construct
  misc_feature 1..432: note = Description of Artificial Sequence: Synthetic coding sequence
  source 1..432: mol_type = other DNA
atgtcagcaccagctcagcctccggctgagggtactgagggcacagcgccaggcggaggccctcctgggcctccccctaacatgacatctaaccgcagactacaacagacccaggctcaggtggaggaggtcgtcgacatcataagagtcaacgtggacaaggtgctggaaagggaccaaaagctttccgagctagacgacagggccgacgcgttgcaggctggagcttcgcagttcgagagcagcgccgctaagctgaagaggaagtactggtggaagaactgcaaaatgatgatcatgctagggcgttggcagctgacccagtactgtctggtcatgtggtccttcccatcgtggacaagaccagaagaagggcctgggggaggtccgaagagtaatctggtcagtgtccagtaccctttcaggaagtag

SEQ ID NO: 246633 - DNA, 354 bp, synthetic construct
  misc_feature 1..354: note = Description of Artificial Sequence: Synthetic coding sequence
  source 1..354: mol_type = other DNA
atgtctgctccggcacaacccccagccgagggtacagaaggaactgcacctggcggtggcccacccggacccccacctaatatgacgagtaataggcgactgcagcaaacccaggcccaggtggaagaagttgtcgatatcatccgggtgaatgtggataaggtactggagagagaccagaagttgagcgagctggatgacagggctgacgccctccaggcgggtgcttcccagtttgaaagcagcgctgcgaagttgaaaagaaagtattggtggaaaaactgtaagatgatgatcatgctcggagcaatttgcgccattatcgtggtagttatagtatctaaatatagatag

SEQ ID NO: 246634 - DNA, 357 bp, synthetic construct
  misc_feature 1..357: note = Description of Artificial Sequence: Synthetic coding sequence
  source 1..357: mol_type = other DNA
atgagtgcacccgctcagccccctgctgagggtacggagggcaccgcccctggcggaggaccaccgggtccccctccaaatatgacaagcaaccgacggttgcaacaaacccaggctcaggtggaggaggtcgttgacataatcagggtgaacgtggacaaggtacttgagagagaccagaagttatcagaattggatgaccgcgcagacgcactccaggcgggtgctagtcaattcgaatccagcgcggctaaactgaagcgcaaatactggtggaagaattgcaagatgatgatcatgcttggagccatatgtgcgattattgtcgtggtgattgttatttatttcttcacttag

SEQ ID NO: 246635 - DNA, 744 bp, synthetic construct
  misc_feature 1..744: note = Description of Artificial Sequence: Synthetic coding sequence
  source 1..744: mol_type = other DNA
atgtccgccccagctcagcctccagcagaaggaaccgagggcacagccccaggagggggtcccccagggccaccgccaaatatgacctccaaccgcagactccaacaaacacaggcgcaggtggaagaggtggttgatattatcagagtcaacgtcgacaaggtgctcgagagggaccagaagctgagcgaactggacgatagggcagacgccctacaggccggtgcctcccagttcgagtccagtgctgccaaactcaagcggaaatattggtggaaaaactgcaaaatgatgattatgctgggcgctatctgcgccattattgttgtcgtaatcgtcatctacttttacctcagaatgtatcatcctttcccagttgtgcattgtcacccccacagctgtcccctgccctccgtctgttctttgaacacattaccccatcccccttccagcatacccgctcaggcatcaccttcacccattcctccattctctctgcgttctttcgcattgtgcccaagtacgctggagatgttgctcgttgcgcagtcaaagagcctgcctgaggaacagcagctagctccaccaccatgcctgctgttcttgtactctcaagtgccccctaagccccaaagggtcggcggacagggcaaaggtcaggggggtgaatggctgaggcggagcacacatgaagctgcccagacctgggaggagaagtccatcggagcacacggggacttttag

SEQ ID NO: 246636 - DNA, 351 bp, synthetic construct
  misc_feature 1..351: note = Description of Artificial Sequence: Synthetic coding sequence
  source 1..351: mol_type = other DNA
atgtcagcccctgctcagcctcctgctgaaggtacggagggcaccgcccctggtggcggaccacctgggccaccccctaatatgacatctaaccgtcggctacagcagacccaggcgcaggtcgaggaagtagtggatatcattcgggtaaatgtggacaaggtcttggagcgtgaccagaagttaagcgaactggatgaccgtgccgatgctctgcaggccggagctagccagttcgagtcgagtgctgcgaaactcaagagaaaatactggtggaaaaattgcaagatgatgattatgcttggagcgatctgtgccattatcgtagtagtgattgttagacgagactag

SEQ ID NO: 246637 - DNA, 351 bp, synthetic construct
  misc_feature 1..351: note = Description of Artificial Sequence: Synthetic coding sequence
  source 1..351: mol_type = other DNA
atgtccgcgacagcagccaccgctcccccagcagcacccgctggtgagggaggtccaccagcccctcctccaaatcttacaagcaaccgccgtttgcagcaaacccaggcgcaggttgacgaggtggttgacattatgcgcgtgaacgttgacaaggttctcgaaagagatcagaagctctctgagctggacgatagagccgacgcgttacaagctggggcttctcagtttgaaacctctgccgcaaagttaaagcgtaaatactggtggaaaaaccttaaaatgatgatcatactcggagtaatctgcgccatcatactgatcatcattatcgtctacttctccacttag

SEQ ID NO: 246638 - DNA, 303 bp, synthetic construct
  misc_feature 1..303: note = Description of Artificial Sequence: Synthetic coding sequence
  source 1..303: mol_type = other DNA
atgtccaccggtcctaccgccgcaacagggtccaacagaagactgcaacagacccagaatcaggttgacgaagtggtggacatcatgagagtaaatgtggataaggtgctcgaaagagatcagaaactgtctgagctcgacgatcgcgctgacgcactgcaggccggagcatcccagttcgagacttccgcggcaaaattgaaaaggaaatactggtggaagaactgcaaaatgtgggcgatcgggatcactgttctggttatattcattataattatcatagtatgggttgtgtcttcctag

SEQ ID NO: 246639 - DNA, 351 bp, synthetic construct
  misc_feature 1..351: note = Description of Artificial Sequence: Synthetic coding sequence
  source 1..351: mol_type = other DNA
atggcgggaatcgaacttgaaaggtgccaacagcaagcgaacgaggtgacagagatcatgagaaataacttcggcaaagtactggagagaggcgtgaaattggcagaactgcagcaaagatcagatcagttgcttgacatgagctctacctttaataaaacaacacagaatctggcccagaagaaatgctgggaaaatatcagataccggatttgtgtggggctcgtcgtcgttggcgtcctgctcatcatactgattgtgttgctggtggtgtttctcccacagtcatctgattcctcctccgctccgagaactcaggatgctggcatcgcttccggcccagggaactag

SEQ ID NO: 246640 - DNA, 783 bp, synthetic construct
  misc_feature 1..783: note = Description of Artificial Sequence: Synthetic coding sequence
  source 1..783: mol_type = other DNA
atggccatcctgtttgccgtcgtggctagaggtactacgattctggcaaagcatgcctggtgcggtggcaatttcttagaagtgacagaacagatcctagccaagattccctccgaaaataataagttaacttatagtcatggaaattacctgtttcattacatctgtcaggataggatcgtgtacctgtgtatcactgacgacgacttcgagagaagcagggcattcaattttttgaacgagatcaaaaagaggtttcagacaacttacggatcccgagcgcagaccgcactgccatatgcaatgaacagtgagttttcctcagtgttagctgcccagctgaagcaccacagtgaaaataaaggactggacaaggtcatggagacccaagcacaggtcgatgagctcaaaggaattatggttcgcaatatagtttgccatctccagaactatcaacaaaagtcctgcagcagtcacgtgtacgaagagccacaggcccactattatcaccaccacagaattaactgcgtgcatctttatcattgctttacctctctctggtggatatacatggcgaaactgtgtgaggagatcggcaagaaaaagctccccctgaccaaggacatgagggagcagggggtaaagtctaacccttgtgattcgtcgctgtctcacacagaccggtggtacttacccgtttcctctaccttgtttagcctgtttaagatactctttcatgccagtaggtttatcttcgtgctgagtacatcactgttcctatag

SEQ ID NO: 246641 - DNA, 663 bp, synthetic construct
  misc_feature 1..663: note = Description of Artificial Sequence: Synthetic coding sequence
  source 1..663: mol_type = other DNA
atggcaatattattcgcggtggtggcacgcggtaccaccattttggctaagcacgcctggtgtgggggaaacttcctcgaagttacagagcagatcctggccaagatcccaagcgagaataataagctaacatactcccacggcaactacctgtttcattatatatgtcaggatcgaattgtgtacctgtgcatcactgatgatgatttcgagcggtccagagccttcaatttccttaatgaaattaaaaaacgctttcagaccacttacgggtcaagagcgcagacggctctaccttacgctatgaacagcgaatttagcagtgtgctcgcggctcagctgaagcaccactcggagaacaaaggattagacaaggtgatggagacacaggcgcaggtcgacgagttaaaaggcatcatggttcggaacatcgacctggtggctcagcgaggagagcggctggagcttctcatcgataaaacagaaaatttggtggacagttctgtgaccttcaagactacgtccagaaacctcgccagagctatgtgtatgaaaaatctcaagttgactatcattatcattattgtaagcatagtgttcatatatatcatcgtctccccactgtgtggcggattcacttggccatcttgcgttaaaaagtag

SEQ ID NO: 246642 - DNA, 540 bp, synthetic construct
  misc_feature 1..540: note = Description of Artificial Sequence: Synthetic coding sequence
  source 1..540: mol_type = other DNA
atggcgatcctcttcgccgtggtggctagaggcactacaatccttgctaaacatgcatggtgtgggggaaactttctggaggactttgaaaggtccagggcatttaacttcttgaatgaaatcaagaagcgtttccagactacgtacggctctcgagcccagaccgctcttccctacgccatgaattctgagttttcctccgtcctcgctgctcagctgaagcatcatagcgaaaacaagggcctcgataaggtgatggagactcaggcacaggtagatgagttgaagggcatcatggtgaggaatatagatctggtagcccagcggggtgagagactcgaacttctcatcgacaagactgaaaacctcgtggattcctctgtcactttcaaaactaccagccggaatctggcacgagccatgtgtatgaagaaccttaagctaaccataatcattataattgtctccatcgtttttatctacattattgtaagcccactttgtggcggtttcacttggccttcttgtgtgaaaaagtag

SEQ ID NO: 246643 - DNA, 303 bp, synthetic construct
  misc_feature 1..303: note = Description of Artificial Sequence: Synthetic coding sequence
  source 1..303: mol_type = other DNA
atggaagaggctagcgaggggggaggaaatgatcgcgtgcgaaatctgcagagtgaagttgaaggagtgaaaaatattatgacacagaacgtggagcgcattttggcgaggggtgagaacctagagcacttacggaacaaaactgaggacctggaggcgacgagtgagcacttcaaaacaacaagccaaaaggtggccaggaagttttggtggaagaacgtgaagatgattgtactcatctgcgtcattgtgttcatcatcatcttgttcatcgttctgttcgccacaggagctttctcatag

SEQ ID NO: 246644 - DNA, 777 bp, synthetic construct
  misc_feature 1..777: note = Description of Artificial Sequence: Synthetic coding sequence
  source 1..777: mol_type = other DNA
atggaagagatgaaaaagacagccattagactgccaaagggtaagcagaagcctattaagacagagtggaactcccgttgcgtgctctttacctactttcagggtgatatttccagcgttgttgacgaacatttctctcgtgcactctcaaatatcaagtccccccaggaacttaccccttcgagccagagcgaaggcgtgatgctgaaaaacgatgactccatgtccccgaaccagtggcggtacagctccccctggacaaaaccccagcctgaggtgcctgtgactaatagagcagctaattgcaacctgcatgtgcctggcccaatggctgttaatcagttctcaccttccttagctaggcgtgcctccgtgcgtcccggagaactctggcatttctcatcccttgcgggaaccagctctctggaacccggttactcacacccattcccagccagacatctggtgccggagccacagcctgatggcaagcgtgagccgttattgagtctcctccaacaagaccgttgcttggcacgccctcaggaatccgcggctcgtgagaacgggaacccaggtcaaatcgccggatccactggactacttttcaatctgccacctggttcagtgcattacaagaagctctacgtgtctagggggtccgcgtcaacctctctgcccaacgagaccctttccgagcttgagacccctggtaaatattccctcaccccacctaatcattgggggcacccccataggtacctgcaacacctgtag

SEQ ID NO: 246645 - DNA, 348 bp, synthetic construct
  misc_feature 1..348: note = Description of Artificial Sequence: Synthetic coding sequence
  source 1..348: mol_type = other DNA
atgaagaaaacggccatccgcctgccgaagggaaagcagaaacctatcaagacagaatggaactctagatgtgttttatttacctacttccagggggatatctcttcagtggtcgacgagcactttagcagagctctttcaaatatcaaatcaccacaggagttgaccccatccagtcaatctgagggagttatgctgaaaaatgacaaaaaactgtacgtgtctcgtggctcggcatccacttcgttgcctaatgaaaccttgtccgagttggagacaccaggcaaatattcgctgacccctcctaatcactggggccacccccaccgttaccttcagcatttgtag

SEQ ID NO: 246646 - DNA, 492 bp, synthetic construct
  misc_feature 1..492: note = Description of Artificial Sequence: Synthetic coding sequence
  source 1..492: mol_type = other DNA
tgaataagctccgtggttgacgaacactttagcagggctctgagcaatattaagtccccccaggagctaacgccatcctcccagagcgagggcgtgatgctgaagaatgatgacagcatgtcaccaaatcagtggcggtatagttccccgtggaccaagccccagccagaggtacctgtgacaaaccgtgccgctaattgcaacctgcacgtccctggacccatggcggtcaatcagtttagtccatccctggcacgccgagcctctgtgaggccaggagaactgtggcacttttcttccctcgctggaacttccagcttagaaccaggctatagtcatccgttccctgcaaggcatctggtgcctgagccacagcctgatggcaaacataagaaactgtacgtcagtcgaggctctgcaagcacatccctacctaacgaaacactgagtgagctcgaaacaccaggtaaatattccctgactcctccgtag

SEQ ID NO: 246647 - DNA, 183 bp, synthetic construct
  misc_feature 1..183: note = Description of Artificial Sequence: Synthetic coding sequence
  source 1..183: mol_type = other DNA
actccctcctcccagtctgagggtgtgatgttgaagaacgataaaaagctttacgtatcacgcggtagcgccagcaccagcctccccaatgaaacactgagtgaattagagacgccagggaaatactcccttactcccccaaatcactggggccacccacataggtatttacagcacctgtag

SEQ ID NO: 246648 - DNA, 954 bp, synthetic construct
  misc_feature 1..954: note = Description of Artificial Sequence: Synthetic coding sequence
  source 1..954: mol_type = other DNA
atgagctgccttgacgttatgtaccaagtctatggacctccgcagccctactttgctgccgcttacaccccttatcaccagaagctggcctattactcaaagatgcaggaggctcaggaatgcaatgccagcccatcaagctctggcagtggatcttcttcattttcatctcagaccccagcatccataaaagaggaggaaggatcccccgagaaagaacgaccccctgaggctgaatacattaacagccgatgcgtgctcttcacatattttcagggggatatcagctccgtcgtggacgaacattttagtcgcgctcttagtcagcctagtagctattccccatcgtgcaccagcagtaaagcgcctaggtcaagcggaccttggcgtgattgcagctttcccatgagccagaggagctttccggcaagtttctggaactctgcataccaagcgcctgtccctccacctcttgggagccccctggcaaccgcccatagtgagctgccttttgccgcagccgacccttatagcccggcagcactgcacgggcacttacatcagggggctactgagccttggcatcacgcccatccccatcacgcccatccgcatcacccctatgcactcgggggagctctcggggctcaggcagccccttatcctcgcccagcggctgtccacgaagtgtacgcccctcatttcgaccccagatatggccctctccttatgcctgctgcctcaggcagacctgctaggctagccaccgcacccgcaccagcaccagggtcgccaccatgcgagctctctggcaaaggagaaccggcaggtgccgcttgggctggtccgggaggacctttcgcatcaccctctggcgatgtcgctcaaggcctgggcttgagcgtggattcagcccgtcgctatagtctgtgtggcgcttccctcctatcgtag

SEQ ID NO: 246649 - DNA, 432 bp, synthetic construct
  misc_feature 1..432: note = Description of Artificial Sequence: Synthetic coding sequence
  source 1..432: mol_type = other DNA
atgtcatgtctcgatgtcatgtatcaggtgtatggaccccctcagccatatttcgccgcagcctacactccctaccaccaaaaactagcttactactctaagatgcaggaggcgcaggagtgtaacgcaagcccctcctctagcgggagcgggtcatcaagcttcagcagccaaactcccgcttctatcaaggaggaggagggctcccccgagaaggagagacccccagaggcagaatacataaattcacgctgcgtgttatttacttattttcagggagacatctcaagcgtcgttgacgagcatttctctagagctctgagccaaccatctagctacagcccctcctgtacatcctctaaagcccctaggtcttcaggtccttggagggcacgccgatatagcttgtgcggtgcttccctgctaagctag

SEQ ID NO: 246650 - DNA, 963 bp, synthetic construct
  misc_feature 1..963: note = Description of Artificial Sequence: Synthetic coding sequence
  source 1..963: mol_type = other DNA
atgtcctgcgccgaggtgatgtatcacccacagccttacggggcaagtcagtacctccctaaccctatggccgcaactacatgccccacagcatactatcaacccgcacctcagcccggacagcagaagaagctggcagtgtttagtaaaatgcaggatagcctggaggtgacccttccaagtaagcaagaggaggaggacgaggaggaggaggaggaagagaaagaccagccagcagaaatggagtacctgaactccagatgcgtgctttttacctactttcagggggatatcggctccgtcgttgatgagcacttttctagagcactaggtcaggcgatcaccctccatccggagagcgcgatttccaagtctaagatgggcctgaccccactgtggagagactcctcggcactttccagccagaggaactcgtttcccacctccttctggacctcgagctaccagccaccgcctgcaccatgtcttggaggggtccatcctgacttccaggttacaggcccaccaggcaccttctcagccgctgatccttccccctggccaggccacaacctgcaccagaccggtcccgcacccccaccagctgtctccgagtcctggccgtatcccctaacaagccaggtttcacctagctattctcatatgcacgatgtctacatgcgccatcaccacccacatgcgcacatgcaccataggcacagacaccaccatcatcatcaccaccccccagctggcagcgccctagacccgtcttacggacctctgctaatgccttccgtccacgctgctcggattccggcaccacaatgtgatatcactaaaaccgagcctaccactgtcacatctgccactagcgcatgggctggggctttccatgggactgtggatatagtcccatccgtgggctttgataccgggtggtcagctatggctcgctcctag

SEQ ID NO: 246651 - DNA, 981 bp, synthetic construct
  misc_feature 1..981: note = Description of Artificial Sequence: Synthetic coding sequence
  source 1..981: mol_type = other DNA
atgtcttgcgcagaggttatgtaccatcctcagccatacggggcaagccagtaccttcccaatcctatggccgctaccacatgtcctacggcctattatcagcccgcacctcagcccggacagcagaagaagcttgccgtcttctccaaaatgcaggacagcctggaagtaacactgcccagtaaacaggaggaagaagatgaggaggaggaggaagaggagaaagatcagcccgctgagatggaatatctgaatagtagatgcgtgctttttacatacttccagggagatattggatcagtggtggacgaacatttctcccgtgccctgggtcaggcaatcactctccaccccgaatctgcgattagcaaaagtaagatgggcctgacgcccttgtggcgcgattcctccgcactgagttcccagagaaacagtttccccaccagcttttggaccagtagttatcagccaccacccgcaccctgtctcggaggggtgcatcctgatttccaggtgactgggcctcccggaactttttcggccgcagacccttctccgtggccgggacataatctgcatcagacaggtccagctccacctcccgctgtttccgagtcttggccttacccacttactagtcaagtcagcccctcttactctcacatgcacgacgtgtatatgagacaccatcatccgcacgctcacatgcatcatcgccaccggcatcatcaccatcatcaccacccaccggcaggcagcgcccttgatccgagctacggcccattgttaatgccctccgtgcacgctgcaaggatccccgcaccccagtgtgacattacgaaaaccgagcccacaaccgttacctcagccacatccgcctgggcgggtgccttccatgggactgttgacatcgtccccagcgtgggcttcgacactggcttgcagcatcaggacaagtccaaggaaagtccctggtattag

SEQ ID NO: 246652 - DNA, 1326 bp, synthetic construct
  misc_feature 1..1326: note = Description of Artificial Sequence: Synthetic coding sequence
  source 1..1326: mol_type = other DNA
atgaaggccgctgtggatcttaagcctaccttgaccatcattaagaccgagaaggttgacctagagctttttccaagccctgacatggaatgcgctgatgttcctctgttgacgccaagtagcaaagagatgatgtctcaggccctgaaggctaccttcagcggttttaccaaggaacagcagcgactgggcattcccaaagatccaaggcagtggacagaaactcacgtccgggactgggtcatgtgggccgttaacgagttctctcttaagggagtcgacttccagaaattttgtatgaacggggctgccctctgcgctctcgggaaagactgcttcctggagttggctcctgatttcgtgggtgacatcctgtgggagcacttggagattttgcagaaagaagatgtgaaaccctaccaggtgaacggcgtaaaccccgcttaccccgaaagtaggtacaccagcgactactttatttcttacggcattgaacacgcccagtgtgtgcccccaagcgagttcagtgagccatcctttataactgagagttaccagaccttgcatcccatttcctctgaggaattgctgagtctaaaatacgaaaacgactatcccagcgtgatcctgcgcgacccactgcaaacagacactctgcaaaacgactactttgcgatcaaacaggaagttgttactccagacaatatgtgtatgggtcgtacttcaaggggtaaactgggcggacaggattctttcgaatccatcgagtcctatgactcttgtgacagactgacacagagctggtcctcccagagcagttttaattcccttcagcgcgtgcccagttacgattcgtttgattcagaggactatcccgctgccctcccaaaccacaagcccaaggggacgttcaaagattatgttcgggaccgggctgacctcaacaaggacaaaccggtgataccagccgcagcacttgcaggctacactggcagcgggccaattcagctgtggcagttcctgctagaactgttgacggacaaaagctgtcagagctttatcagttggaccggggacgggtgggaattcaagctgagtgaccccgacgaagttgccaggaggtgggggaaacgcaaaaacaaaccaaagatgaactacgagaaattatctcggggacttcgctactactacgataaaaacatcattcataagaccgcgggaaaaaggtatgtgtacaggttcgtgtgtgacctccagagcttacttggctacacccctgaggagttgcatgcaatgttggacgtgaagcccgacgctgacgagtag

SEQ ID NO: 246653 - DNA, 1065 bp, synthetic construct
  misc_feature 1..1065: note = Description of Artificial Sequence: Synthetic coding sequence
  source 1..1065: mol_type = other DNA
atgaaggccgctgttgacctgaaacctaccttgaccattattaaaactgagaaggttgacctcgagctctttccttctccagacatggagtgtgctgacgtgcccttgctgaccccaagctctaaggagatgatgagccaggctctcaaggctacatttagtggatttaccaaggagcagcaaaggcttggtatcccaaaggacccgaggcagtggactgaaacacatgtgagagattgggtgatgtgggccgtgaatgaattcagtctgaagggagtggattttcagaaattctgcatgaacggagctgctctgtgcgctttggggaaagattgttttctcgagctggcaccggacttcgtcggcgacatcctctgggaacatttggagatcctgcagaaggaggatgtgaaaccttaccaagttaacggggtgaaccccgcatacccagagtcacgctacacctctgactattttatatcttatggaatcgagcacgcccagtgcgtgcccccttccgagttttcagaacccagcttcattacagaatcgtaccagaccctgcatcccataagtagtgaagagttgctcagcctaaagtacgagaacgactacccctctgtcatcctgcgcgatccattacagaccgacaccctccagaatgactactttgccattaaacaggaagttgtaacacctgataacatgtgcatgggcaggacctctagagggagcgggcctatccagctgtggcagtttctgctggaactgctgacagacaaatcctgtcagtccttcatttcctggaccggtgacggctgggagtttaagctaagtgaccctgacgaggttgctaggcgctggggaaaacgaaagaataaacctaagatgaattatgagaagctgtctcgtggcctgcgatactactatgataagaatatcatccacaagaccgctggaaagagatacgtatacagatttgtgtgtgatctgcagtctctcctggggtacactccagaagaattgcacgccatgctggatgtgaaaccagatgcagatgagtag

SEQ ID NO: 246654 - DNA, 1458 bp, synthetic construct
  misc_feature 1..1458: note = Description of Artificial Sequence: Synthetic coding sequence
  source 1..1458: mol_type = other DNA
atgagttatttcgtggactctgccggttcctcccccgtcccgtacagcgcacctaggcctgcggtggtacgtcaggggccatcaaatacttacgaggaccccaggatgaattgtggcttccaaagcaactaccatcagcagagaccttgttatcccttttgggatgaaatggcgactcaggaggtaccaacaggcctggagcattgtgtgtctgatatggagtgcgcggacgtgcccctgctgactccttcctcaaaggaaatgatgtcacaagccctgaaggccactttttccggcttcacgaaggaacagcagcgcctaggcatccccaaggatcccagacagtggactgaaacacatgtcagggattgggtgatgtgggccgtcaacgaattcagtttgaaaggtgtcgattttcaaaaattctgtatgaacggggcagccctgtgcgctctgggtaaggactgctttctggagctcgccccagatttcgtcggggacatcctctgggagcacctcgagattctgcagaaggaagacgtaaaaccctaccaggttaatggagtaaacccagcataccccgaatctaggtatacctctgactactttattagttatggcatcgaacacgctcagtgtgtgccccctagcgaattctctgaaccatctttcatcaccgagagctatcagacgctgcacccgatttcttcagaagagctgctctctctgaaatacgaaaatgactaccctagtgtgattctgagggatccgctgcagactgacactctccaaaatgattacttcgccatcaaacaagaagtggtgacgcccgacaacatgtgcatggggagaacgtcccgtggcaagctgggcggacaggattccttcgaatccatcgagtcatacgactcgtgcgatcgtctgactcagtcctggagctcacaatcttctttcaacagcttgcaacgagtccccagctatgactcatttgacagcgaagactatccggctgccctcccaaatcataaacccaaggggactttcaaggactatgttcgcgaccgggctgacctcaacaaggacaaacctgtcattccggcagccgctctagctggctacaccgggtcggggcctatccaactatggcagttcctgctagagctccttacagataagagctgtcagtcattcatctcctggacgggagatggctgggagttcaagctgtccgatcccgatgaagtggccaggcgctggggcaagagaaagaacaagcctaagatgaactatgagaagctgagtaggggtctgcgctattactacgacaagaacataatccataagaccgccggaaaacgatatgtctacaggtttgtatgtgatctgcagtcattgttgggttacacccctgaggaattgcacgccatgctggacgttaagcccgacgcagatgaatag

SEQ ID NO: 246655 - DNA, 1065 bp, synthetic construct
  misc_feature 1..1065: note = Description of Artificial Sequence: Synthetic coding sequence
  source 1..1065: mol_type = other DNA
atgaaagcagccgttgaccttaaaccaactctgaccattattaagacagagaaggtcgatctcgagctgtttcctagtcctgacatggaatgtgccgatgtgcctctgttgacccccagttcaaaggaaatgatgtcccaagccctcaaggccactttttccggttttacaaaggagcagcaaagattaggcatccccaaggaccctaggcagtggacggagacccacgtgcgcgattgggttatgtgggccgtgaatgagttcagtctgaagggcgtggattttcaaaagttctgcatgaacggggctgcactgtgtgccctggggaaggattgtttcctcgagttggctcccgatttcgtgggcgacatactgtgggaacacttggaaattctgcagaaagaggatgtcaaaccctatcaagtgaatggggtgaaccctgcatatcccgaaagtcgctacacttccgactactttataagctatggcatcgaacatgcccagtgcgtgcctccctcagaattttcagagcccagctttatcaccgaatcttatcagacattgcaccccatctcctcagaggaacttcttagtctgaagtacgagaacgactacccatccgtcatcctccgggaccccctgcaaactgataccctgcaaaatgattactttgccataaagcaggaggtcgtaacaccggataatatgtgcatgggaagaaccagccgcggatccggtcctatccagctctggcagtttctgctggagctccttaccgataaatcctgtcaaagttttatctcttggactggggatgggtgggaatttaagctcagcgatcctgacgaagtggcaaggcggtggggaaagcgaaaaaataaaccaaagatgaattacgagaagctctctcgagggctgcgctactattatgacaaaaatattatccacaagactgccggaaagaggtatgtatacagattcgtttgcgaccttcagagcctgcttggctatactccagaggagcttcacgcaatgttagacgttaagccagacgctgatgaatag

SEQ ID NO: 246656 - DNA, 819 bp, synthetic construct
  misc_feature 1..819: note = Description of Artificial Sequence: Synthetic coding sequence
  source 1..819: mol_type = other DNA
atgaaggcagccgtggatctcaagcccaccctgaccatcattaaaaccgagaaagtcgacttggagctgttcccttcgcctgatatggagtgtgcagatgttcccctgctgaccccatcaagtaaggaaatgatgagccaggccttgaaagcgaccttcagcggtttcactaaggaacagcagagattgggaattcctaaggatccaaggcagtggactgagacccatgtgcgcgattgggtgatgtgggccgtgaatgaattttcactgaagggcgtcgacttccagaaattctgtatgaatggagccgcactgtgcgcactgggcaaagactgttttttagaactggcacctgacttcgtgggtgacatactgtgggagcacctggagattctgcagaaggaggatgtgaaaccctatcaggtgaatggtgtgaatccagcgtaccctgaaagccgttatacttccgattactttatttcctacggaatcgagcatgcccagtgtgttccaccttctgaattcagcgagcctagctttatcactgaatcctatcaaaccctccacccgatctcatccgaggagctcctgagcttgaagtacgagaacgattacccgagcgttatactgcgtgaccctctccagaccgatacactccagaatgactacttcgctataaagcaagaggtggtgactcccgacaacatgtgtatgggacgcacaagtcgcggtaagttggggggacaggatagcttcgagagtatcgagtcttacgactcctgtggtcaggagatgggcaaagaagagaaacagacctag

SEQ ID NO: 246657 - DNA, 678 bp, synthetic construct
  misc_feature 1..678: note = Description of Artificial Sequence: Synthetic coding sequence
  source 1..678: mol_type = other DNA
atgaaggccgctgtcgacttgaaaccgactcttactatcatcaaaacagagaaggtggacctagaactctttccaagccccggaaagctgggaggccaggattcattcgaaagcattgagtcatatgacagctgtgatcgcttaactcaaagctggagctctcagagcagcttcaatagtcttcagagggtgccctcctacgatagtttcgacagcgaagactaccccgcagctttgccgaaccacaagccaaagggcacgttcaaggattacgtcagggatcgggctgaccttaacaaggacaaacctgtgatcccagcggctgctctggctggatacactggaagcggccctatccagctgtggcaattcctgcttgagctgcttacggataagtcctgccagtctttcatttcatggactggcgatggatgggaattcaagctatcagatcctgacgaggtagccagacgctggggaaaacgaaaaaacaaacctaaaatgaactatgagaagttgtcacgcggacttcgatattattacgataaaaacattatccataagactgccggaaagcggtatgtctatagatttgtctgtgatttacagtccctcctggggtacacgcccgaggagctgcatgctatgctggatgtgaagccagatgctgacgagtag

SEQ ID NO: 246658 - DNA, 1848 bp, synthetic construct
  misc_feature 1..1848: note = Description of Artificial Sequence: Synthetic coding sequence
  source 1..1848: mol_type = other DNA
atgaaagcgttacgcctctccgcctctgcattgttctgccttctgcttataaacggtctgggagccgcaccgcctggccgacctgaggctcagccaccgccactgagctcagaacataaggaacccgtcgctggtgatgcggtgcctgggcctaaagatggctctgctcctgaagtcagaggggctaggaatagcgagccccaagacgaaggggagttgttccaaggagttgatccccgagccctcgcggcagtcctgttgcaggccctggatcggcctgcttctcctcccgcacctagcgggtcccagcagggacccgaggaagaggccgcagaagccctgttgacagagaccgtgcggtcccagacccacagtctacctgcacctgaatcgcccgagcctgcagctcctcccaggccgcagactccagaaaatggacccgaagcctctgaccctagcgaagagctggaagcactggcatcattgctccaagaactgcgggacttcagccccagttcagcaaagagacagcaggaaaccgctgccgctgagaccgagacaaggactcacacactgacgagggtaaacttggagagccccggtcccgaaagagtttggagagcatcctggggcgaattccaagccagagtgcccgaacgagcaccacttccacctcctgctcctagccaattccaagctagaatgccagattcaggacctctcccagagacacacaaattcggcgagggagtgtcatctcccaaaacacatttaggagaggccctggcacctctgagcaaggcctatcaaggagttgctgctccgttcccaaaagccaggcgtcccgaaagcgctctcttggggggatcagaagccggagagaggctgcttcagcaaggactggcccaggtggaggcagggcgacgacaggctgaggccacccgccaggccgcagcccaggaagaacgccttgctgatctcgcctccgacttattgcttcaatatctgctgcaagggggagcgagacagagagggctgggagggagaggcctgcaagaggcggctgaggagagagagagtgcaagggaagaagaagaggcagaacaagagcggcgtggcggtgaggaaagagtgggagaagaagacgaagaagccgctgaggcggaggcagaagccgaggaagcagagagggcacgacagaatgccctccttttcgctgaggaagaagatggggaagcaggcgcagaagataagaggagtcaggaggagacacctggccataggaggaaagaagccgaagggacggaggaaggtggcgaagaagaggatgacgaggagatggatccccagactatcgattcgttaatagaattaagtaccaagctgcacctcccagcagatgatgtggtgtcaatcattgaagaggtcgaagaaaagcggaaaagaaaaaaaaatgcccctcccgagcccgtgccgccaccacgcgctgcgccagcaccaacacatgttcgctccccacagccccctccccctgcacccgctccggctagggatgagctacccgactggaacgaggtcctacccccttgggaccgtgaagaagacgaagtctaccctccaggcccttaccacccatttcctaactatatccggccacgaacactgcagccgccttccgcattgagacgcagacactaccaccatgccctccccccatctcggcactatcctgggcgagaggcacaggcccgaagggcccaggaagaggcagaagccgaagaaagaagactgcaggaacaggaggaattggaaaattatatcgaacacgtgcttttaagacgcccttag

SEQ ID NO: 246659 - DNA, 1848 bp, synthetic construct
  misc_feature 1..1848: note = Description of Artificial Sequence: Synthetic coding sequence
  source 1..1848: mol_type = other DNA
atgaaagctttgaggctttctgcctctgctctcttttgcctgctccttatcaatggactaggcgctgcccctcccggacgtcctgaggcacagccccctccactcagtagtgaacacaaggaaccagttgcgggagacgcggtgccaggtcccaaggacggctctgcgcctgaggtgcggggagccaggaattctgagccccaggacgaaggggagttgttccagggcgtggacccgcgtgccctggcagccgtcctgctgcaggcccttgatcggcctgcctcgccccctgctcctagcgggtctcaacagggtcctgaagaagaggcagcagaagctctgttaaccgagacagtccgaagccagacccatagcctacccgctcccgagagcccagaaccagccgctccacctcgcccacagaccccggagaacggcccagaggcgagcgacccttctgaggaactggaagctttggcatcactccttcaagagcttagagattttagtccttcctccgccaagagacagcaggagactgctgccgctgaaacagaaacccggactcacaccctgacgcgcgtgaacctggagtctcctggcccagagcgggtatggcgtgcgtcttggggggagtttcaggcacgcgtacccgaacgcgcaccgcttcctccgcctgctccaagccagtttcaagccagaatgccggatagcggaccactgccagagacccacaaatttggcgagggggtctcctcgcccaaaacgcacctcggcgaagcactggctccgctgagcaaggcataccagggagtcgccgcacctttcccaaaggctagacggccagaatctgccctgctcggagggtctgaggctggcgaacgcctgttgcagcaggggctggcccaggtcgaggccggaaggaggcaggcagaagcaacccggcaggcggcagcccaagaggagcggctggccgacctcgcaagcgatttactgttgcagtacctgctccaaggaggggctagacagcgcggactggggggacggggactgcaggaagccgctgaagagcgcgagtcagcaagagaggaagaagaggcggaacaggaacgacggggtggtgaggagcgggtaggcgaggaggatgaggaagccgcagaagctgaggcagaggcggaggaggctgaaagagctcgccagaatgctctgctttttgcagaggaggaggatggcgaggctggcgctgaggataaaaggtcccaggaggagactcctgggcataggaggaaagaggccgaaggcaccgaagagggcggtgaggaagaggatgacgaggagatggacccccagactatcgatagcttgatcgagctgagtacgaaactgcacttgcctgcagatgacgtcgtgagcatcatcgaggaagtggaagaaaagaggaaacgtaagaagaacgcaccaccggaacccgtccctccccctagagcggctcccgctccgacccatgtgcggtccccccagccacctccgccagcccctgcgccagctcgcgacgaactgcccgactggaatgaggtactgcccccttgggacagagaggaggatgaggtgtacccccctgggccataccatccattccctaactatattaggccaaggacgctgcagccaccatctgctcttcgcaggagacattatcaccacgcgttgccgccaagccggcactacccagggagagaagcgcaggcgagaagggcccaagaggaagccgaggctgaggaacgcagactccaggaacaggaagagcttgagaattatatcgagcacgtgctgcttaggcgaccttag

SEQ ID NO: 246660 - DNA, 1134 bp, synthetic construct
  misc_feature 1..1134: note = Description of Artificial Sequence: Synthetic coding sequence
  source 1..1134: mol_type = other DNA
atgaaggctctccgccttagtgcttccgcattattctgtctcctgctgatcaatggattgggcgctgccccacccggacgtccagaagcccagcctcctccactcagcagcgagcataaggagccagtggccggagatgctgtcccgggtcccaaggacgggtcagcaccagaggtccggggagcacgaaatagtgagcctcaggacgagggagaactgttccagggagtagatccaagagccctggccgcagtgctcctacaggctcttgacagacctgcatcgccaccggctcctagcgggagccagcaggggccagaggaggaggcagccgaggctctgctgacggaaacggtccgttcccaaacgcacagccttcccgcacctgaaagccctgaacctgctgcaccacctcgccctcaaaccccagagaatggccctgaagccagcgatccaagcgaggaattggaggcccttgcttcactgctgcaggaactccgggacttctccccctcgtctgccaagcgtcaacaggaaactgccgcagccgagactgagacacggacccataccctcacacgggtgaacctcgaaagcccgggaccagagagagtgtggcgcgcatcctggggcgaatttcaggcgagggtgcctgaacgcgcaccattgcctccccctgctccttcccagtttcaggctaggatgccagacagcggccctctccctgagacacacaagttcggcgaaggcgtgagctcccctaaaactcacctgggcgaggcacttgcccctctctccaaggcctaccaaggtgttgcggctcccttccccaaggccagaagaccagaatccgcgttgttaggaggctcagaagctggagaacgcctgttgcagcagggcctcgctcaggtggaggccggacggaggcaagccgaggccacaaggcaagcagccgctcaagaggaaaggttagccgatctcgcatccgatctcctccttcagtttgctgcgggacgcggtcccgctgctcggccatgtcccttagcgctgccactcagtccagggtgtgtcggtacctgccagacgcccctccccggtcccgagccagagctcccagagctgacaaggggctag

SEQ ID NO: 246661 - DNA, 2484 bp, synthetic construct
  misc_feature 1..2484: note = Description of Artificial Sequence: Synthetic coding sequence
  source 1..2484: mol_type = other DNA
atgacgaaactttccgcccaagtcaagggatccctcaacattacaacacccggtctgcagatatggcgaatcgaggcgatgcaaatggtgccggtcccatcatccactttcggcagtttctttgatggcgactgctacattattctggccattcataagactgcaagttccctgtcgtacgacattcattactggatcggtcaagatagctctctcgatgagcagggcgcagcggctatctacacaactcaaatggatgacttcctgaagggacgagccgtccagcatagggaggtgcaggggaatgaaagcgaagcattccgcggatatttcaaacagggattagtgataaggaagggaggcgtggctagtggtatgaaacacgtggaaactaattcttatgacgtgcagcggcttctgcacgtcaagggcaagcgcaacgtcgtggctggtgaagtggagatgagctggaagtccttcaaccgaggagatgtcttccttcttgacctcggcaagctgatcatccaatggaatggcccagagagcaccaggatggagagacttcgtggcatgaccctggccaaggagatccgggaccaggagaggggcggacgaacctatgtaggggtcgttgacggagaaaacgagctggccagcccaaagctgatggaggtaatgaaccatgtcttgggcaagcgaagggagttgaaagcagccgtgcctgacaccgtggtggagcctgcactgaaggccgcactgaagctttaccacgttagtgattctgaaggaaacctcgttgtgcgcgaagtggcgacgaggcctctcacgcaggacttgctgtcccatgaagactgctatattctcgatcagggcggactgaagatctacgtctggaaggggaagaaagcgaatgagcaggagaagaagggggcaatgagtcatgccctgaacttcattaaagccaagcagtaccctcctagcacacaagtagaggtccagaatgatggagcagagtcagctgtattccagcagttattccagaaatggaccgcatctaatagaaccagcgggctcggcaagactcacacagtcggctcagtggccaaggtggagcaggttaagtttgacgccacaagtatgcatgtaaaaccacaagtggcagcacagcagaagatggttgacgatggttctggagaggtgcaggtctggcggatcgagaacctggaacttgtgccggtggactcaaagtggctcggccatttctatggaggagattgttatctcctgttgtacacctacctgatcggcgagaagcagcattacctactgtatgtgtggcagggctcccaggccagccaggacgagattaccgcctctgcctaccaagccgttatcttggatcagaaatataacggcgagccggtgcagatacgggtcccaatgggcaaggaaccacctcacctcatgtccatatttaaaggaaggatggtggtgtatcagggcggaacctcaaggactaacaatctagagacaggcccttctaccagactttttcaggtccagggtacaggcgctaataacacaaaagcatttgaggtgcctgctagggccaactttcttaacagcaacgacgtttttgtgctgaagacccaaagttgctgctacctgtggtgcggtaagggctgctccggagacgagagggagatggctaagatggtggccgataccatcagcaggacggagaaacaggtggtggttgaaggccaagaacccgcaaacttctggatggctcttgggggaaaagccccatacgctaacacgaagaggctgcaggaagagaacctcgtcattactccacggttgttcgagtgtagcaataagacaggcagatttctcgcgacagagattcctgactttaaccaagatgatttggaggaagacgacgtcttcctccttgacgtgtgggatcaggtatttttttggattgggaaacatgcaaacgaagaggagaaaaaagctgccgcaaccaccgcccaggagtaccttaagactcacccaagtggtagagaccctgaaactccgattatcgtcgtgaagcagggccacgagccaccaacctttacgggttggtttctggcatgggacccatttaaatggtccaataccaaaagctacgaggacctgaaggctgagctggggaattcaagagattggtcacaaataacagctgaggtgacttccccaaaagttgacgtgtttaacgctaactctaacctctcgtccggtcctctccctatatttccccttgagcagctggtaaacaaaccagtagaagagctcccggaaggggtagacccttcgcggaaggaggaacatctgagcatcgaggacttcacccaggcttttggcatgacccctgcagcgtttagtgcactgcccaggtggaagcagcagaaccttaagaaagagaaaggccttttctag

SEQ ID NO: 246662 - DNA, 1551 bp, synthetic construct
  misc_feature 1..1551: note = Description of Artificial Sequence: Synthetic coding sequence
  source 1..1551: mol_type = other DNA
atgtcccatgcgctcaacttcattaaagctaaacagtatcctccatccacccaggtcgaggtacagaatgatggcgcagagtctgctgtttttcaacagcttttccaaaagtggactgcctctaaccggaccagcggattggggaaaacccatactgtaggttcagtggcaaaagtggagcaggtgaaattcgatgcgacaagcatgcacgtgaaaccacaggttgccgcacagcagaaaatggtagacgacggctccggagaggtgcaagtatggagaatagagaatctcgaattggtaccggtagattctaagtggttaggacatttttacggaggtgactgctacctcctgttgtacacctatcttataggggagaaacaacactacctcttatatgtatggcagggcagccaggcttcccaggatgagatcaccgccagcgcctaccaggcagttatcctagatcagaagtataatggggaaccagtccagatacgcgtacctatgggaaaagaacctccccacctgatgtcaatctttaaagggcgtatggttgtctatcagggagggacctctcggaccaacaacctggagactggacctagcactagactgtttcaggtgcaaggcacgggagcgaataacacaaaggcctttgaggtccccgcacgcgcaaactttctgaactccaacgatgtttttgttctgaaaacccaatcatgctgttacttatggtgtggaaagggctgcagcggcgacgaacgcgagatggccaagatggtggctgatacaataagccgcactgaaaagcaagtggtggttgaggggcaggaaccagcaaatttttggatggccctgggtggtaaggctccgtacgccaataccaagagactgcaagaagaaaatctcgtgatcactcccaggttattcgaatgtagtaacaaaaccggcaggttcttagctaccgagattccggattttaatcaggacgatctggaggaagacgatgtgtttctgcttgatgtgtgggaccaggtttttttctggattggcaaacatgccaatgaggaagagaagaaggccgcagcaaccacggctcaagaatacctgaagacccacccctccgggagagaccccgaaacccccatcatagtggttaaacaggggcatgaacctccaacattcacgggctggttcctagcttgggatccctttaagtggtctaacactaagtcttacgaggacctcaaagccgagttggggaactcaagggactggagccagatcacagcagaggtcactagtcccaaagtagacgtgttcaacgccaactctaatctgtcgtcaggacccttgccaatcttccctctcgagcaactggtcaacaaacctgtcgaagagctacccgagggggtagacccgtcccggaaagaggaacatctgagcattgaagacttcacccaagcatttggcatgacccctgccgcattttctgctctgcccagatggaagcagcaaaatttaaagaaagaaaagggcctgttctag

SEQ ID NO: 246663 - DNA, 1266 bp, synthetic construct
  misc_feature 1..1266: note = Description of Artificial Sequence: Synthetic coding sequence
  source 1..1266: mol_type = other DNA
atgactaaactgagtgcccaagtcaaggggagcttgaacattaccaccccgggattgcagatctggagaatcgaggcaatgcagatggtgccagttccaagctcaacattcggcagctttttcgatggtgattgctatatcatcttagcaatccataagacggcctcctccctttcctacgatatccattactggattggccaggacagcagcctggacgagcagggcgcagcagcaatctacacaacacagatggatgatttcctgaaaggcagggcagtacagcaccgggaagtgcagggcaatgagagcgaggcgttcagaggatatttcaagcagggcctagtaatcagaaaggggggagtggcttctggcatgaaacatgtggaaaccaacagttatgatgtgcagcgattgctgcacgtgaagggtaaacgcaacgttgtggccggagaagtagagatgagttggaagtcatttaacaggggagatgtgttcttgctcgatttaggaaagctgattattcagtggaacggccctgagtcaacccgcatggaacgcctaaggggcatgactctggcgaaagagatcagggaccaggaacggggtggacggacatatgtcggcgtggtagatggcgaaaacgagctggccagtcccaaactgatggaggtcatgaatcacgtcctcgggaaacgaagggaactgaaggccgcagtgcccgacactgtggtagagcctgctttgaaagcagccctgaaactataccacgtgtccgactctgagggcaatttagtggtcagggaggtagcaacacggcctctaacccaggatctactgtctcacgaggattgctatatactggaccaaggaggacttaagatctacgtgtggaaaggcaagaaggcgaacgagcaagagaagaaaggggctatgagtcacgcattaaacttcataaaggccaaacagtatcccccatctacgcaggtcgaggtgcagaatgacggtgccgaatctgcagtctttcaacagttattccagaaatggaccgcaagcaatcggactagcggactgggaaaaacacatacagtgggctctgtcggcgagggccaggccggagccgtgagagagccaggtagcagaagctgggccagacgtgcgacatggagtacaacacaccccccttcgcttacctgtatctttaatgaagacttctacgctggcagcggtcttgtcctggcagacggggatgttgacaaactttag

SEQ ID NO: 246664 - DNA, 576 bp, synthetic construct
  misc_feature 1..576: note = Description of Artificial Sequence: Synthetic coding sequence
  source 1..576: mol_type = other DNA
atgggcaagcagaactctaaactcgctcccgaagtaatggaagacttggtcaaaagtaccgaatttaatgagcatgagttgaagcagtggtataagggctttctaaaggattgcccgagtggcaggttgaacttagaagaatttcaacagctttatgtcaagttttttccttatggcgacgccagcaaattcgcacaacatgcgttccggactttcgataagaacggggacggaaccatcgactttcgggaatttatctgtgcccttagtattacctctcgtggttccttcgagcagaagctgaattgggcctttaatatgtatgaccttgacggcgatggtaagatcacccgagtggaaatgctggagataattgaagcaatatacaagatggtcggcacagttattatgatgaaaatgaacgaggacggcctgacccccgagcagcgagttgataaaattttctctaagatggacaaaaacaaggatgatcagattaccctggatgaatttaaggaggcggctaagagtgacccatccattgttttattgctccagtgtgacatacagaaatag

SEQ ID NO: 246665 - DNA, 576 bp, synthetic construct
  misc_feature 1..576: note = Description of Artificial Sequence: Synthetic coding sequence
  source 1..576: mol_type = other DNA
atgggcaagcagaactctaagcttgctcccgaggttatggaagaccttgttaagagcactgagtttaacgagcacgagctgaagcagtggtacaagggattcctgaaagattgcccgtcggggaggctgaacctggaagagtttcagcaactgtacgtgaaattcttcccctacggggacgctagtaaattcgcccagcatgcctttcggacttttgacaaaaacggtgatggcacaattgactttcgcgagttcatatgcgcccttagtatcacaagtcggggtagcttcgaacaaaaactaaactgggccttcaatatgtacgacctggacggcgatggaaagatcactcgcgtggagatgcttgagataattgaagcaatttacaagatggtcggtacggtgatcatgatgaagatgaatgaggatggcctcactcctgagcagcgtgtggacaagattttttccaagatggacaaaaataaggacgatcaaattactctcgacgagttcaaggaagccgctaaatctgatccctctattgttctgctcctccaatgcgatattcagaaatag

SEQ ID NO: 246666 - DNA, 576 bp, synthetic construct
  misc_feature 1..576: note = Description of Artificial Sequence: Synthetic coding sequence
  source 1..576: mol_type = other DNA
atgggcaagcagaatagtaagttagcaccagaggttatggaagacttggtcaaaagcacggagttcaatgaacatgaactgaaacaatggtacaaaggatttctgaaggactgcccctccggcagattaaacctcgaagagttccaacagctttacgttaaatttttcccttacggtgacgccagcaaattcgcccagcacgcgttcaggacatttgacaaaaatggtgatggcacaattgatttcagggaattcatatgcgcactgtccataacttcaaggggatctttcgagcaaaaactgaactgggcatttaatatgtacgatttagatggcgacgggaaaataaccagggtcgagatgctggaaatcatcgaggcaatctataagatggtcggaaccgtgatcatgatgaagatgaatgaagatggcctaacacctgagcagcgcgtcgacaagatcttttccaagatggacaagaataaggacgatcaaattacgctagacgaatttaaggaggctgccaagagtgatccctcaattgttctgcttttgcaatgcgatatccagaaatag

SEQ ID NO: 246667 - DNA, 315 bp, synthetic construct
  misc_feature 1..315: note = Description of Artificial Sequence: Synthetic coding sequence
  source 1..315: mol_type = other DNA
atgggtaaacagaatagcaaactggcacctgaggtcatggaagacctagtgaagagtaccgaatttaacgaacacgagctgaagcagtggtacaagggcttcttgaaggactgtccatccggcaggctgaatttggaggagtttcagcagttgtacgtgaaatttttcccatacggcgatgcctcgaagtttgcacagcacgcctttagaactttcgacaaaaatggggacggcaccattgattttcgtgaatttatctgtgccctcagcatcacctctaggggatcttttgaacagaagttaaattgggcctag

SEQ ID NO: 246668 - DNA, 357 bp, synthetic construct
  misc_feature 1..357: note = Description of Artificial Sequence: Synthetic coding sequence
  source 1..357: mol_type = other DNA
atgggtaaacaaaactcaaaactggcaccggaggtgatggaggatctggtaaaatccacggagttcaatgagcatgagcttaagcagtggtacaagggatttctgaaagactgccccagcgggcgtctcaacctcgaggaattccagcagctttacgtgaaattttttccctatggtgacgctagtaagttcgcacagcacgcttttcgcacctttgataagaatggcgatgggacgatcgatttccgggagttcatatgcgccctgtccatcacttcaagaggctcgtttgagcagaaattgaactgggcgttcaacatgtatgacctggatggggatggtaagataaccagatag

SEQ ID NO: 246669 - DNA, 720 bp, synthetic construct
  misc_feature 1..720: note = Description of Artificial Sequence: Synthetic coding sequence
  source 1..720: mol_type = other DNA
atgacaggcagggacagtctgtcagatgggagaaccagcagccgggctctggtgccaggtggctccccccgaggctctagacctagaggctttgcaattaccgacttgctgggactcgaagccgaattacccgcaccggctggtccgggtcaggggagcggctgcgaggggcctgcagtcgcaccctgtcccggaccaggacttgacgggtcatccctcgcacgaggagcactgccgctgggtttaggtctgttgtgtggcttcggcacacagcccccagccgctgctagagcaccatgcctgctgctggctgacgtcccatttttacctccaagggggccagagcctgccgctccattggccccatcaaggcctcccccagctctggggaggcagaagaggtcggactccgtgagcacttcagacgaggatagccagagtgaggatagaaacgatctcaaagcctctcctacactaggcaagcggaaaaaacggaggcataggacagtctttacggcccaccagcttgaagaactggaaaaggccttctcggaagcgcattacccggatgtttacgcgagagaaatgctggcggttaaaaccgagctgcctgaggaccgcattcaggtatctggagtgccatttcttcgctcaaaggataccacggaaaacgtgtccttcccacattcagtgtctcagtccgctgttccatcactgtag

SEQ ID NO: 246670 - DNA, 1098 bp, synthetic construct
  misc_feature 1..1098: note = Description of Artificial Sequence: Synthetic coding sequence
  source 1..1098: mol_type = other DNA
atgacgggcagggactcgctcagtgacggtcggacctctagccgagcccttgtgcctggagggtcgccaaggggatctagacctcgcggatttgcaatcactgatcttcttgggctagaagccgagctgccagcaccggctggacccggacaaggatcaggttgcgaaggacccgctgtcgccccttgtcctggacccggactggatggaagctctttagccagaggggctctgccactagggttgggtctgctgtgtggattcggcacccagccacctgctgccgcacgggcaccttgtctgctgttagcggatgtgccatttctgccgccaagaggcccagaacctgcagcacccctagcaccatctcgccctcccccagctctgggaaggcagaaacggtcggatagtgtgagcacatctgacgaagacagtcagagtgaggaccggaacgatttgaaggcatctcctacactcggtaagcgcaaaaagcgaagacatcgcactgtcttcacagctcaccagttggaggagttggagaaggcattctcagaagctcactatcctgacgtgtacgctagagaaatgctcgctgtcaagactgagctgcccgaggaccgcatccaggtgtggtttcagaatcggcgagcaaaatggaggaagcgtgagaagcgctggggagggtcatcggtcatggccgaatacggtctctatggagccatggtgcgccactgcatcccactgcccgactcagtgttgaactcggccgagggtggtctccttggatcctgtgccccttggctgctcggcatgcacaagaagtccatgggaatgataagaaaacccggatccgaagataagctcgctgggctgtggggctccgaccatttcaaggaaggcagcagccaatccgaaagtggatcccagcgcggttcggataaagtatccccggaaaacggattggaggatgtggccattgatctatcaagttccgcacgacaggagacgaagaaggtgcatccaggcgctggcgcacagggcggatccaactccaccgccctggaaggccctcagccaggcaaagtgggggcaacctag

SEQ ID NO: 246671 - DNA, 432 bp, synthetic construct
  misc_feature 1..432: note = Description of Artificial Sequence: Synthetic coding sequence
  source 1..432: mol_type = other DNA
atgaccggtcgggacagcctgagtgacgggaggacttcaagtcgagccttggtgccaggagggtccccaaggggaagccggccacggggttttgcaatcactgacttgctcggcctcgaggctgaattacccgctccagctgggcctggacaaggatcaggctgcgaggggccagcagtagcaccctgtccaggacctggcctagacggatcatccctcgccaggggagctctacccctgggcctgggactgttatgtggctttggcacccagcccccagcagcagcaagggctccatgcctgctcttggcggatgtcccctttctacctcccaggggaccagaacctgctgcccctctggctccttcccggcctcctcccgctttaggcagacagaaaagatctgactcagtgtcaacttccgctatgtag

SEQ ID NO: 246672 - DNA, 843 bp, synthetic construct
  misc_feature 1..843: note = Description of Artificial Sequence: Synthetic coding sequence
  source 1..843: mol_type = other DNA
atgactgggagagattctctgagcgacggcagaacctccagtcgcgctcttgttcctggtggtagccccagagggtcaaggccgaggggcttcgcaatcactgacctgcttggcctggaagccgagttgccagcaccagcgggtccaggacaaggctcgggctgcgaaggccctgctgttgcgccttgcccagggccagggcttgatggttcgagcttggccaggggggctctccccctgggtctcgggctgttgtgtggttttggaactcagcctcctgcagctgcacgggctccgtgtctgctcctcgctgacgtacctttcctcccccctagagggcctgagcccgcagctcccctcgctccctcaagaccccctcctgcgctgggcaggcagaaaagatccgacagtgtctcgacatctgacgaagattctcagtccgaggatcgaaatgacctgaaggccagtcccaccctgggaaaacgcaagaagcgccgacatcgaactgtattcaccgcccaccagctagaggagctggaaaaggcattcagcgaggcccactacccagatgtgtacgcaagggagatgcttgctgtaaagacggaacttcctgaagaccggattcaggtctggtttcagaatagaagggcaaaatggagaaagcgcgagaaaagatggggaggttccagcgttatggctgagtacggcttgtacggcgcaatggttcggcactgcatcccactgccagattctgtgctgaacagcgctgagggaggcctgctaggaagctgcgcaccatggctccttgaaggcgaaacactaggctgccgcgaaatgaagtag

SEQ ID NO: 246673 - DNA, 657 bp, synthetic construct
  misc_feature 1..657: note = Description of Artificial Sequence: Synthetic coding sequence
  source 1..657: mol_type = other DNA
atgacaggaagggattccctcagcgatgggaggacatccagtagagctctggtccccggaggatctccgagaggatcacgacctcgaggctttgcaattaccgacttgctcgggctagaagccgagctccccgctcctgctggacctggtcaaggcagtggctgcgagggccctgccgttgccccatgtcccggaccaggactagatggatcttcactggcacggggagcactacccttaggactaggattactgtgtggattcggtacacagccacccgcagccgctagagcgccatgcctcctgctcgcagacgtcccttttctgccccctcgtgggcctgagcccgctgcccctctggctcccagcaggcccccacctgctctaggaagacaaaaacgcagcgatagtgttagcacatctgacgaagacagtcagagcgaggatcgcaacgatttgaaagcttctcccaccctggggaagagaaaaaagagacggcacaggactgtcttcacagcccaccagctggaggaacttgagaaagcattcagcgaagctcactatccggacgtgtacgctcgagagatgctggcagtcaagacagaactaccagaagatcggatacaaagagtaagacactgggccgctgagaagtag

SEQ ID NO: 246674 - DNA, 906 bp, synthetic construct
  misc_feature 1..906: note = Description of Artificial Sequence: Synthetic coding sequence
  source 1..906: mol_type = other DNA
atgactggaagagactccctgtccgatggaaggacaagttctcgagcacttgtgcctggaggctcccccagaggctctcgcccacgcggattcgcaatcacggatctgttgggacttgaagccgagctcccggcaccagctggccctgggcagggttcaggatgtgaaggcccagctgtcgccccatgccctggaccgggtcttgacggatctagcctagctcgaggagctttgcccctgggcctgggattgttatgcggctttggcacccagcccccagccgctgccagagccccatgcctgttactcgctgacgtgccatttctccctccaaggggtcctgaacctgcggctcctttagctccaagtagaccaccgcctgcgctgggacgacagaagcggagcgattcagtgagcacgtcagatgaggatagccagagtgaggatcgtaatgacctgaaagccagccccacgttgggaaagaggaagaaacgaagacacaggacagtctttaccgcccaccagctcgaggagttagagaaagccttttctgaggcacactatccagacgtgtacgccagggagatgcttgcagtgaaaaccgagctgccagaagatcggatacaggtgtggtttcaaaaccgacgagccaagtggaggaaaagagagaagaggtggggtgggtcgtccgttatggccgagtacggtctgtacggtgctatggtgagacattgcatacccctacccgatagtgtgctgaactctgcagagggaggattgttgggctcctgcgcaccatggctgttagtgcagacgtccgcgccagggggaagcaggagtctggatttcgcaggagacacacaggcacctcagactccttggtggtgcctaatgaccttttcctag

SEQ ID NO: 246675 - DNA, 711 bp, synthetic construct
  misc_feature 1..711: note = Description of Artificial Sequence: Synthetic coding sequence
  source 1..711: mol_type = other DNA
atgaccggcagggatagcttgtcggatggtaggacatcaagcagagcattagtgcccggtggaagccctcgagggtcacgacccagaggctttgctatcaccgacttgttggggcttgaagccgagttgcccgcaccggctgggccagggcaaggatccggctgcgagggcccagcggttgctccctgtcccggtcccggactggacggctcctcgttggcaaggggagcattgcccctcgggctcggacttctgtgtggcttcggcacccagcccccagctgcagccagggccccatgtctccttcttgccgacgtcccttttctgccgccacgcggaccagaacccgcagctccactggctccctccaggcctccccctgcacttggccgacagaaacgttctgacagcgtgagcacctctgacgaagactcacaatcagaggataggaacgatctgaaggcgagccctactctggggaagagaaagaaaagaaggcacagaaccgttttcaccgcacaccagctcgaagaattggagaaagccttttcagaagcacactacccagatgtttacgctagagagatgcttgctgtgaaaactgagctcccagaagatagaatccaatgcaagctgctgctgctggaagcccctgtccattggaccctgcaggaaacccaccgactgcctcgtccacgcggaggcgcttag

SEQ ID NO: 246676 - DNA, 1110 bp, synthetic construct
  misc_feature 1..1110: note = Description of Artificial Sequence: Synthetic coding sequence
  source 1..1110: mol_type = other DNA
atgcgcgcatgtataagtctggtgctcgccgttttgtgcggactggcctgggccgaagaccacaaggagagcgagccacttccccagctcgaagaagaaacagaggaggcgctggcgagtaacctgtattctgccccaacatcctgccaaggtcggtgctatgaggcgttcgataaacatcaccaatgccattgcaatgccagatgccaggagttcggtaattgctgcaaggacttcgagtctctatgttcggaccacgaggtttctcattcaagtgacgcgattaccaaagaggagatccagagcatttctgagaagatttaccgtgctgacaccaacaaggcccagaaggaagacatcgtactgaactcccagaattgcatctccccgagtgaaactcgcaatcaggtcgaccgatgccccaagccattattcacctatgttaatgagaagctgtttagtaagcccacctacgctgccttcatcaatcttctgaacaattatcaaagggccaccgggcacggcgagcacttttctgcccaggaactggctgaacaggatgctttcctccgcgaaatcatgaagactgcagtgatgaaggagctgtattcattcttgcatcatcagaacagatacggaagtgagcaggagttcgtcgacgatttgaagaatatgtggtttggtctctattcccgtggtaacgaggaaggcgattcctcaggctttgaacacgtttttagcggggaggtcaaaaaaggtaaggtaacagggttccataactggataaggttttacctggaggagaaggagggcctagtcgactactacagtcacatctacgacgggccatgggactcctaccctgacgtcctagctatgcaattcaattgggatggatattacaaggaagtggggtccgcgttcatagggagttctcctgaatttgaatttgccctttatagtctgtgttttatagcacgccctgggaaggtttgtcaactgtccctggggggatatcctcttgctgtccggacctacacatgggataaaagcacatacggaaacggcaagaagtacatagctaccgcttatatcgtcagctccacgtag

SEQ ID NO: 246677 - DNA, 1284 bp, synthetic construct
  misc_feature 1..1284: note = Description of Artificial Sequence: Synthetic coding sequence
  source 1..1284: mol_type = other DNA
atggaggctatggcggcaagcacttcgcttcctgatccaggagacttcgaccgtaatgtaccgagaatctgcggagtctgtggagatcgggctacaggatttcattttaacgcaatgacctgcgaaggctgtaagggcttctttagacgcagcatgaaacggaaggcattgtttacttgtccctttaacggtgattgtaggattactaaggataacaggcgccactgccaggcatgcagacttaaaagatgtgtggatattgggatgatgaaagagtttattctgacagacgaggaggtccagcgaaagagagagatgattcttaagaggaaggaggaagaagctctgaaggatagtctaaggccaaaactgtctgaggagcagcaacgtattatagctatcctcctagatgcccaccataagacctacgatcccacctactcagacttttgccaatttagaccacccgtccgcgtcaatgatggcggtggctcacatccgtcacgccctaactcgagacacacccccagcttctcaggcgatagctcatccagctgctccgaccactgtatcaccagtagtgatatgatggacagctccagcttcagcaatctcgacctcagtgaggaagacagtgatgatcccagtgtgactcttgaactctcccagctgagcatgcttccacatttagcagacttagtatcatattctatacaaaaagtcatcggctttgccaagatgatccctggtttccgggacctgacgtctgaagatcagatcgtactgctaaaatcttctgcgattgaggtgataatgctgagatcgaatgagagtttcaccatggacgacatgtcgtggacctgcggaaaccaggactataaatatcgggtgagtgacgttaccaaggctggacattcactggagctgattgagcctctgatcaagttccaggtgggcttgaaaaagctgaacctacatgaagaggaacacgtcctgcttatggccatctgtatcgtgagtcctgataggcctggtgtccaggacgcagcgctgattgaagctattcaggaccgcttgtccaataccctgcaaacatatatccggtgtcgccacccaccccctggaagccatttactgtatgccaagatgattcagaaactcgcagatcttagatcattaaatgaagagcactccaagcagtacaggtgtctctcatttcaaccggagtgttccatgaagctcacccctcttgtattagaagtctttggtaacgaaattagctag

SEQ ID NO: 246678 - DNA, 1188 bp, synthetic construct
  misc_feature 1..1188: note = Description of Artificial Sequence: Synthetic coding sequence
  source 1..1188: mol_type = other DNA
atgtcaatggaacacgcagccctgacagctactggagcgggtgggagctggaggtcaatgaaaaggaaagccctttttacatgtccattcaacggggattgtagaatcaccaaagataaccggaggcactgtcaggcgtgcaggctcaagaggtgcgtggacatcggcatgatgaaagagttcattctgacggatgaagaggttcagcggaaacgagagatgatactcaaacggaaggaggaggaagcattaaaagacagtttaaggccaaaactgagtgaggagcagcagaggatcattgccattttgttggacgcccatcacaagacatacgatcccacatactctgacttctgccaattccgcccacctgtgcgtgtaaatgacggagggggaagccacccctcaagacccaattccagacacacacccagcttcagtggggattcctcctcaagctgtagcgaccactgtatcacaagctccgacatgatggactcctcatctttttccaatttagacttgtctgaggaggatagcgatgatccctcggtgaccctggaactgagtcagttaagcatgctgccccatctggcagacctggtttcctatagcatccagaaggtgattggcttcgccaaaatgatcccaggttttcgtgatttgacctccgaagaccagatcgtcctgctaaagtctagcgccatcgaggtgattatgctgcgtagcaatgaatcattcacaatggatgatatgtcttggacttgcggcaatcaggattacaaataccgcgtgtcagatgtgacaaaagctggacattctctggaacttattgagcctctgatcaaattccaggtcggcctgaagaaactaaatcttcatgaagaagagcacgtgctgttgatggccatttgcatcgtttcgcccgacagacccggtgtgcaggacgctgccctgatcgaagccatccaggatcgcctgtcaaacacattacagacctacattcgatgtcgacatcccccaccaggaagtcacctgctgtacgccaagatgattcagaagctggctgacctaagatccctgaacgaggaacatagcaagcaatacagatgtttgtcctttcagcctgagtgttcaatgaaactcacaccgttagtactagaggtatttggtaacgagatttcatag

SEQ ID NO: 246679 - DNA, 753 bp, synthetic construct
  misc_feature 1..753: note = Description of Artificial Sequence: Synthetic coding sequence
  source 1..753: mol_type = other DNA
atggaagcaatggcagcttctacctctctacccgatccaggcgattttgatagaaatgtcccaaggatttgcggggtatgtggagatagggctaccgggttccatttcaacgcaatgacttgcgagggatgcaagggtttcttccggagaagcatgaaaagaaaagcacttttcacttgcccatttaatggagattgccgaattacgaaggacaaccggaggcattgtcaggcttgccggctcaaaaggtgtgtcgatattggcatgatgaaggagtttattctgaccgacgaggaagtccagagaaaacgcgagatgatccttaaaaggaaggaggaagaggcacttaaagattccctcagacccaagctttcagaggaacaacagagaatcattgccattctgttagatgcccaccataagacttatgatcctacctactcagacttttgtcagtttaggcctcctgtgcgggtgaatgatgggggtgggagccacccttcaagacctaattctaggcatacaccatcattttccggggatagctcctcatcctgttcggaccactgtatcacttcaagtgacatgatggacagctcctcattcagtaatctagacctcagcgaagaagacagcgacgacccctccgtcacactcgaactgtcacaactctcaatgctgccccatctggcggaccttgtgtcctatagcattcagaaggtaatcggtttcgccaagatgataccaggatag

SEQ ID NO: 246680 - DNA, 306 bp, synthetic construct
  misc_feature 1..306: note = Description of Artificial Sequence: Synthetic coding sequence
  source 1..306: mol_type = other DNA
atggaggcaatggccgctagtacatcactgccagatccaggtgactttgacagaaacgtgcccagaatatgtggcgtgtgcggagatcgcgctacaggcttccacttcaatgctatgacttgcgaagggtgcaaaggcttcttccggagaagcatgaagaggaaagccctgtttacttgcccctttaacggagactgtcggatcactaaagataatcggcgtcactgtcaggcttgtcgactgaaaaggtgcgtcgatattggcatgatgaaagagtttatactgaccgacgaagaagtacaatag

SEQ ID NO: 246681 - DNA, 1284 bp, synthetic construct
  misc_feature 1..1284: note = Description of Artificial Sequence: Synthetic coding sequence
  source 1..1284: mol_type = other DNA
atggaggccatggccgcttcaacctctctgccagacccaggagacttcgaccgaaacgttccccgtatctgcggagtatgtggagacagagccaccggcttccattttaacgccatgacttgtgagggttgcaagggcttttttcgcagaagcatgaagcgtaaagcacttttcacatgtccatttaatggcgactgtcgtatcactaaagacaacaggaggcattgccaagcttgccggctgaagcggtgcgtggatatcggcatgatgaaggagttcatactcaccgacgaggaggtgcagaggaagagggagatgattctgaagcgcaaggaggaagaggcattaaaagactcacttcgccctaagctcagcgaggaacagcaaagaataatcgctatcctcttagacgctcaccataagacctacgacccaacatactctgacttttgccagtttaggccgccagtgcgggtgaatgacggagggggatcgcatccttctcggccaaactctcgccataccccctccttcagcggcgactcgtcatcctcatgctctgaccactgtatcacctcatccgatatgatggattcctcttcattcagtaatttagacctcagtgaggaggattccgatgatccaagcgtcacacttgaattgagccagctttccatgctgcctcatttggccgatttggtgagctacagtatccaaaaagtgattggcttcgcgaagatgatcccagggtttagggatttgacttcagaggatcagatcgtgctcctaaagtcttccgctattgaggttattatgctacgatctaatgagtcattcacaatggacgacatgagctggacctgcggcaatcaggactacaagtatagggtttcagatgttaccaaggccggacactctctcgaactcatcgagcctctcataaagtttcaagtgggcttgaagaagctgaacctacatgaggaagaacacgtgctcctcatggcaatttgtatcgtgtcccccgacagacccggagtccaggatgcagctctgattgaggccatccaggacaggttgagcaatacactgcagacgtacattaggtgtaggcatcctcctcccggaagtcacctgctgtacgccaaaatgattcagaagcttgcggatctccgaagcctgaacgaggagcactctaaacagtatcgctgtttatcatttcaaccagagtgcagtatgaagttaacccccttggtgctggaggtgttcggcaacgagatctcatag

SEQ ID NO: 246682 - DNA, 321 bp, synthetic construct
  misc_feature 1..321: note = Description of Artificial Sequence: Synthetic coding sequence
  source 1..321: mol_type = other DNA
atggaggcgatggcagcctcaactagtctgcccgaccctggcgattttgatcggaacgttccacggatttgtggtgtttgcggcgatagagcgaccggatttcactttaacgccatgacctgtgaaggatgcaaaggattcttccggaggtctatgaagaggaaggctctattcacttgtccttttaacggtgactgtcggatcaccaaagataaccgtaggcattgccaggcgtgtcgtctgaaacgatgcgttgatatcggtatgatgaaagaattcattctcactgatgaagaggtccaaaggaagcgtgaaatgtag

SEQ ID NO: 246683 - DNA, 1434 bp, synthetic construct
  misc_feature 1..1434: note = Description of Artificial Sequence: Synthetic coding sequence
  source 1..1434: mol_type = other DNA
atggagtggcgaaacaagaagcggtccgactggctgtctatggtcctgcggaccgccggtgttgaagaagctttcggatctgaggtgagtgtgaggccacacagaagggcacccttgggctccacttacctgccaccggcaccaagcggaatggaggctatggccgctagcacctctcttcccgatcccggtgatttcgatcgaaacgtgcctcggatctgcggagtgtgcggggatcgcgctacagggtttcattttaatgccatgacatgcgaggggtgcaaaggtttctttcgaaggtctatgaagcgaaaagcactgttcacgtgccccttcaatggagactgccggattaccaaagacaacaggagacactgccaggcctgtagactgaagagatgcgtggacatcggcatgatgaaggagttcatcctgacagacgaggaggttcagagaaagcgggagatgatcctgaagaggaaagaagaagaggccctgaaagattctttgcgcccaaagctttcggaagaacagcaaaggattatagccatattacttgatgcccaccacaaaacctacgaccctacctatagtgatttttgccaatttagaccacccgtgagagtgaatgacggcggtgggagtcatccctctaggccaaactccaggcacaccccctccttctcaggcgactcctcctcaagttgttctgaccattgtatcacgagtagcgatatgatggactcttcatccttcagtaatctggatctcagtgaagaggatagcgacgatccttccgtcactctggaattatctcagctctcaatgcttccccatctggcggacttggtgtcttattccattcagaaagtcattggcttcgccaaaatgattcctggcttcagagaccttaccagcgaagaccagatcgttctgcttaagtcatcagcgattgaagtgataatgctcagatctaatgagagctttactatggatgacatgtcttggacttgcggcaaccaggattataaataccgtgtgtctgatgtgactaaggcaggacattcactggagcttatagagccgctgattaaattccaggtaggtttgaagaagctcaacctacatgaggaagaacacgtgctgcttatggcaatttgcatcgtaagtccggatcgcccaggcgtacaggatgcagccctcatcgaagcgatccaggacagattgtcgaacaccttacaaacttatatacgctgcagacatccacctccgggaagccacctgttatatgccaagatgatacagaagcttgcagacctcaggtccttgaatgaagaacacagcaaacaataccgctgcctgagtttccagcccgaatgcagtatgaagttaacaccgctggtcctggaagtcttcggcaatgaaattagctag

SEQ ID NO: 246684 - DNA, 279 bp, synthetic construct
  misc_feature 1..279: note = Description of Artificial Sequence: Synthetic coding sequence
  source 1..279: mol_type = other DNA
atgggctcgacctggggttcacccggttgggtccgacttgctttgtgtctaactggacttgtcctatctttgtacgcactccacgtgaaagcagccagagccagggatagggattaccgggctctatgcgatgtgggcaccgccatctcctgttcaagagtgttcagcagcagactccccgcagatactctgggcctgtgtcccgatgcagctgagctgccaggggtgtcccgatggttctgcttgccgggtctggaccccgtcttgagagcattatag

SEQ ID NO: 246685 - DNA, 492 bp, synthetic construct
  misc_feature 1..492: note = Description of Artificial Sequence: Synthetic coding sequence
  source 1..492: mol_type = other DNA
atgggtagcacttgggggtctcccggttgggttcgcctcgccctgtgtctgaccggcctggtattgagtctctacgccttacacgttaaggcagccagggcaagggaccgcgattacagagccctgtgcgacgtagggacagctatctcgtgcagcagagtcttttcctcccgatggggcagaggttttgggttagtcgagcacgtcttggggcaggattcgatccttaaccagtccaactcaatattcggatgcattttctataccctccagctgctcctggggtgtctcaggaccaggtgggccagtgtcctgatgcttctgtccagcttggtctcgttggctgggtccgtgtacctcgcctggatccttttttttgtgctttatgacttctgcattgtgtgcattacaacgtacgccataaacgtgagcctgatgtggctctcattccgcaaggtgcaggagccccagggcaaggccaagagacactag

SEQ ID NO: 246686 - DNA, 5823 bp, synthetic construct
  misc_feature 1..5823: note = Description of Artificial Sequence: Synthetic coding sequence
  source 1..5823: mol_type = other DNA
atgtcttctgacaccgaaatggaggttttcggaatcgccgcacccttcttgcgaaagtccgagaaagagcgcatagaggcccagaatcagcctttcgatgccaagacttattgctttgtagtggactctaaggaagagtacgccaagggaaaaatcaagagtagtcaggatgggaaggtgacagtggagacggaggacaataggaccctggtggtgaagccagaggatgtctatgccatgaatcccccaaagtttgatagaatcgaagacatggccatgctgactcacttaaacgaacccgcagtattgtacaacctgaaggacaggtacacatcatggatgatatatacctatagcgggctgttctgcgtcaccgtgaatccctacaagtggctgccagtctataaccccgaagtagtggagggctaccgcggtaagaagcgtcaagaagcgcctccacatatattttcgatctctgacaatgcttatcagtttatgctgaccgatagggaaaaccagagcattttgataactggtgagtctggcgcaggcaagactgtcaacacgaagcgtgtgatacagtattttgccactatcgcagctactggtgacttggctaaaaaaaaagattccaagatgaaaggcacattagaggaccagatcatctctgccaatccacttctggaagcattcggcaacgctaaaacagtgagaaatgataacagctctcggttcggcaagtttataagaatacatttcggaacgaccggaaagctggcatccgccgatatagaaacatacctcctggagaagtcccgggtgactttccagctcaaggcggagaggtcataccatatattctatcagattctcagtaacaagaagcccgagctgatcgaactcttgttgattaccacaaacccctacgattacccatttatcagccaaggcgaaatcctcgtggcatctatcgacgacgccgaggaactgctggccaccgactccgccatcgacattctgggatttacccctgaagaaaaatctggtctttacaagctcacaggggctgttatgcactacgggaatatgaagttcaaacagaaacaacgggaagaacaagcagaacccgatgggactgaggtggcagataagacagcctacctgatgggactcaactcgtcagaccttctgaaggccctctgttttcccagggtaaaggtgggtaatgaatacgtgaccaaggggcagacagtggatcaggttcaccatgctgttaacgccctcagcaagtcagtgtatgagaagctgttcctgtggatggtgactcggattaatcagcaactcgacaccaaacttccgagacagcattttatcggggtgttggacatcgcaggcttcgagatattcgaatacaatagcttagaacagctctgcatcaatttcaccaatgagaaactacaacagttttttaatcatcacatgtttgtgctcgaacaggaggaatataagaaagagggcatcgagtggacctttattgacttcggaatggaccttgccgcatgcatcgagctgattgaaaagccgatgggcatcttcagcattctggaggaagaatgcatgttcccaaaggccacggacaccagcttcaagaataagctgtacgatcagcacttgggcaagtctaacaactttcagaaacccaaagttgttaagggacgggctgaggcccacttttccctgatccattatgccggtacggttgactattctgttagtggatggctcgagaaaaacaaggaccccctgaacgagacggtcgtcggtctctaccagaaaagctccaataggctcctggcccacctctacgctacattcgccacagcagatgccgactccgggaaaaagaaggtcgcgaagaagaaagggagttctttccagaccgtttctgcactgtttcgagagaatctgaacaaacttatgtcaaacctgcgcacaactcatcctcatttcgtgagatgtataatcccaaatgaaacaaaaacccccggtgctatggagcacagccttgtgctgcaccagctacggtgtaatggagtacttgaggggataaggatctgtaggaaggggtttccgaataggatactgtacggtgactttaaacaacgctatcgggttctgaacgcctcagccatccctgagggccagtttattgattcaaagaaggcttgcgaaaaactcctggctagcattgatattgaccatactcaatacaagttcgggcacacgaaggtgttttttaaagccggattactgggcactctggaggaaatgagggatgatcgtttggccaaactgattacgcggacccaggctgtgtgtcgtggatttttgatgcgtgtcgagttccagaaaatggtacaacggagagaatccatcttttgtatccagtacaatataaggtcatttatgaacgtgaaacactggccatggatgaagctcttttttaaaattaaaccgttactgaagagcgcggaaactgagaaggaaatggcaactatgaaggaagaattccagaaaaccaaggacgagctggccaagtccgaggccaagcgcaaggagcttgaggaaaaactggtgactctggtgcaggagaagaacgatctccaactccaggtccaagctgaaagcgaaaaccttcttgacgccgaggaacgatgtgatcagctcattaaagcgaagttccaattggaggctaagattaaagaggtaactgaacgcgcagaggatgaggaggagatcaacgcagagctgaccgcgaagaaacgaaagctggaggacgaatgctctgaactcaaaaaggacatagatgaccttgaactcaccctcgctaaggtcgaaaaggaaaaacatgccactgaaaacaaagtgaagaatctgacagaggagctctcaggcctggatgagactatcgccaaacttactagagagaaaaaggctctacaggaagcccaccagcaggctctcgatgacttgcaggcggaggaagacaaggttaactctttaaacaaaaccaagagcaagttggagcagcaagtcgaggatctagagtcctctctggaacaggagaagaaactgcgcgttgatctggaacgcaacaaaagaaaactggaaggcgacttgaagttggctcaagaatccatcctggacttagagaatgataagcagcagttggatgagcgcctgaagaagaaggactttgagtactgtcaactgcagagtaaagttgaagatgagcagacattgggcctccagttccagaagaaaatcaaggagcttcaggcccgtatcgaagagctagaggaggaaattgaggcagaaagagctacacgagccaagaccgagaagcaaagatcagactacgccagagagttagaggaactgtcagagaggcttgaagaggccggaggcgtcaccagtacacaaatagaactcaacaaaaagcgggaggccgagttcctaaagttaaggcgcgatctggaggaggccacattacagcatgaagccatggtcgctgccctccgcaaaaagcacgcagattccgtagccgaactgggtgagcagatcgacaatcttcaacgcgtgaagcagaagctcgagaaggagaagtccgagttcaaactggagattgatgacctcagtagtagtatggagagcgtcagtaagagtaaggcgaatctggaaaagatctgtaggacattggaggatcagctgtcagaggctaggggcaagaacgaagagatccagaggagcctctccgagctcacaacacagaaatcacggctgcagaccgaagctggtgagttaagtagacagctcgaagagaaggagtctatagtgtctcaactctcacgcagcaaacaggcctttacccagcagaccgaggaactcaagaggcagttggaggaagagaataaagctaaaaacgcacttgctcacgctctccagtccagccgtcacgactgcgatttgctgcgagagcagtacgaggaggaacaggaagggaaggctgaactgcagcgcgcattgagtaaagcaaactctgaagtcgctcagtggaggacaaagtacgagacagatgccatccagaggacagaggaattggaagaggcaaaaaaaaaactggcccaacggttacaggatagcgaggagcaggtggaggccgtgaacgcgaagtgtgctagcctcgagaagactaagcagagacttcaaggcgaagtggaagatctgatggtcgatgtcgaacgggctaatagtttagctgcggctctggacaaaaaacagcgtaactttgataaggtcctggccgagtggaaaactaaatgcgaagagagccaggccgaactcgaggcctcactcaaggagtctcgctctctcagtacagagctatttaagctgaagaatgcttacgaagaggccctggatcagttagagaccgtcaagcgagagaacaagaacctcgaacaggagattgctgacttgaccgagcagattgcagagaacggtaaaaccatccacgagctcgaaaaatcacggaaacaaatcgagctggaaaaggccgacatacagctggccctggaagaagccgaagctgccctcgagcatgaagaagccaaaatcctgcggatccaactggaactgacgcaggtcaagtccgagatcgacagaaaaatcgccgagaaagacgaagaaattgaacagctgaaaaggaactaccagcggaccgtggaaacaatgcagagcgccctagacgcagaggtgcgctctcggaacgaagccatcaggctgaaaaagaagatggagggagatcttaatgaaattgaaatccagctctctcatgccaatagacaggccgctgaaaccctgaaacatctgaggagtgtgcagggacaactgaaggacacgcagttgcatctggatgatgccctacggggtcaggaggacctgaaggagcaactggctatagtggagcgcagggccaacctgctgcaggctgaagtagaagaacttagagcaactctggaacaaacggagagggcgaggaaacttgcagaacaggagctattggatagcaatgagagggtgcagctcctccacactcagaatacatctttaatccatacaaaaaaaaagctggaaactgaccttatgcaacttcagtccgaggtggaggatgcctcgcgggacgcccgaaatgcagaggaaaaggccaagaaagcaataaccgatgccgctatgatggcagaggagctgaaaaaagagcaggatacctctgcccacttggagcgaatgaaaaagaacctggagcagacagtgaaagatttacagcacaggctggatgaagctgagcaactggctctaaaaggtgggaaaaagcagatccaaaaactggagacgaggatcagagagctggagttcgagctggaaggcgaacaaaagaagaatacagagtcagtcaagggcctccgcaagtacgagagacgggtgaaagaactgacgtaccaatctgaagaggaccgcaaaaatgtgctaaggctgcaggacctcgtggataagctgcaggtgaaagttaaaagctacaagaggcaggcggaagaagcagatgaacaagcaaatgcacatttgacaaagtttagaaaggcccagcatgagctcgaggaggctgaagaaagagctgacatcgcagaaagccaggtgaacaagctccgcgctaagacaagagactttacatcgtcacgcatggtggtgcacgagtccgaagagtag

SEQ ID NO: 246687 - DNA, 357 bp, synthetic construct
  misc_feature 1..357: note = Description of Artificial Sequence: Synthetic coding sequence
  source 1..357: mol_type = other DNA
atggcaccactcaggcctttgctgattctggccctcctggcttgggttgccctggccgaccaggagagctgcaaagggagatgcacagagggcttcaacgtggacaaaaagtgccagtgtgatgagctctgcagctactatcagagctgttgcaccgattatactgcggaatgtaaaccccaggtgacacgcggtgacgtcttcactatgcccgaagacgagtacaccgtttatgacgatggggaggagaagaacaacgccacggttcacgaacaggtggggggaccctccctgaccagtgatctgcaagcacagagcaaggggaatcctgaacagactcccgtcttaaagccatag

SEQ ID NO: 246688 - DNA, 495 bp, synthetic construct
  misc_feature 1..495: note = Description of Artificial Sequence: Synthetic coding sequence
  source 1..495: mol_type = other DNA
atgagtgtcgaccctttgagttctaaggccttaaagatcaaacgagagctgagtgagaacaccccacacctttctgatgaagccctaatgggtctctccgtccgcgaactcaaccgtcacctaaggggcctatccgcagaggaggttacccgcttgaaacaacgcaggagaacgctgaagaatagaggctacgctgcttcgtgtcgcgtgaagcgcgtctgccagaaggaagaactacaaaagcagaaatctgaactcgagcgcgaggtggacaagctcgcgcgtgaaaatgcggctatgaggctcgagctcgatgcactgcgtgggaaatgtgaagctttgcagggtttcgctcggtcagtcgctgcagccagaggtccggctaccctcgtggcgcctgctagcgtgattaccatcgtgaagtctacgcccggaagtgggtctggaccagcgcatggcccagacccagctcacggccctgctagctgcagttag

SEQ ID NO: 246689 - DNA, 495 bp, synthetic construct
  misc_feature 1..495: note = Description of Artificial Sequence: Synthetic coding sequence
  source 1..495: mol_type = other DNA
atgtctgtggatcctctctcttcaaaagctctgaaaattaaacgcgagcttagtgaaaacacgccccacttgagcgacgaagccctcatgggcctgtccgtacgagagctcaatcggcacctaagaggcctgagcgcagaggaagtcaccagactcaaacagcggcgaagaacactgaagaatcggggatatgccgctagttgcagagtgaagcgggtttgtcagaaggaggaactccaaaaacagaaaagcgagctggaacgggaagtcgataagctggcacgggaaaacgcggcaatgagactggaactcgacgctcttcggggaaaatgtgaggctcttcaaggctttgcccgaagcgtagcagccgctcgcggtcctgctactctggtggcacctgcatccgttatcactatcgtgaagtcaactccaggaagtgggagcgggcctgcgcatggcccagatccagcccacggccctgcctcctgctcctag

SEQ ID NO: 246690 - DNA, 381 bp, synthetic construct
  misc_feature 1..381: note = Description of Artificial Sequence: Synthetic coding sequence
  source 1..381: mol_type = other DNA
atgtctgtggaccccctgtcatcaaaggccctgaagattaagcgagaattatccgagaataccccccacttaagtgacgaagctctgatgggactcagcgtacgtgagctgaatagacatttgcgtgggctttcagcagaggaggttacgcgcctgaaacagcggagacggaccctgaagaatagaggctatgccgcttcatgccgggtcaaacgtgtatgccagaaggaagagctgcaaaagcagaaatcggagttggaacgcgaagttgacaaactggctcgagagaacgccgctatgaggttggaactcgacgctctgcggggaaaatgcgaagctctccaggggtttgccaggagcgttgcggcagcacggggttag

SEQ ID NO: 246691 - DNA, 495 bp, synthetic construct
  misc_feature 1..495: note = Description of Artificial Sequence: Synthetic coding sequence
  source 1..495: mol_type = other DNA
atgtctgtagatcccctttcctcaaaagccttgaagattaaacgcgaattgagcgagaatacacctcacttgtctgacgaggccctgatggggctgtctgtacgggagcttaatcgacacctgcggggactctctgctgaggaggtgacccgactgaagcagcggagacggactctgaagaaccggggatatgccgcatcctgtcgggtaaaaagagtgtgtcaaaaggaagaattacagaagcagaagagcgaacttgaacgggaagtggacaaacttgcacgagaaaacgcggctatgagactggaattggacgctctgaggggtaagtgtgaagctttgcagggctttgcgagatccgtcgctgccgctcggggacccgctactctagtggcaccggcttccgtgatcacaattgtcaagtcaacgccaggatctggctcgggcccagcgcatggcccagaccccgcacacggccctgcttcctgttcttag

SEQ ID NO: 246692 - DNA, 282 bp, synthetic construct
  misc_feature 1..282: note = Description of Artificial Sequence: Synthetic coding sequence
  source 1..282: mol_type = other DNA
atgggcctgtccgtgcgcgagttgaaccgacacctaagaggtctgtctgccgaagaggtcacccgacttaagcagcgcaggagaactctcaagaatcggggatacgccgcttcgtgtcgcgtgaaacgggtgtgccagaaggaagagttgcagaagcagaagtctgaactcgagcgcgaggtcgataagctcgccagagagaacgctgcaatgcgcttagagttggacgcactcaggggcaagtgcgaagcactgcagggcttcgccagatccgtggcctag

SEQ ID NO: 246693 - DNA, 495 bp, synthetic construct
  misc_feature 1..495: note = Description of Artificial Sequence: Synthetic coding sequence
  source 1..495: mol_type = other DNA
atgtcagtcgaccccttatcgagtaaagcattaaagattaagcgggagctgagtgagaacactccgcacttatcggatgaggccctaatggggctgtctgtccgagaactcaatcggcacctccgcggactgagcgcagaagaagtgacaaggcttaaacaaagaagaagaacccttaagaaccgcggatacgcggcatcttgccgcgtgaaacgtgtgtgccaaaaggaggagctacagaaacagaaatctgaacttgagcgcgaagtggataagcttgccagggagaacgcagccatgcgtttggaattagacgcactgcggggtaagtgtgaagcgctgcaggggtttgccaggagcgtagccgcagcgagggggccagctaccctcgtggcccctgccagtgtgatcactattgttaagtctacgcctggctctggctctggccctgcccatggccctgaccccgcacacggccctgccagttgctcatag

SEQ ID NO: 246694 - DNA, 408 bp, synthetic construct
  misc_feature 1..408: note = Description of Artificial Sequence: Synthetic coding sequence
  source 1..408: mol_type = other DNA
atggggctctccgttagagagctcaacaggcatcttcgcggactcagtgcggaggaagttacacgtttgaagcagcgtcgccgaaccctgaagaaccgtggttacgccgcatcctgccgagtgaagagggtgtgtcagaaggaagagctccaaaagcaaaaaagtgagttagagcgggaagtggacaagctcgcaagagagaatgccgcaatgagactagaactggatgcccttagagggaagtgcgaggctttgcagggcttcgctcggagcgtggcagcagcacgtgggcctgcaacccttgtcgcccctgccagcgtgattaccatagtaaagagcacgcctggttcagggagcggcccagcgcatggacccgaccccgcacacggcccagcctcttgctcatag

SEQ ID NO: 246695 - DNA, 489 bp, synthetic construct
  misc_feature 1..489: note = Description of Artificial Sequence: Synthetic coding sequence
  source 1..489: mol_type = other DNA
atgactacacctaataagggcaataaagccctcaaagtcaaaagagaaccgggagagaacggcaccagcttaaccgacgaggaactcgtgacaatgagtgtccgtgaactaaaccagcatttgagggggctatctaaggaggaaattgttcagctgaagcaaaggaggcgcacactcaagaataggggctatgcagcatcgtgcagggttaagcgcgtaacgcagaaggaggaactggaaaagcagaaggcagaattgcagcaggaggtcgaaaagcttgccagtgagaatgctagcatgaaactggagctagacgcactaagaagtaaatatgaggccctgcagacttttgctagaaccgtggcgcgatccccagtagcccctgctcggggtccactggccgctggtcttggccctctggtgccaggtaaggtcgcggcaaccagcgtgataacgatagtcaagagcaaaaccgacgcacggagctag

SEQ ID NO: 246696 - DNA, 489 bp, synthetic construct
  misc_feature 1..489: note = Description of Artificial Sequence: Synthetic coding sequence
  source 1..489: mol_type = other DNA
atgactacgcctaataagggaaataaggcactgaaggttaaaagggagcctggggagaatggcaccagtctgacagacgaagagctggtgactatgtctgtgagggagttgaatcagcatctccgcggtttgagcaaagaggagatagttcagctaaaacagaggcgaagaacactaaaaaatagaggctacgcggcatcgtgccgcgttaaacgtgtgacacagaaggaggagctggagaagcagaaggccgaactgcagcaagaggtagaaaagttggctagtgaaaatgcaagtatgaaacttgagttggacgccctccgttctaaatatgaggcacttcagacctttgccaggaccgtcgcaagaagccccgttgccccagctagggggcctctcgccgcaggcctgggccctctggtgccaggaaaggtggctgcaacgtcagtgatcacaattgtgaaatcaaaaacagacgccaggtcctag

SEQ ID NO: 246697 - DNA, 471 bp, synthetic construct
  misc_feature 1..471: note = Description of Artificial Sequence: Synthetic coding sequence
  source 1..471: mol_type = other DNA
atgacaacaaatccgaaaccaaataaagcactcaaggtgaaaaaggaggccggtgaaaatgccccagtcctgagtgacgatgagttagtctccatgagtgttagggagctaaaccagcacctgcggggactcacaaaggaagaggtcactcgcctgaagcagcgccgaagaacacttaaaaatcggggttacgcagcgtcgtgtagaatcaaaagagttacacagaaagaggaattagagcgccaacgagtggagctgcagcaagaggttgaaaaacttgctagagagaacagctccatgcggctcgaactggatgcgctgagatccaaatacgaggcattgcagacattcgcccgaaccgtcgccagaggaccggtcgcgccaagcaaggtggctaccacttcggtgatcacaatagtcaaatctacggaattatccagcacatctgtaccattctccgctgccagttag

SEQ ID NO: 246698 - DNA, 471 bp, synthetic construct
  misc_feature 1..471: note = Description of Artificial Sequence: Synthetic coding sequence
  source 1..471: mol_type = other DNA
atgacgacaaaccctaaacctaataaggccctgaaagtgaaaaaggaggctggcgagaacgcacccgtcttgagtgatgatgagctggtctctatgtctgtcagagagctgaaccagcatttacgaggtctcacaaaggaggaggtcacccggttgaagcagcggagaaggacactgaagaatcgtgggtacgcagcatcttgtaggatcaagcgcgttactcagaaagaagaattggagcgacagcgcgttgaattgcagcaggaggtggaaaagttagcccgagagaacagtagcatgcggctcgaattagacgcactgagaagcaaatacgaagccctacaaaccttcgccaggaccgtggccaggggccctgtggccccatctaaggtggccaccacttcagttataacaattgtgaagtccactgagctttcatctacgagtgtgccattttccgctgcttcttag

SEQ ID NO: 246699 - DNA, 471 bp, synthetic construct
  misc_feature 1..471: note = Description of Artificial Sequence: Synthetic coding sequence
  source 1..471: mol_type = other DNA
atgacaacaaatcctaagcctaacaaggctctcaaagttaagaaggaagcaggcgagaacgcgccagtgttaagtgacgacgagctggtctctatgagtgtccgggagttgaaccagcacctccggggtcttaccaaagaggaagtcaccaggctgaaacagcgacgcaggacattaaagaaccgaggctacgccgcaagttgccgtattaagcgtgtgacccaaaaggaagagctggagaggcagcgcgtggaactccagcaggaggtggagaaactggcccgagagaactcttctatgaggttggagttagatgcattgagatctaagtatgaggcactgcagacctttgcccgaactgtcgcacggggacccgtggcaccatctaaagtcgccacaacatctgttatcaccattgtgaagtcgacagaactgtcctccaccagcgtccccttttccgcggcttcatag

SEQ ID NO: 246700 - DNA, 1041 bp, synthetic construct
  misc_feature 1..1041: note = Description of Artificial Sequence: Synthetic coding sequence
  source 1..1041: mol_type = other DNA
atgccctctccgctagcgctaagaccatatctgcggtccgaatttagccctagcgtggacgctcgcccttgctcctctcctagtgagctcccagcgaaattgttactgggcgctactttaccgcgagccccacgcctgcctcgtagacttgcttggtgctctattgattgggaacaagtgtgcctcttacagcggctgggagctgggggatttggaagcgtctataaagcgacctacagaggtgtgccagtggccataaaacaggtcaataagtgcaccaagaatagactggcttctcgcaggagtttctgggccgaacttaacgtggcaagattaagacatgacaacatcgtaagggtggttgccgcttcaacacgaactccggctgggtcaaacagcctgggcaccattattatggaattcggcggaaatgttaccctccaccaggttatttacggggctgccggtcacccagagggtgacgccggagaacctcactgtagaactggcggacaactctccctgggaaagtgcctgaagtactccctggacgtcgtgaacggtctgctgttcctacatagccagtccatcgttcatttggacctcaagcctgccaacattctcatttccgagcaagacgtgtgcaaaataagtgactttggctgctcggagaagctggaagatctactgtgctttcaaactcccagttaccccctgggagggacgtacacacacagagctccagaactgcttaagggcgaaggagtcacacctaaggctgatatctactcttttgccatcactctgtggcagatgacaacaaagcaagctccatactcaggtgagagacagcatattctgtacgcagtggtggcctacgatctgcgcccaagcctcagcgccgcagtttttgaggatagtctgccaggtcagagactgggtgatgtgatacagcggtgctggcgtccctctgcagcacaaagaccatccgccagactgctgttagtggacctgacaagtctgaaagctgaacttggttag

SEQ ID NO: 246701 - DNA, 1839 bp, synthetic construct
  misc_feature 1..1839: note = Description of Artificial Sequence: Synthetic coding sequence
  source 1..1839: mol_type = other DNA
atggcgcgtcgaccgcgtcacagtatctacagttcagatgaagatgacgaagacttcgagatgtgcgaccacgactacgacggactgcttcccaagtccggcaaaagacacctcggcaaaacccgctggacccgagaagaagacgagaaactgaaaaaattggtcgagcagaacggcactgatgactggaaggtcattgccaattaccttccaaatcgtactgacgtgcagtgccagcatagatggcagaaggtccttaatccggagctcataaaaggtccgtggactaaggaagaagaccagcgagtaattgagctggtgcagaaatacggccctaaacgctggtccgtgattgcaaagcacttgaaaggcaggattgggaaacagtgtcgggagagatggcacaatcacttgaatcctgaagtaaaaaagacctcttggaccgaggaggaagatagaatcatatatcaggcccataagcggttgggtaatcgttgggccgaaattgcaaaactgctgccgggtcgtacggataatgccattaagaatcactggaactctactatgcgcagaaaagtggagcaggaagggtatctgcaggagtcgtcaaaagctagccagcctgccgtggccacctccttccagaagaactctcaccttatgggttttgcccaggcccctcccacagctcaacttcccgctacagggcagcccactgtcaacaatgattacagctattatcacatatcagaggcccaaaatgtgtcctcccacgtgccttacccagtggccctgcatgttaatattgtcaacgtgcctcagccagcggctgccgctatccagaggcactacaacgatgaggaccccgagaaagagaaacgaatcaaggagctcgagttactgctgatgagcacggagaatgagctgaaggggcaacaggtgctgcctactcagaatcatacatgctcttatccaggttggcattccacaaccatagcggaccatacccgcccacatggggattccgccccagtgtcctgtctcggcgagcaccattccactcctagcctcccagccgacccaggttccttacctgaggagtccgcttcaccagcacggtgcatgatagtgcaccaaggcactatcttggacaacgtcaaaaacctgctcgagtttgccgaaaccctgcagtttatcgacagctttctgaataccagcagtaaccacgaaaattcagacctggaaatgccttcattaaccagtacacctctgataggccacaaattgacagtgaccaccccatttcatagggatcaaaccgtgaaaacacagaaggagaatacagtgttccggacgcccgcaatcaaacgatctatactcgaatcctctcctcgcacccccaccccgtttaaacacgctctggccgctcaggaaatcaaatatggcccactcaaaatgctcccacagacgccctcccacctcgtggaggacctgcaggacgttattaagcaggaaagtgacgagtcagggattgtcgcagagttccaggaaaatggccctcctctgctcaaaaagatcaaacaggaagtcgaaagcccaacagacaaatcggggaactttttttgctcacatcattgggaaggggacagtctgaatacacagctgtttactcagacctcccctgtggctgatgctcctaatatattgacttcgtccgtactgatggctcccgcttccgaggacgaggataacgtgctgaaggccttcacagtgcctaagaatcggtccctcgcttcccccctgcaggcaaccaaggcccaaaggctatttcaattttag

SEQ ID NO: 246702 - DNA, 2181 bp, synthetic construct
  misc_feature 1..2181: note = Description of Artificial Sequence: Synthetic coding sequence
  source 1..2181: mol_type = other DNA
atggccagacgcccaaggcactcaatttactcatccgacgaagatgacgaagattttgaaatgtgtgatcacgactatgacggcctgctcccgaagagtggaaagagacatctgggcaagacaaggtggacaagagaagaggacgagaaactgaaaaaactggtggaacagaacgggaccgatgactggaaggtcattgccaactacttacctaatcgtactgacgtccagtgccagcaccggtggcagaaggtgctgaacccggagctaattaaaggtccatggaccaaggaagaggatcagcgcgttatcgagcttgtgcaaaaatacggtccgaagagatggagcgtcattgcaaaacatcttaagggccgtattgggaaacagtgcagagaacgatggcacaaccatttaaacccagaggtcaaaaaaacatcctggacggaagaagaggatcgcataatctaccaggctcataaacgtctgggtaataggtgggcagagatcgctaagctgcttccaggacggaccgataatgctatcaaaaaccactggaacagtacaatgaggcggaaagtggaacaggagggttatttacaggaatcgagcaaggccagtcagcccgctgtggctactagcttccagaagaatagtcacctgatgggctttgcccaggccccacccacggcccagctccccgctaccggccagccaaccgtgaataatgattactcctactaccacatctccgaggcacaaaatgtttcatcacacgtaccctatccagtagctttgcacgttaacatcgtgaacgttccacagcccgctgccgctgccatccagcggcactataatgatgaagacccagaaaaagagaagaggatcaaggagttagagctccttctcatgtctacagagaacgagctaaaaggccagcaggtactgccaacacaaaatcatacttgcagctaccccggttggcattctactactattgcagatcacacccgtcctcatggcgactccgctccggtgtcctgcctgggggagcaccatagtacgccctctctgcccgctgacccaggctctctgccagaggagtccgccagcccagcgagatgcatgattgtgcatcagggtaccattctggataacgttaagaacctgctcgagtttgccgaaaccctgcagtttattgattcatttttgaacaccagctcgaaccacgaaaatagcgatctcgaaatgcccagtctgacctccacccccttgatcggacataaactgacagtcaccaccccattccaccgcgaccagaccgtgaaaacccagaaagagaataccgtcttcaggacccccgctattaaaaggtcaatcctagaaagctcccctcgcacaccgacccctttcaagcacgcccttgccgctcaggaaatcaagtacggcccactgaagatgttgccgcagactccctcgcatttagttgaagacctacaggatgtgattaaacaggaatcagacgagtccggtatagtagccgaatttcaggaaaacggtcctcctctactgaagaaaattaagcaagaagttgaatcccctaccgataaaagcggaaactttttctgtagccatcattgggagggagattcccttaacacacaactgtttactcagacttcccccgtcgccgacgcgcctacaggagtccaatggcacgactttggctcccttcagccactgccaccaggttttaagaggttttcatgtttatcactgccaagaagctgggattacaggcacccacccccaaggccagcaaatttcgagttcctggtggagactgggttcctgcatgtcggccaggcgggactggagctgctcacaagcggtgacctcccagcgtcagccagccagtccgctaggatcacaggagtgtcacatcgcgcacgtcccgataatatccttacctcctcagtcctgatggcgcctgcatccgaagatgaggacaatgtcctcaaagcctttactgtgcctaaaaataggtcgcttgcttccccattgcagccgtgtagctccacctgggaaccggctagctgcggaaagatggaggaacagatgacctcctcctcccaagcaagaaagtacgtcaacgcattctccgcgagaacattggttatgtag

SEQ ID NO: 246703 - DNA, 2286 bp, synthetic construct
  misc_feature 1..2286: note = Description of Artificial Sequence: Synthetic coding sequence
  source 1..2286: mol_type = other DNA
atggcccgtcggcctcgacattcaatatatagtagcgacgaggacgatgaagacttcgaaatgtgcgaccacgattacgacggcttactccccaaaagtggcaagcggcacctcgggaagaccagatggaccagagaggaagacgagaaattaaagaagctggtggaacagaacggcacagacgactggaaagtgattgccaattatctgccgaatagaactgacgtgcaatgccagcaccgctggcagaaagtcctaaacccagaactgataaaagggccttggacaaaagaggaagatcaacgggtgatcgaattggtccagaagtatggtcctaagaggtggagtgtcattgcaaaacatctgaaaggacgcatcggaaagcagtgtcgcgagaggtggcacaaccacctgaaccctgaagtcaagaaaacttcctggacagaagaggaagaccgaattatttaccaggcccataagagactgggaaaccgctgggcagaaatcgcaaaacttctgcccggtcggaccgacaacgccatcaagaatcactggaattcaacaatgcggaggaaagtagagcaggagggttatttgcaggaatcctcaaaggcttctcaacctgctgttgccacttcattccagaaaaattctcatctgatgggattcgcgcaggcaccaccaaccgctcagctgccagccactggccagcccacagtcaacaatgactactcctactatcacatctccgaagctcagaacgtgagtagccacgtcccgtatcccgtggcgcttcacgtgaatatcgtgaacgttccacagccagctgctgctgccatacagcggcattacaacgacgaagatcctgagaaagagaaacggattaaagagttagagctgcttcttatgtctaccgagaacgagttaaagggacagcaggtgctgccaacacagaaccatacatgcagctaccccggttggcactccaccacaatcgcagatcacaccaggcctcacggtgactctgccccagtgagttgcctgggcgagcatcacagcacaccaagtctcccggcagaccccggaagcctgcctgaggagtccgctagccccgcacggtgcatgatcgtccatcaggggaccatcctggataatgttaagaacctgctggagtttgccgagacattgcaatttatagattctgattcatcctcctggtgtgacctatctagttttgaattttttgaagaggcagacttctccccaagtcagcaccatactggcaaggcattgcagctacagcagcgcgaaggaaacggtactaagcccgctggcgagccatctcctcgtgtaaacaagcgcatgctgtcagaaagcagtctcgatcctcccaaagtcctgccgcctgcccgacacagcaccatcccattggtgatcctgcgcaagaagagaggacaggctagtccacttgccacgggagattgttctagcttcatctttgccgacgtgtcctcatctacccctaagagatcacccgttaagtctttacccttctccccctcacagtttttgaacacatctagcaatcacgagaactccgacttggagatgccttcactgacctctactccactgatcggacataagctgacagtgacaaccccctttcatagggatcagacggtgaaaacacagaaagagaacactgtgtttagaacccccgcaattaaacgatcaattctggagagctctcccaggactcccaccccctttaagcacgccctggcagcccaggagattaaatacggccctctaaagatgctgccccaaactccttcccatttggttgaggatcttcaggatgtgataaagcaagagtccgatgaaagtggcattgtcgctgaattccaggaaaatggcccaccactcttaaaaaagataaaacaggaggtcgaaagccccaccgacaagtccgggaatttcttctgtagccaccactgggaaggcgacagtctaaatacccagttgttcactcagacctcacctgtcgcggacgcaccaaacattctaacgtctagtgttttgatggcccctgcttccgaggacgaggacaatgtacttaaggccttcaccgtccctaaaaacaggtcactggcctcacccttgcagccatgttcgtcaacttgggaacccgcatcctgcggcaagatggaggagcagatgacaagtagctcacaggctaggaaatatgtcaatgccttcagcgctaggaccttggtgatgtag

SEQ ID NO: 246704 - DNA, 1923 bp, synthetic construct
  misc_feature 1..1923: note = Description of Artificial Sequence: Synthetic coding sequence
  source 1..1923: mol_type = other DNA
atggcccgaagacccagacactcgatatacagttctgatgaagacgatgaggacttcgagatgtgtgaccacgattacgacggtctcctgccgaagtccggaaagaggcaccttggcaaaacacggtggaccagagaggaggatgagaagttgaaaaaattggtagagcagaacggtaccgatgactggaaagttattgccaactatctaccaaacaggaccgacgtacagtgtcaacaccggtggcagaaggtcctcaacccggagctgatcaagggcccttggacaaaggaggaggaccagcgcgtgattgaactcgtccaaaaatatgggcctaaaaggtggtctgtgattgcgaagcacctcaaaggtcgtatagggaagcagtgtagggagcgatggcacaatcacttaaacccagaggttaagaaaacttcatggacggaggaggaggaccggatcatctatcaggcacacaaacggcttgggaacagatgggcagaaatcgcaaagttgctccccggaagaactgacaatgccataaaaaaccactggaatagcaccatgaggagaaaggtggaacaggagggatacctgcaggagagcagtaaggcgtctcaaccagccgtggctacatcgttccagaagaatagccacttgatgggatttgcccaagcgccacctaccgctcagctccctgctactggccaaccaacagtgaacaacgactattcctattatcatatcagcgaggcgcagaatgtttcatctcacgtgccttatcctgttgcactgcacgtgaacattgtgaacgtgccacagcctgctgccgctgccatccagcgtcactacaatgatgaggacccagagaaagagaaacgcattaaagagttagagctgctgttgatgtcgaccgagaacgagctgaagggtcagcaggtactgcctacccagaatcacacttgttcctatcctgggtggcattccaccactattgccgatcacacccgaccacacggggatagtgctcccgtttcatgcctcggggagcaccattctacacccagcctgcccgctgatccaggctctctccctgaagagagcgcttccccagcgaggtgtatgattgtgcatcagggtactattctcgacaatgtcaaaaatctgcttgagttcgcagagaccctacagttcattgactctttcctgaacactagtagtaaccatgagaacagcgatttggagatgccctccctcaccagcacccctctcatagggcacaagttaacagttaccactccatttcacagagatcaaacagttaaaacccagaaagaaaatactgtgtttcgaacgcccgctattaagaggagcattttggagagcagtccacgcacacctacacctttcaagcacgctttggcagcgcaggagattaagtatgggccacttaaaatgctaccgcagactccgtcccatcttgtagaagacttacaggacgtgattaagcaagaaagcgatgaaagtggaattgtagcagagttccaggagaatggccctcccctcctcaagaagattaagcaggaagtggaatcccctacagataaaagtggcaactttttctgctcccaccattgggagggggactcactgaatacacagctctttacccagacatcaccagtggcagatgccccaaacattcttacaagcagtgtcctgatggcccctgcctctgaggatgaagataacgttttgaaggcctttacagttcccaaaaaccggtccctggcaagtccgctccagccctgcagctcaacttgggagccagcttcgtgcggtaagatggaagagcagatgactagctcttcccaggccagaaaatatgtaaacgccttctccgcccgaactctggttatgtag

SEQ ID NO: 246705 - DNA, 1914 bp, synthetic construct
  misc_feature 1..1914: note = Description of Artificial Sequence: Synthetic coding sequence
  source 1..1914: mol_type = other DNA
atggccagaagaccccgacatagcatctacagctccgatgaagatgacgaagatttcgaaatgtgcgatcatgactatgatggactgctccccaagtctggtaagcgacacttaggcaagaccaggtggactagggaagaggatgaaaaacttaaaaagcttgttgaacagaatggcaccgacgactggaaggtgatcgccaattacttaccgaacagaacggatgttcagtgccagcatcgctggcaaaaggtgcttaacccggaattgataaaaggaccctggacaaaagaagaggaccaaagggttatcgagcttgttcaaaagtatggtcccaagcggtggtctgtgatcgccaaacatctcaagggccgtattggtaaacagtgcagggagcggtggcacaatcacctcaaccccgaagttaaaaagaccagttggacagaagaagaggacaggataatttatcaagcccataagcgacttggaaaccgttgggcagaaatcgccaaattgcttcccggtaggaccgataacgcaataaaaaaccactggaacagtacaatgcgtcgtaaggtggaacaggaagggtacctccaggagagttctaaagcgagccaaccggcagtagccacctcttttcagaagaacagtcatttgatgggattcgctcaggcgccaccaaccgcgcagctccctgccaccggtcagcctacggtaaacaatgactattcatattaccatatttcagaggctcagaatgtcagttcacacgtgccataccccgtggctctgcacgttaacattgtgaatgttccacagcctgcagcagccgctatccagcgtcattacaacgacgaggaccccgagaaggagaagagaattaaggaactggaattgctactgatgtctaccgaaaacgaactgaaaggccagcagacgcagaaccacacctgctcatatcccggttggcatagcaccacaatagccgaccacaccagacctcacggcgacagtgctcctgttagctgcttaggcgagcatcacagcacgccctccctcccagctgatccaggtagtctccccgaggagtcggcgtctcctgcgcgatgcatgattgtgcaccaaggcaccatcttggacaatgtcaagaacctgttagaattcgccgagacactccagtttatagactcattcttaaacacatcaagtaatcatgaaaactccgatctcgagatgccctctctgacttcaacccccttaatcggacataagctcactgtgaccacgcccttccacagggaccaaaccgtcaagacccagaaggaaaacacggtttttcgtaccccagccatcaaacgctctatcttggagtcctccccgcgtacccccacgccatttaagcacgccctggccgctcaggaaattaaatacggaccactgaagatgttgccacagacaccttcacatttggtggaggacctgcaggatgtgattaagcaagaatccgatgagtctggcatcgtcgccgaatttcaggaaaacggacctccactgctcaaaaagattaagcaggaagtggaatcacccaccgacaagtctggaaatttcttctgtagccaccactgggagggagactcattgaacacccagttgtttacacagactagccccgtcgctgatgctcctaacatccttacctcaagcgtcctcatggccccagccagtgaagatgaggacaatgttcttaaggctttcaccgtacctaagaataggtcgctagcttcccccctgcaaccctgttcctcgacttgggagccggcatcctgtggcaaaatggaagagcaaatgacaagctcttctcaggcaagaaagtacgtcaacgccttttctgccaggacactcgtgatgtag

SEQ ID NO: 246706 - DNA, 240 bp, synthetic construct
  misc_feature 1..240: note = Description of Artificial Sequence: Synthetic coding sequence
  source 1..240: mol_type = other DNA
atggctaggagaccacggcattctatttactctagtgatgaggatgacgaggattttgagatgtgtgatcacgactatgatggactgttgccgaagtcagggaagcgccatctgggaaagacacgctggactagagaagagaataggacagacgtgcaatgccagcaccgatggcagaaagtgttaaaccccgagctgatcaaggggccatggaccaaagaggaggaccagcgaaattag

SEQ ID NO: 246707 - DNA, 312 bp, synthetic construct
  misc_feature 1..312: note = Description of Artificial Sequence: Synthetic coding sequence
  source 1..312: mol_type = other DNA
atggccaggcggccacgccactcaatctacagctcagacgaggacgacgaggacttcgagatgtgcgatcatgactacgacggcttgctccccaagagcggcaaaagacatctcgggaaaaccaggtggacccgagaggaggatgaaaagcttaagaaactggtggagcaaaatggaacagatgattggaaggtgattgccaactacttacctaacaggactgatgtccaatgtcagcacagatggcagaaggttttgaaccccgagctcatcaagggcccttggacgaaggaagaggaccagcgaaactag

SEQ ID NO: 246708 - DNA, 1818 bp, synthetic construct
  misc_feature 1..1818: note = Description of Artificial Sequence: Synthetic coding sequence
  source 1..1818: mol_type = other DNA
atggccagacgaccacggcacagtatctatagctctgacgaggacgatgaagacttcgaaatgtgtgaccacgactatgatgggttactacccaaatctgggaagagacacctgggcaagactagatggacacgggaagaagatgagaagctgaagaaactggttgagcaaaacggtaccgacgactggaaggtgattgccaattacctacccaacagaaccgatgtacagtgccagcacaggtggcaaaaagttttaaatcccgagctcatcaaagggccatggaccaaggaagaggaccagagagtgatcgagctggtgcagaagtacggacccaaaagatggagtgtgatagcaaaacacctgaagggtaggatcgggaagcagtgccgtgaacgttggcacaatcacctgaatcccgaggtcaagaaaactagctggactgaagaggaagatcggatcatatatcaggcccataagcgcctggggaacagatgggccgaaattgccaagctcttgccagggcgtaccgacaacgccatcaagaaccactggaattcaaccatgcgaaggaaggtcgagcaagaaggctatctgcaggaatctagtaaagcaagccagccagctgtggccacatcttttcagaagaacagccatctgatgggattcgcccaggctccgcctactgcccagcttccagccaccggtcagcccacagtgaacaatgactactcctactaccatatatccgaagctcagaatgtttcatctcacgtgccttatcccgtcgccctgcacgtgaatattgtgaatgttccccagccagcagctgctgctatccaaacccagaaccacacatgcagctatccaggttggcactccaccacaatcgccgatcacacgcgcccacacggagacagtgcacccgtaagctgtttgggtgagcatcacagcacaccatcactaccagctgacccaggttccttgcccgaggaatctgctagcccagccagatgtatgatcgtgcatcagggcacgattctggacaacgttaagaatcttcttgaatttgcagaaacattacaatttattgacagcttcctgaacacatcaagtaatcacgagaattcagaccttgagatgccttcactcaccagcaccccattaatcggtcacaaactgacagtgactactcccttccaccgtgatcagactgtgaagactcaaaaggaaaacacggtgttccggactcctgccataaaacggtcgatccttgaaagctccccaaggaccccaactccatttaaacacgccctggccgcacaggagataaaatacggccctcttaaaatgctgcctcagacacctagtcatctcgtagaagaccttcaggacgtgatcaaacaggagagcgacgaatccggaattgttgctgaatttcaagagaacggccctcctctgctgaaaaagattaaacaagaggtggaaagtcccacagacaagtctggcaatttcttttgcagccatcattgggagggggattctctcaacacacagcttttcactcaaacatccccagtagcagatgcgcctaacattctgacatctagtgtactcatggcacctgcctctgaggatgaggacaacgtgcttaaagcctttaccgtccctaaaaatcgttcactggcttccccattacagccatgctccagtacttgggagcccgcttcctgtgggaagatggaggagcagatgacctcatcatctcaggccagaaagtatgtcaacgccttttctgccagaaccctagtaatgtag

SEQ ID NO: 246709 - DNA, 717 bp, synthetic construct
  misc_feature 1..717: note = Description of Artificial Sequence: Synthetic coding sequence
  source 1..717: mol_type = other DNA
atgctgacaaccttgctgccaattctgttgctctccgggtgggctttctgtagccaagacgcttccgacgggctccagagattgcatatgttgcagatttcctatttcagggatccctatcatgtgtggtaccaggggaacgcgtctcttgggggtcatcttacccacgtgcttgagggccctgacactaacaccacgattattcagcttcagccattgcaggagccagagtcttgggccagaacccagagcggtctgcagagctatcttctccagtttcatgggctggtacggcttgtccaccaggaacggaccttggcctttcctctcaccatccgttgtttcctgggctgtgagctgccacccgaggggtcaagggcacacgtgttcttcgaggtcgccgtgaacggatcaagctttgtgtcctttcgtcctgagcgcgcactgtggcaagcagacactcaagtgacgtccggggtggtcacgttcactcttcagcagctgaacgcctacaatcggaccagatacgaactgcgagagttccttgaagacacgtgcgtgcagtatgtccagaaacacatctcagctgagaatactaaagggtcacagacttcccgctcttacacgtccttggtcctgggtgtgcttgttgggagttttatcatcgctggggtggctgtaggtatattcctgtgtaccggaggtcgcagatgctag

SEQ ID NO: 246710 - DNA, 2031 bp, synthetic construct
  misc_feature 1..2031: note = Description of Artificial Sequence: Synthetic coding sequence
  source 1..2031: mol_type = other DNA
atgtcaaggcgtactcggtgcgaggacttggacgagctgcattaccaagacacagattctgatgtgcccgagcagagggattccaagtgcaaggtgaagtggacccacgaagaaaatcgtactgatcagcaatgccagtacagatggttgcgcgttctgaaccccgacctggtaaagggcccttggaccaaagaggaggaccagaaggtcattgagctggtaaaaaagtatgggaccaagcaatggaccctgatcgctaagcacctgaaaggcaggctgggcaagcagtgccgcgagagatggcacaaccacctgaaccccgaggtcaagaaaagctgctggacagaggaagaggaccgaattatctgcgaagctcacaaggttctgggcaaccgctgggccgaaattgccaaaatgctccccggacgcacagacaatgctgtcaaaaatcactggaatagtactattaaacgcaaggtggatactggcggtttcctatcagaatctaaggattgcaagccacccgtatatctcctacttgaacttgaagacaaagacggcctgcagtccgcacagcctacagaggggcagggaagccttctgactaactggcccagtgtgcctcctaccatcaaggaggaagaaaactctgaggaagaactggctgctgccactacttctaaagagcaggagccaattgggacagacctggacgccgtgagaacaccagagcccctggaggagttccccaagagggaagaccaagaaggaagtccccctgaaacaagcctaccatacaaatgggttgtagaagcagccaatctgctgatcccggcagtgggctcatccctaagtgaggctctggatctgattgaatcggacccggacgcctggtgcgatctgagcaagttcgatttgccagaggaacctagtgccgaggactcaatcaacaattctttagtccagctccaggcctctcaccagcagcaggtcctcccccctcggcagccctctgcgttggtgccttcagtaacagaatatcgcctcgacggccacactattagtgatctctctcgcagttccagaggcgagctcatcccgatctctcccagtacagaggtggggggatccggcatcggaacacctccatctgtgctcaagcgccagcgaaagaggagggtagctttaagcccagtaactgaaaactcaacctctctgagtttcctggattcctgcaattctctgactccaaaaagtacacccgtcaaaacgctcccattcagccccagtcaatttctgaatttttggaacaaacaagatactctggaactggaaagcccctctctgacctccacacccgtatgtagccagaaagtggtcgtgaccacaccccttcaccgcgacaagacaccgctgcaccaaaaacacgctgccttcgtgacccctgatcagaaatacagtatggataatactcctcatacaccaaccccctttaaaaacgcactggaaaaatatgggcctctgaaacccctgcctcagacccctcatctagaagaagacctgaaggaagttctgcgctccgaggcaggtatagaactcatcattgaggatgacatccggcctgaaaaacagaagcgaaagcccggactgaggcggtcgccaattaagaaggttcgaaaatcactcgccttggatatcgtggacgaagacgttaagctgatgatgtccaccctgcctaagagcctgtccctgccgaccacagctcctagtaactcgtcatcccttaccctgtccgggattaaagaggataactcgttgctcaaccaaggcttcctccaggcgaagccggaaaaggcagctgtggcacagaagccacgcagccattttaccacccccgctcctatgtcttcagcgtggaagaccgtcgcctgtggtggaacccgagaccagctgttcatgcaggagaaggctagacaactattgggtcgccttaagccaagccatactagcagaactctgattctatcctag

SEQ ID NO: 246711 - DNA, 1395 bp, synthetic construct
  misc_feature 1..1395: note = Description of Artificial Sequence: Synthetic coding sequence
  source 1..1395: mol_type = other DNA
atgcctagctgctccacaagtacaatgccaggtatgatttgtaagaatcctgacctggaattcgactcccttcaaccatgcttctatcccgacgaggacgacttctatttcggagggccagattcgacaccaccaggggaagatatctggaaaaaatttgagctgctgccaacccccccactgtccccgtcacgtgggttcgctgaacattcaagtgagccaccatcatgggtgacggaaatgcttctggagaatgaattatggggaagcccagctgaggaagatgccttcgggctaggtggcctcggcggactgaccccaaatccggttatcctgcaggattgcatgtggtccggcttttccgctcgtgaaaagctggaaagggctgttagcgagaagcttcaacatggtagagggccacccaccgccggatccaccgctcagtctcctggggctggggctgcaagtccggctggcaggggacacggcggagccgctggcgctggccgtgccggagcagcattgccggcagaactggcccaccccgcagccgaatgcgttgacccggctgtggttttcccttttcccgtgaacaaacgggagccggctcctgtgccagcggctccagcaagcgcacccgctgccggacccgctgttgccagtggcgctggaatagccgctcccgctggagccccaggcgtcgcccctcccagacccggtgggcgtcagacgtccgggggtgatcataaggccctgagcacctctggggaggataccctgtccgactctgatgacgaggacgacgaggaagaggacgaagaagaggaaattgatgtagtgaccgtggagaaacgcaggtcaagttcaaacacaaaagcagtgaccacattcaccatcacagtgcggccaaagaatgccgctcttggcccaggaagggcccagtccagcgagctgatcttgaagcgctgccttcccattcaccaacagcacaactatgcagcaccctcaccttatgtagagtctgaggacgcgccaccgcagaaaaagatcaagtcagaagcttctcctaggccactaaagagtgtcatccccccaaaggcaaaatccctgtctcctcgcaatagcgatagtgaggactccgagcgtcgaaggaaccacaatattctggagcgccagaggcggaacgatctacggtcatccttcttgacactgcgagatcatgtgcccgagcttgtcaaaaacgagaaggccgcaaaggtggttatcctgaaaaaagcgaccgagtacgtgcacagcctccaggcagaagagcatcagttgcttctggagaaggaaaaactccaggccagacagcagcagctgctcaagaagattgaacacgcgcgtacatgctag

SEQ ID NO: 246712 - DNA, 1149 bp, synthetic construct
  misc_feature 1..1149: note = Description of Artificial Sequence: Synthetic coding sequence
  source 1..1149: mol_type = other DNA
atgccttcatgttctacctccacaatgcctgggatgatttgcaagaatcccgatctcgagttcgattctctacagccgtgtttctacccagatgaggatgacttttactttggtggtcccgatagcaccccacccggtgaagacatatggaagaaatttgaactccttcctaccccacctttgtccccctcacgaggtttcgctgagcatagctctgagcccccaagttgggttaccgagatgctgttggagaatgaactttggggatcccccgctgaggaagacgcattcggcctgggcggactcggcggtttgactcctaacccagtgatcctgcaagattgtatgtggtctggcttctccgctcgtgagaagctggagcgggctgtctctgagaagctgcagcatggaagaggccctccaactgcaggctcaacggcccagtctccaggggttgcacctcccagaccaggcggtcgccagacttccgggggagaccacaaagccctgtccaccagtggcgaagacacacttagcgactcagacgatgaggacgacgaggaggaggatgaggaggaagagatcgacgtcgtcaccgtagagaagcggaggtcttcctccaatacaaaagccgtaaccacgttcacaattaccgttagacccaaaaatgctgcccttgggccagggagagctcagtccagcgagttgattctgaaacgttgcctcccgattcatcagcagcacaactacgcagccccaagcccctatgtagagagcgaggatgcaccaccacaaaaaaagatcaaatcagaggccagcccaagaccgctgaagagcgtgattcctccgaaggctaagtctttatcaccacgcaactcagacagtgaggatagcgaacgccgaagaaaccacaatattctggaaaggcagcggcgaaatgaccttcggtccagcttcctgaccctgcgggatcacgtgccagaacttgtgaaaaatgagaaagccgcaaaagtcgtcatactgaaaaaagcaactgagtacgtgcacagtctccaggcagaggagcaccagttgctcctggagaaagagaagctgcaagcaaggcagcagcagctgctcaagaagattgaacacgcacgcacatgctag

SEQ ID NO: 246713 - DNA, 852 bp, synthetic construct
  misc_feature 1..852: note = Description of Artificial Sequence: Synthetic coding sequence
  source 1..852: mol_type = other DNA
atggcagttccgccaacctatgctgatctgggaaaaagcgcccgagatgtcttcaccaaagggtatggctttgggctcatcaagttagaccttaaaacgaaaagcgaaaacggacttgaatttacttcctccggctctgctaacacagagacgactaaggtcactggaagtctggagacaaagtaccggtggaccgaatatggtctcacattcaccgagaagtggaacacagacaacacacttggcacagaaattacagtcgaagaccaattagccagaggactcaagttaacgtttgactcaagcttttctcccaacactggtaaaaaaaatgctaagattaaaaccggctataagagagagcacatcaacctgggctgtgatatggatttcgacatcgcgggacctagtattcggggtgccctggtgctaggttacgaaggatggctagccggataccagatgaactttgagacggccaaaagtagagtcactcagtctaacttcgccgtcggttataaaactgatgaatttcagttgcacacaaacgtcaatgacggaacggagtttggaggttctatttaccagaaagtgaacaaaaagctagagacagcggtgaatctggcttggaccgccggtaacagcaatactcgcttcggcatagcagccaaataccagatcgatcccgatgcttgctttagtgctaaagtgaataactcatctctgattggcctaggatatactcagactctgaaaccgggtatcaagttaacgctgtccgcccttctggacggcaagaacgttaatgcagggggtcataaactggggctggggctggagttccaagcgtag

SEQ ID NO: 246714 - DNA, 852 bp, synthetic construct
  misc_feature 1..852: note = Description of Artificial Sequence: Synthetic coding sequence
  source 1..852: mol_type = other DNA
atggccgtgcctccgacatacgcagatctcggcaagagcgcccgagatgtttttactaagggttacggtttcggtcttattaagttggacctgaagaccaaatctgagaatggactggaatttacaagctcagggtccgcaaataccgagactaccaaagtcactggctctctggaaaccaagtaccggtggacagagtatggccttaccttcacggaaaaatggaacactgataacaccttaggcaccgagataactgtggaggatcagctcgccaggggtctcaagctcacttttgactcctctttttcgcccaacacaggtaagaagaacgccaaaatcaagaccggctataagcgggagcatatcaacctgggatgtgatatggactttgacatcgctgggccaagcattcggggagccctggtcctgggttacgaggggtggctcgcagggtatcagatgaattttgagactgccaaaagcagggtgactcagtctaattttgcagtgggctataaaactgacgagtttcagctgcacaccaacgtgaacgatggaactgaatttgggggaagcatctatcaaaaagttaacaagaaactggaaacagccgtaaatttagcgtggaccgctgggaactccaatactagattcggcattgctgcaaaataccagatagaccccgacgcttgtttctccgccaaggtaaataattcctcattgatcgggctggggtatacccagaccctaaagccaggaattaagctgactctctccgctctgctcgatggtaagaacgtgaatgccggagggcataagctgggcctggggttggagttccaggcctag

SEQ ID NO: 246715 - DNA, 852 bp, synthetic construct
  misc_feature 1..852: note = Description of Artificial Sequence: Synthetic coding sequence
  source 1..852: mol_type = other DNA
atggctgtaccgcctacatatgcggatctagggaagagcgcccgagacgttttcaccaaaggatacggttttggtctgatcaaactagacttaaagaccaagagcgagaacggacttgagttcaccagctcaggctctgcgaacactgagacaacaaaagtcactggcagcctagagacaaagtaccgctggacggaatatggcctaacgttcacagaaaaatggaacactgataataccctgggcaccgagattactgtagaggatcagctagccagaggattgaaactgacttttgactcttccttttcacctaacaccggcaagaagaacgctaaaattaagaccggatataaacgggagcatatcaacttaggttgcgacatggacttcgacatcgccggtcccagcattaggggcgcactggtgctgggatacgagggctggctcgctggctaccaaatgaatttcgaaacggccaagtccagagtaacacagagtaatttcgcggttgggtataaaaccgacgaatttcagctccatactaatgttaacgacggtactgaatttggcggtagcatctaccagaaggttaataaaaagctcgaaaccgctgttaatttggcttggactgccggaaattccaataccagattcggcatcgccgcaaagtaccaaatcgatcctgacgcatgcttttctgctaaagtaaataactctagcttgatcggactagggtacacacaaacgctgaagcccggaatcaaattaacactgtctgctctgctggatgggaaaaacgtcaatgcaggcggacacaaactgggtctgggacttgagttccaggcttag

SEQ ID NO: 246716 - DNA, 849 bp, synthetic construct
  misc_feature 1..849: note = Description of Artificial Sequence: Synthetic coding sequence
  source 1..849: mol_type = other DNA
atggcgacacacggacagacctgcgccagacctatgtgtattccgcctagttatgccgaccttggcaaagccgctcgtgatatcttcaataagggattcgggtttggccttgtgaagcttgacgtaaaaacaaaaagctgttccggggtggagtttagcacgagtggatcgtccaatacagataccggaaaggtgacaggaactttggaaacaaagtataagtggtgcgaatatggtttgacctttacggagaagtggaataccgacaatacattggggactgaaatcgccatagaagatcagatatgccagggcctcaagctcacctttgatactaccttctcacccaacacgggaaaaaagtccggcaagatcaagtcttcctataagagggagtgcataaacctcggttgtgacgtcgacttcgattttgctggcccagccatccatggatctgctgttttcggatatgagggctggcttgccggataccagatgacttttgattctgcgaagtcgaaactgacccgtaacaatttcgctgttggctaccgcactggcgattttcagctgcataccaatgtgaatgacggcactgaattcggaggatccatctaccagaaagtgtgcgaggatctggatacttcagtcaacctagcatggacaagcggcacaaactgcaccagattcggaatcgctgctaagtatcagctggatcctaccgcctctatctcagccaaggtcaataacagtagcttgatcggagtgggatacacacaaacattgcgccctggcgtgaaactgactttgagtgctcttgtggatggaaaatccattaatgccggatag

SEQ ID NO: 246717 - DNA, 930 bp, synthetic construct
  misc_feature 1..930: note = Description of Artificial Sequence: Synthetic coding sequence
  source 1..930: mol_type = other DNA
atgagttggtgcaacgagctccggctccctgcccttaaacaacacagcatcggccgtggactggagtctcacatcacaatgtgcattccccctagctatgcagacctgggcaaagctgcaagagatatcttcaacaagggcttcggattcgggcttgtcaaacttgacgtgaaaacaaagtcttgcagtggggtggaattctctaccagcgggagcagcaacacggatactgggaaggtgacaggaacgctcgagacaaaatataaatggtgtgagtatggactgacatttacagagaaatggaacaccgataacaccttgggcacagaaatcgccatcgaggatcagatatgccaaggtctgaaactcactttcgatacgaccttttcaccaaataccggaaagaagtccggcaaaataaaatcaagctataaacgcgaatgcattaacctgggctgtgacgtagatttcgactttgccggacctgccattcacggctcagccgtttttgggtacgaaggctggttggcagggtaccaaatgacctttgacagcgccaaaagcaagctaacccgaaacaactttgctgtgggataccgaaccggtgactttcagctgcataccaacgtcaatgatggaacagagtttggaggatcaatctatcagaaggtctgcgaagatttggacacctcggtgaatttggcatggacttcaggtaccaattgcacacgttttgggattgccgctaagtatcagttagacccaactgcatcaatctccgcaaaggtcaataactcgtcgttaattggggtgggttatacacagaccctccgccctggtgtgaagttgacactcagcgccttagtggatggtaagtcaatcaatgctggcggtcacaaggtgggactagccctcgaactcgaggcttag

SEQ ID NO: 246718 - DNA, 885 bp, synthetic construct
  misc_feature 1..885: note = Description of Artificial Sequence: Synthetic coding sequence
  source 1..885: mol_type = other DNA
atggctacccacgggcagacttgtgcccgtccaatgtgtatccccccatcttacgctgacctggggaaggctgccagagacatcttcaacaaaggcttcgggttcggcctagtcaagctggatgttaaaactaagagttgcagcggggtggaattttcaacatcaggatccagcaacacagacaccggtaaggtgaccggcaccctcgagacaaaatataagtggtgcgaatacggactgactttcaccgagaagtggaatacagacaatacccttggaacagagattgctattgaagaccaaatctgtcaaggactcaagttgacattcgatacaacttttagcccaaacacagggaagaaaagcggtaaaatcaaatctagttataagagggaatgcataaacctcggttgtgacgtggactttgatttcgccggacccgcaattcacggcagtgccgtcttcggctacgaagggtggctggcgggttaccagatgaccttcgactccgccaagagcaagcttactagaaacaactttgccgttggctatagaactggtgatttccagctgcacactaatgtgaatgacggcacagaatttggtggtagcatataccagaaagtctgcgaagacttagatacttctgtgaaccttgcatggacaagcggtacaaactgtactagattcgggattgctgcaaaataccagcttgacccaactgcttctattagcgcgaaagttaacaactcatcgctgatcggagtgggttacactcagaccctccgacctggagtgaagctgacactgagtgccctggtggacggaaagagtatcaacgccggaggacacaaggtcggcctcgccctcgagcttgaggcttag

SEQ ID NO: 246719 - DNA, 588 bp, synthetic construct
  misc_feature 1..588: note = Description of Artificial Sequence: Synthetic coding sequence
  source 1..588: mol_type = other DNA
atggccacacacggtcagacctgcgcccgacctatgtgcatccccccatcatacgctgatttaggcaaggccgctcgagatatttttaataaaggtttcggctttggcttggttaagctggacgtaaaaaccaagtcttgctctggcgttgaattctcgacgagcggctcgagtaacacagatacgggaaaggtgactggcaccctggaaactaaatataaatggtgtgagtacgggttgacatttaccgagaagtggaacaccgacaatacactcggtactgagatcgcgatagaagaccagatctgccagggattgaagctcactttcgacaccacgttttctcccaatacgggtaaaaagtccggaaaaatcaagagttcctacaaacgcgagtgtatcaacctgggatgcgacgttgatttcgatttcgcaggaccggcaatccacggttccgccgtcttcggctatgagggatggcttgccggataccagatgactttcgattctgccaagtctaagttgacaaggaacaacttcgcagtgggttaccgcactggagactttcaactacacaccaacgtttag

SEQ ID NO: 246720 - DNA, 330 bp, synthetic construct
  misc_feature 1..330: note = Description of Artificial Sequence: Synthetic coding sequence
  source 1..330: mol_type = other DNA
atgtcttggtgcaacgagctgaggttaccagctctgaaacagcacagcattggtagaggactagaaagtcacataacaatgtgtataccgccatcttatgctgacttgggcaaagccgctagagacatctttaataagggtttcgggttcgggttagttaagctagacgtgaagactaagagctgcagcggagtggaattctctaccagcggatcctctaataccgacactgggaaggtcaccggcacccttgaaaccaagtataagtggtgcgagtacggacttacttttacagagaagtggaacacggacaacactctggggacctag

SEQ ID NO: 246721 - DNA, 615 bp, synthetic construct
  misc_feature 1..615: note = Description of Artificial Sequence: Synthetic coding sequence
  source 1..615: mol_type = other DNA
atggctacacatggccaaacttgcgcccgtcctatgtgcatccccccaagctacgccgacctcggcaaggcagccagagatatttttaacaagggattcggatttggccttgtcaaactcgatgtaaagacgaagagttgttccggagtggaatttagcacatcaggtagctctaacaccgatacgggaaaggtgaccggcaccctagagacgaaatacaaatggtgtgagtacggccttacatttaccgagaagtggaacaccgacaatactcttggtacagagatcgctatcgaagaccaaatctgccagggacttaaactgacttttgacaccaccttttcaccaaataccggcaaaaaaagtggaaagatcaaatcttcatacaagcgcgaatgcattaaccttggctgcgacgttgatttcgattttgcaggaccagcgatccacggctcagccgtgttcggctacgaggggtggcttgctggctatcagatgacgttcgactctgctaagtctaaacttacccggaacaacttcgctgtaggctaccggactggcgacttccaactgcacaccaatgtcaatgatggaactgaattcgggggttcttag

SEQ ID NO: 246722 - DNA, 768 bp, synthetic construct
  misc_feature 1..768: note = Description of Artificial Sequence: Synthetic coding sequence
  source 1..768: mol_type = other DNA
atgttggtcatccctgctacccaggaggccgaggagttttccacatctggttcaagtaacacagacacaggcaaggtcaccgggacactggagaccaaatataagtggtgcgagtatgggctaactttcaccgagaagtggaacaccgacaatactctgggaacggagatagcgattgaagatcagatctgtcagggtctgaagctgacatttgataccaccttttccccaaataccgggaagaagagcggcaaaattaaatcgagttacaaaagggagtgcataaatcttgggtgcgacgtagactttgattttgcgggacctgccattcatggatctgcagtgtttggatatgagggctggcttgccggataccagatgacctttgatagcgctaagtctaagttgacgaggaacaacttcgcagttggctaccggaccggggacttccagctccatacaaacgtgaacgatgggacagagttcgggggatcaatctatcaaaaggtctgcgaagatctggacaccagcgtcaatctggcctggacctctggaactaactgcaccagatttggtattgccgcaaagtaccagttggaccccactgcatccattagcgctaaagttaataactcttctctcataggggtgggatacactcagaccctcaggcccggagtaaaactcacattgtctgcccttgtggacggtaagagcatcaacgctggtggccacaaagttgggttggcacttgaactggaagcatag

SEQ ID NO: 246723 - DNA, 885 bp, synthetic construct
  misc_feature 1..885: note = Description of Artificial Sequence: Synthetic coding sequence
  source 1..885: mol_type = other DNA
atggctacacacggccagacctgtgcacgccctatgtgtattccacccagctacgcagacctaggcaaagccgctcgagacatattcaataaagggtttggctttggactcgtcaagctcgacgtcaagactaagagctgttccggagtcgaattcagtacctccgggagctccaacaccgatactgggaaagtgactggaactctggaaactaaatacaagtggtgcgagtatggactgactttcacagagaaatggaacacagacaacaccttgggaaccgaaattgctatcgaggaccaaatctgccagggcctaaagttgacatttgacaccaccttctcccccaacacaggcaaaaagagtggcaaaatcaaatcaagttacaagagagagtgtataaacctgggatgtgacgtcgacttcgatttcgctggacctgccatacacgggagtgccgtctttgggtacgaaggctggcttgccggataccagatgacttttgactccgcaaagtcgaagctcacacgaaataatttcgccgtcggttaccggacgggcgactttcagctgcatactaatgttaacgacggtactgaattcggcggatccatttaccagaaagtgtgtgaggacttagatacctccgtcaatctcgcatggacttctggaactaactgcactagattcgggatcgccgcaaagtaccagctggacccgaccgcaagcattagtgccaaagtgaataactcatccctgattggcgtgggttacacacagaccctgaggccaggcgtcaaacttaccctgagcgcactggtagacggtaagagtatcaatgccggtggtcacaaagtgggccttgccttggagctggaggcctag

SEQ ID NO: 246724 - DNA, 852 bp, synthetic construct
  misc_feature 1..852: note = Description of Artificial Sequence: Synthetic coding sequence
  source 1..852: mol_type = other DNA
atgtgcaatacacctacctactgcgatcttggcaaggcagccaaggacgtgttcaacaaaggctatggcttcgggatggtaaaaatcgatctcaagactaaaagctgctccggggtggaattttcgacctcagggcacgcttacacggacacgggcaaggcttctggaaacctggagacgaagtataaggtttgcaactacgggttgacattcactcagaagtggaacaccgataatactctgggcactgaaatctcctgggaaaataaactggcagaaggtttgaaactgactctggacacgatcttcgtgccgaatacagggaaaaaatcaggaaagctcaaggccagctacaaaagagattgtttttcggtgggaagcaatgtagatatcgacttctccggcccaacaatttatggttgggccgttctcgcctttgaaggctggctggccggttaccaaatgagttttgatactgcaaaaagtaaactgagtcagaataacttcgcgttggggtacaaggccgcagattttcagcttcacactcacgtcaatgacggtacagagttcggaggaagcatctaccagaaggttaatgaaaagatcgagaccagcataaaccttgcctggaccgcgggtagcaataataccaggttcgggatagctgcaaaatacatgctggactgccggacaagccttagtgccaaagttaacaatgccagcctgataggcctgggttacacccagaccctccggccaggagtcaaactaacacttagcgccctgattgacggcaagaatttttccgcgggaggccacaaagtaggtctgggattcgagctcgaggcatag

SEQ ID NO: 246725 - DNA, 855 bp, synthetic construct
  misc_feature 1..855: note = Description of Artificial Sequence: Synthetic coding sequence
  source 1..855: mol_type = other DNA
atgtgcaatactcccacttactgcgatctgggtaaggccgctaaggatgtcttcaataagggatacgggttcggaatggtaaaaattgacctcaagacaaagagttgctccggagtggttgaattctctacttccgggcacgcatacaccgataccggcaaagcatctggcaacctcgagactaaatacaaggtttgcaactatggcctgacgttcacgcaaaagtggaacactgacaatacactggggacagagatctcttgggaaaacaaactggcagagggcctcaaattaactctggacactattttcgtgcctaacaccggaaaaaagtccggcaaactaaaggccagctacaagcgggactgcttttctgtgggaagtaacgtagacatagacttcagtggcccaaccatttacggatgggctgtgttggccttcgagggctggctggccggataccagatgtcttttgacacagccaaatctaagttgtcccagaacaatttcgcgctcggttataaggccgcagacttccagctacatactcacgtcaatgatgggacggagtttggtggaagcatttatcagaaggtgaacgaaaaaatcgagactagtataaatttggcctggactgccggtagtaacaacacccgttttgggatcgccgctaagtacatgcttgactgccggacttcactgtctgctaaagtgaataatgcatccctgattggactgggttacactcagaccttaagaccgggagtgaaactcaccctctccgcactcattgacggaaagaacttcagtgcgggaggccacaaggtgggactggggtttgaattggaagcctag

SEQ ID NO: 246726 - DNA, 498 bp, synthetic construct
  misc_feature 1..498: note = Description of Artificial Sequence: Synthetic coding sequence
  source 1..498: mol_type = other DNA
atgtgcaataccccaacgtactgcgacctgggcaaggccgctaaggatgtctttaataagggctacggcttcgggatggttaagatagatctgaaaactaaatcttgctctggcgtcgagttcagtactagcggccatgcatacactgataccggaaaagcaagtggcaacctggagaccaagtacaaagtgtgtaactacgggctaacattcacgcagaaatggaacaccgacaacacactggggacagagattagttgggaaaacaagctggccgagggactcaagctgaccctcgacacgatctttgtccctaacactggaaaaaaaagtggaaagctgaaggcctcctacaagcgtgattgtttcagtgtgggctccaatgtggacatagattttagcggcccaacaatctacggctgggccgtactggccttcgagggatggctggcaggttaccagatgtctttcgacaccgccaagtctaagctgagttag

SEQ ID NO: 246727 - DNA, 855 bp, synthetic construct
  misc_feature 1..855: note = Description of Artificial Sequence: Synthetic coding sequence
  source 1..855: mol_type = other DNA
atgtgcaacacccctacctactgtgacttggggaaggctgctaaggacgtcttcaataaggggtacggtttcggaatggtgaaaattgatctgaaaactaagtcttgcagcggtgtgatggagtttagtacctccgggcacgcgtacactgatacaggaaaagctagcggtaatttagaaaccaagtacaaagtttgcaattatggcctgacatttacccagaagtggaacactgacaataccctgggcactgaaataagctgggagaacaaactggccgagggcttgaagttaacactagacacaatttttgtccctaatactggcaaaaaaagcggcaaattaaaggcgagctataaacgcgactgtttttccgtgggctccaacgttgacattgacttttcagggcctaccatttatggttgggctgtcctggcttttgaaggctggctggccggttaccaaatgtcattcgatacagccaagtcaaaactgtcacagaataactttgcgcttggctataaagccgctgactttcagcttcacactcacgtgaatgatggaaccgaattcggtggcagcatctaccagaaggtgaatgagaagattgagacgtccattaatttggcttggacagcaggcagcaataacactcgctttggaattgcagcaaagtacatgctagattgcaggacttctctctctgctaaggtcaacaacgctagtctgattgggctgggatatactcagacccttaggcccggagtgaagctcaccctgtcagctctgatcgatggcaagaacttctccgccggtggacataaggtcggactaggctttgagcttgaggcatag

SEQ ID NO: 246728 - DNA, 480 bp, synthetic construct
  misc_feature 1..480: note = Description of Artificial Sequence: Synthetic coding sequence
  source 1..480: mol_type = other DNA
atgtgtaacacacccacctactgcgatttgggcaaagccgctaaagacgtctttaataaaggttatggcttcggtatggttaaaatagaccttaaaacgaaatcctgctccggcgtggagtttagcacaagcggacacgcctacacagacaccgggaaggctagtggcaatttagagactaagtacaaggtctgcaattatggcctgaccttcacccagaagtggaacaccgataacacactgggcactgaaattagttgggaaaacaagctggctgaaggactgaaactgacattggatacaatttttgtgcctaacactggcaagaagtcgggaaagttgaaagcctcctacaaaagggattgtttctctgtagggagcaacgtcgacatcgacttcagcgggcctacgatatacggatgggctgtgctggcctttgaaggctggctagccggatatcagatgagcttcgatacgtag

SEQ ID NO: 246729 - DNA, 1062 bp, synthetic construct
  misc_feature 1..1062: note = Description of Artificial Sequence: Synthetic coding sequence
  source 1..1062: mol_type = other DNA
atggtgggtgataccctcaaactgctgtcaccattgatgaccagatacttttttttactgttttacagtaccgattcttcagatcttaacgagaaccaacaccccctcgacttcgacgagatggctttcggaaaggtcaaaagcggcattagttttttgattcagacaggcgtcggcattttagggaattcctttctcctttgcttctataatttaatcctgttcaccggacataaactgcggccaacggatcttattctgagccaattagctcttgccaattcaatggtgttgttttttaaaggcattccacagaccatggcggctttcggcctaaagtatctactgaatgacacaggctgtaagttcgtattttattatcaccgcgtaggaacacgcgtgtccctgagcacaatttgcctgttaaacgggtttcaggccatcaaactcaatcccagcatttgccgttggatggagattaagattagatccccacgattcattgatttctgttgcctcctctgctgggcgcctcatgtgctgatgaatgcctcagtccttcttctggtcaacggccctttaaactccaaaaatagctctgccaagaataactacggatattgttcctataaagcctcgaaacgcttctctagcctgcatgccgtgctatattttagtccagacttcatgtctctgggctttatggtatgggcttcaggaagcatggtgttctttctttaccgccacaagcagcaggtccagcataatcattctaatcgactgtcatgcaggcccagccaggaggcaagagccacgcacacaatcatggtgttagtgagctcttttttcgtcttctactccgtgcattctttcctaaccatctggacgactgtggtcgccaatccaggtcagtggatcgtgacaaattctgtgctcgtagccagttgctttcctgctcggagcccatttgtcctgatcatgtctgacactcatatttctcaattctgctttgcttgtagaactcgtaagacacttttcccgaacctggtggtaatgccttag

SEQ ID NO: 246730 - DNA, 594 bp, synthetic construct
  misc_feature 1..594: note = Description of Artificial Sequence: Synthetic coding sequence
  source 1..594: mol_type = other DNA
atggcggcagtgaaggatagttgtggcaaaggcgaaatggcaacaggcaatggtcggcgattgcatctgggtatccctgaagccgtctttgtcgaggatgttgattctttcatgaagcaaccagggaatgaaaccgcagacaccgtgttaaaaaagctggatgagcagtaccagaagtataaattcatggagctaaacctggctcagaagaagcgtcggctcaagggtcagatacccgaaattaagcagactctcgagatactgaaatatatgcaaaagaaaaaggaaagtacgaattcaatggaaactcggtttctgcttgcggacaatttgtactgtaaggcttcagtacctcctacagataagatgtgcctgtggctaggtgctaacgtaatgttggaatacgacatcgacgaagcccaggccctgctcgagaaaaacctctctaccgctacaaaaaatttagattctctagaggaagacctggactttttgagagatcagtttactacaaccgaggtgaacatggccagagtttacaactgggatgtgaagcgcaggaacaaagatgattctactaagaataaagcgtag

SEQ ID NO: 246731 - DNA, 579 bp, synthetic construct
  misc_feature 1..579: note = Description of Artificial Sequence: Synthetic coding sequence
  source 1..579: mol_type = other DNA
atggcaccccagcctatgattcacacgcaacagggcctgcggacttccagtccgagcactccttcaccagaacaccaggaagatgtagacagtttcatgaaacagcccggaaatgagactgctgatacagtgctgaagaagctggacgagcagtaccagaagtataagtttatggagcttaacctggcacagaaaaaacgcagattgaagggacagatccccgaaattaaacagactctggagatcttgaagtatatgcagaagaagaaggagtccaccaatagtatggaaacccggttcttgctggctgacaacctgtattgtaaggcttctgtcccaccgactgacaagatgtgcttgtggctcggggcaaatgtcatgctggaatacgacatcgacgaggcgcaggcactcttggaaaaaaatttgtcaacggccacaaagaatctggactccctggaagaagatctcgacttcctacgcgatcagtttaccacaactgaagtgaacatggctagggtgtataattgggacgtgaaaagacggaacaaggatgacagtaccaagaataaagcttag

SEQ ID NO: 246732 - DNA, 702 bp, synthetic construct
  misc_feature 1..702: note = Description of Artificial Sequence: Synthetic coding sequence
  source 1..702: mol_type = other DNA
atgcggcctcaacaattgcacgcaaccgagataacctcctctgggttcagactcgcttggccgccactactgactgcggattcgggctactatgtcttggagctggtcccttctgctcagcccggtgcagctcgtcgccagcagctgcctggcaatgcaacggattggatttgggccggactcgaccctgatacggactacgatgtggctctagtccccgaatcaaatgttcggttacttcgccctcagatactgagagtgcggacccgcccaggggaggctggccctggcgcaagcggcccagaatctggagcagggccagcgcctacacagctggctgcccttcctgcacctgaggaagctgggccagagagaatagttatcagtcatgcccgaccacggagcttgagagtgtcctgggcaccggcactgggttctgctgcagctcttggctaccatgttcagttcggccctctgcggggtggcgaagcccagagggtggaggtgcccgcagggcgaaattgcaccaccttacagggccttgctccaggtactgcttaccttgtcacagtcacagctgccttcagatctggccgtgagtccgccctgtcagccaaggcctgcactccggacggtccacgcccacggcctcggccagtcccgagggctcctacaccaggaacggcctccagagaaccttag

SEQ ID NO: 246733 - DNA, 1338 bp, synthetic construct
  misc_feature 1..1338: note = Description of Artificial Sequence: Synthetic coding sequence
  source 1..1338: mol_type = other DNA
atgctgccttggaccgccctggggttggcattatcacttcgtctcgctttggcgagatcaggcgcagagaggggccctcccgcatctgccccaaggggcgatctgatgttccttctggatagttctgctagcgtgtcgcactacgaattttctagagtccgcgagttcgtcgggcagctcgtggctcctttgcccctaggaacgggcgcactaagagcttcgctggtgcatgttggaagccggccttatactgagttccctttcggtcaacattctagcggtgaggctgcacaggatgccgtgcgtgcaagtgcgcagcgcatgggggacacacacaccgggttagcgctcgtttacgcaaaagaacagctgtttgccgaagctagcggagcaagaccaggggtaccgaaagtattggtgtgggttaccgatggtggatcaagcgatccagtgggccctccaatgcaggagttgaaggatctgggggtgactgtgttcattgttagcaccggcaggggaaatttcctggaactttccgccgctgcaagcgcacccgctgaaaaacacctacacttcgtggatgtagacgaccttcacattatcgtccaggagctaagaggctccatcctagatgctatgcgcccacagcagctgcacgcgacagagattacatcatccggcttccgtttggcctggccacctctcctgacagccgactctgggtactacgttctggagctggtgccaagtgcacagcctggtgccgctcgccgacaacaactgcctgggaacgccaccgattggatttgggccggactggacccagataccgactatgatgtggctctggtgccagaatcaaatgttcgcctgctgcgtccacagatacttcgtgttaggacccgacccggagaagccggacccggagcatctggccctgagtccggcgcaggacccgcacctacacagctggcagccttacctgctcctgaggaggcaggcccagaacggatcgtgatctcccatgctcggcctaggtccctcagagttagttgggctcctgcattgggatccgccgctgccttgggataccatgtccagtttggtcccctccggggtggagaagcacagagagttgaggtgcctgcgggaaggaactgcaccaccttacagggcctagcccctgggacagcctatctcgtgacagtgaccgctgcctttcgaagtggaagagagagcgccttgtcggcgaaagcctgcacacctgacggccctcgtccccgtccaaggcccgtccctcgggctcctacacctggaaccgcgtcacgcgaaccgtag

SEQ ID NO: 246734 - DNA, 195 bp, synthetic construct
  misc_feature 1..195: note = Description of Artificial Sequence: Synthetic coding sequence
  source 1..195: mol_type = other DNA
atgctgccctggacagctctgggtctcgcgctgagtctccgactggcattagcccgttctggggcagaacggggtgctcagggccctggcaggcaccgcgtgcactgccagcacaggccacgacaactcccaggagccgtgagccggtgcctgtctccatgtcgagaggcccctgccctatgtggaaggggatag

SEQ ID NO: 246735 - DNA, 978 bp, synthetic construct
  misc_feature 1..978: note = Description of Artificial Sequence: Synthetic coding sequence
  source 1..978: mol_type = other DNA
atgccaagcagtacagccatggctgtcggagccttaagcagttctctgctcgtgacctgttgtctcatggtggctttatgctccccgagtatccccctcgagaagttggcccaagctccggaacagcctggacaggagaagcgcgaacatgccagccgcgacggcccaggccgtgttaatgaattgggaaggcccgctagggacgaggggggatccgggagagattggaagtccaaatctggacggggattggcgggaagggagccgtggtctaaattgaaacaggcgtgggtttcgcagggaggaggtgcaaaggccggagacctccaagtcaggcccaggggggacacaccacaggcagaggctctagccgctgctgcccaggacgcaatcggaccagagctggcacccaccccagagccaccagaagagtatgtgtatcctgattatcgcggtaaaggctgtgtcgacgaatctggcttcgtctatgctataggtgaaaagttcgcccctggaccttccgcatgcccctgcctatgcacggaggaaggacccctgtgtgctcagcccgagtgccccagactgcatcctcggtgcattcatgtggacacctcccaatgttgtccacaatgcaaggagaggaagaactactgtgaattcagaggcaaaacctaccagactttggaagagttcgttgtctctccctgtgaacgctgtcgatgtgaggccaatggagaagtgctttgtacagtgagcgcatgccctcagactgagtgcgtcgaccccgtatacgagcctgaccagtgttgcccaatatgtaaaaacggtccaaactgttttgcagagacggctgtcattcctgctggaagggaagtaaagacagacgaatgtacgatttgtcattgcacatatgaggaggggacctggaggattgagaggcaggctatgtgtacgcgacatgaatgcagacaaatgtag

SEQ ID NO: 246736 - DNA, 750 bp, synthetic construct
  misc_feature 1..750: note = Description of Artificial Sequence: Synthetic coding sequence
  source 1..750: mol_type = other DNA
atgactagtgagacattatggtggctcatcaccctcaaaaaacaactgggcgacaatgaggccataacacaggagatcgtcggatgcgcccatctggagaattacgccttaaaaatgttcttgtacgccgacaatgaggaccgcgcagggcgatttcataaaaacatgataaagtcattttacaccgcaagcctcttaatcgatgtgatcacggtgttcggggagttgacggatgaaaacgtcaagcatcgaaaatacgccaggtggaaagccacctacatacataattgcttgaagaatggcgagacgccccaggcagggccagttgggatagaggaggataacgacatcgaggagaacgaagatgccggtgccgctagcctccccactcagccgacccaaccaagctccagctctacatatgatccctcaaatatgcccagcgggaattacacaggcattcagatccccccaggagcccacgcacccgctaatacaccagcagaagtcccacacagtactggtgttgcctcaaacactattcagccaactccccagaccattccggcaatcgacccagcgctgttcaataccattagccagggagatgtgagattaacccccgaggattttgctcgggctcagaaatactgcaaatatgccggtagcgcactgcagtacgaggacgtttccacagctgtgcaaaacctacagaaagctctcaagctgctcacaactgggcgtgagtag

SEQ ID NO: 246737 - DNA, 924 bp, synthetic construct
  misc_feature 1..924: note = Description of Artificial Sequence: Synthetic coding sequence
  source 1..924: mol_type = other DNA
atggctgcgttagccccactgccccctttgcctgcccaattcaagagtatccagcatcacctacgcacggcgcaagaacatgataaacgcgacccagtggtcgcatactactgtagactctacgccatgcagacagggatgaagattgattcaaagacacctgaatgtaggaagttcctctctaagcttatggatcagctggaggccctaaagaagcagctgggcgataatgaggccatcacacaggagattgtgggctgcgcacacctggagaactacgccctgaagatgtttctctacgccgataatgaggatagagcgggtcgattccacaaaaacatgattaaaagcttttatacagcatccctgctgatcgatgtcattacggttttcggcgagctgactgatgaaaacgtgaagcacagaaagtacgccagatggaaagccacgtatattcataactgtttgaaaaatggtgagacccctcaggctgggcctgtggggatcgaggaggataacgatattgaggagaatgaggatgcaggtgcagcctcactcccaacccagcctacacagccatctagttccagtacctacgaccccagcaacatgcctagtggaaactacacgggaattcaaatcccacctggtgcgcatgctcctgctaacacccccgctgaagtcccccacagtactggcgtcgcttcaaacactattcagcctacaccacagaccattcccgcaatagaccccgctctgtttaacaccatttcccagggggacgtgcggctgactcccgaagatttcgctagagctcaaaaatattgcaaatatgcaggcagtgccctccagtacgaggacgtgtctactgctgtccaaaatttgcaaaaagccctcaagctccttaccacgggtcgtgagtag

SEQ ID NO: 246738 - DNA, 663 bp, synthetic construct
  misc_feature 1..663: note = Description of Artificial Sequence: Synthetic coding sequence
  source 1..663: mol_type = other DNA
gagatggcagcacttgctccactgcctcctcttccagcccaattcaaaagcattcagcatcacttaaggacagcacaggaacatgacaaacgtgatcctgtggtagcctactactgtcgcctgtacgcaatgcagacgggcatgaagatcgacagcaagacccccgagtgcagaaagttcctgagcaagctgatggatcagcttgaggccttgaaaaagcagttgggcgataacgaagcaattacccaagagattgtgggatgtgcccatctcgaaaattatgcgttaaaaatgtttctgtacgcggataacgaagatcgcgctgggaggttccataagaatatgatcaagtccttttacaccgcaagcttactgattgacgtgatcaccgtctttggggagctcacagatgaaaatgttaagcatcgaaaatatgccaggtggaaagctacctatattcacaattgcaaagaatggggtgacagctccagcaggccctgttggctcaagaagataatgattctcaaaaaaatgaagatgctcgaacagccgctgtgccctctgagtcagctctctcaccatcacctccagctgatgacccagcacgccatccgccagctgtattggaatacagacagtagtggttgcacaaggtcctcgtag

SEQ ID NO: 246739 - DNA, 669 bp, synthetic construct
  misc_feature 1..669: note = Description of Artificial Sequence: Synthetic coding sequence
  source 1..669: mol_type = other DNA
atgaccagcgagacgctgtggtggttaatcacactgaaaaagcagctcggtgacaacgaggctataacacaggaaatagtcggctgcgcacacttggaaaactacgccctcaagatgttcctgtacgctgacaatgaagatcgagcgggaagatttcataaaaatatgatcaaatccttttacaccgccagtttgctgatcgacgttataacggtgttcggggaactgaccgacgagaatgttaaacaccggaaatacgcccgttggaaagctacatacatacataactgtctcaaaaacggagagacaccccaagccggaccagtggggattgaagaggacaacgacatcgaagagaatgaggatgctggtgctgcctctctgccaacacagccgacacagccctcgagcagtagcacttacgatccctctaatatgcccagcggaaattacaccggtatccagattccaccgggtgcacatgccccagccaacacccctgccgaggtgccccattccactggagacgtccgactcactcctgaagatttcgcgagagcacagaagtactgcaagtacgccggaagcgcactccagtatgaagatgtgagtaccgctgttcagaatctccagaaggcgttgaagctactaacaacggggagggaatag

SEQ ID NO: 246740 - DNA, 621 bp, synthetic construct
  misc_feature 1..621: note = Description of Artificial Sequence: Synthetic coding sequence
  source 1..621: mol_type = other DNA
atggccgctaataagcctaaaggacagaactccctggcgctgcacaaagtgataatggtcggaagtggtggagtcggtaagagcgctcttaccctccaatttatgtacgacgaattcgtagaagattatgagccaactaaagctgattcctaccggaagaaggttgttctggatggggaagaagtgcagatcgacatacttgacactgcgggacaggaggactatgcagcaatccgcgacaactactttcggtccggggagggtttcctttgtgttttttctatcaccgaaatggagtcctttgccgcaactgccgattttagggagcagatccttcgggttaaagaggacgaaaacgttccatttttattggtggggaacaagagcgatctcgaggataaacgccaggtgagtgtcgaagaggctaagaacagggcggagcaatggaatgttaattacgtggaaacatccgcgaaaacacgcgctaatgtcgacaaagttttctttgatcttatgagagaaatccgcgcacgaaaaatggaagactcgaaggagaagaacggaaaaaaaaagcgtaaaagcctcgccaagcggatccgggaacggtgttgtattctctag

SEQ ID NO: 246741 - DNA, 306 bp, synthetic construct
  misc_feature 1..306: note = Description of Artificial Sequence: Synthetic coding sequence
  source 1..306: mol_type = other DNA
atggccgcaaataaaccaaagggccagaactctctggcccttcacaaagtgatcatggttgggtccggtggcgtgggcaagtcagcattaactctgcaatttatgtacgatgagttcgttgaggattacgagcccacaaaggccgactcttaccgaaagaaagtcgtcctggatggagaggaggtccaaatagacattctggacaccgccggacaggaggattacgccgcaatacgggataattattttagatcaggcgaaggctttctgtgcgtgttctccattactgaaatggaaagcttctag

SEQ ID NO: 246742 - DNA, 621 bp, synthetic construct
  misc_feature 1..621: note = Description of Artificial Sequence: Synthetic coding sequence
  source 1..621: mol_type = other DNA
atggcagccaacaaatctaagggtcagagctccctggcgttgcataaggtcattatggttggctctgggggagtgggtaaatctgccttaaccttgcaatttatgtatgatgagttcgtggaggactacgagcctaccaaagcggattcatatcgcaagaaggtcgtgttagacggagaggaggtgcagatcgatatactggataccgcaggccaggaggactatgctgccattcgtgataactattttaggagtggcgagggctttctgctggtgttctctatcactgagcacgagagttttacagccaccgccgaatttcgtgagcaaattctgcgggtgaaggccgaggaggacaaaatcccccttcttgtcgtcggaaataaatcagatctggaagagcggaggcaggttcctgtggaagaagctcgcagcaaggctgaagagtggggggtccaatatgtcgagacgtctgctaaaacaagggcaaacgtagacaaggttttctttgacctgatgcgcgagataagaaccaagaaaatgtcagagaacaaggacaagaacggtaagaaaagcagtaagaacaagaaaagcttcaaagaaaggtgttgtcttctgtag

SEQ ID NO: 246743 - DNA, 684 bp, synthetic construct
  misc_feature 1..684: note = Description of Artificial Sequence: Synthetic coding sequence
  source 1..684: mol_type = other DNA
atggccgcaaacaagtcgaagggtcagagttctctcgcgctacacaaggtgatcatggttggttctggcggtgtggggaagtcggccctcacacttcaattcatgaacgtcagcaagagtttagcctacgacaagaagaagtacacggctaataagaaggttgagggaatcctagagttcgtggaagattacgaacccactaaggccgacagctatagaaaaaaggtggttctggacggcgaagaggtccaaattgatattctagacactgctggccaggaggattacgctgccattcgggacaattacttcagatccggagagggttttctgctggttttcagtattaccgaacacgaatctttcactgctaccgctgagttccgagaacagatcttgagggtaaaggccgaggaagacaaaatccctttactcgtcgttgggaataaaagcgatctcgaggagaggcggcaggtcccagtggaagaggcacgctctaaggctgaagagtggggtgtgcagtacgtggagacatcggctaaaacgcgcgcaaacgtagacaaggtgttttttgacttgatgagagagataaggacaaagaagatgagcgaaaacaaggacaagaatggcaaaaagagctcaaagaacaagaagtcttttaaggagagatgctgtttactctag

SEQ ID NO: 246744 - DNA, 504 bp, synthetic construct
  misc_feature 1..504: note = Description of Artificial Sequence: Synthetic coding sequence
  source 1..504: mol_type = other DNA
atggctgcaaataaatccaaggggcagagctcccttgcgctccacaaggtgataatggttggaagcggcggtgttgggaaatccgctctgacccttcagtttatgtacgatgagtttgtcgaagattatgagccaacgaaagccgactcctacagaaaaaaggtggtacttgacggcgaagaagttcagattgatattctcgacacggcgggacaggaggattatgccgctatccgtgacaactatttcaggagcggggaaggctttctcttggtattctccattaccgaacacgaatcctttaccgccacagccgaatttcgggaacagattctgagggtcaaggcagaggaggataaaattccccttcttgtcgtcgggaacaagagtgatctcgaagagcggagacaggtaccagtcgaggaggcaagaagcaaagcggaggaatggggggtccagtacgtagaaacatcagccaagacaagagccaacgtggataagtag

SEQ ID NO: 246745 - DNA, 621 bp, synthetic construct
  misc_feature 1..621: note = Description of Artificial Sequence: Synthetic coding sequence
  source 1..621: mol_type = other DNA
atggcagctaacaagtccaaaggccaatccagcctggcgcttcacaaggtgataatggtcgggagcggtggagtaggaaagtctgccttgacactgcagtttatgtatgatgagttcgttgaggactacgaacccactaaagcagattcctaccgcaagaaagtggttctggacggagaggaggtgcagatcgacatactggatactgcaggtcaggaagattatgcagctataagagataactatttcagaagcggcgagggcttcctgcttgtcttctcgataacagagcacgagtcatttactgcaactgccgagtttagagagcagatcctgagggttaaagcggaagaagataaaattcctcttctggtcgtgggtaataaaagtgacctggaggaaaggcgccaggtccctgttgaggaagctcggagcaaggccgaagaatggggcgtgcagtatgttgagacctctgctaaaacacgggctaacgtagataaggtgttcttcgaccttatgcgggaaattcgaaccaagaaaatgtcagaaaacaaagataagaacggaaagaagtcatctaagaataagaagtctttcaaagagcgctgctgcctgctatag

SEQ ID NO: 246746 - DNA, 687 bp, synthetic construct
  misc_feature 1..687: note = Description of Artificial Sequence: Synthetic coding sequence
  source 1..687: mol_type = other DNA
atgaaacagagacagtctgccctgcagtgggtaatatgcgtgagccagcctcagaagacaagcgaaatggccgcaaataaatccaagggacagtcatcgttggctcttcataaagttatcatggtgggctccggcggtgtgggcaagtccgccttgactctgcagttcatgtatgacgaattcgtcgaagattacgaaccaaccaaagctgattcctaccgcaagaaggttgtgctggatggggaggaagtacagatcgatatcttagacacggccggtcaggaggactatgcagcaattcgtgacaattatttccgctccggcgagggcttcttgctggtcttctcaatcacagaacacgagtccttcaccgccaccgcagaattccgggagcagatcctaagggtgaaagcagaagaggataagatcccacttctggttgtaggaaacaaatccgatttagaagaacgcaggcaagtgcctgtggaggaagccagaagcaaggccgaggagtggggagttcagtacgtggagaccagtgcaaagactagggctaacgtggataaagtgttctttgatctgatgagggaaattaggactaagaagatgagtgaaaacaaggacaaaaacgggaaaaaatctagcaagaataagaaaagctttaaagagagatgttgtctgttgtag

SEQ ID NO: 246747 - DNA, 1860 bp, synthetic construct
  misc_feature 1..1860: note = Description of Artificial Sequence: Synthetic coding sequence
  source 1..1860: mol_type = other DNA
atggccagcggtgcctacaatccgtatatcgagatcattgaacaaccccgtcagcggggaatgcgatttcgttacaagtgcgaaggtaggagcgcaggatccatccccggagagcactccacagacaacaacagaacttatcccagcattcagatcatgaactactacgggaagggaaaagtgcgcatcactctcgtcacaaaaaatgacccttacaagccacacccccacgacctggtgggcaaagactgtagggatggttattatgaagccgaatttggacaggaaagacggccactcttcttccagaatttgggcatacgctgtgtgaaaaaaaaggaggtgaaggaggctatcatcacccgcattaaagccggaattaacccatttaatgtgccagaaaagcaattgaacgatattgaggactgtgatctgaacgtggtcagactgtgttttcaggttttcttgccagacgagcatggcaatctcaccactgcgcttccgcctgtggtttccaacccaatctacgacaatcgcgctcctaataccgctgagcttcggatttgcagagtgaataagaactgcggtagcgttcgtgggggtgatgagatcttcctcctgtgcgataaggtgcagaaggacgatatagaggtccggttcgtgctgaacgactgggaagctaaaggaattttctcgcaggccgatgtgcaccgccaggtcgctatcgttttcaaaaccccaccgtactgcaaggctatcactgagcctgttacagtgaaaatgcagctaaggcggccttctgatcaggaagtgtccgaatcgatggattttcgctatctgccagatgagaaagatacatatggaaacaaagctaagaagcagaagacgacactactgtttcagaagctatgccaggaccacgtggagacagggttccggcacgtcgatcaggatgggctggagttactaacgagcggggacccccctacacttgccagccagagtgcgggaatcaccgtgaatttccccgagcggccaagacccggactgctgggcagtatcggggaaggtaggtactttaaaaaggagcccaaccttttttctcatgacgcggtcgtcagagagatgccaacaggcgtgtcttcccaggccgagagctactacccttctcccggtcccatttcctctgggctgagccaccatgcttctatggcccctctaccgtcttctagctggtcttccgtggctcaccccacccctcgctccgggaatactaatcccctgagtagcttttccaccaggacactgcccagtaattcacaaggcataccaccctttctgcgaatcccggtggggaatgacctgaacgctagcaatgcctgcatctacaataatgcggatgatattgtgggcatggaggcatcaagcatgccctccgctgacttgtacgggatttctgatcctaatatgctgtctaattgcagtgtaaacatgatgaccacctccagcgactctatgggtgagacagacaaccctagacttctaagcatgaatctggaaaatccgagttgcaactcagtcctagacccaagggacctgaggcaactccaccagatgagcagttcttcaatgtctgctggtgccaattccaacacgactgttttcgtgagccagtccgatgccttcgaaggctccgacttcagctgtgccgacaatagcatgatcaacgaatctggccctagtaattcaaccaacccaaactcacacggatttgtgcaggattcacaatacagcggaattggctctatgcaaaacgagcagttgagcgacagttttccttacgaattttttcaggtgtag

SEQ ID NO: 246748 - DNA, 1764 bp, synthetic construct
  misc_feature 1..1764: note = Description of Artificial Sequence: Synthetic coding sequence
  source 1..1764: mol_type = other DNA
atggccagcggcgcatacaacccttacatcgaaatcatagagcagccgcgacagaggggcatgagatttcgatacaaatgtgaagggcgttcagctggttcgatcccaggcgaacactccacagacaacaatcggacatatccatccattcagattatgaattattacggcaaaggcaaggtgagaatcactctcgtgacaaagaacgacccctataaaccccatccacacgatctggtggggaaggactgccgcgacggttactacgaagctgaattcggccaggagcgccgtcctctgttctttcagaacctcggcattagatgcgtaaaaaaaaaagaagtcaaggaagctattattaccagaatcaaggccggaatcaatccattcaatgtcccggagaagcaactgaatgacattgaggactgcgacctgaacgtagtccgtctgtgtttccaggtgtttctacctgacgaacatggcaatctgaccacagctttgccgccagtggtgtctaatcccatttacgataacagagcacccaatacagcagaactcagaatttgtagggtgaataaaaactgtggcagtgttagggggggagatgagattttcttgctgtgcgacaaagtacaaaaagatgacatcgaggtgaggttcgtgttaaacgactgggaagctaagggtatcttttctcaggccgatgtccacagacaggtagccattgtgtttaagacacctccctattgtaaggcaattacagagcccgtgactgttaagatgcagctgaggcgcccatctgaccaggaggtctcggagagcatggattttcgatacctccccgatgaaaaggatacttacggaaataaggcgaagaaacagaagaccaccctgctatttcagaagctctgtcaggatcacgtgaacttccccgagcgacctcggcctggactcttgggctcaatcggagaagggagatacttcaaaaaagaacccaatctttttagccacgacgccgtcgttagggagatgccgactggtgtgagttcacaggccgaaagctattacccttcacctggtccaatttccagtggcctgtctcaccacgcttccatggcaccgctaccctcctctagctggtcctccgttgcacacccaaccccgcgttccggcaataccaatccgctgtccagcttttccactagaacacttccatctaacagccagggaattccccctttcctgcgcatacccgtgggcaacgacttgaacgctagcaatgcatgtatctataacaatgccgacgacatcgtcggtatggaagcatctagcatgccaagcgccgatctctacggcatcagtgatcctaatatgctcagcaattgttccgtgaatatgatgacgacatcttctgacagcatgggtgagaccgacaaccccaggttgctatctatgaatttagagaatcccagttgtaactcagttctcgaccctagggatctccgtcagctgcatcagatgtccagctcttctatgagtgccggtgccaactctaacaccactgtttttgtttcccaatcagacgcgtttgaagggtccgatttttcctgtgcagacaattccatgataaatgaatctggtccaagtaacagtaccaatccaaactcgcacggcttcgtgcaggattcgcagtattcggggataggcagcatgcagaacgaacaattatccgattcattcccatacgagttctttcaggtctag

SEQ ID NO: 246749 - DNA, 1647 bp, synthetic construct
  misc_feature 1..1647: note = Description of Artificial Sequence: Synthetic coding sequence
  source 1..1647: mol_type = other DNA
atggacgaattgttccccttgatcttcccagcggaacctgctcaggccagcgggccttatgtagagattatcgaacagcctaagcagcgcggaatgagatttcgctataaatgtgagggccgtagcgctggctcaatcccgggagagaggtctacagacaccaccaagacacaccctacaatcaaaataaacggctatactggcccagggaccgtcaggattagtctcgtgacaaaagacccccctcatcgcccacatccccacgaactggtcggcaaggactgcagggacgggttttacgaggctgagctgtgtcccgatcggtgtatccatagttttcagaatctgggcattcagtgcgtgaaaaagcgtgacttggagcaggctatcagccagcgcatccagaccaacaacaatccatttcaggaagagcagcgaggagactacgacctcaatgctgtgcggctgtgtttccaagtaaccgttcgggacccatccggaagacccctaagactgcccccagttttaagccacccaatatttgataaccgggcacctaataccgctgagcttaagatctgccgggttaaccggaactcaggaagctgtctggggggtgatgaaatctttctcctttgcgataaagtgcaaaaagaggacattgaagtgtacttcactggtccgggttgggaagcacggggttcattctctcaggccgatgtgcatagacaggtggccatcgtttttcggactccaccctacgccgatccatcattgcaagctccagtgagggtgagtatgcagctgcggaggccatctgatagagagttgagcgagcccatggagttccagtacttacctgacaccgacgatagacaccggatcgaggaaaaaaggaagcgcacttacgaaacatttaagagcatcatgaaaaaaagtcctttttcaggcccaaccgatcctagacccccacccaggaggattgctgtgccgagtaggtcttcagccagcgtgccaaagcctgctccgcagccatacccttttactagctctctcagcacgatcaactacgatgagttcccaaccatggtattccccagcggccagatcagccaggcttcggccctcgcccctgcccctccgcaggtgcttccacaggcaccagccccagcccctgcccctgcaatggtgagcgcactcgcccaggccccagccccagtgcccgtcctggctcccggtcctccacaagcagtagcacccccagcgccaaaaccgactcaagccggtgaggggacgttatcagaggcgttacttcagttacaattcgacgacgaagacctgggcgcacttctcgggaattctaccgatccagccgtttttaccgatctggcaagcgtcgataattctgagttccagcagctgcttaatcagggcattcccgttgcgccacacaccacagaacccatgctaatggagtatcccgaagccatcacgcggctggtaactggtgcccagcggcctcccgacccagcacctgcacctctgggggcacccggtcttccgaatggactgctttcgggagatgaggattttagctcaatcgcagacatggacttttccgcactgttgtcccagatctccagttag

SEQ ID NO: 246750 - DNA, 1656 bp, synthetic construct
  misc_feature 1..1656: note = Description of Artificial Sequence: Synthetic coding sequence
  source 1..1656: mol_type = other DNA
atggacgaactgtttcctctcatctttccagctgagcccgctcaggccagtggcccttacgtggagataattgaacagcctaagcaacgaggaatgcggttccgatacaagtgtgagggtagatccgcaggatcaattccaggcgaaaggtcgacagacaccacaaagacacatcccactattaagatcaatggatatactggcccagggaccgtgagaattagcctcgtaacaaaggaccctcctcatcgacctcatccacacgagctagtgggcaaggattgtagagatggcttttacgaggccgaactttgccctgacaggtgcatacactcttttcagaacctgggaatccaatgcgtgaagaagagagacttggagcaggccataagtcagcgtatccagacgaataataacccatttcaagtgcccatcgaagagcaacgcggtgattatgacctcaatgccgtgaggctctgttttcaggtaactgttcgcgatcctagcggacgccctctccgcctcccgcctgttctttcacaccctatcttcgacaaccgagcccctaatacagccgagctaaagatctgtagggtgaaccgtaactcaggaagttgcttgggcggtgatgaaatcttcctcctttgcgataaagtccaaaaggaggatatcgaggtatactttacaggcccaggttgggaggcacgagggtccttcagccaggctgatgtgcatcggcaggtggcaatcgtcttccgaacgcccccttatgcggacccgtctcttcaggccccagtgagagtgagcatgcagcttcgaaggcccagcgatcgggaattgtctgagccgatggagttccaatacctgccagacacagatgataggcataggatcgaagagaagcgtaaaaggacttacgagacttttaagtctatcatgaaaaaaagcccctttagcgggccaactgatccgaggcctccgcctcgaagaatagctgtacccagccgcagcagcgcatcagtccctaaacctgctccgcagccatacccctttacctcttcactctccactatcaactacgacgagtttccaactatggtctttcccagcggacagatctcccaagcctccgccctggctccggctccccctcaggtacttcctcaggcccctgctcctgccccagcacctgctatggtctcggctcttgcgcaagccccagctcccgtgcccgtgctggcccctggaccgccacaggctgtggccccacccgctcctaaacctacccaggcaggcgaggggaccctttctgaggctctgctccagcttcagttcgacgatgaagaccttggagccttgctcggcaacagcactgacccagccgtcttcacagacctggcatcagtggacaactctgagttccagcagctgctgaaccagggcatccccgtcgccccacacactaccgagccaatgctcatggaatatcccgaagccatcaccagactggtcacgggtgcgcagagaccccctgaccccgctcctgcacctctgggtgcgcctggcctccccaacggccttctgtccggggacgaggacttctcctccattgcggacatggacttcagcgcgctccttagccaaatttcatcttag

SEQ ID NO: 246751 - DNA, 741 bp, synthetic construct
  misc_feature 1..741: note = Description of Artificial Sequence: Synthetic coding sequence
  source 1..741: mol_type = other DNA
atggatgagctgttcccattgatattcccagcagaacctgcccaggcttcggggccatatgtggaaatcattgagcagccaaagcagcgcggaatgaggtttcgctacaagtgcgaagggagaagcgctggaagcattcccggagagcgatcaactgacactaccaaaacccatccgaccataaagataaacgggtataccggccctggcaccgtcaggatttcactagttacaaaagacccgcctcatcgccctcatcctcacgagctggttggaaaggattgtagggacggtttttatgaggcagagctgtgtccagaccgttgtatacattccttccagaatctgggcattcagtgcgtcaaaaaaagggatttggaacaggctatctcccagagaatccagactaataacaatccattccaggtcccaatcgaagagcagcgcggagactacgacctgaacgcggttcgcctatgcttccaagtcacagtgagggacccctccgggcgtccactgaggttgccccctgtgttgtctcacccaatctttgacaacagggcacctaatactgccgaactgaaaatctgtcgtgtcaatcggaacagcgggtcatgcttaggaggagatgagattttcctgctctgcgacaaggttcagaaagaggatatcgaggtttgcccacaagctagtacaccagcgctgagcctgtatgtcattccggaacaccatcagctgtag

SEQ ID NO: 246752 - DNA, 1134 bp, synthetic construct
  misc_feature 1..1134: note = Description of Artificial Sequence: Synthetic coding sequence
  source 1..1134: mol_type = other DNA
atggacgaattatttcctctaattttccctgctgagccggcacaggcttcaggcccttacgtggagattatagagcagcccaaacagcgcggtatgcgcttccgctacaaatgcgagggacgaagcgccggatctatccccggtgaacggagcactgacacaactaagactcacccaacaataaagatcaacgggtacacgggacctgggaccgtcagaatcagcctagtgaccaaagaccccccacaccgcccacatccccatgagttagtgggtaaagattgccgggacgggttctacgaagcggaactttgtcctgacaggtgcatccattcgtttcaaaacttaggaattcagtgtgtgaagaagagagaccttgagcaagctatctcacagcgtatccagaccaataacaaccccttccaagtgccaatcgaggagcaacgcggagactacgacctcaacgctgtgcggctgtgctttcaagttaccgtgcgcgaccccagcgggcgaccgctgaggctccctcctgttttatcgcacccgatcttcgacaaccgcgcacccaataccgccgagctgaaaatttgtcgggtaaatagaaactccgggagttgccttggcggtgacgagatcttcctcctttgtgataaggtccaaaaggaggacatcgaggtgtatttcacaggtcccggatgggaggccaggggaagcttttcccaggccgatgtgcaccgccaggtggccatcgtgttccgcacgccaccctatgctgacccttctctgcaggcacctgtgcgggtgagtatgcaactgagacgccctagcgaccgggaactttctgaaccgatggagtttcagtatttacctgacacggatgacaggcaccgaatcgaggagaaaagaaagcggacctacgagaccttcaagtctataatgaaaaagagcccattctccgggccaactgacccgagaccaccaccaagaaggatcgctgttcctagccgctctagtgccagcgtgcctaaacccggtaaggatttccttctgtctcattggaacgatcgcttttccagcgtacagctgcggtcaagcggtgatgaggatagttgggcccctttgcaaacatactag

SEQ ID NO: 246753 - DNA, 714 bp, synthetic construct
  misc_feature 1..714: note = Description of Artificial Sequence: Synthetic coding sequence
  source 1..714: mol_type = other DNA
atggatgagctgttcccccttattttccccgctgaacccgctcaagccagcggcccatatgttgaaataatcgagcagccaaagcagagaggaatgcgctttcgctacaaatgtgagggcagatctgcgggaagcattcctggcgaacgcagcacggacacaactaagacacaccctacaatcaaaatcaatgggtacaccggaccaggaacagtgcggatcagccttgtcacgaaggatccccctcatcgccctcacccccacgaattggttggtaaggattgcagagatggcttttatgaagcagaactgtgccctgaccgatgcattcatagctttcaaaatctcggaattcagtgcgttaagaaaagagacctggagcaggctatttctcagcgaatacagaccaacaataacccattccaggtgcctatcgaagagcagaggggggactatgacctcaatgccgtgcggctttgttttcaggtgacggtccgagatccgtccggacgacccctgaggctcccgccagtgctctcccatcccatcttcgacaaccgggctcctaatacagctgagcttaagatttgccgcgtcaatcgcaactcagggtcttgcctggggggtgacgaaatcttcctcttatgcgataaggtgcagaaagctcatgggataccagtgcccgctcgttacagacgatcatcaccagactag

SEQ ID NO: 246754 - DNA, 1278 bp, synthetic construct
  misc_feature 1..1278: note = Description of Artificial Sequence: Synthetic coding sequence
  source 1..1278: mol_type = other DNA
atggacgagctgttcccgctcattttccctgctgaacctgcccaggcaagcggaccttacgtcgagataattgagcagcctaaacaacgagggatgcggttccgttacaaatgcgagggcaggtctgctggcagtataccaggcgagaggagcactgacaccacaaagacacatccaaccattaaggtctggatgagtgggccactttactttggccagattaatggatatactgggcctggaaccgtgcgaatcagcttggtaactaaggatcctcctcatagaccgcaccctcatgagctggtggggaaggattgccgcgatggtttctatgaggccgaactgtgccccgatagatgcatccactctttccagaacctgggcatccagtgcgttaagaagcgcgacctggagcaggctatcagtcagcgcatacagacaaacaataaccctttccaggttcctattgaggaacaacggggagactacgatctcaatgctgtcagactgtgctttcaagtgacagtccgcgacccctctggaaggcctcttaggctgcccccagtgctttcccaccctatttttgacaaccgggctcctaacaccgcagaactgaaaatctgtcgggttaaccgcaattccggcagctgcctcgggggtgatgagatattcctgctgtgtgataaggtgcagaaggaagacatcgaagtgtactttacaggaccgggatgggaggcaagaggaagtttttcccaggccgatgtacacaggcaggtcgcaatagttttccggactcccccttacgctgacccatccctgcaagcgccagtcagagtgtctatgcaacttagacggcctagtgacagagagctgagcgaaccaatggaattccaatatctgccagatacagatgaccggcaccgcattgaagagaagcgcaaacgtacctatgaaacttttaaatccatcatgaaaaagagcccatttagcggcccaaccgatcccagacccccacccaggaggattgccgttccaagtcgctcctccgcctcagtgcccaagcccgcaccacagccatatcccttcactagctcactctccacaatcaactatgatgagtttccgactatggtcttcccatcaggacaaatttcccaggctagcgctttggctcccgctccaccacaagtgttgccgcaggctccagctcccgctcctgcccctgctatggtaagcgccctggctcaggcccctgagcactgggtggccggagactag

SEQ ID NO: 246755 - DNA, 1314 bp, synthetic construct
  misc_feature 1..1314: note = Description of Artificial Sequence: Synthetic coding sequence
  source 1..1314: mol_type = other DNA
atgacccaattcctgcctcccaatctgctagccctgttcgccccacgggaccctatcccgtacctgccaccactggaaaagctgccacacgagaagcaccataaccaaccttattgcggaatagcaccctacattcgagagttcgaggatcccagagacgctcccccacccacaagggccgagacccgggaggagagaatggagcgtaaacggagagagaagatcgagcgcagacagcaagaagtcgaaactgaattgaaaatgtgggaccctcataacgaccccaacgcccagggcgacgctttcaaaacactatttgtggccagagtgaactacgacaccacagagtctaaactgcggagagagtttgaggtgtacgggcctatcaaaagaatacatatggtatactccaagcggtcaggtaagccaaggggttacgctttcatcgaatatgaacacgaacgtgacatgcatagcgcttacaagcatgctgatggcaagaaaattgatggtcgccgtgtgctggtagacgttgaacggggaaggacggtaaagggatggagacccagacgccttggaggaggcttggggggtacccggcgaggaggggcagacgtgaacattaggcactcaggcagggacgatacaagccgctatgacgagcgacccggacctagcccactaccccacagagatcgagatcgggaccgggagcgagagagaagggagaggtcacgagagagggataaggagcgggaacgcaggagaagcaggtcaagagatcggaggcggcgtagcagatcccgtgacaaagaggaaaggcgacgctctagggaacgttcaaaggacaaggatcgggaccggaagcgacgaagctcacggtcacgcgaacgggctaggcgcgaaagggagagaaaagaggagttgaggggcggtggaggggacatggctgaaccttctgaggctggcgacgctccacccgacgacggtcccccaggggaactcggcccagacggacctgacgggcctgaagagaaggggagggatcgagatcgagaacgcagacgatcccaccggagtgagcgagaacgtcggcgagatagggacagagatcgggatcgggatagagagcacaagcgcggagaacgcggtagcgagaggggcagagacgaggcccgtggcggaggaggcggtcaagacaacggactggaaggtttaggaaacgactcgcgagatatgtacatggaatctgaagggggtgatggctacttggcacccgaaaacgggtacctgatggaggccgctccagagtag

SEQ ID NO: 246756 - DNA, 1731 bp, synthetic construct
  misc_feature 1..1731: note = Description of Artificial Sequence: Synthetic coding sequence
  source 1..1731: mol_type = other DNA
atgctaaggagcggcccagcctctgggcctagcgtccctaccggccgtgccatgccatcccgcagggttgctcgtccccctgcagctcccgaactgggcgctcttggtagtcctgacctgagttcattatcactggctgtgagtcgctccacagagattattgatgagtatatcaaggagaatggctttggtctagacggcggtcagcccggtccaggcgaaggacttccaagattggtgtccagaggggctgctagtctgtcaaccgttaccttaggccctgttgccccacccgctaccccccctccatggggttgccctctcggtcggctggtgtctcccgcacctggcccagggccacagccccacttggttattaccgagcagccaaagcagaggggaatgcgattccgctatgagtgtgagggcaggtcggccggatctatattgggagagtccagcactgaggctagcaaaacattacccgcaattgaactgcgggactgcgggggtctgagggaggtcgaggtcacagcatgtctggtctggaaggactggccccatagggtacacccacatagcctggtcgggaaagattgtaccgatggcatttgccgggtcaggttaagaccacatgtgtctcctcgccattccttcaataacctcggtatccagtgcgtacggaaaaaagaaatagaagccgctattgaacgaaaaatacagctggggatcgatccttacaatgccggatcactcaagaaccatcaggaagttgatatgaacgtagttagaatctgtttccaggcttcctatagggaccagcagggacagatgagacgcatggatcccgtccttagtgagcccgtgtatgacaaaaaaagcaccaatacaagcgaactgaggatatgccgaatcaacaaggagtctgggccttgtaccgggggtgaggaactttacctcttgtgtgataaagttcaaaaggaagacatctctgtagtcttttccagggccagttgggaggggcgagccgacttttcacaggccgacgtgcatagacagatagccatcgtttttaagacccccccatacgaagacctcgagattgtggaacctgtgaccgtgaatgtttttctacagaggttgactgacggcgtgtgcagcgaacccctgcctttcacgtatctgccacgggatcacgactcctacggagtcgataaaaaacggaaacgagggatgccagacgtgctgggcgagctgaactctagtgacccacacggtatcgaatccaaacgcaggaagaagaagcctgccattctcgaccatttcctgccgaaccacggatcagggccatttctgccaccaagcgccctgctcccagatcccgattttttttcaggcaccgtgtcattgcccggattagaacctcctggcggtccagatctgctcgatgacggattcgcttatgaccctaccgcccctaccctgtttactatgctggacctacttccgccagcacccccacacgcctctgccgtcgtgtgctctggtggtgctggtgctgttgtaggtgagacccctggccctgaacccctgacgctggattcatatcaggccccaggccctggtgatgggggtactgcgtccctggtagggtctaacatgttccccaaccattatcgggaggccgcattcgggggagggctattgtcccccggacccgaggcaacctag

SEQ ID NO: 246757 - DNA, 1740 bp, synthetic construct
  misc_feature 1..1740: note = Description of Artificial Sequence: Synthetic coding sequence
  source 1..1740: mol_type = other DNA
atgcttagatccgggccagcttcgggcccatctgtgcctacgggtagagctatgcctagtaggagagtagctaggccgcctgccgcacccgaactcggagccttaggttctcccgacctgagctctttgtctctggcagtgagccggtcaaccgacgagttagaaattatagatgaatatatcaaggagaacggctttggcctggacggaggtcagcccggtccaggagaaggtttaccacgtctcgttagccgcggtgccgcatctctcagcacagtaactctcggccctgtcgccccaccggcaaccccacctccgtggggctgccccctggggaggctcgtgtcccctgcgcctggacccggtcctcagccacacctagtgatcaccgaacagccaaagcagagaggcatgcgcttccgctacgaatgtgagggacgttctgcagggtccattcttggggagtcttcaacggaagcttcgaaaacactgcccgctatcgagctgcgggactgtggtggtctgcgggaggtggaggttactgcatgcttagtgtggaaagactggcctcaccgcgtgcacccacattccttagttggaaaggattgcaccgacggtatctgccgggtgaggctaaggccacacgtgtcacccaggcatagcttcaacaatcttggcattcagtgcgtgcgcaagaaggagatcgaagccgctattgaacggaaaatccagctcgggatcgatccctataatgcaggatccttaaagaatcaccaggaggttgatatgaacgtcgttcgtatttgctttcaggcctcatacagggaccagcagggacagatgcgacgaatggaccccgttctgtccgagccagtctacgacaaaaagtccaccaatacgtcagagttacgaatttgtcgaattaacaaggaaagcggaccttgcactggcggagaggagctgtatctgctgtgtgataaagtgcagaaggaagacatttctgtggtattttccagggctagttgggaggggagggccgacttctcccaggccgacgtacaccgccagatcgcaatagttttcaagactcccccttatgaagatcttgaaatcgtggagcctgtcactgtgaacgtttttttgcagagactgacggacggcgtgtgctctgagccactgccatttacttaccttccacgcgaccacgattcctacggagtcgacaagaagcggaaacgaggaatgcccgatgttctcggcgagctgaacagcagcgatccacacggcattgaatctaagagaagaaaaaaaaaacccgcaatcctagaccattttctgcccaaccatggaagcggcccattccttcctccctctgcactcctgccggaccctgactttttttccgggaccgtgagcctaccaggcctggaaccacccggagggccagatctccttgacgatggcttcgcttatgaccctaccgccccaacactttttacaatgctggacttgctcccacctgctccaccgcacgccagcgccgtggtatgctcaggtggggctggcgctgtggttggcgagacccctggccctgaaccacttaccctggactcctatcaggcccctggcccaggggacggcggaaccgctagtttagtgggcagcaatatgttccctaatcactatcgggaagctgcattcggtggaggcctgctcagtcccggaccagaggctacgtag

SEQ ID NO: 246758 - DNA, 2187 bp, synthetic construct
  misc_feature 1..2187: note = Description of Artificial Sequence: Synthetic coding sequence
  source 1..2187: mol_type = other DNA
atggaggctgccgcaggaggccgaggttgtttccaacctcatcccggattgcaaaaaacactcgagcagtttcacctttcaagcatgtctagcctcggcggacctgccgcattctccgcacggtgggcacaagaagcttacaagaaggagagtgctaaggaggctggggctgctgccgtgcccgcaccagtgcccgcagcaaccgaaccgcctcccgtgctgcacctgcctgctatccagcctcccccacccgttctcccgggacctttcttcatgccctcggatagatctaccgaacggtgcgaaaccgtcctagaaggcgagaccatcagctgctttgtggtcggcggagaaaaaagactgtgcctcccacagattctcaactcagtgctgcgggactttagcttacagcagataaatgccgtttgcgacgagttacatatctattgttcccggtgcacggccgatcagctggagatcctgaaggtcatgggcatcctccctttctcagccccatcctgcgggctgatcactaagacagacgccgagaggttgtgcaatgcgttactgtatggcggtgcctacccgccaccctgcaaaaaggagctcgcagcctcgcttgcccttggcctcgagctctctgagagatccgtccgggtgtaccatgaatgttttggtaagtgcaaaggactcctggtgcccgagttatacagcagcccatccgctgcgtgcattcaatgcctggattgtaggcttatgtacccacctcataagtttgttgtgcactcccataaagcacttgaaaatcgaacatgtcattgggggttcgacagcgcaaattggagggcatacattctgctatcacaggattacaccggaaaagaggagcaggctaggcttggacgctgtctcgacgacgtgaaggaaaagttcgattatggcaacaagtataagaggcgtgtcccgagggtatccagcgagccccctgcaagtatcaggcctaaaactgacgacactagcagccagtcgcctgcccctagcgaaaaggacaagccctcatcctggttgagaaccctggccggatcatcgaataagtccctgggctgtgtgcacccacgtcaacggctttcggccttccggccttggagtcctgcagtctcggcctctgagaaggagctgagtccgcacctgcccgctctcatccgggacagtttctattcatataaatcctttgaaactgccgtcgcgcctaacgtggcactggcacctccagctcaacagaaggtggtgtcctctcccccttgcgccgctgcagtctccagggcacccgagcccctcgccacctgcacacagccgaggaagagaaaattaacagtcgacacacccggtgcccctgagactttggccccagtggcggctcccgaggaggacaaggactctgaggcggaagttgaagttgagtccagggaagaattcacgtctagcctcagttcgctctcatcccccagctttacctctagctctagcgccaaggacctgggatctcctggggcaagggcgctgccatctgctgtgcctgatgccgcagcgccagccgatgcccctagcgggctggaggcagaactggaacacttgcgacaggccctggagggcggtttggacaccaaggaagccaaggagaagtttctgcacgaagtggttaaaatgcgcgtgaagcaggaggaaaaactgtccgctgccttacaggctaaaagatccctgcatcaagaactggagtttttaagggtggctaaaaaggagaagttacgggaagctaccgaggctaaacgaaaccttagaaaggagatcgaacgcctccgtgccgagaacgaaaagaagatgaaggaggccaacgaatcaagactgaggctgaagagggaattagaacaggcacggcaggctcgggtgtgcgataagggctgtgaggctggccgtctgagggccaagtacagcgctcaaatagaggacctgcaggtcaagctgcagcatgctgaggccgacagagaacagcttcgagcggaccttctaagggagagggaagcgagagaacaccttgaaaaggttgtgaaggagctgcaggagcagctctggcctcgggcacgacccgaggccgctgggtcagagggagcggcagaattggagccttag

SEQ ID NO: 246759 - DNA, 1632 bp, synthetic construct
  misc_feature 1..1632: note = Description of Artificial Sequence: Synthetic coding sequence
  source 1..1632: mol_type = other DNA
atgggctgtataaagtcaaaggagaataaatcacccgcaatcaagtacagaccagaaaacacaccggagccggtctctacatctgtcagccattatggtgccgaacccaccaccgttagcccatgcccctcatccagtgctaagggcactgccgtgaacttctctagtctgtccatgacaccatttggaggctcttccggagtcacacccttcggcggagcctcctcaagcttctccgttgtcccctcatcttaccccgcagggctcactgggggtgtgaccattttcgttgcactctacgactacgaagcgcgtacaaccgaggacttgtcattcaaaaaaggcgagcgcttccagattattaacaacacagagggtgattggtgggaggcgagatcaatcgccactgggaaaaatggttatatcccttcaaattacgtggctcccgcagactctattcaggctgaagaatggtacttcggcaaaatgggcaggaaggacgcagagcgcttactgttgaacccaggaaatcaaagaggaattttcctggtgagggaatccgaaacaacaaagggggcttactcactgagcatccgggattgggacgaaattcgcggagataacgtaaagcactacaagattagaaaactggataacggagggtactatattaccacacgggcacaattcgacaccttacagaaactggtgaaacattacacggagcacgccgacggtctttgtcacaagttgacaaccgtatgtcctactgtaaaacctcagacgcagggactcgctaaggacgcgtgggagatacccagggaatctcttaggttagaggtcaaactcggtcagggctgttttggcgaggtttggatgggcacttggaacggcactaccaaggttgccatcaaaacattaaagcccggaactatgatgcctgaggctttccttcaggaagctcaaatcatgaagaagctccgccatgataagctcgtaccactctacgctgtagttagcgaggaaccaatttacatagtgaccgaatttatgtcaaagggatctctgctggactttctgaaagaaggcgacggaaagtatttgaaactgccccagcttgttgacatggctgcccagatcgcagatggtatggcctacatagagagaatgaattacatacacagggatttacgcgcagccaatatcttggtgggggaaaatttagtatgcaaaattgccgatttcgggctcgcaagactgatcgaagataacgaatacaccgctaggcagggagcaaagttcccgatcaaatggacggcgcctgaggccgcactctacggtcgcttcacaataaaaagcgatgtgtggtcctttgggatcctccagaccgagcttgtcaccaaggggagggtcccttaccccggaatggttaacagagaggtgctcgagcaggttgagcgtggttaccgcatgccatgccctcagggctgcccagaatctctccacgagttgatgaatctctgttggaagaaagaccctgatgagaggcccacattcgagtacattcagagctttctggaagactatttcaccgcaacagagccccagtaccagcccggagagaatctgtag

SEQ ID NO: 246760 - DNA, 1632 bp, synthetic construct
  misc_feature 1..1632: note = Description of Artificial Sequence: Synthetic coding sequence
  source 1..1632: mol_type = other DNA
atgggctgtatcaagtcaaaagaaaataaatcacctgcaatcaaataccggcctgagaatacacctgagcctgtctcaaccagcgtctcgcattatggcgcagagccaacaaccgtttccccttgcccaagtagtagcgccaagggaactgccgtcaacttttcaagcttgtccatgacaccgttcggcggaagcagtggcgtgacacccttcggcggtgccagcagttcattttcggtggtgccatcatcatatccggctggattgaccggaggagtcactattttcgttgcactgtacgattacgaagctaggaccacagaagacctatcctttaagaaaggggaacgttttcagatcattaacaataccgaaggggactggtgggaggcacggagtattgccactgggaaaaatggatatatcccgtcgaattacgtcgcgccagccgactccatccaggcagaagaatggtatttcggcaagatgggccgaaaagatgctgagcgcctgcttctgaacccgggaaaccagagaggaatcttccttgtcagggaatccgagaccacaaagggggcatactcgctaagcattcgggattgggacgaaatcaggggtgataatgttaaacattacaagatacggaaacttgacaacggagggtactatataacaacccgcgcacagtttgacacactacagaagctagtgaagcattacacggagcatgccgacggcctgtgccacaaactgactacagtgtgtcctacagtcaagccccaaactcagggactggcaaaagatgcctgggaaattcccagggagagcctccgactggaggtgaaattagggcaggggtgtttcggtgaggtttggatgggaacttggaatggcaccaccaaagtcgcaatcaaaactcttaaaccaggcaccatgatgcctgaggcatttctgcaggaagcacagatcatgaagaagctgaggcatgacaagttagtccctctttatgccgtggtgtctgaggagcctatatacattgtgactgagttcatgagcaaaggctccctgctcgattttctgaaggagggggacgggaagtatcttaaactgcctcaattggtagatatggcagctcagatcgcggatggtatggcctatatagagagaatgaattacatccaccgagacttaagagcagccaacattctggtgggcgaaaatctggtctgcaaaatcgctgattttggattggccagactgattgaggacaacgaatacaccgcaaggcagggggctaagttcccgattaagtggaccgcccctgaggcagcactgtatgggaggttcaccatcaagtcagatgtgtggtcatttggaatcctgcagaccgagctagtgacaaaagggagggtgccttatcccggaatggttaacagagaagtcctcgaacaagtggagcgaggctatcgaatgccttgcccccagggttgccccgaatccttgcacgagctgatgaatctgtgttggaagaaagatcctgatgaacgaccaacatttgaatatatccaaagcttcctcgaggactatttcaccgccactgaaccacagtaccagcctggcgagaatctgtag

SEQ ID NO: 246761 - DNA, 1632 bp, synthetic construct
  misc_feature 1..1632: note = Description of Artificial Sequence: Synthetic coding sequence
  source 1..1632: mol_type = other DNA
atgggatgtattaaatccaaagaaaataaaagtcccgctataaaatacagacctgagaacacgcctgaacccgtttccacatctgttagccattatggagccgagccgacgaccgtatccccttgcccaagcagttcagcgaaaggaacggctgtgaacttctcaagcttatctatgaccccattcggaggcagctctggagttactccattcgggggagcatcaagttcattctcagttgttccttcaagctacccggcagggctgacaggtggtgtaacaatattcgtagccctatatgactatgaggctagaactacagaggacctgtcctttaagaaaggggaacgattccagattataaataatactgaaggtgattggtgggaagccagatcaatcgcaactgggaagaacggctacatcccctcaaattacgttgcccctgcagactccatacaggccgaggaatggtattttgggaaaatgggtcgaaaggacgctgagcgactgctgttaaacccaggcaaccagcgcggaatttttctcgtgagagagagtgaaactactaagggcgcatacagcttgtcaatccgcgattgggacgagattcgcggagataacgttaagcactacaaaattcgtaaactcgacaatggagggtactatattactacccgcgcacagtttgacaccctccaaaaacttgttaagcactatactgaacacgcagacggcctctgtcacaaattaactaccgtgtgtccaaccgtgaaaccccagacgcaggggctggccaaggacgcttgggagatccctcgagaaagcctcaggctagaggtaaaactcggtcaggggtgcttcggcgaagtgtggatggggacatggaacggaacaaccaaagtcgccattaagaccctgaagcctgggactatgatgcctgaggccttcctgcaggaagctcagatcatgaagaagctgcgtcacgacaaactggtgccactgtacgctgttgtgtcggaggagcccatctacattgtgacagagtttatgtctaagggatcacttcttgattttttaaaggaaggcgatggcaaatacctgaaacttccccagctcgtggatatggctgcacagatcgctgatgggatggcctatatcgaaaggatgaattatatccatagggaccttcgcgctgccaacatattggtgggggaaaacctggtgtgtaagattgcagactttggcttggctagactgattgaagataacgaatatacagctcggcaaggggctaagtttcccattaagtggacagctcctgaagctgctctttatggccgttttaccattaaaagtgacgtttggagctttggcatcttgcagactgagctcgtgacaaagggaagggtcccatatccaggaatggtgaaccgcgaggttctggagcaggtagagaggggttacagaatgccatgtccccaaggctgtcctgagtcactacatgaactgatgaacttgtgttggaaaaaggatcctgacgagcgtcccaccttcgaatacatacagagcttccttgaagactactttacagctaccgaacctcagtatcagccaggagagaatctttag

SEQ ID NO: 246762 - DNA, 1539 bp, synthetic construct
  misc_feature 1..1539: note = Description of Artificial Sequence: Synthetic coding sequence
  source 1..1539: mol_type = other DNA
atgggctgcatcaaaagcaaggggaaagacagcctgagcgacgatggcgtggacctcaagacccagccggtcagaaatactgagcgcaccatctacgttagagatcctacctccaacaaacagcaacgaccagtacccgagtctcagcttctgccaggacaacggttccaaacaaaggacccagaggagcagggtgacattgtcgttgcgctgtatccttatgacggtatccatcctgatgacttatcttttaagaagggagaaaagatgaaagttttggaagaacacggcgagtggtggaaggcgaaatccctgctgacaaagaaggaaggcttcattcctagtaattatgtagccaaactcaataccttggaaacagaggagtggttttttaaagatataacccggaaagacgccgagcgacaattactggcccctggcaactctgctggagccttcctgattagggaaagcgagaccctcaaggggtcgtttagccttagtgtgagggattttgatccagtccatggtgacgtgatcaagcactacaaaataaggagtctcgataatgggggttattacataagcccacgtattacattcccctgcatctcggacatgattaaacattaccagaaacaggccgatgggctgtgtcggaggctggaaaaggcctgcatctcccctaaaccgcagaagccctgggataaggatgcctgggagatcccaagagaatctataaagctggtgaagagactcggtgctgggcagttcggagaggtctggatgggctactataacaatagtacaaaagtcgcagttaaaactcttaagccagggacaatgtccgtgcaggccttcctggaagaagcaaatctgatgaaaacactgcaacatgataaactcgtgcgactctacgcggtcgtgactagagaagaacctatctacattattacagagtatatggctaaaggatcactcctcgatttcttgaaaagcgacgagggaggcaaggtgctcttacccaagctgattgactttagcgcacagatagccgaaggcatggcctatattgaacggaaaaactatattcacagggacctgcgagccgctaatgtgctcgtgtctgaaagtctgatgtgtaaaattgccgattttggcctggcccgtgtgatcgaggacaacgaatacaccgcccgagagggtgccaagttcccaatcaaatggaccgcccctgaagctattaacttcggttgtttcactatcaaaagtgatgtttggtccttcggcatcctgctgtacgaaatcgtcacttatggaaagataccctatcctggaaggactaatgccgacgtgatgacagcactgagtcagggctacaggatgccgagagtggaaaattgtcccgacgagctctacgacatcatgaagatgtgctggaaggaaaaggcagaagaaagaccgactttcgactacctacagtcggtcctcgacgatttctataccgctacggagggacaataccagcagcagccttag

SEQ ID NO: 246763 - DNA, 453 bp, synthetic construct
  misc_feature 1..453: note = Description of Artificial Sequence: Synthetic coding sequence
  source 1..453: mol_type = other DNA
atgggctgcatcaaaagtaaagggaaggatagcctgtctgacgacggagtggaccttaaaacgcaacccgtgcgcaacacagaaaggactatttatgtgcgggatcccacaagcaataaacagcagagacccgtccccgagtcacagctccttcccggacagcgatttcagactaaagatcctgaggagcagggagatatcgtggtcgctctgtacccctacgacggcatccatcctgacgacctgagcttcaagaaaggagagaaaatgaaagtcttggaggaacacggggagtggtggaaggccaagtcactgctgactaaaaaggagggctttatccctagcaattacgtggctaagcttaacactttggagactgaagagtggttcttcaaggatattaccaggaaggacgcagagcggcagctgctcgcccctgggaattccgcatag

SEQ ID NO: 246764 - DNA, 1476 bp, synthetic construct
  misc_feature 1..1476: note = Description of Artificial Sequence: Synthetic coding sequence
  source 1..1476: mol_type = other DNA
atgggatgtatcaaatccaaaggcaaggattctctgtctgatgacggagtcgatctcaagacccagccagtaccagagagccagttgttacctggccaaagatttcagacgaaggacccggaggagcagggcgacatagtggttgccctgtacccgtacgatggcatccacccagatgacttgagttttaaaaaaggggagaaaatgaaagtactcgaggaacacggtgaatggtggaaggccaagagtctcttaaccaaaaaggaggggtttattccttcaaactacgtggcaaagctgaatacgctagagacagaggagtggttcttcaaggatataacccgcaaagatgcagagaggcaactgttagctcccggtaactctgccggagctttcctgattagggaaagtgaaaccttgaaggggtcctttagtttgagcgtgagagatttcgatccggtgcacggtgacgtgatcaagcattacaaaatcagaagtctcgacaatggcggatactacataagcccacggataaccttcccttgcatctcagacatgattaaacattaccagaaacaggccgacggcttatgccgccgacttgaaaaggcgtgcatcagcccaaaaccccagaagccgtgggacaaagatgcttgggaaatacctcgggagtcaatcaaattagtgaagcgcttaggcgcaggtcagtttggcgaagtctggatggggtactataataatagtaccaaagtggcagtgaaaaccctcaagcctggaactatgtccgtacaggcattcttggaagaggcaaatctcatgaagacattacagcacgataaactcgtccgactgtacgctgtagtaaccagggaagagccgatctacatcattacagagtacatggcaaaaggatccctactcgattttctgaaaagcgacgaagggggaaaagttctgctcccaaagctgatagatttttcagctcaaatcgcagagggcatggcctacattgaacgaaaaaactatatccaccgggacttaagagccgcaaatgtactggtttccgagtccctgatgtgtaagattgcagatttcggcctcgctagggtaatcgaagacaatgagtacacagccagagagggtgcaaaatttccaattaagtggactgcaccagaagcgattaattttggatgtttcaccattaagtcggatgtgtggtcttttggcattctcctgtacgagattgttacctatggcaaaattccatacccgggacggactaacgcagacgtcatgacggctctctctcagggttacagaatgccgagggtggaaaactgtcccgacgagttatacgacatcatgaaaatgtgttggaaggagaaagccgaagaacgcccaacctttgactatttgcaatctgtactggatgatttctacaccgctacggaaggacagtatcagcagcagccctag

SEQ ID NO: 246765 - DNA, 993 bp, synthetic construct
  misc_feature 1..993: note = Description of Artificial Sequence: Synthetic coding sequence
  source 1..993: mol_type = other DNA
atggccgcagtggactctttttatcttttataccgcgaaatagccagatcgtgcaattgctatatggaagcactggccctggtgggggcatggtatactgcccgtaagtccatcacagtgatctgtgacttttacagtctgattcggctgcattttatccctcgactgggcagcagggctgacctgatcaaacagtacgggaggtgggccgttgtttctggggcaactgacgggattggcaaggcatacgcagaggagctggctagccgcggactgaatatcattctgatttccaggaacgaagagaagctgcaggtggttgctaaagacatcgctgatacttataaggtggaaacagatatcattgttgctgatttcagctccgggagggagatctacctcccaatcagggaggccctcaaggataaggacgttggtatccttgtgaataatgtgggagtgttttatccctatccacagtacttcacccagctcagtgaggataagctgtgggacataatcaatgttaacattgccgctgcatctctgatggtgcatgtcgttttgccaggtatggttgagagaaaaaagggagctattgtgacgataagttcagggtcctgttgcaaaccgacacctcagctcgcagcattcagcgcaagtaaagcctacctagaccattttagccgcgctttgcagtacgaatacgctagcaagggcatctttgtacagtctcttatccctttttatgtggccacttccatgacagcgccaagtaatttcctccacagatgttcttggcttgtgccatcacctaaggtgtacgcccaccacgccgtgagcacattgggtattagcaaacggaccacagggtattggagccactctatacagtttctgttcgctcagtacatgccggagtggttatgggtctggggagccaatatcctgaaccgcagcctgaggaaagaggctctctcctgcacagcctag

SEQ ID NO: 246766 - DNA, 336 bp, synthetic construct
  misc_feature 1..336: note = Description of Artificial Sequence: Synthetic coding sequence
  source 1..336: mol_type = other DNA
atgggcagctcctcatttctagtgcttatggtaagcttagtgctggtaacgcttgtggctgtcgagggcgtaaaggaagggatcgagaaggccggagtgtgcccagcggataatgtaagatgttttaagtccgaccccccacaatgtcacaccgaccaggattgtttgggggagaggaagtgttgctaccttcactgcggctttaagtgcgtaattcccgtcaaggaacttgaggagggagggaacaaggacgaagatgtctcccgaccttaccccgaacccggatgggaggctaagtgtcccggatcctcctccacgcgatgtcctcagaaatag

SEQ ID NO: 246767 - DNA, 675 bp, synthetic construct
  misc_feature 1..675: note = Description of Artificial Sequence: Synthetic coding sequence
  source 1..675: mol_type = other DNA
atgaggacacagtcgctcctgcttctcggcgctctgctggccgtgggctctcaactgccagccgtgtttgggagaaaaaaaggggaaaaaagtggcggttgtccaccggatgacggcccttgcctccttagcgtacccgatcagtgtgtggaagactcccagtgccctttgaccagaaaatgctgctacagggcttgcttcagacagtgcgtgccgcgagtgtccgttaaactggggtcatgcccagaggaccagctcagatgcttaagtcccatgaaccacctgtgtcacaaggattctgactgctcagggaaaaagcggtgttgccacagcgcatgcggcagagactgccgggaccccgctcgaggtacagcccctggatgccctggccaggcaaattccgacctcggttctgttgcactgcatctttcatggggccctacagaaagagtgcatgatggcagaccaggtgccctgcctgctggtcagcattatctatatcagcgctggttccagccatctgacaatcattggcctgctgacacctccttgcagccgattcatccatggttcctactgctgggagtcaaagtccactcactttcttctgaggaaggtctttgtatcactccagtgctatgtaccacggccatccgagcatcccacccctcctag

SEQ ID NO: 246768 - DNA, 372 bp, synthetic construct
  misc_feature 1..372: note = Description of Artificial Sequence: Synthetic coding sequence
  source 1..372: mol_type = other DNA
atgcgaacacaatcactgttattgcttggggcactgcttgcagtgggaagccagcttcctgccgttttcggtaggaagaaaggggaaaagtccggcggttgtcccccagatgacgggccttgcttactctccgttccagaccagtgtgtggaagattcccagtgcccgttaactaggaaatgctgttaccgggcttgtttccgacagtgcgtgcctagagttagcgtgaagctcggaagctgtccagaagaccagttgcgatgtcttagcccaatgaatcacctatgccataaagacagcgactgtagcggtaagaaacggtgttgccactccgcctgcgggagggactgccgggacccagctcgaggctag

SEQ ID NO: 246769 - DNA, 1647 bp, synthetic construct
  misc_feature 1..1647: note = Description of Artificial Sequence: Synthetic coding sequence
  source 1..1647: mol_type = other DNA
atgcctgctctgagacctctgctacctctgctccttctacttagacttacctctggggcaggtctgctgcctggattgggtagtcaccccggagtttgccctaaccaattatccccaaacttatgggtggatgcacagtccacttgcgagcgagagtgctcacgcgaccaagattgcgcagcagccgaaaagtgctgcattaatgtgtgcggattacactcatgcgtcgctgccaggtttcctggatcaccagccgctcctaccaccgcagcatcttgcgagggattcgtctgcccacaacagggtagcgactgtgatatctgggacggacagcctgtgtgtagatgcagagatcgctgtgaaaaggaaccttcttttacttgcgcctcagatggactgacttactataaccgatgctatatggatgccgaggcatgcctgagaggactccatctacacattgtcccatgtaaacatgtcctcagctggcctccctcatcccccggacctccagaaacgacggctcgcccaacccccggagccgctccagtgcctccagctctttactcttccccaagccctcaagccgtccaagtgggtggcacggcctcgctgcactgcgatgtctccggcaggcctcccccagccgtaacatgggagaagcagagccatcagcgggagaacttgatcatgcggcctgatcaaatgtacgggaacgttgtggttacctctatcggccagctggtgctctataacgctcggccagaagatgcagggttatatacctgtactgctcgcaatgccgctggattgcttagagcggacttcccactgtccgttgtccaaagggagccagccagggatgcagctccatcgatccctgctccagccgaatgcttgcccgatgttcaagcctgcaccgggccaacttccccccacctggtgttatggcactacgaccctcagcgcggagggtgtatgaccttccctgccagaggttgtgacggcgctgctcggggttttgagacttatgaagcttgtcagcaggcctgcgccaggggacctggggacgcctgtgttcttcccgcagtccaaggcccttgtcgcggttgggaacctcggtgggcttacagtcccctactgcaacaatgtcatccttttgtgtacggtggctgcgaaggcaatggcaataattttcacagccgagaatcttgtgaagatgcttgccctgtgccaagaacacccccatgcagggcatgcagactgaggtccaagcttgcgctgtcgttgtgcagatcagattttgccatagtcgggagacttactgaagtgttagaagagccggaggctgcaggaggcattgctcgagtggccttggaggatgtcctcaaagacgataagatgggactaaagtttcttggtaccaaatacctggaagttacactttccggtatggattgggcgtgtccatgccccaacatgacggccggtgatggacccctagtgattatgggcgaagttcgggacggcgtcgcagttctcgatgctggcagctatgtcagagctgccagtgagaaaagagtgaagaaaatccttgagttactcgaaaaacaggcatgtgagttgttgaatcggttccaagactag

SEQ ID NO: 246770 - DNA, 1731 bp, synthetic construct
  misc_feature 1..1731: note = Description of Artificial Sequence: Synthetic coding sequence
  source 1..1731: mol_type = other DNA
atgtgggcacctcggtgtaggcgcttttggagtcggtgggagcaagttgcggctctgcttctcctactcttgctgctgggagtcccaccacgatcacttgccctgccacctatccgctattcccacgccggtatttgcccaaacgatatgaacccgaacctttgggtcgatgcgcagagcacatgtagacgcgagtgtgagaccgaccaggaatgcgaaacttacgagaaatgttgccctaacgtgtgtggaacaaagagctgcgtggcggcacgatacatggacgtgaaagggaagaaaggacctgttggcatgcccaaagaagccacctgcgaccacttcatgtgcttacagcagggctccgagtgcgatatctgggatgggcagccggtgtgtaaatgtaaagatcggtgcgagaaagaacccagtttcacttgtgcgagcgatgggctcacctattataatagatgttacatggacgctgaggcctgctctaagggaatcaccctggctgtggtaacctgccggtatcacttcacctggcctaatacttccccacctcctcccgagaccactatgcatcccacaacagcttctccagagactccagaactggacatggcagcacctgcattgctcaataatccagtgcaccagagcgtgactatgggagaaacagtttccttcttgtgtgacgtcgttggaaggcctcgacctgagatcacctgggaaaaacagctggaagatagggaaaatgtcgtcatgagaccaaatcatgtgcgcggaaatgtggtggtgactaacatcgcccagcttgttatttacaacgctcagctgcaggacgccggaatctacacctgtacagcaagaaacgtggccggagtgcttcgagccgactttcccctgtccgtggtgcgcggtcatcaggccgcagctacaagcgaaagcagccctaacggaaccgccttcccagctgcggagtgtctgaagcctcccgatagcgaggactgcggcgaagagcagacccggtggcacttcgacgcgcaggcaaacaattgcctgacttttacctttggccattgtcacagaaatctgaatcactttgaaacctatgaggcttgcatgctcgcttgtatgagcggccctctggccgcatgctccctaccggcattgcaggggccatgtaaagcttatgcgccaaggtgggcctacaactctcagactggacaatgtcaaagctttgtttacggcggatgcgaaggaaatggaaacaattttgaatcccgggaggcttgcgaggagagttgcccttttcctcgcggaaaccagcggtgtcgcgcatgcaagcctcgtcagaaactggtgacctcattttgcaggtctgatttcgtaattctgggccgagtcagcgaacttacggaggagcctgactcaggccgagctttggtgacagtggacgaggttctgaaagacgagaagatgggcttgaagtttcttggtcaggagccattggaagtgactctgctccatgttgactgggcctgcccctgtcccaatgtgaccgtctctgagatgccactcatcatcatgggagaggtggacggcggaatggcaatgctgaggcccgatagcttcgtaggagccagttctgcgcgaagggtgagaaaactgcgggaagttatgcacaagaaaacttgcgacgtgttgaaggagttcttgggcttgcattag

SEQ ID NO: 246771 - DNA, 849 bp, synthetic construct
  misc_feature 1..849: note = Description of Artificial Sequence: Synthetic coding sequence
  source 1..849: mol_type = other DNA
atggatgtgaaggggaaaaaggggccagtgggtatgcccaaggaagcaacatgcgatcatttcatgtgcctgcagcaaggttctgaatgcgacatctgggatgggcagccagtgtgcaagtgtaaagatcgctgtgagaaggagccctcctttacctgtgcccaggcaaataactgcctgacattcaccttcggccactgtcatagaaacttgaatcatttcgagacctatgaagcctgtatgctggcttgtatgtcagggcctttggcggcttgttcactccctgctctgcagggcccttgtaaagcatatgccccacggtgggcttacaactcacagacaggccaatgtcagtcctttgtctatggcggatgcgaaggcaatggaaataacttcgagtcccgtgaggcctgtgaggaaagctgcccattcccccgtggaaatcaacgctgtagagcctgtaagcctcggcagaaactggtcacatcgttctgcaggagtgatttcgtcattctaggaagagtgtccgaactcactgaagaaccagactctgggagagcactggtgaccgtggacgaggttttaaaggacgaaaagatgggcctgaaattcctggggcaagagccactcgaggtgacattactgcatgtagactgggcatgcccatgtcccaatgtcacggtcagcgaaatgcctctcattatcatgggggaggtcgatggtggcatggctatgttgcgaccggacagctttgtgggagcatcctccgcccgacgcgttaggaaactcagggaggtgatgcataagaagacatgtgatgtgctcaaggagtttctgggactgcactag

SEQ ID NO: 246772 - DNA, 1509 bp, synthetic construct
  misc_feature 1..1509: note = Description of Artificial Sequence: Synthetic coding sequence
  source 1..1509: mol_type = other DNA
atgcctttggtgaagaggaatattgagccccgtcatctttgtaggggcgctctgcctgaaggtattacatctgaactggagtgtgtcactaattccacgctggccgctatcattcgtcagctgtccagcctgtctaaacacgccgaagacatttttggcgaactgtttaacgaagcaaacaatttctatataagagcaaactccttacaggaccggatcgacagattggccgtgaaagtgacgcaactcgactccactgtcgaggaggtctccctccaggatatcaacatgaagaaggcatttaaatcaagcaccgtgcaggaccaacaagttgtctccaagaactcaattcccaatcccgtcgcagacatttataaccagtccgacaagccaccacctctgaatatactgactccttatagagacgacaagaaagatggccttaagttctacaccgatcccagctactttttcgacctttggaaggaaaagatgttgcaggataccgaggataagcgcaaggagaaaaggaggcagaaggagcagaagcgcattgatggcactacccgggaagttaaaaaggtgaggaaggctaggaatcggaggcaggagtggaacatgatggcctacgataaggagctgaggccagacaatcgcctcagtcagtctgtctatcatggggctagcagtgaagggtccctgagcccagataccaggtctcatgcatcagacgttactgactattcttaccctgctacccctaaccactcgctccatcctcagccagttacacccagctacgctgctggggatgtgccccctcatgggccagcaagtcaggcggcagaacatgagtaccgccctccatctgccagtgctcggcacatggccttgaaccggccacaacagcctccaccccctccacctccacaggcccctgaaggaagtcaggcctccgcaccgatggccccagctgactacggtatgttgccagctcagattatcgagtattacaatcccagcggccctcccccacccccacccccaccagtgattcccagcgcccaaaccgccttcgtttccccactgcagatgcccatgcaaccaccttttccagcctctgcgtcgagtacccacgcagcaccgccacaccccccatctacgggcctgctagtgacagctcccccacctcccggacccccacccccaccacctggacctccaggaccgggtagctccctgtcatccagtcccatgcatgggcctcctgtcgctgaagcgaagcgtcaggagcccgctcagcccccaatttcagatgcccgttcggatcttctggcagcaatacggatgggcatccagttgaagaaggttcaggagcaacgagagcaagaggctaagcgagagcccgtgggtaacgacgtggcaacaattctgagccgtcgcatcgccgtggagtattccgatagtgatgacgacagtgagtttgatgagaacgactggagcgattag

SEQ ID NO: 246773 - DNA, 1500 bp, synthetic construct
  misc_feature 1..1500: note = Description of Artificial Sequence: Synthetic coding sequence
  source 1..1500: mol_type = other DNA
atgccattggttaaacgcaatatcgagccgcgacacctttgccgcggagcactcccagagggaattacttctgaactggaatgtgtcaccaactctactcttgcagccattatccgccagttgtcaagcctgtcaaagcatgcagaggacatcttcggtgagttatttaatgaggcaaataatttttacattcgggctaattccctacaggatcggatcgatcgcctggctgttaaagttacccagctcgacagcacagttgaggaggtgagccttcaagacatcaatatgaagaaggcctttaagtcatccaccgtgcaggaccaacaggtggtgagcaaaaattccattcctaatccagttgccgatatctacaatcagtcagacaagccaccgccacttaatatcctgacaccttatagagacgataaaaaggatggcctgaagttctacaccgatcctagttacttctttgacctgtggaaagagaaaatgctgcaggacacagaggacaaaagaaaggagaagaggcgccaaaaacgtgaaaaacataaactgaatccaaatcgaaaccagcaggtgaatgtgcggaaggtccgtacacgcaaggaagagtgggagcggagaaaaatggggatcgagttcatgtctgacgccaagaagctggagcaggctgggtccgctaaggaagatagagtgccatctggctctcatgcctctgacgtgacggactattcttacccagcaacgccaaaccactcccttcacccacaacctgtgaccccctcctacgccgctggggatgtccctcctcatggtccagcgtcacaggccgctgaacacgagtacagacccccatccgccagtgcacgtcatatggctctcaaccgtcctcagcagccccctcccccaccaccgccacaggctccagaaggatcacaggcttctgcccctatggcacctgctgactatgggatgctgccagcacaaatcatcgaatactataatccttcgggaccccctccaccaccccctcctcctgtgataccctccgctcagaccgcctttgtctctccattacagatgcctatgcaacccccattccctgctagcgcttctagcacgcacgcggcacctccccaccctccatcaactggcctgctggtaaccgcacccccaccacccggaccaccccctccaccacctgggcctcccggacccggatcatctctgtcatcctcacctatgcatggtccccctgtcgctgaggcaaagcgacaggagcctgcgcaaccccctatcagcgacgccaggagcgacttgctcgcggcaattcggatgggtattcagctcaaaaaggtgcaggagcagagggaacaagaagcaaagcgcgaacccgtgggtaacgacgtggcgacaattctgtccaggcggatcgctgtggaatacagcgacagcgatgacgactccgagtttgacgaaaatgactggtcggactag

SEQ ID NO: 246774 - DNA, 786 bp, synthetic construct
  misc_feature 1..786: note = Description of Artificial Sequence: Synthetic coding sequence
  source 1..786: mol_type = other DNA
atggagggaggactaggacgcgcagtgtgcctcctgacaggtgcctccagagggttcggcaggactctggcgccactgctcgcctctctgctgagtccagggtccgtcctggtcctgtccgcacggaatgacgaagccctacgtcagttagaggctgaattgggtgccgagcgcagcggtcttcgggttgtcagggtacctgccgacctgggagctgaagctgggctgcagcagctgctaggtgccctgagagaactgcctcgcccaaaaggactccagcgacttctcttgatcaataacgcaggaagtctcggtgatgtaagcaagggatttgtcgacttgagcgactcaacccaggtgaacaactattgggcgctgaatttgactagcatgctgtgccttacatccagcgtgctaaaagcattccctgattctcctgggcttaatcgcaccgtggtgaatatatctagtctctgtgcgctgcagccctttaaagggtgggctctgtactgcgccggaaaagctgccagggatatgctctttcaggtgttagccctggaggagcctaacgttcgcgtgttaaactacgctcccggtccgctggacaccgatatgcagcaactggcaagagagaccagcgtggaccctgatatgaggaagggtctccaggagctgaaagctaaaggcaagctggtggattgcaaggtgagcgctcagaagctcctctcacttctggaaaaagacgaatttaaaagcggggcacatgtcgacttctacgacaaatag

SEQ ID NO: 246775 - DNA, 2430 bp, synthetic construct
  misc_feature 1..2430: note = Description of Artificial Sequence: Synthetic coding sequence
  source 1..2430: mol_type = other DNA
atggaggacgaacagcctgattctctggagggctgggtgcccgtccgagaagggctgttcgcagaaccagaacgccaccggctgaggttcttggtcgcctggaatggagccgaaggaaagtttgcagttacctgccacgacagaacagctcaacagagaagattgagggagggtgcaaggctcgggccagagccagagcccaagcccgaggccgctgtgtcaccgtcctcctgggccggtctcttgtccgccgcagggctgaggggagctcataggcagctcgcagctctttggccacccctggaaaggtgttttcccagactgccgccagagctggatgtaggagggggtggcgcttggggcctgggcctagggctctgggcactgttatggcccaccagagctgggccaggagaggcagccttgcaggagctgtgcggacagttagagcgatacctcggtgctgctgcagatggatgcggcggtgcgacggtcagggatgctctgttcccagcggagggcggagccgcagattgcgaaagtccccgagaatttagggaacgggctttgagggccagatgggtggaggcagacgctcggctccgccaagtgattcagggacacggaaaagccaatacaatggtagccctgatgaacgtgtaccaagaggaagacgaagcataccaggagctggtgactgtggcaacgatgttcttccagtacctactgcagcccttcagggctatgcgggaggtggcaaccctctgtaagctggatattctgaagtccctcgacgaggatgatttaggccctcggagggttgtggcattggaaaaagaggccgaggagtggacacggagagcagaggaggctgtggtgtccattcaagacattaccgtgaattattttaaggagacagttaaggccctcgccggaatgcagaaggagatggagcaggatgccaaaaggttcggacaggccgcatgggcgacagccattcccagactggaaaaactccaactgatgctcgcacgggaaacactgcagctgatgagggcaaaggagctatgtctgaaccacaaaagagctgagattcaggggaaaatggaagacctacccgagcaggagaaaaataccaacgttgtggacgagctggaaattcaattctacgaaatccagctggagctgtatgaggtgaagttcgaaatactcaaaaatgaggagattcttctgacaacccagttggattcgctgaagcggctgattaaagaaaagcaggacgaggtcgtgtactacgacccatgtgaaaatcccgaggagttgaaggtgattgattgcgtggtcggcctgcaggatgacaaaaacctggaagtgaaagagctgcggaggcaatgccaacagctggaaagcaaacgaggcaggatttgtgctaaaagagcctccctcaggagccggaaagatcagtgtaaagagaaccaccggttcagactgcagcaggcagaagaatccatcagatattcaagacaacaccattctatccagatgaagagggataagattaaggaggaagagcagaaaaagaaagagtggatcaaccaggaaagacagaaaacactccaacgcctgaggtcatttaaggataagcggcttgcccagtccgtcaggaacactagtgggagtgagcctgtggcacccaacctcccttcagacctgagccagcaaatgtgcctgccagctagccacgctgtgtcagtgattcatccttccagtcgcaagaccaggggagtgccgttaagtgaggccggaaatgtgaagagtccaaagtgtcagaattgccacggcaacatccctgtgcaagtgtttgttccagtcggggatcagactcatagcaagagtagtgaggagctgtctctcccgcctccacccccaccccctccacctcctcctcctccaccacctccccctcccccaccgttgcgcgctttgtctagctcgtcacaggcagccacacaccagaacctggggttccgcgctccagtcaaggatgatcagccacgccctctagtatgcgaatctccagctgagagacctcgtgatagtctcgaaagcttttcttgtcccggttctatggacgaggtgctggcatccctcaggcatgggagggccccactacgaaaggtagaggtgcccgctgttagaccccctcacgcaagcattaacgagcacatcctggctgccatcaggcagggagtgaaacttaaaaaagtacatccagacctagggcctaatccttcatcaaagccaacatccaaccgtcgcacttcagacctggagcgctccattaaagcagccttgcaacgcatcaaaagggtgagtgccgactccgaagaggactctgacgaacaggacccaggccagtgggacggctag

SEQ ID NO: 246776 - DNA, 1452 bp, synthetic construct
  misc_feature 1..1452: note = Description of Artificial Sequence: Synthetic coding sequence
  source 1..1452: mol_type = other DNA
atgcccgtgcccccacccccaccccctcccctgccacctccccctccccctttgggtgccccaccacctccccctccctctgccccacccgtgtcaaccgatacttcttccttaaggagggccgatccaaagggcaggtccgcactgctggctgacatacagcaggggaccaggctgagaaaggtaacccaaatcaacgacaggagcgccccacagatagagagttccaaagggaccaataaagagggaggaggctctgccaacacccggggtgcgtcaacgccaccaacattgggcgatctcttcgcaggagggttcccagtcctaaggccagctggccaacgtgatgttgccggaggaaaaaccggccaaggacccggatcgcgggcaccttctcctaggctgcccaacaagacaatctccggaccccttataccgccagcctcccccaggctgggaaatactagtgaagcccacggggctgcccgaaccgcaccccctaggcccaatgtgcccgcacctcctcccccaactccaccacccccacctcccccattgcccccaccccttccttctagttcccccatcaagacgccactagtgtcccctcccggacccctcacaaagggaaacctccctgtggttgccccacctgttccctgtgcacctcccccacccccaccccctcccccacccacaccgccacctctgcctccagcgtcagtcttgagtgataaagctgtgaagcctcagctggcgcctctccacctgccacctatccccccaccattaccactactgcccccatgcggctaccccggtctcaaagccgaaccagcgagtcctgctcaggacgctcaggaacctcccgctcctcccccaccactccccccatacgcctcttgctcccctcgtgcctctctccccgctcctcccctcccaggtgtgaatagctcaagcgaaacacccccacctcttcctcctaagtcaccatcattccaggcccctccacagaaggccggagcccaggccttaccagcgcctcctgcaccccctggaagccagccattcctccaaaagaaaaggcatgggcgacctggagcgggtggaggtaagttaaaccccccacccgctcctcccgctcggtccccaacgacagaactcagctcaaaaagtcagcaggcaacagcctggacccctacccagcagccaggcggtcagctccgcaacggctcactgcacattatcgacgatttcgagtcgaaattcactttccacagcgttgaagactttccccctcccgacgaatacaagccatgtcaaaagatttatccaagtaaaatccccagatctcggacacctggcccttggctccaagctgaggctgtcggacagtcatccgacgacatcaaagggaggaattcgcagctgtccctgaaaactctccgctag

SEQ ID NO: 246777 - DNA, 1452 bp, synthetic construct
  misc_feature 1..1452: note = Description of Artificial Sequence: Synthetic coding sequence
  source 1..1452: mol_type = other DNA
atgcctgttccacctccccctcccccaccacttcccccacctcccccacccctaggggcaccccctccccctccgccaagcgctccgccagtgagcaccgataccagctcactcaggcgcgcagatcctaagggaaggagcgctctcctggctgatatccagcagggaacccgcctgcgaaaggtcacccagatcaatgacaggtccgcgccacagattgagagtagcaaaggcaccaataaggaggggggagggtctgctaacacaaggggtgccagtacaccaccaacactgggagacctttttgcgggtggtttccccgtgttgcgccctgctgggcagcgggacgtggctggtggcaagaccggacagggcccaggatcccgtgctccttccccacgactccctaacaaaacgattagtggtccactcatccctccggcttcacccagactcggcaacacctctgaggcacatggcgctgccaggacagcgcctcccagaccgaatgtccccgctcctccacccccaacacctcctccccctccgcctccactgcctccgcctttgccatcctctagcccaatcaagactccactcgtctctccccctggccctctcacaaaagggaatttaccagtggtggccccaccggtgccgtgcgcgcctcccccacctccccctcctccccctccaacaccccctcctctcccccctgcctccgttctaagcgataaagctgtcaaaccccagcttgcaccactgcacctcccgccaattccccctcccttgcctctgcttcccccatgtggttaccctgggcttaaagcggagccagcttcacccgctcaagacgcccaggagccccctgctccccctccgcctttgcctccatacgcctcctgttcacctcgcgctagtctccccgctcctccgctgcccggagttaacagcagcagtgagaccccccctcctctgcccccaaagagcccctcctttcaggcaccccctcagaaagctggagcacaagctctccctgccccaccagcgccacccggttctcagccctttctgcagaagaagaggcacggaaggccaggggctggcggtgggaaactgaatcccccacccgcacctccagcccgttcccctactacggagttaagttctaaatcccagcaggccaccgcctggaccccaacacagcagccgggtgggcagcttcggaatgggtctcttcacattattgacgatttcgagagcaagttcaccttccattctgtcgaagacttcccccctccagatgagtataagccatgccagaaaatttacccaagcaaaatacccaggagtagaacaccaggaccatggctgcaagctgaagccgtgggacagagtagtgacgacataaaggggagaaacagtcaggtcacgcaggctagctgtctttag

SEQ ID NO: 246778 - DNA, 1452 bp, synthetic construct
  misc_feature 1..1452: note = Description of Artificial Sequence: Synthetic coding sequence
  source 1..1452: mol_type = other DNA
atgccggttcctcccccacctcctccgcctctacctccccctcccccaccacttggcgctcctcccccacccccaccaagtgccccacccgtttccactgatacttctagcctcaggcgagcagatcctaaaggtcggagcgctctcctggccgacatccagcagggcacacgcctccgcaaggtgacccagatcaacgaccgcagcgccccacagattgagagcagcaagggaaccaacaaggaggggggaggcagcgccaacaccagaggagcatccacacctccaaccctcggggacctcttcgcgggaggattcccggtcttgagacctgctggccagagagatgtggcgggtggtaagacagggcaggggccagggagcagggcacctagcccccgattacccaacaaaaccatcagtgggcctctgatcccaccggcttcgccacgtttgggaaatacgtctgaggcacacggggctgccagaacagccccacctaggccaaatgtgcccgctccccctccccctacaccccctccaccaccaccacctctgcctccccctcttccctcctcctcacctatcaaaacaccactggtgtcgcctccgggaccccttactaaaggtaacctgcctgtggtggccccacctgtgccatgcgctccaccaccaccgccaccacctccccctccaacacccccacccctgcccccagcaagcgttctgtctgacaaggccgtgaagccccaattggcccctctgcacttgccaccaattccaccaccgctgcccctcctgcccccatgtggttatccaggtttaaaggctgagccggcatcaccggcacaggatgcccaggagcctcctgccccacccccacctcttcccccatacgcctcatgtagccctcgggcttcattgccagccccacccctccctggagtgaacagtagctctgaaaccccacctcccttacctccaaaaagcccctccttccaggcccctcctcagaaggctggcgctcaggcactgcctgcccctcccgctccgcctgggtcccaacctttcctgcaaaagaagaggcatgggagacctggcgctgggggtggtaagttaaaccctccgcctgcacctcccgcacgatctccaaccaccgaactaagctctaagtcccagcaggctaccgcctggacgccgacacagcagcccggaggacaactgagaaatggctcactccatatcatcgatgatttcgagtccaaatttaccttccacagtgtagaagacttccccccaccagacgaatataaaccttgccaaaagatctacccctccaagattccaagatctcgaactcccggaccttggctgcaggccgaggcagtcggccagtccagtgatgacattaaggggaggaattcccaagttacacaggcaagctgtctgtag

SEQ ID NO: 246779 - DNA, 930 bp, synthetic construct
  misc_feature 1..930: note = Description of Artificial Sequence: Synthetic coding sequence
  source 1..930: mol_type = other DNA
atggccgtgaatcaaagtcacaccgaaaacaggcggggtgccctcattccaaacggtgagagcctcttgaagaggagccccaatgttgagctctcattcccccaacgaagcgaggggagcaacgtgttttcagggagaaagacaggcacactattcctgacgagttaccgggtgatcttcataacaagctgctctatcagcgaccccatgctgtcttttatgatgccttttgacctgatgaccaatttgactgtagagcagcccgttttcgctgccaactttattaaaggcaccatccaggctgccccttacggtggttgggaagggcaggctactttcaaattggtttttcgaaatggggacgctatcgaattcgcacagttgatggtaaaggccgctagtgctgccgcaagagggttcccccttagaacgcttaatgattggttcagcagcatggggatttacgtgattacaggcgaagggaacatgtgcacaccacagatgccttgctcagtcattgtgtacggtgcgcctccagccggatatggcgctccccctcccggatatggagcccctccagccggatacggagcacagcctgtggggaatgaaggcccacccgtaggctatcgtgcatcccccgtgaggtatggagcgccacccctaggatatggtgccccaccagccggttacggagctccacctctcgggtacggcgcaccccctctgggttatggcacccctcctcttggttacggcgctcctcctttgggttacggagcacctcccgctggtaacgagggcccacccgcaggctacagggcttcacctgccggttctggtgctcgaccacaagagagtaccgccgcacaggccccagagaatgaggcctctcttccgagtgcgagctcgagtcaggttcactcctag

SEQ ID NO: 246780 - DNA, 930 bp, synthetic construct
  misc_feature 1..930: note = Description of Artificial Sequence: Synthetic coding sequence
  source 1..930: mol_type = other DNA
atggccgttaatcagagtcacacggaaaataggagaggtgccctgatccctaacggagaaagcctactcaagaggtcccccaacgtcgagctgtcctttcctcagcgttccgaaggatccaatgtgttcagcggaagaaagacaggaaccctgttcttaacaagctatagggtgatatttatcaccagttgcagcataagcgaccctatgctgagcttcatgatgccctttgacttgatgacaaatcttacagttgagcagccggtgttcgccgctaactttatcaaaggtactattcaggccgctccatatgggggatgggaagggcaggccaccttcaagttggtattccgtaatggcgatgcaatcgaattcgcgcaattaatggtgaaggcagccagcgccgctgcccgtggcttcccactgcgcactttaaacgactggttctcctctatggggatctatgtcattactggggagggcaacatgtgcacaccacagatgccttgctctgttattgtctacggagcgcctccagccggatatggggcaccaccccctgggtatggcgctcctccagcgggatatggcgctcagcccgtaggtaacgagggacctcctgtgggatatagggccagccctgtcagatatggtgccccacctctcggttatggggcaccgccagccggttacggcgcacctcctctcggctatggggctccaccccttggctatgggacacccccactgggctacggtgctccaccactgggttacggtgccccaccagccggaaacgaaggcccacctgccggttacagggcttcccccgctggaagtggtgccagacctcaggaaagtacggccgctcaggcccctgaaaacgaggcctcgctccccagtgctagctcaagccaggtccattcttag

SEQ ID NO: 246781 - DNA, 930 bp, synthetic construct
  misc_feature 1..930: note = Description of Artificial Sequence: Synthetic coding sequence
  source 1..930: mol_type = other DNA
atggcagtgaaccagagtcatacagaaaacaggcgcggtgccctgatacctaatggagaatcacttctcaagcgttcccctaatgtcgagctctcctttccccagcgtagcgaaggtagtaatgttttttcggggcgaaaaacgggcacacttttcctaacatcttatagggttatttttattacatcctgttccatatccgaccccatgctgtcattcatgatgccatttgacctcatgactaacctcactgtagaacaacctgtttttgctgcaaatttcattaagggaacgatacaagcagccccttatggcggttgggagggccaggcgaccttcaagctggtattcaggaacggtgatgcaatcgaatttgctcagctgatggttaaggccgcttcagcggctgctaggggattcccccttaggactctgaacgattggttttccagcatgggcatttatgtgattactggcgaaggaaacatgtgcacccctcagatgccctgttccgtcatcgtgtacggggctcccccagccggttacggagcccctccgcctggctacggcgctcccccagccggatatggagctcagcctgttgggaatgagggtccaccagtgggataccgtgcatcccccgtaaggtatggcgctccgcctcttggatacggggctccacctgccggatatggggcaccccctctcggttatggtgctcccccactgggctacggaactccccctttaggttacggcgctccccctttggggtatggagcgccaccagcagggaacgaaggcccaccagccggttatcgcgctagtcccgcaggctctggcgctaggcctcaggagtccacagccgctcaggcacccgagaacgaagcctccctcccttccgcctcaagctcccaggtccactcttag

SEQ ID NO: 246782 - DNA, 708 bp, synthetic construct
  misc_feature 1..708: note = Description of Artificial Sequence: Synthetic coding sequence
  source 1..708: mol_type = other DNA
atgccgtttgacttgatgacaaatctgacagtggaacagccagtctttgcggcaaattttattaagggaaccatccaggcagccccttacgggggttgggaaggacaggctaccttcaaactggtgtttaggaatggagacgcgatagagttcgctcagctgatggtcaaagctgcaagtgctgccgcaagggggttccccctacgcacccttaacgattggttctcttcaatgggcatctacgttatcaccggagaaggcaacatgtgtacgccccagatgccctgttctgttattgtctacggagctccacccgctggctatggggctcctccccctgggtacggtgcaccccctgctggatatggcgctcagccagtggggaacgaaggccctcccgtgggctatcgtgctagccccgtgcgctatggtgcaccgcctttggggtatggcgcacccccagccggatacggcgctccacctttaggctatggagctcctccacttgggtacggtactcctccccttggctatggtgcaccccctttgggctacggcgcaccccctgctggcaacgaaggaccccctgccggatatcgggcatcaccagcaggctcaggggcacgcccacaagagtccactgcagctcaagcccctgaaaacgaggcctctctcccttcagccagtagctctcaggtacacagttag

SEQ ID NO: 246783 - DNA, 1401 bp, synthetic construct
  misc_feature 1..1401: note = Description of Artificial Sequence: Synthetic coding sequence
  source 1..1401: mol_type = other DNA
atgccttacgaaataaagaaagtgttcgcatctttgcctcaggtagagagaggggtaagcaaaatcatagggggtgatcccaagggaaacaatttcctctataccaacgggaagtgtgtgatcttgcggaacatagatgaccactcacgctttgtcaactgcgtgaggttcagccctgacggtaatcggtttgcaaccgcctccgccgacgggcaaatttacatctacgacgggaaaaccggcgaaaaggtgtgcgccctggggggatcgaaggcccacgacggtggaatctatgctatttcttggtcaccggactccacccatctcctgtcggccagtggcgacaaaaccagcaagatctgggatgtatctgtgaattcagtggtatccacttttcccatgggctctaccgtcctcgaccagcagctcggttgtctttggcagaaggatcaccttctaagcgtgtccctgagcggctatatcaactatttggacaggaacaatccctccaagccactgcatgtgataaagggccattccaaatccatccagtgccttacagtgcacaagaacggcggtaaatcatacatatattcaggttcacacgatggacacatcaattactgggattcagaaaccggtgaaaatgatagcttcgcagggaaggggcacacaaatcaggtcagccggatgacagtggatgaatctggacagctaatttcatgttccatggacgatacggtgagatatacatctttgatgctacgagattactcagggcaaggggtagtgaagctagatgtacagcccaagtgcgtggccgtgggccctggtggctatgcagtggtggtgtgtattggccaaatcgtgttattaaaagaccagcgcaaatgtttctcaatagacaatcctggttacgagccagaagtagtggctgtgcatccgggaggggacaccgtggctattggcggagtcgatggtaatgtcagattgtacagcatcctgggcactaccctgaaggatgaggggaagttacttgaggcaaagggtcccgtgaccgacgtagcttattctcacgatggcgcttttcttgcagtgtgcgatgcctccaaagtggtcactgtgttctcagttgccgacgggtactctgaaaacaatgtcttttatggtcatcacgccaagatcgtctgcctggcctggtccccggacaatgagcacttcgcaagcggaggcatggacatgatggtctacgtctggactctgtccgaccccgaaacccgagtcaaaatccaggacgcgcaccggttgcaccatgttagttcactcgcctggcttgatgaacataccctcgtcactacctcccatgacgcatctgtgaaggaatggacaatcacatactag

SEQ ID NO: 246784 - DNA, 1821 bp, synthetic construct
  misc_feature 1..1821: note = Description of Artificial Sequence: Synthetic coding sequence
  source 1..1821: mol_type = other DNA
atgccctatgaaatcaagaaagtgttcgcctcactgcctcaggtagagcgcggagtctcgaaaatcattggcggtgatcctaagggcaacaatttcctgtatactaacgggaaatgtgtgatcttaagaaacatagacaatcctgcactcgccgatatttatactgagcatgcccaccaggtggtcgtcgcaaaatacgcccctagtggcttctacattgcctccggagacgtctctggaaaactgaggatctgggataccacacagaaagagcaccttctgaaatacgaataccaaccattcgctggtaaaattaaagacatcgcttggactgaggattctaaacggatagctgtggtcggagaaggtcgggagaaattcggtgctgtgttcctgtgggattctggatcctccgtgggagagatcacagggcataataaggtgatcaatagtgtggatatcaaacagagtcgaccgtatcgcctggcgacggggtctgacgataattgcgccgcttttttcgaaggacccccattcaagttcaaatttactattggagatcactcgcgatttgtaaactgtgtacgattctccccggacggcaataggttcgccaccgctagcgccgacgggcagatctatatctacgatggcaaaacgggagaaaaggtctgtgccctaggtgggtccaaagcccacgacggcggtatatacgctatttcatggtcacccgactcgactcacctgctcagcgcctccggggacaagactagcaaaatatgggacgtctctgtgaattcggtagtcagcaccttccccatgggatctacagtgctcgatcaacagctcgggtgtctgtggcagaaagatcaccttctgtccgtctcactcagcggatatattaactacttagatcggaataatcctagtaaaccgttacacgttataaagggccattccaagtctatccaatgcctaaccgtgcataagaacggcggaaagtcatacatttacagcggtagtcacgacggccacattaattactgggatagtgagaccggtgagaacgatagcttcgcaggcaaagggcacacaaatcaagtctcgaggatgacagttgacgaatcgggacagctcatttcgtgcagtatggatgacaccgtgcgctacacatctctcatgctccgcgattattccgggcagggagtggtgaagctggatgtccagccgaaatgtgttgctgtgggcccaggaggttacgcagtggtagtgtgtatcgggcagatcgtgctgctcaaagaccaaagaaaatgcttcagcatcgacaatcccggatacgagccagaagtggtggcggtccatcccggaggagataccgtggctatcggcggtgtagacggaaacgtgcgcctgtactccattctcggtaccaccctgaaggatgaaggaaaactgctggaagccaaaggtcccgtcactgatgtcgcgtactctcacgatggtgcctttctggctgtctgcgacgcgtccaaagtggtcacagtgttttcagtcgctgacgggtacagtgagaacaacgtattctacgggcatcatgccaaaatcgtgtgtctggcctggagcccggataacgagcactttgcaagtggaggaatggatatgatggtgtatgtgtggacgctgagtgatcctgaaactagggttaaaatccaggacgctcataggttgcaccatgtttcctctttggcatggctggacgagcacactctggttacaacatcacatgacgcctctgtcaaggagtggacaataacttattag

SEQ ID NO: 246785 - DNA, 1326 bp, synthetic construct
  misc_feature 1..1326: note = Description of Artificial Sequence: Synthetic coding sequence
  source 1..1326: mol_type = other DNA
atgttgacatgggtatggtacctcataatgaccagtgttctacaagcaagtgtttccagtgttgatcatagtcgcttcgtcaattgcgtgcgatttagccctgacggtaatagattcgctaccgcttcagccgatggccagatatacatctatgatggcaagaccggggagaaggtgtgcgccctcggcggatctaaggcccacgacggtggaatctatgcaatcagctggagcccagacagcacccatctgttgtctgccagtggcgacaagacctctaagatctgggacgtgtcagtgaattcggtggtctctaccttccctatgggatctaccgtgctggaccagcagctgggctgcttgtggcagaaagaccatctgctttccgtctcactgtctgggtatataaattacctggatagaaacaatccaagtaagccactgcacgttattaaggggcactccaaatctatccagtgccttactgtgcacaagaatgggggaaagtcctacatttactcaggatcgcatgacggacacattaattactgggatagcgaaactggggagaatgatagctttgcaggaaaaggacacaccaatcaggtgtcacgaatgactgtagatgagtctggccagctgatctcctgcagcatggatgacaccgtacgttatacaagtttaatgctgcgggactacagtggacagggcgttgtgaagttagacgtgcagccgaagtgtgttgccgtgggtcccggtggatatgccgtggtcgtttgcataggacagatcgtcctccttaaggaccaacgcaaatgcttttctattgataaccccggttacgaaccggaggttgttgcggtccatcctggcggtgataccgtagctatcgggggtgtggatggtaatgtacggctgtattctatccttgggacgacattaaaggatgagggcaaactgctggaagccaaggggccagtgactgacgtggcgtactcccacgacggtgccttcctggctgtatgcgatgcaagtaaagtcgtgacagttttctcagtggcggatggctacagtgagaataacgtgttttacggccaccacgccaaaatcgtgtgtcttgcttggagccctgataacgagcactttgcaagcggaggaatggatatgatggtttacgtctggacactctcagatcctgaaacccgcgtgaagatccaggacgcacatcggttgcaccacgtctcatctttagcttggctggatgagcatactctagttacaactagtcacgacgccagcgtgaaggagtggactatcacttattag

SEQ ID NO: 246786 - DNA, 531 bp, synthetic construct
  misc_feature 1..531: note = Description of Artificial Sequence: Synthetic coding sequence
  source 1..531: mol_type = other DNA
ccagcagagactgaaaaggtgtttgccagcctccctcaggtggaaagaggagttagtaaaatcattgggggtgaccccaagggaaacaacttcctctacacaaacggaaagtgcgttatactccgaaacatagatgatcattcaagatttgtgaattgcgtgagattctctccggacggcaatagattcgctactgcgtcggctgacggacagtgcctccccgctccggtgacagctcaatcccgacgactacctaacgcttcacccgacatgcagaacttggacattgctcttccaacttctgccgacagttccagtgagccaaagccacagagtatggaaaagctgcctccctggtccgctcatttcccgtgggccccacgtttttggacaagttcttgggctgcctatggacgacgcacaacctgcagtgtgtctccgtgccctggaacatcgaccatctggacagagacaacccccgcaagtccctgtacaagctcacgcgtaaccgtaaaccgcagtagcgtatag

SEQ ID NO: 246787 - DNA, 1821 bp, synthetic construct
  misc_feature 1..1821: note = Description of Artificial Sequence: Synthetic coding sequence
  source 1..1821: mol_type = other DNA
atgccctacgagattaaaaaagtctttgcgtcgctgccgcaagtggagcgcggagttagcaagatcatcggtggggatcctaaggggaacaacttcctgtacaccaacgggaaatgtgtaatcctccgcaacattgacaatccagccttggccgatatttacacagagcacgcacaccaggtggttgtggctaagtacgcgccttccggcttttatatcgccagcggcgatgtatccggaaaactgcgcatatgggatacaacacagaaggagcaccttctcaaatatgagtatcaaccctttgcaggcaagattaaggatatagcctggacggaagacagcaagcgcatagcagtcgtaggagagggcagggagaaatttggggcagtgtttctgtgggactccggctcctcggtcggagaaattactggacacaataaggtcattaactccgttgacattaagcagtccagaccttaccgactggccacggggtctgatgacaattgcgctgctttcttcgaaggcccaccatttaaattcaaatttacgattggggatcattcccggtttgtgaattgtgtgaggttctctcccgatggaaatagattcgctacagcttctgctgatggccagatttacatttacgacgggaagacaggcgaaaaggtgtgtgcgctgggaggctccaaggcacacgacggcggaatttacgccatatcttggtcacctgatagtacccacctgctctccgcctccggagataagaccagcaagatctgggatgttagtgtgaattcagttgtgtcaacctttcctatggggtctaccgttctcgaccagcaactggggtgtctctggcaaaaggaccacctgctttccgtgtccctgtctggttacatcaactatctggacagaaacaacccatctaaaccccttcatgtgatcaaggggcacagcaagtctattcaatgcctaacagtgcataaaaatggcggaaagagctatatctatagtggtagccacgatgggcatattaactactgggattcagagactggcgaaaatgattcattcgctggcaagggacatactaatcaggttagcagaatgaccgtagatgaatccggacaactgatctcctgttctatggacgacactgtgaggtatacatccctgatgctgcgcgattacagcgggcagggagttgtgaaactggacgttcagcccaaatgcgtggccgtgggcccaggcggttacgctgtggtggtgtgtatcggtcagatcgtgctcctgaaagaccagcgaaagtgtttctctattgataatcctgggtacgagcccgaagttgtggccgtgcacccgggtggggatacagtcgcaattgggggagtcgacgggaatgtgcgcttgtattctattcttggcacgacgctgaaagatgaaggcaagctcctggaagccaaagggcctgtgaccgatgtggcctactcccatgatggcgcttttttagccgtctgtgatgcttccaaagtggtgaccgtgttctccgtggccgacggctattctgagaacaacgttttctatgggcaccatgcgaagatcgtgtgtcttgcatggagcccagacaacgaacactttgcgagcgggggtatggatatgatggtatacgtgtggaccttgtccgaccccgagacaagggtcaagatccaggatgcacatcggctgcaccatgtcagctctttggcatggctcgatgaacatactctggtgactacatctcacgacgccagcgtgaaggagtggaccataacatattag

SEQ ID NO: 246788 - DNA, 1401 bp, synthetic construct
  misc_feature 1..1401: note = Description of Artificial Sequence: Synthetic coding sequence
  source 1..1401: mol_type = other DNA
atgccttatgagatcaaaaaagtgttcgccagccttccccaggtggagaggggtgtctcaaagatcatcggcggagaccctaaggggaataattttctctatactaacggtaagtgcgtcatcctgcgaaacattgacgaccacagtaggttcgtgaattgcgtccgcttctcccccgatggtaatcggttcgcaaccgcctctgccgatggccaaatttacatctatgacggcaagacaggggaaaaagtctgtgctctcgggggttccaaagctcacgacggcggtatctacgcaattagttggtcgcctgatagcacgcacctcctctcagcaagcggcgacaaaacatccaaaatttgggacgtaagcgtcaactctgtcgttagcaccttccccatggggtctaccgttctcgaccagcagctgggctgcctttggcagaaagatcatctcttgtccgtctccctctcaggatatatcaattatctggaccgcaacaatccctccaagccgctgcacgtcataaagggccactctaaaagtatacagtgcttgactgtccacaagaatggcggaaagtcgtacatttattctgggtctcatgacggtcatattaactattgggattccgagactggggagaatgatagttttgccggaaagggtcataccaatcaggtatccagaatgactgtcgacgaatccgggcaactgatctcctgcagcatggacgataccgttaggtatacatcactaatgctcagggactactcagggcagggggtcgtgaagctggacgtccaacccaagtgtgttgcggtaggcccaggcggatacgccgtggtggtttgcatcggtcagatcgtgctcctgaaagatcagcggaagtgttttagtatagacaacccagggtacgaacccgaagttgtcgccgtgcacccagggggtgatacggttgcaatcggcggagtcgatggcaacgtgagactttatagtattttgggcacaaccctgaaggacgagggaaaactacttgaggccaaaggtccagttacagacgttgcgtactctcatgacggcgctttcctcgccgtgtgtgatgctagtaaggtcgttaccgtcttcagcgtcgccgacggctactcagagaacaacgtcttctacggacatcacgccaagattgtgtgtctggcatggtctccggataatgaacactttgcctctgggggtatggatatgatggtctatgtttggacgctgtctgaccctgagacgagagttaaaattcaggacgcccacagattgcaccatgtgtcttcattagcttggttagacgagcacacattagtcacgacatcacacgacgcaagcgtgaaggagtggaccattacttactag

SEQ ID NO: 246789 - DNA, 3675 bp, synthetic construct
  misc_feature 1..3675: note = Description of Artificial Sequence: Synthetic coding sequence
  source 1..3675: mol_type = other DNA
atgttgccttataccgtcaactttaaagttagcgccagaaccctgactggggcacttaacgcacataacaaagcagcagtggactggggttggcagggtctcattgcatatggctgtcactcgctggtcgtagtcattgattccatcactgcccagactctgcaagtcttggaaaagcacaaagctgatgtggttaaggtgaagtgggctagagagaattaccaccacaatatcggttccccctactgtctcagactggcatctgctgacgtgaatggaaaaatcatcgtttgggatgtagccgctggtgttgcccagtgcgagattcaggagcacgcgaagccaatccaagatgtgcagtggctgtggaatcaggatgccagccgtgacctcctcctagccatccacccgccaaattacattgtgttgtggaacgctgacacaggcactaaactatggaaaaaatcctatgccgacaacattctttccttttctttcgacccctttgacccatcacatctcacgctcctgacttcggaagggattgtgttcatctcagacttcagcccttctaagcctccgtctggtccaggaaaaaaagtctacatctcttcgcctcattcatcacctgctcacaataagctggcgaccgccaccggtgcaaagaaggcactaaataaggtgaagattctgatcacgcaggagaaacctagcgctgagttcatcaccttgaacgattgcttacaactcgcatatctgccgtctaagaggaatcatatgcttctgttatacccacgagaaatcctcatcctggatttggaagtaaatcagactgtgggggtcatcgcgatcgaacgcaccggggtgcccttcctgcaggtgatcccgtgtttccaacgggatggcttattctgtctgcatgagaacggatgcataaccttgcgggtgaggcggtcctacaacaacatcttcactacatccaatgaagaacccgatcctgaccctgtccaagaactcacctatgatttacgctcccagtgtgacgctattcgcgtgacgaagaccgtgaggccgtttagcatggtttgctgccctgtcaacgaaaacgcggcagccctggtggtgtccgacggtcgcgtcatgatatgggaactcaagagtgccgtctgtaaccggaactcccggaattccagcagcggtgtttcccctttatactcacctgtgtcattttgcgggataccagttggtgtgctgcaaaataagctgccagatctatcattggataacatgatcggacaaagcgctatcgcaggagaagagcatccacgtgggagcatccttcgggaagtacacctaaagttcctgttaaccggcctgctgtccggattgcccgcaccccagttcgccattaggatgtgtccccctcttaccacaaaaaatatcaagatgtaccagccgttgctggctgttgggacctctaacggcagtgtgctggtgtatcacctaacctccggtctgctccataaagaactctccattcatagttgcgaggtgaaggggattgagtggacgtcgctgacatcattcctctcattcgctacctcaactccaaacaatatgggactggtgcgcaacgagctccagctggtggatctgccaacaggaaggagcatagctttccgcggagaaaggggtaacgatgaaagtgccatcgaaatgatcaaagtgtcacatttaaaacagtatctcgcagtggtgtttcgcgataagcctctagagctgtgggacgtgcgtacgtgtacgcttctaagggagatgagcaaaaatttccccacaatcactgctctagagtggagcccaagtcacaatcttaaatcgctcagaaagaaacaattagcgacccgggaggccatggcacggcagaccgtcgtgtccgatacagaactcagcattgtggaatcttctgtaataagtttgttgcaagaagcagaaagcaagtcagagttatcccaaaacatttctgccagggagcactttgtgttcactgatattgacgggcaggtgtaccaccttacagtggagggtaatagcgtcaaagattctgcccgaattcccccagatggatctatgggttctattacttgcatcgcatggaagggggacaccctcgtgttgggcgacatggatggaaatctcaatttctgggaccttaaaggacgcgtctcccggggtataccaacacataggtcttgggtgaggaagattcgattcgcccctggcaaaggaaatcagaaactgattgctatgtacaatgacggcgctgaggtttgggatacgaaggaagtacagatggttagctccctgagatcgggtaggaatgtgacatttaggattcttgatgtggactggtgcaccagcgataaggtgattctagcatcagatgatggctgtattcgggtgttagagatgtctatgaagagtgcctgtttcagaatggatgaacaggagttgaccgagccagtgtggtgcccatatttgctggtgccaagggcatccctcgccttgaaggcatttttgttgcaccagccctggaatggacaatacagtttggacatttcccacgtggactatccagagaatgaggagattaagaatctgctgcaggagcagctaaacagcctctcaaacgacataaaaaagctgctgctcgatcccgagtttactctgcttcagcggtgtctgctggtgtctcgcctctacggggacgagtctgagctccatttctggacagtcgcagcccattacctgcatagtctgtcccaagaaaagtccgcctctacgaccgctcccaaggaagccgctcctcgcgacaaactctcaaacccacttgacatctgctatgatgttctgtgtgaaaatgcctactttcagaagttccagctggagcgggtaaacctccaggaggtcaaacgatcaacttacgatcacactcgaaagtgtacggatcaattattgttgcttggccagacagatagagcagtccagctgctgctcgagactagtgctgataaccaacactattactgcgattcacttaaggcttgcctggtgactactgtcacctcttcagggccttctcaaagtaccatcaagttggtcgccactaacatgatagctaatggtaaattagcagaaggagtgcagctgctctgcctgattgataaagccgctgacgcatgcagatacctccagacctacggcgaatggaatcgggctgcctggctggcaaaggtgcgcttaaaccccgaagagtgtgccgacgtcctgcgcagatgggtggatcatctctgtagcccccaggtcaatcaaaaaagtaaggcattgctggtgcttctaagcctgggctgcttcttcagcgtcgccgagacactgcattccatgcgttattttgaccgggcagccctgtttgttgaggcttgcctgaaatatggagcgttcgaggtcaccgaagatacggagaaattaattaccgcaatctatgctgattacgccaggtcgctgaagaatcttgggttcaagcaaggtgcggtgctgtttgccagtaaagcaggggcagccggaaaggacctactgaatgagttggagtctccaaaggaagagccgatcgaagagtag

SEQ ID NO: 246790 - DNA, 1371 bp, synthetic construct
  misc_feature 1..1371: note = Description of Artificial Sequence: Synthetic coding sequence
  source 1..1371: mol_type = other DNA
atgcgcaaaaagtggaagatgggcggtatgaagtacatcttcagtcttttgttttttctgctcttagagggaggcaaaacagagcaggttaaacactcagaaacctactgtatgtttcaggacaaaaaataccgtgtcggagagaggtggcacccgtacctggagccctatggcttagtctattgcgttaattgtatatgttctgaaaacggtaacgttttgtgtagtagagtcaggtgccccaacgtacattgtctttcacctgtgcatatcccccatttatgctgcccgcgttgtcccgactctctcccacccgtaaataataaggtcaccagcaagagttgcgaatacaatgggaccacctaccaacatggcgaactcttcgtagcagaaggtctgtttcagaaccgccagccaaaccaatgtactcaatgtagttgctcggagggcaacgtctattgcggcctgaagacttgtccaaagctaacttgtgcatttcccgtatccgttcccgattcgtgttgtagggtgtgtaggggcgacggcgagctgtcttgggaacatagcgacggggatatctttagacaaccagctaatagggaagctagacacagttatcaccggagccactacgatcccccaccctctaggcaggcagggggtctttcaagatttcctggtgctcggtctcacaggggcgctctgatggactcccagcaagcaagcggtaccattgttcaaattgtgatcaacaacaagcataaacatggccaggtgtgcgtgtccaacgggaaaacatattcccacggcgaatcctggcatcccaacctgcgagcctttggcatcgtggagtgcgtattgtgcacttgtaatgttaccaagcaggagtgcaaaaaaatccactgtcccaacagatacccgtgtaagtatccccagaaaattgatggcaagtgttgcaaagtttgtccaggcaaaaaagcgaaggagcttcccggacagtctttcgacaataagggctacttctgtggagaggaaacaatgcccgtttacgaaagtgtatttatggaagacggcgagacaacaaggaaaatcgctctggaaacagaacgtccacctcaggtcgaagtgcacgtatggactataagaaaaggcatcctccagcatttccacattgaaaagatatccaagcggatgtttgaggagctcccccacttcaagctcgtcaccaggactacactgtcacagtggaagatctttaccgaaggggaggctcagataagccagatgtgttcgagcagggtctgtcgcacagaactcgaagatctggtgaaggtgctgtacctcgagagatcggaaaaagggcactgctag

SEQ ID NO: 246791 - DNA, 1458 bp, synthetic construct
  misc_feature 1..1458: note = Description of Artificial Sequence: Synthetic coding sequence
  source 1..1458: mol_type = other DNA
atggctgccgtgtggcagcaggtcctggctgtcgacgccaggtataacgcctatcggacccctaccttccctcagttcagaacgcagtacattcggagacgatcacagctgcttcgcgagaacgccaaggccggacacccccctgcactccggagacaatatcttaggctgagggggcagcttcttggccagcgctacggccctttgtcagagccaggaagcgctcgcgcatactctaacagtattgtgcgttcgagtaggacaaccctcgacagaatggaagatttcgaggatgaccccagggctctgggagcccgagggcacaggagatccgttagtaggggaagctaccaactgcaggcacaaatgaatagagccgtgtacgaagacaggcctccaggaagtgtcgtcccgactagcgcagcagaggcttccagagcgatggctggcgacacaagcctttcggaaaattacgccttcgctggaatgtaccacgtgtttgaccagcatgttgacgaagctgtgcccagggtcagatttgcaaacgacgaccggcaccgcttggcctgctgctctctagacgggtctatatccctgtgtcagttggttccagccccacctaccgtcttgagggtgctgagagggcacaccagaggagtgtccgactttgcatggtctctgagcaatgacatcttggtgtcaacgagcctggacgccaccatgagaatttgggcctctgaagatggaaggtgcattcgcgagataccagacccggacagcgctgagctgttgtgttgcaccttccaaccagtaaataataacttgactgttgtgggtaacgctaagcataacgttcacgtaatgaacatcagcaccgggaagaaagtgaagggaggctcttcaaaattaactggcagggtcttggcactgtccttcgacgcaccagggaggctcctgtgggcgggtgatgaccacggctccgtgttttccttcctgtttgatatggccaccggcaaacttaccaaggcaaagcggttggtggtacacgagggctcacctgtgacatctatatcagcgagatcttgggtatctagagaagcacgtgatccttcgctgcttattaacgcatgtctgaataaactcctcctgtatcgggtagtcgataacgaaggaacactgcagttgaagcgctcctttccaatcgagcagtcctcccacccggtgagaagtatcttttgtcctcttatgagcttcaggcagggagcatgcgtcgtcacaggatccgaggacatgtgtgtgcatttctttgacgtagagcgcgctgcaaaggcagctgtcaacaagctgcaggggcacagtgcgccagttttagatgtatcattcaactgtgacgaaagtcttctggcatcttccgatgctagcggcatggtgatcgtgtggcgccgagaacaaaagtag

SEQ ID NO: 246792 - DNA, 1893 bp, synthetic construct
  misc_feature 1..1893: note = Description of Artificial Sequence: Synthetic coding sequence
  source 1..1893: mol_type = other DNA
atggaagcagtggtgctgccgtggcagatctttggagtgagagaactgcctgtggaaagaggtgtgacgatgaaaggacccaggctgtttcgcgcaccaggccacgtacccactggcctgaagtgccaccctgaccaggaacacatgatataccccctcggctgtacagtactcatccaggccataaacaccaaagagcagaacttcctgcagggtcacggcaataacgtttcctgtcttgcaattagtcggtccggcgagtacattgccagcggccaggtcacgttcatgggctttaaagccgatatcattctgtgggattacaagaacagggagctcttagccagactgtccctgcacaaaggcaaaatcgaggcactagccttctcccctaatgacctctacctcgtgtcactggggggtcccgacgacgggtctgtggtggtttggagtatcgcaaagagggacgccatatgcggctccccagcggcaggcttgaacgtgggcaatgcaactaacgtgatcttttcccggtgtagggacgagatgttcatgaccgccggtaacggaaccatccgggtgtgggagctggatctgcccaatcggaagatttggcccacagaatgtcaaactggccagctgaaacgcatcgtcatgtccattggcgtggatgacgacgatagcttcttctacttaggcactactacaggtgacattctgaaaatgaatcccagaacaaaactgctgactgatgtcggtccagcaaaagacaagtttagcctgggcgtcagcgctattaggtgcctcaagatggggggactattggtcggctctggcgctggactcctggttttttgcaaatctcccggttataagccaatcaagaagatccagctgcaagggggaatcacctccatcactttgcgaggggaagggcaccagtttttagtgggcaccgaggagtctcatatctatcgtgtcagctttactgacttcaaggaaaccctgatcgccacttgtcacttcgacgcagtggaagacattgttttcccattcgggacagctgaattattcgctacctgcgcaaagaaggatatccgcgtgtggcacacctcatccaacagggagttgctgcgtataaccgtgccaaacatgacttgccacggcattgactttatgagagatggcaagagcatcatctctgcgtggaacgatggcaagattagggcctttgcgcctgaaactggcaggctgatgtatgttatcaataacgctcaccgcattggggtgaccgccatcgctacgacttccgactgtaagagggttatatccggagggggagaaggcgaagtgcgcgtgtggcagattggctgccaaactcagaagttagaggaggcactcaaggagcacaaatcctctgtctcatgtatcagggttaagcggaataacgaggaatgcgttacagcaagtacagatgggacatgcattatctgggacttagtgcggctgagacgcaaccagatgattctggcaaacacgttattccagtgcgtttgctaccaccccgaggagtttcagataattaccagcggcactgacaggaagattgcttactgggaggtattcgatggcactgtgattcgcgagctggaagggtccctctctggttctatcaatgggatggatattacgcaagaaggagtgcacttcgtgaccggagggaatgaccaccttgtgaaggtttgggattacaatgagggtgaggttacccatgtcggggtggggcactctgggaatatcactagaatacgcattagcccaggtaatcagtatatagtttccgtgagtgcggacggcgctatacttaggtggaagtatccttacactagctag

SEQ ID NO: 246793 - DNA, 1863 bp, synthetic construct
  misc_feature 1..1863: note = Description of Artificial Sequence: Synthetic coding sequence
  source 1..1863: mol_type = other DNA
atggataacaagatatcaccagaggcccaggtggcagaattagagttagatgctgttatcggcttcaatggccatgtgcctactggcctgaaatgtcaccccgaccaggagcacatgatttatccattaggctgcacagtgctgatacaggctatcaataccaaggaacagaattttttacaaggccatgggaataacgtgagttgcctggctatcagtcggtccggcgagtatattgcgtctggccaggttacgtttatggggtttaaggcagatatcattctgtgggattacaaaaaccgcgagctcctggccaggctgtccctccacaaggggaagatagaagccctggctttctcaccgaacgatttgtatttggtgtccctcggaggtcccgacgacggatccgtcgtggtttggtctatagcaaagcgagatgctatctgtggctcacccgcagcaggtctcaacgtaggcaacgccactaatgtcattttcagtagatgtagagatgagatgttcatgacagctggcaacggcactataagggtctgggagctggacctgccaaatcgcaaaatttggcccactgagtgccagacaggtcaacttaaaagaattgtgatgagcatcggcgttgatgatgacgatagtttcttctatctgggaaccaccaccggtgacatcctcaaaatgaacccaagaactaagctgctaaccgacgtggggccagctaaggacaagttttccctgggcgtatcagctatccggtgtctgaagatgggaggactattagtcggaagtggagcaggactgctggtgttttgtaagtctccgggatataagccaattaagaaaatccagctgcagggcggtattacctccattaccctaaggggggaaggacaccagtttttagtgggcacagaggagagccatatctaccgcgtttcctttactgacttcaaagagaccttgatcgccacttgtcattttgacgcagtggaggatattgtgttcccatttggaactgcggaactgtttgcaacgtgcgctaagaaagatatcagagtgtggcacacatcatccaatcgtgaattgctgcgcatcacagtgccaaatatgacgtgccacggcatcgattttatgcgtgatggtaagtctattatctccgcctggaacgatggaaagatacgcgcatttgccccagagactggtcgcttaatgtacgttatcaacaacgctcacaggatcggcgtaactgccatcgcaaccaccagcgactgtaagagggttataagcgggggaggagaaggcgaggtccgcgtgtggcagatcggatgtcagacccaaaagctggaggaagctctgaaagagcataaatcctctgtgtcatgcattagggtcaagcggaacaacgaggagtgcgttaccgccagcaccgacggcacgtgcatcatttgggacctagtcaggctgaggcggaaccagatgatccttgctaatacattgttccagtgcgtctgctatcacccagaagagttccaaatcattacgagcggcaccgatcgcaagatcgcctactgggaagtctttgacggcaccgtaatacgagagctggaggggtccctgagcggctctattaacggcatggacattactcaggagggtgttcacttcgtgaccggaggcaatgatcatctggtgaaggtctgggattacaatgagggggaggtgactcatgtgggagtggggcattcaggcaatattactcggattaggataagccccggaaaccaatacatcgtcagtgtgagcgcagatggggcaattcttcggtggaaatacccctacacaagttag

SEQ ID NO: 246794 - DNA, 1659 bp, synthetic construct
  misc_feature 1..1659: note = Description of Artificial Sequence: Synthetic coding sequence
  source 1..1659: mol_type = other DNA
atggataacaagatctcccctgaggctcaagtcgcagaactcgagctagacgctgtgatcggttttaacgacattattctttgggattataagaatagggagctactcgcccgactgagtttacacaaaggtaaaattgaggctctcgcctttagtcctaacgatctgtatttagtcagcttaggtggtcctgatgatggctctgtggttgtgtggagcatcgccaagagggacgccatctgcggcagtcccgctgctggcctgaacgtgggaaacgccacaaatgtgatctttagtcgttgtagggacgagatgttcatgaccgccggaaacggtaccatccgtgtctgggaacttgatttaccaaaccgcaagatctggcccacagagtgccagaccggacagctgaaacgtatcgtgatgagcattggggtcgatgacgacgattcctttttctacttggggaccactactggagacatcctcaaaatgaaccctcggaccaaattgctgacggatgttggaccagcgaaagataagttctctctgggcgtgagcgccatccgatgccttaagatggggggtcttctcgtcggctccggggcaggtcttctggttttttgtaaaagtcctggctacaaacccatcaaaaagatccagcttcaggggggtattacctcaataaccctgaggggcgaggggcaccagttcttggtcggcacagaagagtcccacatatatagggtaagcttcactgatttcaaagaaaccctcatcgctacctgccactttgatgctgtagaggacatagtctttcccttcggaaccgccgagctgttcgctacttgcgccaagaaggacatccgggtgtggcacactagctcaaatagggagttattgagaatcaccgtgccaaatatgacctgtcatggaatagattttatgcgcgatgggaagtcgattatcagtgcatggaacgacggcaaaatcagagccttcgcccctgaaacggggagactcatgtatgtcattaataacgcgcataggatcggcgtcacagccattgcgacaacctctgattgtaagcgcgttatatccggcggaggtgagggggaggttagagtctggcagattggatgtcagactcaaaagcttgaagaagcactgaaagaacacaagtcttcagtgtcttgtatccgcgtcaaacggaacaacgaggagtgtgtcactgcttctaccgatgggacatgcatcatctgggacttggtgaggctgcggagaaaccagatgatcctggccaatacactctttcagtgtgtgtgctatcacccagaggagttccagatcattacctccgggactgataggaaaattgcctattgggaggtctttgatggtacagtgatccgtgagctggagggatcgctcagcggaagcatcaacgggatggacataacgcaggaaggggttcactttgtcacagggggtaatgatcacttggtgaaggtttgggactataatgagggggaggtaacccatgtgggtgtgggccactctggcaatataacaagaataaggattagcccgggtaaccagtatattgtgtcggttagtgctgatggagctatcttgagatggaagtatccctatactagttag

SEQ ID NO: 246795 - DNA, 3969 bp, synthetic construct
  misc_feature 1..3969: note = Description of Artificial Sequence: Synthetic coding sequence
  source 1..3969: mol_type = other DNA
atggcttggatgacatacatctctaactggtttgagcaagacgactggtatgaaggcctccagagagctaatatgagccaggtcagacaagtgggcctcctcgccgcaggctgtcagccttggaataaggacgtgtgcgctgcaagcggagacagatttgcgtactgtgcaaccttagctatctacatctaccagctggatcatcgatataacgagttcaaactgcatgcaatcatgagtgaacacaagaagaccattaccgccatcagttggtgcccacataatcctgatctctttgcatcagggtcaaccgacaatcttgtcataatctggaatgtcgccgagcaaaaggtcatcgccaaactagattcaaccaaaggaatccctgcctccttaagttggtgttggaacgcggaggacgtggtggcctttgtgtcgcatcggggtcctcttttcatttggaccatctctggccctgattcaggggtgattgtacataaggatgcacacagtttcttgagtgatatatgtatgttccgatggcacacgcaccagaagggaaaagtggtctttggccatatcgatggcagcctctccattttccaccctgggaataagaatcagaaacatgttctgcgaccggagtcgctggagggcactgatgaagaagatcctgtcaccgctctggagtgggacccactcagtaccgattatcttctggtcgtgaatttgcattacggcatcaggctcgtggacagtgagagcctgtcctgtattaccacctttaacctccctagcgcggctgcctcagttcagtgtttggcttgggtgcctagcgctccaggtatgttcatcaccggcgactcccaggtcggagtcttaagaatatggaatgtatctcggactacaccgatagataacctgaagcttaagaaaaccggctttcattgcctccacgtgttaaactcacctccacgcaaaaaattctcagtgcagtcacccacaaagaaccattatactagctctactagcgaggccgtcccaccgcctactctgacccaaaatcaggctttcagcttgcctcctggccatgcagtgtgttgcttcctggatggtggcgtggggctctatgacatgggggctaaaaaatgggactttctgagagacctggggcatgtcgaaacaattttcgattgcaagttcaagccagatgacccaaacttgcttgctacagctagttttgatggcaccataaaagtctgggatatcaacactctgaccgctgtttacacttcccctggcaacgaaggcgtcatctactcattatcctgggcaccgggaggccttaactgcattgccggaggcaccagtaggaatggtgcatttatctggaatgtgcaaaagggtaaaatcatccagcggttcaacgagcacgggaccaacggaatcttctgtattgcctggagtcacaaagatagcaagaggatcgccacttgttcctcggatggattctgcattatacgcactatcgacggcaaagtactgcataaatataaacatcccgctgcagtgtttggttgcgactggtcccagaacaataaggacatgattgccactgggtgcgaagacactaatgtgagagtttattacgtcgccacaagtagtgatcagcctcttaaagttttttctggccatacagccaaagtgttccacgtcaagtggtctcctctgcgcgagggaattctctgtagcgggagcgacgatggtactgtgaggatttgggactatacacaagatgcgtgcatcaatatcctgaacggccataccgcgcctgttcgcggtttgatgtggaacacagagattccgtacctgctgatctcgggcagttgggattataccattaaggtgtgggatactcgggagggtacatgtgttgacacagtgtacgatcacggagctgacgtgtatgggttgacttgccaccccagtagacccttcaccatggcaagctgctcacgcgactctacagtcagactctggagtttaactgccctggttaccccggtccagattaacatcctcgccgatcgctcatgggaggagattattggaaatacagattacgcaattgagcctggtacacctcccttactctgcggtaaagtgtctcgcgacatcaggcaggagatcgagaagctgacggccaattctcaagtaaaaaagctacgctggttctccgagtgcttatctcctcccggaggatctgataacctttggaatctggtggcggtcataaagggtcaagacgattctttactgccacagaattattgcaaaggcatcatgcatctcaagcacctgattaagttcagaacctctgaggcccaagagttaaccactgttaagatgagcaaattcggagggggtatcggcgtgccagctaaagaagagagacttaaggaagctgccgaaattcacctccgcttaggccagattcagcggtactgtgaactcatggtggagctgggtgagtgggataaggcactttccattgctccaggagtttccgtgaaatactggaagaagctcatgcagagaagggccgatcagctgattcaggaagataaggacgacgtcataccttactgcatcgccattggggatgttaagaagcttgtgcatttcttcatgtcgaggggtcaactgaaagaagctctgttggtggcacaagccgcttgtgaagggaacatgcagcccctccacgtatctgtgcccaaaggcgcttcttactctgacgacatttacaaagaagactttaacgagctcctgcataaggttagtaaggagctcgccgagtggtactttcaggacggtcgagcagtgttggctgcctgctgccacctggccatcgacaacatcgaattggcaatggcctatctgatcaggggcaacgagctcgagctggctgtgtgcgtaggtaccgttcttggggagagcgcagcccctgctacccactatgctctggaactgttggctcgaaagtgtatgatgatcagtgtatgtttcccatgtgtaggctactcagtgcctttctgctatgtgaaccgaaatctggctgctgacttgctactaatgattccagacaatgagttgcatctcataaagctatgtgcgttttatccgggttgcacagaagaaatcaacgatttgcacgataagtgcaagctgccaactgttgaggagtgcatgcagctggccgaaaccgcacgtgccgatgacaacatttttgagacagtcaagtattatctgctgtctcaggaacctgagaaggcactacctatcggcatctccttcgtgaaggagtacatatccagctcagactggactttggacacaatttacccggtcctcgatctcctgagttatatcaggacagaaaagctgctccttcacacctgtaccgaagctagaaatgagttgctaatcctctgtggctacattggagccctgctcgcgattagacgccagtaccaatccattgtgccagccctgtacgaatacacatcccagctgctcaaaaggagagaggtcagtgtgcccctgaagatcgagtatctcagcgaggagctggacgcatggagagcatgcacccagtcgactaaccgcagcctggaggacagtccctatacgcccccaagcgatagccagagaatgatttacgcaacactgctcaaaaggcttaaggaggaatcgctcaaaggaataatcggccctgattatgtaacgggctcaaacttgccatcgcattccgacatccacatatcctgtcttaccggactgaaaatacagggtcccgtcttcttcctagaggacggaaaatccgccattagcctaaacgacgctcttatgtgggccaaagtcaaccctttttcccctctcgggacagggatccgactgaacccattctag

SEQ ID NO: 246796 - DNA, 393 bp, synthetic construct
  misc_feature 1..393: note = Description of Artificial Sequence: Synthetic coding sequence
  source 1..393: mol_type = other DNA
atgtcccaggtccgtcaggtcgggttgctcgctgccggatgtcagccatggaacaaggatgtgtgcgctgcttcgggagacagatttgcatactgcgccacactcgcgatctatatctatcagctggaccaccgatataacgagtttaaactccacgcgattatgagtgaacataagaagactatcaccgctatctcttggtgccctcacaaccccgacctcttcgcgagcggctctaccgataatctggtgatcatttggaatgtagcggaacaaaaggtgatcgcgaagctggatagggccaggcccccttccccaaaaataatctacattaagatcatcaatattatcgaagaaaacatccataatagtgaaatgcagtggatcatctag

SEQ ID NO: 246797 - DNA, 3897 bp, synthetic construct
  misc_feature 1..3897: note = Description of Artificial Sequence: Synthetic coding sequence
  source 1..3897: mol_type = other DNA
atgagccaggtgcgacaggtaggcctgctggccgcaggatgtcagccatggaataaggacgtgtgtgccgcatcaggcgaccgattcgcttactgcgcaacccttgctatctacatttatcagttggaccacagatataatgaattcaaattgcatgccatcatgtccgaacacaagaaaacaatcaccgccatctcgtggtgtccccacaatccagatctgtttgccagtggctccactgacaacctagtgataatatggaatgtggctgagcagaaggtgattgcgaagctggactcaaccaagggaatccctgcgtcgttgagttggtgctggaatgctgaggatgtggtggcatttgtgagtcaccggggaccactgttcatctggacgatctcaggacctgattccggtgtcatcgttcacaaagatgcccactcatttctgagcgacatttgtatgttcagatggcatactcaccagaaaggcaaggtggtattcggccacatcgatggctccttgagtatttttcacccaggcaacaaaaaccagaagcacgtcttaaggcctgagtcactagagggaacggacgaggaagatcccgtcaccgccctcgaatgggatcctctgtctactgactatctgcttgtggtgaacctccactatggaattagattggtggactccgagtctctgtcttgcatcacaaccttcaacctgccaagcgcagccgctagtgtccagtgtttggcctgggtcccttctgctcccggaatgtttatcaccggcgattcccaggtgggtgtgttgcgaatctggaatgtcagtagaactactccaatagacaacctcaagctcaagaaaacaggcttccactgcttgcacgtgctgaacagtcccccacgaaaaaaattctccgtgcagtctccgaccaagaaccactacacctcatctacctccgaagccgtgccacctcctacccttactcagaaccaggcattttctttgcctcccggtcatgcagtgtgctgttttctagatggcggtgtgggattgtatgatatgggagctaaaaaatgggacttcctaagggacctgggccatgtggaaaccattttcgactgtaaatttaaaccagatgaccccaaccttttagccacagcttcattcgacggcaccatcaaggtgtgggatatcaacactttgaccgccgtatacacctctcctggcaacgagggggtgatttacagcttgagctgggcaccgggaggcctgaactgcattgcaggcggtactagtcgcaatggtgcttttatctggaatgtgcagaaggggaaaatcatccaaaggtttaatgagcacggaaccaatggcatcttttgcattgcttggtctcataaggactccaaacggattgcaacctgctcttctgatggtttctgcatcatcagaacgatagacggaaaagtcttacataagtacaaacatcccgcagcagtttttgggtgtgactggagtcagaacaacaaggacatgattgcaaccggatgcgaagatacaaatgtccgagtgtattatgtggctacctcatcggaccaaccgctcaaagtgttcagcggccacaccgcaaaagtgtttcacgtgaagtggtctcccctgcgggaaggtattctgtgttcaggctcggacgatggtaccgtgcggatctgggattatacgcaagatgcatgcattaacattctgaacggtcacaccgcgccagtgcggggactgatgtggaacacagaaataccgtatctgctcatctcaggcagctgggattacactattaaagtctgggatactcgtgagggcacctgcgtcgatacagtctatgaccatggggcagatgtttatggtctcacctgccatccatcaagacccttcaccatggcttcatgctccagggactctactgtgcgcttgtggtcactgaccgccctggtgaccccggtccagattaacatcctggcggatcgatcttgggaagaaatcattggcaacaccgactacgccatcgaaccgggtacgccacccctcctctgcgggaaggtaagccgtgatatcagacaggaaatcgagaaactgactgctaattcccaggtgaagaagttgcggtggtttagtgagtgcctgagtccaccaggcggatcagacaatttatggaacctggttgcagtcattaagggacaggatgactccctgttaccccagaactattgcaaagggattatgcatctcaagcaccttatcaaattcagaacgagcgaggctcaagagctgactacggtgaagatgagtaagttcggcggaggtataggcgtaccggctaaagaagagaggttgaaggaggccgctgagatccatctgcggttgggccaaatccagaggtattgtgagctcatggtggaactcggggagtgggacaaggccttgtccattgcgccaggtgtctctgtgaagtattggaagaagctgatgcagcgacgtgctgaccaactgatccaagaagacaaggacgacgtgatcccatattgcatagcaataggcgacgttaagaaactggtgcactttttcatgagcagggggcagttaaaggaggccctcctcgtcgctcaggccgcttgcgagggcaacatgcagccattgcatgtgagcgtgcccaagggtgccagctattccgatgacatttacaaggaagatttcaacgagctgctccataaggtgtcaaaggaactggctgagtggtattttcaagacggcagagcggtcttggccgcatgctgtcatctcgcaatcgacaacattgaactagccatggcatacttgatccgcggaaatgaactggagcttgccgtttgcgtgggcaccgttttgggtgaaagcgcagcgccagctacacattacgccctggagttactcgccagaaagtgtatgatgatttcagtttgcttcccctgtgtgggatattccgtgccattttgttatgttaaccgaaacctggctgccgatctcctcctgatgatccctgataacgagctgcacctgattaagctgtgtgccttctatcccggttgcactgaggaaatcaatgacctgcacgacaagtgcaagctgcctacagtggaggaatgcatgcagctggccgaaacagctcgggctgatgataatatcttcgagacagtgaaatattacctcctgagccaggagcctgaaaaagccctccccatcggcatctccttcgtgaaggaatacatcagcagtagtgactggactctggataccatttatcctgtgctggatttgcttagctacatccgtaccgagaagttgctgttgcacacatgtactgaggcacggaatgaactgctcatcctgtgcggttatataggtgctctgctcgccatccgacgccagtaccagtctatagtccctgcactgtacgagtacaccagccaactcctaaaacgccgagaggtgagtgtgcctttaaagatagaatacctttccgaagaattggacgcttggagggcctgtactcagtcaacaaacaggagcctggaagactctccatataccccaccaagcgactcccaacgtatgatttatgctacattactgaaacgcctgaaagaggaaagtttaaagggcatcatcggacccgattacgtaacaggctccaatcttccatctcacagcgatatacatataagctgtctgacgggattgaaaatacaaggcccagtgttcttcctcgaagatgggaagagcgcaatctctcttaatgatgctctgatgtgggcaaaggttaaccccttttcccctctgggcacaggtatcagactaaatccattctag

SEQ ID NO: 246798 - DNA, 3852 bp, synthetic construct
  misc_feature 1..3852: note = Description of Artificial Sequence: Synthetic coding sequence
  source 1..3852: mol_type = other DNA
atgtctcaggtgaggcaggtgggcctgttggccgctgggtgtcaaccctggaacaaggacgtgtgtgctgcctccggggatcggtttgcttactgtgctacactggctatttacatctatcaactcgatcatcgctataatgagttcaagctgcacgccattatgtcggaacacaagaagacaatcactgcaattagctggtgcccccacaaccctgatctgtttgcctcgggttccactgataatctcgtaattatttggaacgtggcagaacagaaggtgattgctaaactggactctacgaaaggcatcccagccagtctatcatggtgctggaatgcagaggacgtggtggcattcgtgtcgcaccgcggaccactgtttatttggactatttctgggccagattccggggtgatcgtgcataaagacgcgcattcattcctcagtgatatttgcatgttcaggtggcatacccatcagaaaggcaaagtggtctttggccatattgatggcagcctgagtatcttccatccaggcaataaaaatcaaaagcacgtcctccgacctgaaagcctcgagggtacagatgaagaagacccagtgaccgcactggaatgggatcctctgtcaactgattatcttctcgtggttaacctccactacgggattcggttggtggattcagagtcactgagctgcatcactacattcaatcttccctcggccgcagcctcggtgcagtgtctggcctgggttcccagcgccccaggcatgttcatcacaggggactctcaagttggcgtcctgcggatctggaacgtgtcgcgtaccactcccatcgataatctcaaactcaaaaagacgggcttccactgcctccatgtgctcaactccccgcctcggaagaaattctctgttcagtccccaacgaagaatcattacacctcctcaacaagcgaagccgtgccccctccgacgcttacacagaaccaagctttttcccttcctccaggacatgcggtgtgttgcttccttgatgggggagtcggtctgtatgacatgggggctaagaagtgggactttctgcgtgacttggggcatgtcgagacaatcttcgactgcaaatttaaaccagacgaccctaacctcctggctacagcatcatttgatggcaccatcaaggtgtgggacattaacacgttgactgccgtatacacctcaccaggtaacgagggagtaatctattcgctgagctgggccccagggggactcaactgtatcgccggtggtaccagtcgcaatggcgctttcatttggaacgtgcagaaggggaagataattcagagatttaacgaacacggtacaaacggtatattctgcattgcttggtcacataaggattccaaacgtatcgccacctgtagctcagatgggttctgtattattaggacaatcgacggaaaggttttgcacaagtataagcaccccgctgcggtgttcggatgtgactggagtcagaacaacaaagacatgattgccactggctgcgaagacactaatgttcgcgtgtattatgtggccacctcgtccgaccaaccactaaaagtatttagtggtcatactgccaaggtgtttcatgtcaagtggagtccactgagagaaggtattctgtgttccgggtccgacgatggcacagtgcgtatctgggattatacccaggatgcctgcattaacattctgaacgggcataccgcccctgtgcgcggactgatgtggaacactgagattccctatctcttgatcagcgggtcatgggactatactatcaaggtgtgggacacccgggagggtacatgcgtggacactgtttatgatcatggcgctgacgtgtatggactcacatgccaccccagcaggccctttaccatggccagttgctctcgagattcaaccgttagactctggtcgctcacagccctagttactcctgtgcagatcaatatcctggccgatcggtcctgggaggagataatcggaaacacagattatgcaattgaacctgggaccccacctctgctgtgcggcaaagtctcccgtgatatccgccaagaaattgagaagctgaccgccaatagccaggtaaaaaaattgcgctggttcagtgagtgtctctcacctcctggaggctcagataacctgtggaatctggtggccgttatcaagggacaagatgatagtctgcttccgcagaactattgcaaaggcataatgcacctcaagcacctgatcaagtttcgtaccagcgaagcacaggaattaaccactgtcaagatgtccaagttcggcggtggcattggggtgcccgcaaaagaggaacgcctcaaagaagccgctgaaatccacctacgcttggggcagattcagcggtattgcgagctgatggttgagctgggcgagtgggacaaggcactgtccattgccccaggcgtcagcgtcaagtactggaaaaagctgatgcaaagaagagccgaccaactgatccaggaggacaaggatgatgttatcccctattgcatcgccatcggagatgtcaaaaaactggtgcacttctttatgtcccgtggacagctcaaagaggcactcttggtggctcaggcagcctgtgagggaaatatgcagccattacacgtctctgtgcccaagggggcttcatactccgacgatatctacaaggaagacttcaacgaactcttacacaaggtgagcaaggagctggccgagtggtacttccaagatggtagggccgtgcttgctgcatgttgtcacttggcaattgataacattgaattggctatggcctatctaatacggggaaatgaactagagcttgcggtctgtgttggaacagtcctgggtgagagcgcggctcctgccacccactatgcactcgagctcctcgccaggaaatgcatgatgatttctgtgtggaacttggccgcagatctcctgttgatgattcctgacaacgaattgcacctgatcaagctttgcgctttttacccagggtgcacagaggagatcaatgacctccacgataaatgcaaactcccaacggtcgaggaatgcatgcagcttgccgagaccgcacgtgctgatgataatatctttgagactgtgaaatattacctgttaagccaggaacctgaaaaggccttgcctattgggatttcattcgtgaaagagtatatctcaagctcagattggactctggacacaatctaccctgtgttggatctgctttcctatattaggacagaaaaactattgttgcacacctgcactgaggcaagaaatgaactgcttattctttgtggttacataggagcattgttagcaattagaaggcagtaccagtcaatcgtgcccgctctgtatgaatataccagccagctgcttaaacgacgcgaagtttccgtgcccctcaaaatagagtatctgagcgaggagctcgacgcctggcgagcttgcacgcagtccaccaaccgtagcttggaggatagtccctacacaccgcctagcgattctcagagaatgatttacgccaccttactcaagaggctcaaagaagagtctctgaagggtatcatcggccctgattacgtgaccggctcaaatctcccatcacatagtgacatccatatcagctgcctcactggattgaagatacagggccctgtgtttttcctggaggatggcaagagcgcaataagcttaaacgatgcgctgatgtgggctaaagtgaatccattctcaccactggggacaggaattcgtctgaatccattctag

SEQ ID NO: 246799 - DNA, 3549 bp, synthetic construct
  misc_feature 1..3549: note = Description of Artificial Sequence: Synthetic coding sequence
  source 1..3549: mol_type = other DNA
atgatcacagtgtccaatcaggagggcgataccatcagacaaacccaggttcggtcagagccatctaatatgcagtttttcttaatgaaaatggacgacaggacctctgccgcagagtcaatgatctccgtcgtgttggggaagaagactctgtttttcctgaatctcaatgaaccagacaaccctgccgacttggaatttcagcaggatttcggtaacatcgtttgctacaattggtacggcgatggcagaattatgataggcttttcttgtggccatttcgttgtgatctccacacacaccggcgaactggggcaagagatctttcaggccaggaaccacaaggacaatttgacatctatcgcagtctcgcagaccctgaacaaagtggctacatgtggcgataattgcatcaagatccaggatctagtcgaccttaaggacatgtatgttatcttgaacctcgatgaggagaataaaggattaggcaccctgagctggaccgacgacggccagctgctcgccctcagcacccaacgaggctcccttcacgtcttcctgaccaagctcccgattctgggcgacgcctgcagtacacgcattgcctacctaactagtttgttggaagtaactgttgccaaccccgtggagggagaactaccaataaccgtgagtgttgatgttgaacccaactttgtcgcagtcgggctgtaccacttggctgtggggatgaacaaccgtgcctggttctacgtcctcggagaaaatgctgttaagaaactaaaggatatggaatacctcggcacagtcgcaagcatatgcctgcattcagattacgccgcagccctgtttgaaggtaaagtccagttgcacctaattgaaagcgagatcctggatgcgcaggaagagagggaaacgagactatttcctgccgttgacgataaatgcaggatcttatgccacgccctcaccagtgattttttaatttacgggactgataccggagtcgtgcaatatttctacattgaggattggcagttcgttaatgactatcgacatccagtgtccgttaaaaagatttttccggatcccaacggcaccaggttggtgtttatcgatgagaagtccgatggatttgtgtattgtcccgtgaacgatgctacatacgagattccggacttttctccaactatcaaaggggtgttgtgggagaactggccgatggacaaaggagtattcattgcatacgatgatgataaggtgtacacatatgttttccataaggacaccatccagggagctaaagttatcctagcaggtagtaccaaagtgccctttgctcataaacccttactgctgtataacggcgaattgacatgccagactcaatcaggcaaggtgaacaacatttacctgtcaactcacgggttcttgagtaacctcaaagacacaggccctgacgaactgagaccaatgctggcccagaacctgatgcttaagagattcagcgatgcttgggaaatgtgtaggatccttaatgatgaagccgcatggaacgaattagcaagggcctgcttgcaccacatggaggtcgagttcgcgatccgagtttatagaagaataggtaatgttgggattgttatgtcattggagcaaataaagggcattgaagactataatctgctggccggacatctggccatgtttaccaacgactataacctggcccaggacctgtatctcgccagctcctgcccaatcgctgcccttgagatgagaagagacctgcagcattgggacagtgccctgcagctcgcgaagcatttggcacccgaccagatccccttcatttcaaaagaatatgccattcagttggagtttgctggcgattacgtcaatgctctggcacactatgagaaaggaattactggcgacaataaagaacatgatgaggcgtgcttggcaggcgttgcccagatgagtatcaggatgggtgacatcagaagaggcgtcaatcaggcactcaaacacccctctcgggtccttaagagagactgcggggcaatccttgagaatatgaaacagttcagtgaggccgctcaactgtacgagaaggggctgtattatgacaaggcagcttcagtgtacatacgcagtaagaactgggctaaggtcggggatctgctcccccacgtgagcagccccaagattcatttgcagtacgccaaagccaaggaggctgatggtcggtacaaggaggcagtggttgcgtacgaaaatgcaaagcagtggcaatcagtcattaggatttacctcgatcacttaaacaatccggaaaaagcggtgaatatcgttcgggagacacaatcactggacggagctaaaatggtggcccgtttctttctgcagcttggcgactatggaagtgccattcagttcctcgtgatgagtaagtgcaacaacgaggccttcacccttgcccaacagcacaataagatggagatatatgccgatatcatcggatccgaagatacaaccaacgaagactatcagtcaattgcactgtatttcgagggggagaagagatacctgcaggccggtaaattctttctcctgtgtggccaatattcacgcgcactgaaacatttcctgaaatgtccctcctcggaagacaatgtcgccattgagatggccatagaaactgtgggccaggcaaaagacgaactgctgaccaaccagctgattgatcacctcctgggtgaaaacgacggcatgcccaaggacgccaaatatttattccggctgtacatggctctgaagcaatacagggaggcagcacaaacagctattatcatcgctcgggaagaacaaagcgccggaaattatcgcaacgcccatgatgtgctgtttagtatgtatgcagaacttaagagccagaaaatcaagatcccttcagaaatggccaccaatcttatgattcttcacagttatatcctcgtaaagatccacgtaaagaacggcgaccatatgaagggcgctagaatgctgattcgtgtagcgaataatatctcaaagttcccatcccacatcgtgcccatcctgacaagtacagtcatagagtgccatagggctggactgaaaaacagtgccttctcctttgctgcaatgctgatgcgtcccgagtatcgctccaaaatagatgccaagtataaaaagaaaatagaagggatggtgcggaggccggacatcagcgagattgaagaagcaacaacgccctgtcctttctgcaagttcctgttgcccgagtgcgagttgctttgtcccggttgcaagaacagtatcccatactgtattgccaccggacgacacatgctgaaagacgattggaccgtttgtcctcattgtgatttccctgccctctactccgagctgaagatcatgctgaacaccgaaagtacgtgccccatgtgttccgagcgattgaacgccgctcagctgaagaagatcagcgactgtacgcagtatctgcggacggaggaagagctgtag

SEQ ID NO: 246800 - DNA, 4029 bp, synthetic construct
  misc_feature 1..4029: note = Description of Artificial Sequence: Synthetic coding sequence
  source 1..4029: mol_type = other DNA
atgaaaaggatttttagccttttggagaagacttggctgggagcacctattcagtttgcctggcagaagaccagcgggaattacctggcggtgaccggggcagactatatcgttaaaatttttgacaggcatgggcagaagaggtctgaaatcaatctccccggtaactgcgtagccatggattgggataaggacggcgacgtactggccgtcatcgccgaaaagagtagctgcatctatctgtgggacgcaaacactaataagacgagtcagctcgataatgggatgagagaccagatgtcctttctcctctggtcaaaggttgggtccttcttggccgtgggaactgtgaagggaaatcttctaatctataaccaccagacctcacgcaagatacccgtgctcggtaaacatacgaagcgtatcacatgtggctgctggaacgctgaaaacctcttagccttagggggagaagataagatgataaccgtatccaaccaagagggcgacaccatccgtcagactcaggtgaggtctgagccttcaaacatgcagttcttcctgatgaaaatggacgaccgaaccagcgcagcagagtcaatgatcagcgtggtgctgggcaagaaaacgctcttcttcctaaaccttaacgagcctgacaaccccgcagatcttgaatttcagcaggattttggcaacatcgtgtgctacaattggtatggggatggacggattatgatcggattctcatgcggacattttgtcgtgatctccacccacacaggagaactgggccaggagatctttcaagcacgcaaccataaagacaacctcacttcaatagccgttagccagacccttaacaaagtggctacctgcggagacaactgcatcaagattcaggacttagttgacctcaaggatatgtatgtaattttgaatctggacgaggagaataagggtcttggtacgctttcttggactgacgacggccagttgctcgcgctgtccacccagcgcggttccttacacgtgtttttgacgaaactcccgattcttggagatgcatgctctactaggattgcttatctcacctccctgctggaagttaccgtagctaacccagtggaaggggaactgccaattaccgtgtctgtggacgtcgaacccaatttcgtggccgtcgggctctatcatctggcggtgggaatgaataaccgcgcatggttctacgtgctcggtgaaaacgccgtcaaaaagcttaaggacatggagtacctgggaacagtggcatcaatctgtctgcactctgactacgccgcagccctgtttgagggcaaggtacagctgcatctaatcgaatctgagattctggatgcacaggaggagcgggagactcggctgtttccagctgtcgacgacaaatgtcgaattctgtgtcatgctctgacctctgattttctcatctacgggaccgacactggcgttgtgcagtatttctacatcgaagattggcaatttgtcaacgattataggcatccggtcagcgtgaagaaaatatttccggaccccaacggtactcgtctggtctttattgacgagaaatctgacgggtttgtgtactgccctgtgaatgatgcgacttatgaaatccctgatttcagtccaactatcaaaggcgtgctctgggagaactggcccatggataagggagtgttcatcgcctacgacgacgacaaggtatacacttacgtgttccacaaagatacgatccagggcgctaaagtgatcctggctggtagtacaaaggtcccgtttgcacataagccactgctcctttacaacggggagctcacatgccagacgcaatcaggaaaagtgaacaatatttatctgtcgacccatgggttcctcagcaacctgaaagacaccggtcccgacgagctcaggcccatgctggctcagaatctgatgctgaaaagattctccgacgcatgggagatgtgccggatccttaatgacgaggcggcatggaacgaactggcgagagcttgcctgcaccacatggaggtcgagtttgccatcagggtctacaggcggattggcaacgtcgggatcgtgatgtctttggagcaaatcaaggggattgaggactacaacctcctggccggacacctcgcaatgttcacaaatgattacaacctggcacaggatctgtatctcgcttcgtcatgtcccatagccgctctggaaatgcgtcgggatctgcagcactgggattcagcacttcaactggcaaaacacttagcccctgatcaaattccattcattagtaaggaatatgcaatccagctggaattcgccggagattacgttaacgccctcgcgcattacgaaaaaggcatcactggagacaacaaggaacacgacgaggcctgcctggccggagtggcacagatgtctatacgcatgggagatatccgcagaggggtgaaccaggccctgaaacacccatcccgggtcttaaagcgcgattgtggtgctattttggagaacatgaagcaattctctgaagctgcccagttgtatgagaaggggctttactacgataaagctgcttctgtgtatattcgtagcaaaaactgggccaaggttggtgatcttttaccccacgtgagctcacctaaaattcacctgcagtacgctaaggcaaaggaggccgatgggagatacaaggaggctgttgtcgcctacgaaaacgccaaacagtggcaaagcgtgatcaggatttatttggaccatctaaataaccccgagaaggctgttaacattgtccgagaaacccagagtctggatggcgcaaagatggtcgcgagattcttcttgcagttaggggattatgggtcggcaatacagttcctggtgatgtccaagtgcaacaacgaggcctttactcttgctcagcagcacaacaaaatggaaatttatgctgatatcatcggctcagaggacacaaccaacgaagactatcaaagcattgccctatacttcgagggagaaaagagatacctgcaggccggtaagttcttcttactttgcggacagtatagtcgcgctctaaagcactttttgaagtgtccttcatctgaggataatgttgctatcgaaatggccattgagacagtaggacaggccaaggatgagcttctgacgaaccaactcatcgaccacctgctcggtgagaacgatggtatgccaaaagacgctaagtatctgttccgtctctatatggctctgaagcagtatagggaggcagctcagactgctatcataattgccagagaggagcaaagcgcagggaattaccgcaacgcccacgacgttctcttttccatgtatgcagaactgaaaagccagaagatcaagattccatcggagatggccacaaatctgatgattctgcactcatatatcctcgtaaagattcatgttaaaaatggggatcatatgaaaggcgctaggatgcttattagagttgctaacaatatttccaaatttcccagtcacatcgtgccgatcctgacctcaactgtgattgagtgtcatcgggctggcttgaagaacagcgcattctcctttgccgcaatgttaatgcggccagagtatagatctaagatcgatgctaagtataaaaaaaaaatcgagggaatggtgagaagacccgatatcagtgagatcgaagaggccaccacaccctgtccattttgcaagttcttgcttcctgagtgcgagctgctgtgtcccggttgtaaaaatagcataccatactgcattgccaccgggaggcatatgcttaaggacgattggaccgtgtgcccacactgcgactttcccgctctgtactctgaactcaaaatcatgctgaacaccgaatctacatgccccatgtgctctgaaagattaaatgcagcccagttgaagaagatttcagattgtactcaatacttaaggactgaggaggagctgtag

SEQ ID NO: 246801 - DNA, 1443 bp, synthetic construct
  misc_feature 1..1443: note = Description of Artificial Sequence: Synthetic coding sequence
  source 1..1443: mol_type = other DNA
aaaaggatctttagtcttctggagaaaacatggctaggcgcaccaatccaattcgcttggcaaaagacatccggtaattacctggccgtgaccggcgctgactacattgtgaaaatttttgatcggcacggacagaagcgctccgaaattaaccttccaggcaactgcgtggctatggactgggacaaggatggcgacgtactggccgtaatcgctgagaagtcctcatgcatctatctgtgggacgctaacactaataagactagccaacttgacaacggaatgcgtgaccagatgtccttcttgttgtggtccaaagtgggatcctttctagctgtcggcaccgtcaaggggaatctgctaatctataatcatcagacatcccgcaaaatccccgttctcgggaaacatactaaacgcattacatgtggctgttggaacgccgagaatctcttggcacttggaggcgaggataaaatgataacagtttccaatcaggagggggacactatccggcagacacaagtgcggtcagaaccttctaatatgcaattctttctcatgaaaatggacgaccggacttctgccgctgaatccatgatcagcgtggtgctggggaagaaaacacttttttttctgaacctaaatgaacccgataatcccgcagatctggagttccaacaggatttcggcaacatagtttgttacaattggtatggcgacggacgcattatgatcggttttagttgtgggcactttgtcgtaatctccactcacacgggggaacttggccaagaaatcttccaagctcgcaaccataaggacaatctcacatccattgccgtgtcacagacactcaataaggtcgccacctgcggggacaactgtatcaagatccaggacctggtggacctaaaggatatgtacgtgatcctcaatttagacgaggagaataagggccttgggaccctgagttggacagacgacggtcagcttctcgctctaagcacccagcgcggatcgcttcatgtgtttttgaccaagctcccaatcctcggggatgcctgcagtacccgtatcgcctatttgacaagcctccttgaggtaactgtggccaacccggtcgagggggaattgccaattaccgtttcagttgatgttgagccaaatttcgtggctgtgggtttgtaccacctcgcagtagggatgaataaccgcgcatggttctacgtccttggtgagaacgctgtgaaaaaactgaaggatatggagtaccttggcactgtcgcctccatatgccttcattctgattatgccgcagccctgtttgaaggcaaggtccagttgcatctcaaagccaagtcctggatgcttaagaagaatgtgagactgggattctcccagcagtggatgatctccgccgtctcgtacgctatgccctag

SEQ ID NO: 246802 - DNA, 1446 bp, synthetic construct
  misc_feature 1..1446: note = Description of Artificial Sequence: Synthetic coding sequence
  source 1..1446: mol_type = other DNA
atgaagaggatcttctcactgctggagaagacgtggctaggtgcaccaatccagttcgcgtggcagaagacctccggcaattacctggccgtgacaggggcagattacattgtgaagatttttgaccgccacggccagaagaggagtgaaatcaatctcccaggtaactgcgtggccatggactgggacaaggacggcgacgtccttgctgtgatcgccgaaaagagtagctgcatctatctttgggatgcaaacacaaacaaaacctcccagctggataatggaatgcgtgaccagatgtcatttcttctttggagcaaggtggggtcttttcttgctgtcggcaccgtgaagggcaatctcctcatttacaatcaccagacttcgaggaaaattcccgtcctgggaaagcatacaaagagaatcacgtgcggatgctggaatgctgaaaatcttctggcgttaggaggcgaagacaaaatgatcacagtgagcaaccaggagggagacaccattaggcagacacaggtgcgatcagagccctcaaatatgcagtttttcctgatgaagatggacgaccggacttcagccgcagagtcgatgatctcggtagtcctcggcaagaagacattgtttttcctgaatctgaatgagccggataaccccgcagacctcgaattccagcaggattttggaaacatcgtctgctacaactggtacggagatggccgtattatgatcggattcagctgtggacacttcgttgtcatctcaacgcacacaggcgaactgggccaggaaattttccaagccaggaaccacaaggacaacctcaccagtattgctgtttcccagaccctcaataaggtggctacatgtggtgataactgcatcaagattcaggacctggtagatcttaaagacatgtatgtgattctcaatctggatgaagaaaacaagggcttggggactttgtcttggaccgatgatggacagttacttgccctctcaacccagagagggtccctccacgtctttcttaccaagcttccgattttgggtgacgcatgcagtacccggattgcttatctcacatcgctactggaggtgactgttgccaatcccgtggagggcgaattacctatcaccgtctccgtcgatgtggagccaaacttcgttgctgtgggattataccacctggcagttggtatgaataatcgggcttggttttacgttttgggggagaatgcagtaaagaaactcaaggacatggagtacctggggacagtcgcctctatctgcctgcactctgactacgccgcagctctgttcgaagggaaggtgcagcttcacctaaaagctaaatcatggatgctgaaaaagaatgtcaggcttggattttctcagcaatggatgataagcgctgtcagttatgccatgccttag

SEQ ID NO: 246803 - DNA, 2832 bp, synthetic construct
  misc_feature 1..2832: note = Description of Artificial Sequence: Synthetic coding sequence
  source 1..2832: mol_type = other DNA
atgggcctgacaaaacaatacctccggtatgtcgcctccgccgtttttggcgtgataggcagccaaaaaggaaacattgtgttcgtgactttgagaggagaaaaaggccgatacgttgctgtgcctgcctgcgagcatgtgttcatttgggaccttcggaagggtgaaaaaatactgatcctgcaaggattaaagcaagaggtgacctgtttatgtcctagtcccgatggtttgcatctggcggtaggttacgaggatggatccattcgcatctttagtctcttgtcgggggaaggcaatgtcaccttcaacgggcacaaggccgctatcaccaccctgaagtacgaccagctgggagggaggctggcaagcgggtcaaaggataccgacattattgtctgggatgttattaacgagtctgggttgtatcgactgaaggggcacaaagatgccattacccaggcactctttctgagagagaagaatctgctcgtcacatcaggcaaggatacaatggtaaagtggtgggacctcgacacacagcattgttttaagactatggtgggccacaggactgaggtgtggggtctcgtgttactaagcgaggagaaaagactgatcaccggggcatctgatagcgaactgcgggtttgggacattgcctatcttcaggaaatcgaggaccctgaagaaccggacccaaaaaagattaagggaagctcacccggaatacaggacacactagaggcggaagacggagcttttgagacagacgaggcgcctgaagatcgcattctgtcatgtcgcaaagctggaagcattatgcgcgaaggcagagaccgtgttgtcaacctggccgtcgataaaacaggacgaatcctggcgtgtcacgggaccgattcggtgttagaattgttttgtatcctctccaagaaggagatccagaagaaaatggacaaaaaaatgaagaaagccaggaagaaagccaagcttcactccagtaagggagaggaagaagatcccgaggttaatgtcgaaatgtctctccaggacgaaattcagcgggttaccaacattaagacttcggccaagatcaaaagcttcgatctgatccactccccgcatggagagctgaaggctgtgttcctgcttcagaataacctcgtggagctgtattccctgaaccctagcctgcctaccccccaacccgtgaggacatctaggatcacaatcggtgggcaccgatccgacgtccgtacgctcagcttcagttccgacaatatcgcagttctttctgcagccgctgacagcataaagatctggaaccggtcaactcttcagtgcataaggacaatgacatgcgagtatgctctgtgtagctttttcgtgcccggagacagacaggttgtcataggtaccaagacaggaaagttacaattgtacgacctcgcctcgggaaacttgctggagaccattgacgcccacgacggggcactctggtctatgagcctctctccggatcaacggggtttcgtgaccggcggagccgataaaagtgtgaaattctgggacttcgagttagttaaagacgagaacagcacacagaaacgcctgagtgtcaaacagacgagaaccctccagcttgatgaagatgtgctttgtgtgagctatagcccgaaccagaagctcttggcagtctcattactggactgtaccgtgaaaattttctacgtggatacccttaaattttttctaagcctgtatggacataagcttcccgtcatttgcatggatattagccacgacggtgctttgatcgccaccggaagtgctgatcgcaatgtcaaaatctgggggttggattttggagactgccacaaatccctcttcgctcatgatgatagcgtgatgtatctgcagtttgtccccaagtcacacctgttcttcaccgccggtaaggatcataaaattaaacaatgggacgctgacaaatttgagcacattcagactcttgaaggccatcatcaggagatctggtgccttgcagtctctccatcgggagattacgttgtctcaagctcccacgacaagtctttgcggttgtgggagaggaccagagagcccctgatcctggaagaggagcgcgaaatggaaagggaggccgaatacgaggagagcgtggccaaggaagatcaacctgccgttcccggagaaactcagggggattcatatttcactggcaaaaaaaccatagaaaccgtcaaggcagccgagagaatcatggaagccatcgagctctaccgagaggagacagctaagatgaaggagcataaggctatctgtaaggccgcaggcaaagaagttcctttacctagtaatccaattcttatggcatacggctcgatcagcccttcagcttacgtacttgagatcttcaaaggtatcaaatcaagcgaactggaggagtccctgctcgtgctgcctttttcatatgtaccagatatactcaagcttttcaacgaatttatacagctcggaagcgatgtcgaactgatttgtagatgcttattctttctactccggatccactttggccaaataactagcaaccaaatgttggtgcccgtgattgaaaaattaagggaaacgaccatcagcaaagtgtcccaggtcagggacgtgattggatttaacatggctggattggactacttgaagagggagtgtgaagccaagtccgaggtcatgttctttgccgacgcaaccagccatctggaggagaaaaaacgcaagcgcaagaagcgagaaaaactgatcctgaccctgacctag

SEQ ID NO: 246804 - DNA, 123 bp, synthetic construct
  misc_feature 1..123: note = Description of Artificial Sequence: Synthetic coding sequence
  source 1..123: mol_type = other DNA
atgggactgaccaaacaatatctcagatatgtcgcaagcgccgtgttcggggtaattggcagccagaagggtctcgcttcacaagcctcgagcagtttcgtgttttttgctaccgagttttag

SEQ ID NO: 246805 - DNA, 1611 bp, synthetic construct
  misc_feature 1..1611: note = Description of Artificial Sequence: Synthetic coding sequence
  source 1..1611: mol_type = other DNA
atggccacacgggctcagcccggacctttgtctcaagcaggttctgcgggagtagccgctttggccactgtgggggtagcctccggtcccggacctggacggcctggccctctccaggatgagactctgggcgtggcctccgtgccatcccagtggcgggcagtccaaggcattaggtgggagaccaaatcttgccagactgcctctattgcaacagcatctgctagcgcccaggcgagaaatcacgtggatgctcaggtccagactgaggctcctgtccctgtgagtgtccagcctccctcccaatacgatattcccaggctggcagctttcctgcggcgagtggaagctatggtgattagagagttgaacaaaaattggcagtcacacgccttcgacggctttgaggtgaactggaccgaacagcagcagatggtgagctgtctctacactcttggctacccccctgcccaggctcaggggttgcatgtgacctcgattagctggaacagcaccgggagcgtcgtggcttgcgcctatgggagacttgatcacggcgactggtcaactttgaagtcgtttgtgtgcgcttggaacctggaccggagggacctgcgccctcagcaaccgtctgccgtcgtggaggtcccgtctgccgtgttgtgcctcgcctttcacccgacccaaccctctcatgttgctggcggactctacagtggcgaagtcttagtgtgggacctgtcccgactggaggatccactgctatggaggactggcctcaccgacgacacccatacggacccggtgagccaggtggtttggctgccagagcccggtcatagccaccgcttccaggtcttgtccgttgcaactgacggcaaagtgttactttggcagggcataggcgtcggccaacttcagctgaccgaaggatttgccctcgtgatgcagcagttgcccagatctacaaagctcaagaagcatccacgcggagagactgaagtgggcgctaccgccgtggcgttctcatcctttgatcctcgcctgttcatcctggggacggagggcggatttccactgaagtgctctctggctgcaggagaagctgctttaactagaatgcccagctcagtgccactgagggctcctgcccagtttaccttttcgcctcacggcggaccgatatactcagtaagttgcagtccatttcatagaaacctgttcctaagcgcaggtactgatggtcacgtgcacctgtatagtatgctgcaggccccaccacttactagcctccagctatctcttaagtacctttttgccgtgcgctggtccccagtgcggcctctggtttttgctgctgcgtcaggcaagggcgatgttcagctcttcgacctccagaaatcatcccagaagccaacggtgctaataaaacagactcaggatgagtctccggtgtactgcctggagtttaattcccagcagacacaattgctcgcggcaggagatgcccaaggcactgtcaaggtctggcaattatccaccgagtttacagaacaagggccaagggaagccgaggatctggactgcctagctgccgaggtagccgcatag

SEQ ID NO: 246806 - DNA, 420 bp, synthetic construct
  misc_feature 1..420: note = Description of Artificial Sequence: Synthetic coding sequence
  source 1..420: mol_type = other DNA
gccggtgtggcggctctggccaccgtgggcgtggcctcagggccaggccctggacgacctgggccattacaagacgaaactctgggggtggccagcgtcccctctcagtggcgggctgttcagggtataaggtgggaaacaaagtcctgccagactgcaagtattgcaaccgctagtgcttcagcccaggctaggaaccacgttgacgcccaggttcagaccgaggcccctgtgccagtttccgtccagccgcctagccagtatgatattccacggctagcggctttccttcgcagagttgaagctatggtgatccgggagttaaacaagaattggcagtcccacgccttcgatggtttcgaagtgaattggacggaacagcaacagatggctggcccttggggtttagaacacgcttag

SEQ ID NO: 246807 - DNA, 819 bp, synthetic construct
  misc_feature 1..819: note = Description of Artificial Sequence: Synthetic coding sequence
  source 1..819: mol_type = other DNA
ttgtctcaagctggatccgccggagttgctgctcttgccacagtgggcgtggcttccggcccagggcctggtagaccaggtccattgcaggatgaaacgctgggagtggcaagcgttccctcacagtggcgagccgtccagggaataagatgggaaacaaagtcctgtcagacggcctcaatcgcgacagcctctgcctccgcgcaggccagaaaccacgtggatgcacaggtccagaccgaagctcctgtgccagtcagcgtgcagcctccatctcagtatgacattcccaggcttgccgcttttctacgcagggtcgaggccatggtcatccgggaactgaataagaattggcaatcccatgcctttgatggctttgaggttaattggactgagcagcagcagatggtatcgtgtctctataccctgggatatcctcctgcacaggctcaggggttacatgtgacaagcatcagttggaatagcaccgggtccgtagttgcgtgcgcatatgggaggctcgaccacggcgactggagtactcttaagagttttgtgtgtgcctggaaccttgatcggcgagatttaagaccgcagcaaccttcagcggtggtcgaggttccctcagccgtattatgtctggccttccatccaacccagccttcgcacgtggcaggggagctcccagcagttagcgcttcatccccactgagaacccagctgcctgctttacagcgcgctcaaggcagttttccatgggctttgtggccaggcgataggaaagcgggtcctgatccattgtcccttgaaccacgatag

SEQ ID NO: 246808 - DNA, 3513 bp, synthetic construct
  misc_feature 1..3513: note = Description of Artificial Sequence: Synthetic coding sequence
  source 1..3513: mol_type = other DNA
atgttcttttatctctctaaaaaaatcagcattccaaataacgtaaaattgcagtgtgtctcctggaataaggagcagggctttattgcctgcggaggtgaggatggattgctgaaagtgctaaagctggagacccaaaccgacgacgctaagctacggggactcgcggctccatctaatctctcaatgaatcagaccctcgagggacactccggctctgtccaggtggtgacctggaacgagcagtaccaaaagctgaccacctctgacgaaaatggccttattattgtttggatgctctacaagggaagctggatcgaagagatgatcaataacagaaacaaaagcgtcgtgaggtccatgtcctggaacgcagatgggcaaaagatttgcatcgtatacgaagatggagcagtgatcgttggtagtgtcgatggaaacaggatttggggcaaagatttaaagggcatccagctttcgcacgtcacatggtccgctgactcaaaggtactactgttcggcatggccaatggcgagatccacatctacgacaatcagggcaacttcatgatcaagatgaagctctcctgcctggtgaatgtgaccggagcgatatccatcgccggaattcattggtaccatgggaccgagggatatgtggagcctgactgcccctgtctggcagtgtgcttcgacaatgggcgatgtcagataatgcgacatgaaaatgatcagaatccagtgctgattgacacaggcatgtacgtggtcggtattcaatggaatcatatgggctcggtgctggcagttgccggattccagaaagctgcaatgcaggacaaagacgtgaacattgtccagttctacacacccttcggggaacatttggggacattaaaagtgcctgggaaggagattagcgcactgtcatgggagggtggcggtctgaagattgccctcgccgttgacagcttcatctatttcgctaacatccgaccaaactacaaatggggttactgctctaacactgtagtgtacgcctatactcgcccagaccgtcccgaatattgcgtggtcttctgggataccaagaataatgagaagtatgtcaagtacgtgaaggggctgatcagcataacaacatgcggggatttctgcattctcgccaccaaggcggatgagaaccacccccaattcgtcctggtgctgtgtaactcgattgggactccactcgacccaaaatatatcgatattgtgcccctctttgtagccatgacgaagacccacgtcatcgccgcatcaaaggaggccttttacacttggcagtacagagtagcgaaaaaactcactgcactggagattaaccagatcactaggtcccgcaaagaggggcgagagcggatctaccatgtggacgacaccccttcagggagcatggacggggtgctggattatagcaagacgatacaaggcacacgtgaccctatctgcgctatcaccgcttccgataagatactcatagtcgggagagaatccggaaccatccagagatactctctacctaacgtaggcctaattcagaagtattccctgaattgtagagcttatcagttgagcctgaattgcaactcatctcgcctggctattatagatataagtggagtgctcacattcttcgacttagatgccagagtgactgatagtaccggccagcaggtggtaggggaactgcttaaactcgaacggagagatgtctgggacatgaaatgggccaaggacaacccggatctgttcgccatgatggaaaagacccgcatgtatgtcttccggaatttggacccagaggaaccaatccagacatccggctacatctgtaattttgaagaccttgaaatcaaatcagtgctgttagatgagattctaaaggacccagaacaccctaataaagattatctgatcaacttcgaaatcaggagcttacgagatagtcgggctctaattgaaaaggtgggaatcaaggatgccagtcagttcattgaggacaatccccatccgaggctctggcggctgctcgccgaggctgctctgcagaagctcgacctttacacagcagagcaagcatttgttcgatgcaaagactatcaggggattaagtttgtcaagcgtctgggaaagctgctcagtgagagcatgaagcaggccgaagtggtcgggtacttcgggaggttcgaggaagcagaacggacctatttggagatggaccggcgtgacctggcaatcggactgaggctgaagctcggcgactggttccgagtactccagctgttgaagacaggttccggggacgccgatgactcactactagaacaggccaataatgcgattggcgactacttcgccgataggcagaagtggttaaacgctgtgcagtactacgtgcaaggcagaaatcaagagagactcgccgagtgttactacatgttagaagactacgaggggcttgagaacttggccatttctcttcctgagaatcataagctactgccagagatcgcgcagatgtttgtacgggtgggcatgtgcgagcaggccgtcaccgctttcctgaaatgttctcagcctaaggcggctgttgacacttgcgtgcacttgaaccagtggaacaaggccgtcgagttagcaaaaaaccattcaatgaaggagatcggaagtctactcgccagatacgcaagtcacttactggagaagaacaaaacacttgatgcaattgagctgtatagaaaggctaactacttctttgacgcagctaagctgatgtttaaaatcgccgatgaagaggccaaaaaaggttctaagcctctgcgggtgaagaagctttatgtgcttagcgccctgctcatcgagcagtaccacgaacagatgaaaaatgctcagaggggcaaggtgaagggaaaatcttcagaagctacctcagctcttgctgggctactagaagaagaggtgctgtccaccaccgatcggttcaccgacaacgcctggcgcggagccgaggcctaccacttctttattcttgcccaacgtcagctgtatgaggggtgcgtcgacacggccctcaagacagcgctgcacctaaaggattacgaggatatcatccctcccgttgagatttatagcttattggccctttgcgcttgtgcctcccgggctttcggcacctgttccaaggcctttatcaagcttaaatcactggagaccctcagctcagagcaaaaacagcagtatgaagaccttgcactcgagatattcactaaacacacaagtaaggataatcggaagccagagcttgattctctgatggagggcggagaagggaagctccctacttgcgtggccaccgggtcgccgattacagagtaccagttctggatgtgctctgtctgcaagcatggagtgctggcacaagagatttcccattactcattctgccctctgtgtcactctcctgtgggatag

SEQ ID NO: 246809 - DNA, 3546 bp, synthetic construct
  misc_feature 1..3546: note = Description of Artificial Sequence: Synthetic coding sequence
  source 1..3546: mol_type = other DNA
atgttcttctatttatctaagaagatctcaataccaaataacgtcaaactccagtgtgtaagctggaacaaagagcagggattcatagcatgcggcggagaggatgggctcctgaaggtgctgaagctggaaacacagacagacgacgcaaaattgaggggcctagctgccccaagtaacctgagtatgaatcagaccctcgagggccactctgggagtgttcaggtcgtgacctggaacgagcaataccaaaagctgacaacatctgatgagaatgggctgataattgtttggatgctctataaagggtcatggatagaggagatgattaataacaggaataagagtgtagttcggtccatgtcatggaacgccgatggccagaagatttgcatcgtatatgaggacggggctgtgattgtaggttctgtggatggtaaccggatctggggtaaagacctcaagggcatacagctttctcacgtcacctggagtgcagattccaaggtactgctgttcggcatggctaacggcgagattcacatttacgacaaccaaggaaattttatgatcaaaatgaagctgtcttgccttgttaacgtgactggtgcgatcagtattgccggtattcattggtaccacggaaccgaaggttatgtagagcccgattgtccctgtctcgcggtctgttttgataacggaagatgccagatcatgagacacgaaaatgaccagaacccagtcctgatcgatacaggcatgtacgtagttgggattcagtggaaccacatgggctcggtcctggccgtagccggattccagaaggcagctatgcaggataaggatgtcaacattgtccagttttacactcccttcggggagcacctgggcacactaaaggtacctggcaaggaaatttccgccctttcctgggagggcggtggattgaagatcgccctggcagtggactctttcatctatttcgccaatataagacccaattacaaatggggttactgtagtaacaccgtggtgtatgcctataccagaccagacagaccagagtattgtgtagtgttctgggataccaagaataatgagaaatatgttaaatacgtcaagggcctgatctccataaccacctgcggcgatttctgtatcctggccacaaaggctgatgagaatcatccccaggaagaaaacgagatggagaccttcggtgctacctttgtcctggtcttgtgcaattctatagggacgccattggacccgaagtatattgatatcgtgcctttatttgtggctatgacaaaaacccatgtgatcgcagcctctaaggaggccttttatacctggcagtatagagtcgctaaaaagctcacggccctcgagatcaaccaaatcactcggtctaggaaggagggccgagaacgaatctaccatgtggacgatactccgagtgggtcaatggatggcgtgctcgactacagtaaaaccattcaggggacacgggatcctatctgtgcaataactgcttccgataaaattctgatcgtgggtagagaatctgggacaattcagcgctactcactgcctaacgtggggctcattcagaaatactctctcaactgccgggcataccaactctcgctcaactgcaatagtagccggttggccatcatagacatttctggcgtattgacttttttcgatctggacgcgcgtgtgacggactcaacaggtcagcaagttgtcggcgagctactgaaactcgaaaggagagacgtgtgggatatgaaatgggccaaagacaatcccgacctctttgcgatgatggagaaaacacgaatgtacgtgtttcggaatctcgacccggaagagccaatacagaccagcgggtacatatgcaactttgaggacctggagatcaaatcagtgctgttggacgagatactaaaagaccccgaacaccccaacaaggattacctgatcaactttgagatcagaagtctgagagactcccgcgctctcatcgaaaaggttgggatcaaagacgcatctcagttcatcgaagacaacccgcacccacggctgtggcgacttttggcagaggctgccctccagaaactcgacctgtacactgcagagcaggcctttgttcgttgtaaggactatcaaggtataaaatttgtaaaacgactgggcaaactgctgagcgaatcaatgaaacaagcggaagttgtgggctactttggccgatttgaggaagccgagagaacctacctggagatggatagacgcgacctcgcaatcgggctccgactaaagttgggggactggttccgagtgctgcagctattaaaaacagggagtggcgatgccgacgactccctcttagagcaggccaataacgccattggagattacttcgcggataggcagaagtggctgaacgccgttcagtattatgtccagggacgcaatcaggagagactggcggaatgttattacatgctagaggactatgaagggctggagaacttagctatcagcctgcccgagaatcacaaacttcttcctgaaatcgctcagatgtttgtacgagtgggtatgtgtgagcaggcagtgaccgcattcttgaaatgcagccagcccaaagcagccgtggatacttgtgtgcacctaaaccagtggaataaagcagtcgagctcgcaaagaaccactctatgaaggagattggcagtttgctggcaaggtacgctagccacctcctggaaaagaataagaccctggacgccattgaactatacaggaaagctaattatttcttcgatgccgcaaaactcatgtttaagatagcggatgaagaggcaaagaagggtagtaagcctttacgcgtgaaaaaactatatgtgctatccgcacttctgattgaacagtatcatgagcagatgaagaatgctcagaggggcaaggtgaagggtaagtcaagtgaagccacttcagcacttgcagggttgttagaagaagaggttctttccactacagataggtttaccgacaacgcgtggcgcggagctgaggcataccatttttttatcctcgctcagcgtcaactgtatgaaggctgcgtggacacagccctgaagacggctctccatctaaaggattacgaggatatcatcccaccagtagagatctactcattgcttgctctttgtgcctgtgcaagccgggcattcgggacctgtagcaaggcctttatcaaactcaagagtctggaaacactgagcagtgagcagaagcagcagtacgaggatcttgccctagaaatttttaccaagcacacttcgaaggacaaccgaaagccagaattagattccttaatggaaggtggcgagggaaagctgccgacgtgtgttgctactggctctcctatcactgagtatcagttctggatgtgtagtgtctgcaagcacggagtgcttgcacaagaaatcagtcattactcattttgtcccctttgccacagccccgtgggctag

SEQ ID NO: 246810 - DNA, 1680 bp, synthetic construct
  misc_feature 1..1680: note = Description of Artificial Sequence: Synthetic coding sequence
  source 1..1680: mol_type = other DNA
atgacaaaaacccatgttattgccgctagcaaggaggctttctacacctggcagtaccgcgtggccaaaaagctgacagcgcttgaaattaatcagatcacccgctcccggaaagagggcagggagcgcatctatcatgttgatgatacaccttcaggttcaatggacggcgtcctcgactattcaaagacaatccagggcacccgcgaccctatctgcgctataaccgctagtgacaaaatcttgatcgttggaagagagtctgggaccattcagagatactccttgcctaatgtcggcctgatacagaagtacagtctgaactgtcgagcttatcaattgtcgctaaactgtaactctagtaggctcgcgatcatcgatatttccggagttttaactttttttgatctggacgcgagggtaaccgacagcacggggcagcaggtagtgggtgagctgctcaaattggaaaggagagacgtatgggacatgaaatgggccaaagataatcccgacctctttgccatgatggaaaagacaaggatgtacgtgtttcgaaatctcgaccccgaagagcctatccagaccagcggatacatctgcaactttgaggaccttgaaattaagagcgtgttattggacgagatccttaaggatccagaacaccctaataaagactatctaattaactttgagattcgctctttacgggactctagagccctgatcgagaaagtggggattaaagatgcgtctcagtttattgaggataacccacatcctcggctgtggcgtctcctggctgaggctgcactgcaaaagctggatctgtacacagccgaacaggccttcgtgcggtgcaaggactatcagggcatcaagtttgtcaagcgactcgggaagctcctcagtgaatctatgaagcaggcagaggtggtgggatattttggacggttcgaggaagctgagcggacgtacctggagatggatcgaagagatctcgcaattggactccgtctgaagctgggagattggtttcgcgtcctgcagctgctcaaaactgggtccggtgacgctgatgattctttacttgagcaggccaacaatgcaataggcgactacttcgccgatcgccaaaaatggttgaacgccgtacagtattatgtacaagggcgaaaccaggaaagactggccgagtgttactacatgttagaggactatgaaggcctggaaaatctcgctatcagcttacccgagaatcacaagcttttgcccattgcggatgaagaagctaagaagggtagcaagcccctccgagtcaagaaactttacgtcttatccgctcttctcattgagcaataccacgagcagatgaagaatgctcagcggggaaaagtaaagggcaagtcttctgaagctacttccgccttggctgggttgttggaggaagaggtgttgtccaccactgaccgattcaccgacaacgcatggagaggcgctgaagcttaccacttttttatcctcgcacagcggcaactttacgagggatgtgttgacacggccctgaaaacagtggagaagggcaactgtcaacatgcactgccccaggaagctcaatcattgagcatcaatagcggctgcgccgtctatgcaaatacagtgagtctgttgcggaagtag

SEQ ID NO: 246811 - DNA, 2856 bp, synthetic construct
  misc_feature 1..2856: note = Description of Artificial Sequence: Synthetic coding sequence
  source 1..2856: mol_type = other DNA
atgtgctgtacggagggctcactgcgaaagagggacagccaacgcgctcctgaagccgtgctatgcctccagttatggcaacggactgtgccattagatactctgaaaggcctaggcacgtgtttcccttccggccctgagctgcgcggagcaggcattgcggctgccatggagagggcttccgagcgccgaaccgcttctgccctgtttgcaggattcagagcgctgggtttatttagtaacgacatcccacatgttgtacgattctcggcgttgaagagaagattctatgtgacgacttgcgtgggcaagtctttccatacttatgacgtgcagaaactgtctctcgtagccgtctccaattccgtcccacaggacatctgctgcatggccgctgatggccgtttggttttcgcagcatatggcaacgtgtttagcgcctttgcacgaaataaagagatcgtgcacactttcaaaggacacaaggccgagatccatttcctgcagccgttcggtgaccacatcatttccgtggatacggatggaatattaatcatctggcatatttacagcgaagaggaatatttacaacttacttttgataaatccgtatttaagattagtgctatcctgcatccctcaacatacctcaacaagatcctgctgggctcagagcaggggtcattacagctttggaatgtgaaatccaataagctcctgtacacattccccggatggaaggtgggtgtgactgccttacagcaagccccagctgtggacgtggtggcaatcggccttatgtccggacaggtcataattcacaatattaagtttaatgagacactgatgaagttcaggcaggattggggaccgataacctccatttcctttaggacagatgggcaccctgtaatggcagccggttccccttgtgggcatataggcttgtgggatcttgaagacaagaagctcatcaaccaaatgagaaacgcccatagcactgctatagcagggctcactttcctgcatagagagcctctgctggtcactaatggcgcagacaatgctctgcgcatttggattttcgacggtcccacaggcgaagggcgtctgctgagattcaggatgggacacagcgccccactcactaatatccgatactacggtcagaatggacagcagatccttagtgcatctcaggacggcacacttcagagcttctccaccgtgcacgagaaatttaacaagagtcttgggcatggcctcattaataaaaagagggtgaaacgcaaaggtctgcagaacacaatgagtgtgcgccttcccccaattaccaaattcgcggcagaagaggcgagagagagcgattgggatggcattatcgcttgccatcaagggaagctgtcgtgttctacctggaactaccagaagtcaacaatcggagcatactttttgaaacctaaggagcttaagaaggatgacattacagctacagcagtggacatcacttcttgcggcaactttgcggtcatagggctgtcaagcggcacagtcgacgtgtataacatgcagtccggcattcatcggggttcttttggcaaggatcaggcacataagggatcggtccggggagtggcggttgatgggctgaaccagctgacagtgacgaccggcagtgaaggcctgctaaagttttggaattttaaaaataagatccttattcactccgttagcctttcctcaagcccgaatatcatgttgctccatcgcgatagcgggatacttggtctagcactggatgatttcagtatatctgtgctcgatatagaaactaggaaaatcgtgagagagttctcgggccaccagggacagattaatgatatggcctttagtcctgacggcagatggcttatctcggctgccatggactgctctatccggacttgggatctgcctagcggctgtcttatagattgttttttgcttgactcagctccactcaacgtgagcatgagccctacaggcgacttcctagccacatcacacgtggatcatctgggtatatatctatggagcaatattagtctttatagcgtagtgagcctccggccattgccagcggactacgtcccatcaatagttatgttgccaggaacctgtcagactcaagacgtggaggtctctgaagagaccgtggagccgtcagatgagttgatcgaatacgactcccccgagcagcttaatgagcagctggtgactctgtccctgttaccggagagtagatggaagaacctactgaatctggacgtgatcaagaagaagaacaagcctaaggaaccacctaaggtgccgaaaagcgctccatttttcatccccactataccaggcctcgtgcccaggtacgcggcacctgaacaaaacaatgatccacagcagagcaaggtggtgaacctgggggtcctggcccagaagtctgatttctgccttaaattggaagaagggctggtcaacaacaagtatgataccgcgctcaacctattgaaggagtcaggccctagcggcatcgaaactgagcttagatccctatctcccgattgcggaggttccatcgaagtcatgcaaagcttcttgaagatgatcggtatgatgctcgacaggaagcgtgatttcgagctcgcgcaggcctacctcgcactgtttctaaagttacatctgaagatgctaccatcggaaccagtactgttggaagagatcacaaatctcagctcacaggttgaagagaactggacacacctgcagagcctgttcaaccaatccatgtgcatacttaattatttgaaatcagcactgctctag

SEQ ID NO: 246812 - DNA, 2856 bp, synthetic construct
  misc_feature 1..2856: note = Description of Artificial Sequence: Synthetic coding sequence
  source 1..2856: mol_type = other DNA
atgtgttgtacagaaggttctttacggaagagagacagccagagagcgcctgaggccgtcttgtgcctccagctctggcaaagaaccgtaccacttgacacactgaaagggctagggacatgttttcccagcggccctgagctacgaggagccggaatcgcggctgcgatggaacgcgcaagcgagagaaggactgcatcagccctgtttgccggattcagggctctcgggcttttcagtaacgacataccacacgtggttagattttccgccttgaagagaaggttctatgtcaccacctgtgtaggcaaaagctttcacacatacgatgtacaaaaacttagtcttgttgccgtgtctaactcagtaccacaggacatttgttgtatggccgcagacggaagactggttttcgcggcttatggtaatgtgttcagtgcattcgctagaaacaaagaaattgtccataccttcaaggggcataaggctgagattcatttcctgcagcctttcggcgatcacatcatatctgtcgacacggatggcattttgataatttggcatatttatagcgaggaagagtatctccagctcacattcgataagtccgtatttaaaatctctgctatccttcaccctagcacctacttgaataagatcctgctgggctcagagcaaggcagtcttcagctgtggaacgtgaagagcaacaaattgctctatacatttccaggttggaaggtgggtgtaaccgcgcttcaacaggccccagctgtggacgtggtagccattggcctcatgtcagggcaggtgataatacataatatcaagttcaatgagacactcatgaagttccgccaagattggggccctattactagcatctctttcaggacagatggccatccagtcatggccgcaggctctccatgtggccacattggtttatgggatctggaagataagaagcttatcaaccagatgagaaatgcccattccaccgctattgcagggctcacattcttacaccgggaaccgcttctggtgaccaacggcgctgataacgcattacggatttggatatttgatggaccgacaggcgaaggcagactcttgcgcttccggatgggacattccgcaccactaaccaatatcaggtactatggccagaacggacagcaaatcctgtcagcgtcccaggatggcacgctccagagcttttctacggtgcacgagaaattcaacaaatctctggggcacggcctcatcaacaaaaaaagagttaaacggaaagggttgcagaacactatgtcagtccggctccctccgataaccaaatttgccgctgaggaggctcgggagagcgactgggatggcataatcgcttgccaccaggggaagctctcctgcagtacttggaattatcagaagagtacaataggagcttactttctgaagcctaaggaactcaagaaagacgacatcacagccacagcagtcgacataacgtcctgcgggaacttcgccgtgatcgggctcagctctggaaccgtagatgtgtacaatatgcagtctggcatccatcgagggtccttcgggaaagaccaagcgcacaaggggagtgtgcgcggtgtcgctgtggatgggcttaatcagttaacagttacaaccgggtccgaaggtttgctgaagttttggaactttaagaacaagatcttaattcactctgtgagcctgagctccagtcccaacatcatgcttttgcaccgggacagcgggatcctcggactagctcttgatgacttctcaatctccgttctagatatagagacaaggaaaatcgtaagggagttctcaggtcaccaggggcagatcaacgacatggcctttagtcccgacggacgctggctgatctccgctgctatggactgcagcattcgtacttgggatttgcccagtggttgcctgatcgattgctttctgctcgactccgcaccattgaatgtttcaatgtcccccaccggagattttctggccacttcacatgttgatcacttggggatttacctgtggtctaacattagtctatacagtgtggtttcactaagacctctcccagccgactacgtcccctcgatagttatgcttcccggaacatgccagacccaggatgtcgaggtgtccgaagagacagtcgagccatctgacgaactaatcgaatatgatagccccgagcagctgaacgagcagctggtcactctctcgttgttgccagaatccaggtggaagaacctcctcaacctcgatgtgataaagaagaagaacaaaccaaaggagccgcctaaggtgcctaagtctgcgccattttttatcccaactatacccggactcgttccaaggtacgccgcacccgagcagaataatgaccctcagcagagcaaggtcgtgaatctcggggtgctggcccagaagtccgacttctgcctcaaactagaggagggcctggtgaacaataagtatgacacagccctgaacttgttgaaggagtccggacccagcggcatcgaaaccgagctacgctctctctccccagactgtggaggaagcattgaagtgatgcagagcttcctgaaaatgataggaatgatgctggaccgcaagagagatttcgaactagcccaggcctaccttgccctgttcttgaaactgcatctgaaaatgcttccttcggaaccagtgctgttggaggaaattactaacttgagctcccaggtggaagagaactggactcatctgcagtcgctgttcaaccagtccatgtgtatactaaattacctgaagtccgctctgttgtag

SEQ ID NO: 246813 - DNA, 1239 bp, synthetic construct
  misc_feature 1..1239: note = Description of Artificial Sequence: Synthetic coding sequence
  source 1..1239: mol_type = other DNA
atggcagggtccgtcggacttgcactgtgtggtcaaactctggtcgtacggggtggaagtagatttttggcaacctcgattgccagtagtgacgatgattccctgttcatttatgattgcagcgctgccgaaaaaaaaagtcaggagaacaagggggaagacgcccctcttgaccagggaagtggtgccatccttgcctcaaccttctcaaagtctggaagttactttgcattgactgatgattctaaacgtctgatactgtttcgcacgaagccttggcaatgcttgtctgtgaggactgtcgcccgaaggtgtactgccctgacattcatcgctagcgaagaaaaggtcctggtggctgataagtccggggacgtttactcattcagtgtcttggagccacatggctgcggcagactggaactgggtcatctgtcaatgctgttggatgtcgcagtcagcccggacgaccgatttattctcactgcagaccgcgatgagaagatccgcgtttcctgggcagccgctccccactctatcgagagtttctgcctgggccacaccgagtttgtgtccagaatcagcgttgtcccgactcagccaggcctcttgctctcctcttccggcgacgggaccctccgtctgtgggagtatcgctccggccgtcagcttcactgctgccatctcgcgtcactccaggagcttgtggacccacaggctcctcaaaaattcgcagcatcgcgcatagcgttttggtgtcaggagaactgcgttgctctgttatgtgatggtaccccagtcgtttacatatttcagcttgacgccagacggcagcagctggtctacaggcagcagctggcctttcagcatcaagtgtgggatgtggctttcgaagaaacccaggggctgtgggtgctgcaggactgtcaggaggcccctctggtgctgtatcgccctgtgggagaccagtggcagtccgtgccggagagcacagtgctgaagaaagtaagcggtgtgctgaggggcaactgggccatgctggaagggtctgccggagccgacgcctcctttagctcgctctacaaggcaacgttcgataacgtgacttcctacctgaagaagaaggaagaacgtcttcaacaacaacttgaaaagaagcagagacgccgtagcccaccacctggcccagacgggcatgccaaaaaaatgcggcctggggaggccacactctcatgctag

SEQ ID NO: 246814 - DNA, 1239 bp, synthetic construct
  misc_feature 1..1239: note = Description of Artificial Sequence: Synthetic coding sequence
  source 1..1239: mol_type = other DNA
atggcagggtccgtggggttggccctgtgtggacagacactagttgtacggggaggctcacggttcttggccacgagcatcgcatcctcagacgacgactccctcttcatctatgactgttccgcagctgagaagaagtcacaggaaaacaaaggagaagacgctccgctcgaccagggctccggtgcaatcctggcgtccacattttccaaatctggaagctattttgcgctgactgacgattctaagcgtctcatcctgttccgaacaaagccctggcagtgcctgtcggtacggactgtggctagacgttgtaccgccctgacttttatcgcatcggaagaaaaggtgttagtggctgataagtcgggggacgtctacagcttctctgtgttagaacctcacgggtgtggaagactcgagctcggacacctttcaatgctactggacgttgccgtttccccagacgaccggttcattctaactgccgaccgtgatgaaaaaattcgggtgtcctgggccgctgcaccacacagtattgaatccttttgtcttggtcacaccgaatttgtgtccaggatatctgtggtgcccacccagcccggtctcttgctcagttcctcaggggacggcaccctgaggctgtgggagtaccggagcggaagacagctgcattgctgccatctagccagtctccaagaactggtagatccccaggcccctcaaaagttcgcagcctctaggatcgccttttggtgtcaggaaaattgcgtagccctgctttgcgacggaacccccgtggtgtacattttccaattggatgccagacgccaacagctcgtttatagacagcaattggctttccaacaccaggtgtgggatgtggcatttgaggagacgcagggcctttgggtgctgcaggactgccaggaggcccctctggttctgtaccgcccagtcggcgatcagtggcagtctgttcccgagtcgacggtcctaaagaaggtgtccggggtgctgcgcggaaattgggcaatgctggaagggtctgccggtgcagacgcctccttttcatccctgtacaaggccacgttcgacaacgtgactagctacctgaaaaaaaaagaggaaagactccaacagcagctggaaaagaagcagaggcgaaggtcgcctcctcccggtccagatgggcacgccaaaaaaatgagacccggtgaggccacactaagctgttag

SEQ ID NO: 246815 - DNA, 2034 bp, synthetic construct
  misc_feature 1..2034: note = Description of Artificial Sequence: Synthetic coding sequence
  source 1..2034: mol_type = other DNA
atggcggctcatcatagacagaatactgccggacggaggaaggtacaggtgtcctacgtgattagggacgaagtagagaagtacaatcgcaatggcgtaaacgcgttgcagctcgatccagccctgaaccgcctgttcacagctggaagggacagcattattaggatctggtccgtgaaccaacataagcaggacccttacatcgcctctatggaacatcatactgactgggtgaatgacatcgttctgtgctgtaatggcaagacactgattagcgcctcatctgacaccaccgtaaaggtatggaatgctcataagggtttctgcatgagcacactgcggacacacaaagactacgtgaaagctcttgcctacgcaaaggataaggagttagtggcctcagctggcctcgacagacagatcttcctgtgggatgtaaacactttgaccgctctcacagcgtcaaataacactgtgaccacctcctccctctcgggtaacaaggactctatttacagtttggcaatgaaccagttgggaaccattatagtgtcaggttctacagagaaagtgcttcgagtgtgggaccccagaacttgcgcgaagctgatgaagcttaaaggacataccgacaatgtgaaggccctgttgctgaaccgtgatgggacgcagtgtctgtccgggtccagcgacggcacgataagactgtggagcttagggcaacagaggtgcatagccacataccgggtccatgacgagggcgtttgggccctacaggtcaacgacgcttttactcacgtttactctgggggacgcgataggaagatttattgcacggatttgcggaatccagacattagagtgctgatctgtgaagaaaaggcgccagtgttgaagatggaattggaccgctctgctgatcccccacccgcaatctgggtcgccaccacaaagtccacagtaaacaaatggactctcaaggggattcacaattttcgggcttccggtgactacgacaacgattgtaccaacccgatcactcccctttgtacacagccagaccaggttattaaagggggagctagtatcattcagtgtcacattctcaatgacaaacgacatattctaaccaaggataccaataataatgttgcttattgggacgtactcaaggcgtgcaaagttgaggacctgggcaaggttgatttcgaggatgagataaaaaaaaggtttaagatggtgtacgtgcctaactggttttcagtggacctcaagacaggtatgttgactatcaccctggatgagtcagactgcttcgccgcatgggtaagtgcgaaagatgcgggttttagtagccccgatggttctgacccaaagttgaacctcggagggctgctccttcaggccctcttggagtattggccacgaacccacgtgaaccccatggacgaggaggagaatgaggtgaaccacgtgaatggcgagcaggagaatcgcgttcagaaggggaatggctacttccaagtgcctcctcacacccccgtcattttcggggaggcaggcggtcgaaccctgtttcgtttgttgtgtagagattctggaggggagaccgaatccatgctgctgaacgagactgtacctcagtgggtcattgatattactgtggataaaaacatgccaaagttcaacaaaatacccttttaccttcagcctcacgcttccagcggggctaaaacactgaaaaaagacaggctttctgcctccgacatgcttcaggtgcgcaaagtgatggagcacgtttacgaaaagatcattaatctggacaatgagtcccagactacctcttcatctaacaatgagaagcctggtgaacaggagaaagaggaagacattgcagttctggccgaggaaaaaatagagctcctctgtcaggaccaggtcctggatcctaacatggaccttcgtaccgtgaagcactttatctggaagagcggaggtgatctcacgttgcattataggcagaagtccacgtag

SEQ ID NO: 246816 - DNA, 1788 bp, synthetic construct
  misc_feature 1..1788: note = Description of Artificial Sequence: Synthetic coding sequence
  source 1..1788: mol_type = other DNA
atggaatgccagtccgcccaagtcatcagtgcttcttccgacacgacggttaaggtgtggaacgctcataagggtttctgcatgagcaccctgaggacacataaggactacgtgaaagcactggcctatgccaaagacaaggagctggtggcgtctgccggactggatagacaaatctttctgtgggacgtgaacactttaactgctctgactgcctccaacaatacagttacaacctcttccttatctggcaataaggactccatctactctctcgcaatgaatcaattaggcacaatcatcgtgagcggtagtaccgagaaagtactgagagtgtgggatcccagaacttgtgccaaactgatgaaattaaaagggcacactgacaacgtcaaggcacttctgctgaaccgcgacggaacccagtgtctttctggatcctctgatgggactatccgcttatggtccctcgggcagcagcggtgcatcgctacatatagggtgcatgatgagggtgtttgggctctacaggtgaacgatgcgtttactcatgtgtacagtgggggacgagaccggaagatctactgcaccgacctaaggaaccccgatatccgcgtgctgatatgcgaggagaaagcgcctgtccttaaaatggaactagaccggagcgctgatcctccgcctgctatttgggttgcaacgaccaagagcaccgtcaacaaatggactctcaaaggaatccataattttagggcatccggagattatgataatgactgtaccaaccctatcacccccctgtgcacccaaccagatcaagtgataaagggcggagcaagcatcattcagtgtcatatcctcaatgataagagacatattctgaccaaggataccaataacaatgtagcctactgggatgttttaaaagcttgcaaagtagaagaccttggcaaagtggattttgaagacgaaatcaaaaagagatttaaaatggtttacgttcctaactggttttccgtcgacttaaagaccggtatgctgacaatcacgcttgacgagagtgattgttttgccgcttgggtctctgccaaggacgccggattttcctcccctgacggatccgaccctaagttgaacctgggaggcttgctgctgcaagccttactcgaatactggcctcgtacacacgtgaaccccatggatgaagaggagaacgaagtaaaccatgtcaatggagagcaggaaaaccgcgttcagaaggggaacggatattttcaggtgcctccacacacccctgtgatctttggggaagctggcggacgaactctatttcgactgctatgtcgcgactcgggcggtgagacggagtccatgctcctcaacgaaaccgttcctcagtgggtcatcgacataaccgttgacaaaaacatgcctaaattcaacaagatccccttctacctgcagccccatgcaagctccggagccaaaacacttaagaaggatcgtctgtcagcaagcgacatgcttcaggtgaggaaagtgatggagcacgtctacgaaaaaatcatcaacctggataatgagtcccagaccacctcctcctcgaacaatgaaaaacccggagaacaggaaaaagaggaagatattgcagtgttggctgaggagaagatagagctcctttgtcaagaccaggtcctggatcctaacatggacctgcgtactgtgaagcactttatatggaaatctggcggagatctcacattgcactaccgccagaagagcacttag

SEQ ID NO: 246817 - DNA, 366 bp, synthetic construct
  misc_feature 1..366: note = Description of Artificial Sequence: Synthetic coding sequence
  source 1..366: mol_type = other DNA
atgcccaaattcaataaaattcccttctatctgcagccccatgccagttccggggctaaaacactgaagaaagatagacttagtgctagcgacatgctgcaagtacggaaagtaatggagcatgtgtacgagaaaatcatcaatctagacaacgagtcacaaacaacctcatcatctaataacgaaaagcccggtgagcaggagaaggaggaagacattgccgtgctggctgaggaaaaaatcgagctgctctgccaggaccaagtgagggtgctcgatccaaatatggacctacgcaccgttaagcactttatttggaagagcgggggtgatctcacactgcattacaggcagaagtccacttag

SEQ ID NO: 246818 - DNA, 1209 bp, synthetic construct
  misc_feature 1..1209: note = Description of Artificial Sequence: Synthetic coding sequence
  source 1..1209: mol_type = other DNA
atggcagcccatcataggcaaaacaccgcagggagacgaaaggtacagtgtctcagtgggagttcagacggcactatccgcctgtggtcactgggccagcagaggtgcattgctacatacagggtgcacgatgagggcgtctgggcgctgcaggtcaacgatgcctttacccatgtatactccggtggtagagatcggaagatttattgtaccgacctgcgcaatcccgacattcgagttctcatttgcgaagagaaggcccctgtgctgaaaatggaactcgacaggtcagccgacccccctccagctatatgggtcgcaaccactaagtctaccgtgaataagtgggcctgcaaagtggaggatctgggtaaggtagatttcgaggacgagattaagaaaaggtttaaaatggtgtacgtcccaaactggttctccgtggaccttaaaacggggatgctcacaattaccttggacgagagcgactgcttcgccgcttgggtgtcagccaaggacgccggattctcctcaccagatggctccgaccccaaattaaacttggggggactgttactccaggccctacttgaatattggccccgaacccatgtgaaccctatggatgaagaggagaatgaagtgaaccatgtgaatggtgaacaggaaaacagagtgcagaagggaaacgggtacttccaggtgccacctcatacaccagtgatattcggtgaagccggaggtagaaccttgtttcgcctgctttgcagggacagcggcggagaaaccgaatcaatgctgttgaatgaaaccgttccacagtgggttatcgatataactgtcgataagaacatgccaaaattcaataagatccccttctatctgcagccacacgcatccagtggggctaagacactgaaaaaggatcgcctgagcgctagcgacatgcttcaagtgagaaaggtcatggagcacgtctacgaaaaaattattaatttggacaacgaaagtcaaaccacctcgtcctcgaataatgagaaaccaggcgagcaggaaaaagaggaagacatcgccgtgttagcggaagagaaaattgagctgctctgtcaagaccaggtgctggaccctaatatggatctgcggacggtcaaacacttcatttggaaaagtggtggggacttaactctgcattaccggcagaaatcgacctag

SEQ ID NO: 246819 - DNA, 651 bp, synthetic construct
  misc_feature 1..651: note = Description of Artificial Sequence: Synthetic coding sequence
  source 1..651: mol_type = other DNA
atggatgcattagaagactacgtatggccacgtgccacaagtgagctgatcttactaccagttacgggactggagtgtgttggagatcgtctcctagcaggcgagggccctgacgtcctggtctatagcctcgattttggtggccatctgagaatgataaaacgggtgcagaacctattgggacattacctcatccacggatttagggtgcggccagagccaaacggtgatctggatcttgaagccatggtggctgtctttgggagcaaggggctgcgcgtcgtgaaaataagctggggccaaggccacttttgggagctctggcgctctgggctctggaacatgtcagactggatctgggacgcgcgatggctggaaggaaatattgctctggcactgggacataatagcgtcgttctctacgacccggtggtgggatgtattctccaggaagtgccgtgcacagatagatgcaccttgagttctgcttgcttgatcggtgatgcgtggaaagaacttaccatcgttgccggagccgtgagcaaccagcttctggtgtggtaccctgcaactgcttttaccctgtatttgtccgctcgccctactcctttttgttgcgtgttgacaccccgaatgtgtactaggttgtag

SEQ ID NO: 246820 - DNA, 3456 bp, synthetic construct
  misc_feature 1..3456: note = Description of Artificial Sequence: Synthetic coding sequence
  source 1..3456: mol_type = other DNA
atgggaagcgccgctagatgggagggatctttctccagagagttttcaagcctgctcagtagaggctgcctgtccacaagcaggattgatatggacgccctcgaggactacgtgtggcccagggcgactagtgagttgatcctgttgccagtcacagggttagaatgtgttggtgacagactgctggccggagagggccctgacgtgcttgtttatagccttgactttggtggacatctccggatgattaagcgcgtgcagaacctactcggacattatctgatacatgggttccgagtaagacccgaacccaacggcgacttggatctggaagccatggtggccgtgtttggttcgaaagggcttcgcgttgtgaagattagctggggtcagggacacttctgggaactgtggcggtcaggactgtggaatatgtcagactggatatgggacgcgcgatggctagagggcaatatcgctctggctctgggccacaactccgtggtgttatacgacccagtggtcggttgcattctgcaggaggtcccctgcactgataggtgtactctgagcagcgcctgtctgataggtgatgcatggaaagaactgaccatagttgctggagctgtcagtaaccagctattggtttggtatcccgctaccgccctggccgataataagcccgtggctcccgatcgcaggatctccgggcatgtaggcattatcttctcaatgtcttacctggaatccaaaggcctactcgcaactgcttccgaggatcgttcagtacgcatctggaaggtgggtgatctgcgcgttccgggtggaagggtccagaacatcggccactgtttcgggcatagcgcacgcgtgtggcaggtgaagttactcgagaattatctgatcagcgcaggagaagactgtgtgtgtttggtgtggtcgcacgaaggcgaaatcctccaagcctttcggggtcaccagggacgaggaataagggctatcgccgctcacgaacgccaggcttgggtgattactggcggagacgatagtgggattcgtttgtggcatctcgtaggacgaggatatcggggactcggagtgtccgccctgtgctttaaaagtagaagtaggccaggaacacttaaggccgtcaccttagctggctcctggaggctgcttgccgttacagataccggggctctgtacctgtacgatgttgaggtgaaatgctgggaacagttgctggaggacaagcatttccagagttattgcctgctggaggctgctccaggccctgagggctttgggctatgcgccatggcgaatggggaaggccgagttaaagtagttcccatcaacacgccaacagcggctgtggatcaaacactgttccccggtaaggtccacagcctgtcttgggcgttgcgcggatatgaagaactgttgctcctggccagtggaccaggcggtgttgtcgcttgtctggaaatcagtgccgctccatccggcaaagccatttttgtgaaggagcgttgcaggtacctcttgcccccatccaaacaacgctggcacacctgctccgcatttctccctcccggtgattttctggtttgtggggatcggcgagggtccgtcctgctgtttccgtctcggcctggcttgctgaaggatccaggagtcggcggaaaggccagggcgggagccggtgctccagtcgtaggatctgggtctagtggcggagggaatgcgttcaccgggcttggccctgtctccactctgcctagcctgcatggaaagcaaggggtgacctctgtgacatgccatggcggttatgtctacaccacagggagagacggggcttattatcaacttttcgtgcgagacgggcagttacagccagttctaaggcagaaaagctgtagaggcatgaattggctggccggtctccggatcgtacctgatgggagtatggtgattctggggttccacgccaacgaatttgtggtctggaatccaagatcccatgagaaactgcatatagtaaactgcgggggtggacaccggtcctgggcattcagtgacaccgaagccgcaatggcgtttgcctacctaaaagatggcgatgtgatgctgtatagggctttaggtgggtgcacccggcctcacgttattcttcgcgaaggccttcatggccgagagattacctgtgtcaaacgggtcggaacaatcacactaggaccggaatacggggtgccaagtttcatgcagccggacgacttggaacctggtagcgagggaccagacctgaccgatatcgttattacatgcagtgaggacacaacagtgtgtgttctggccctgcctactactactggctctgcccacgcacttactgccgtgtgcaaccacatttccagtgtcagggccgtcgcagtttgggggataggcacacccggtggaccccaggacccccaacctggtcttacagcccatgtcgtatcagcaggaggacgcgctgagatgcattgcttttctatcatggtgaccccggacccatctacacccagccgccttgcatgtcacgttatgcacctgtctagtcatagactggatgagtactgggacaggcagaggaaccgtcatcgcatggtcaaagtagatcctgaaacccgctacatgtctttggccgtctgcgagcttgaccagccaggcctaggcccactggtcgctgcagcatgttccgatggcgcagtccgtctgtttctgcttcaggattccgggagaatcctgcagctcctggccgagactttccatcataagagatgcgtcttgaaggtgcacagcttcactcacgaggctccaaatcagaggaggcgtctcctgctgtgttcggccgctacagacggatccctggccttttgggacctgacaacaatgttggaccacgatagtacggttctcgagccacctgtggaccccggtctaccatacaggctgggcaccccgtcgctcacactacaggcccatagctgcggtattaactcactccatactctgccaacacgagagggacaccatttggtggccagcggctcggaggacggaagtctccacgtatttgtcctcgcagtggagatgctccagctcgaagaggctgtgggagaggccggactcgtaccgcagctcagggtactggaagagtactctgtgccttgcgcgcatgccgcacatgtcacaggcctcaagatcctgtccccttctatcatggtgtcagccagtatcgaccaacgcctaacattctggcgcctaggacatggagaacctaccttcatgaattctaccgtgttccacgtccctgacgtcgcagatatggactgctggccggtcagcccagagtttggacacaggtgtgcattgggtgggcaggggctggaggtctacaactggtatgactag

SEQ ID NO: 246821 - DNA, 3213 bp, synthetic construct
  misc_feature 1..3213: note = Description of Artificial Sequence: Synthetic coding sequence
  source 1..3213: mol_type = other DNA
atgatcaaaagggtgcaaaacctactgggtcactatctgatccacggtttccgagtgcgcccagaacccaacggagaccttgatctcgaggctatggtggccgtgtttggaagcaaggggttgcgagtcgtgaagatatcttggggtcagggtcatttctgggaactgtggcggtctgggctatggaatatgagcgattggatctgggatgctaggtggcttgaaggcaacattgccctcgctttgggccacaacagcgtcgtgctgtacgatccggtggtggggtgcatcctgcaagaagtgccctgcacggatagatgcaccctgagtagtgcatgcctgatcggagatgcttggaaagagcttaccatcgtggccggtgctgtgtctaaccagttgcttgtttggtatccggcaacagccctggctgataacaaaccagtggctcccgatagaaggatctctggccatgtgggcatcatcttttctatgtcttatctggaatcaaagggtctgctcgccaccgcttctgaagacaggtccgtgaggatttggaaagtcggagaccttagagtgcccggagggagggtgcagaatatcgggcactgcttcggacactccgctcgtgtctggcaggtcaaacttctggagaactacttgatttctgctggggaagattgcgtgtgtctggtctggtcccacgaaggggaaattttgcaagcctttcggggacatcagggcagaggaattcgcgctatcgcggctcatgagcgtcaggcctgggttataaccggcggtgacgacagcgggattcgcctctggcatctggttggacgcggatatcggggactcggggtctccgcactgtgttttaaaagcaggagcagaccaggtactttaaaggccgttacgctcgctggatcgtggcgcttactcgccgtgaccgataccggagcactatacttatacgatgttgaggtgaaatgttgggagcagttattggaagacaaacactttcaaagctattgtctgctcgaggccgctccaggccctgaaggcttcgggctgtgcgctatggctaacggagaggggagagtgaaggtggtgccaattaacaccccgaccgctgccgtggaccagaccctcttccctgggaaagtacactccctctcttgggccctgcgcggatacgaggagctcttactgctggcatccggtcccggtggggttgtggcatgtctggaaatctctgcagctcccagcgggaaggccatttttgtcaaggaaagatgtcgctatctgctccctccgtctaaacagagatggcatacctgcagcgcgttcctaccacctggtgatttccttgtctgtggcgacagacgcggatcagtgcttctgttcccttcgcgtccagggctgttaaaggaccccggagtgggtgggaaagcccgagccggagctggcgctcctgtagtcgggagcgggtcttccggagggggtaatgcatttaccggattgggacctgtctctactctgccctccttgcatggcaagcagggggtgacctcggtgacttgccacggagggtatgtgtacactacaggtagggacggggcttactatcagctcttcgtaagggatgggcagctgcagcccgtgttgcgccagaaaagctgtagaggaatgaactggctggcgggtctgcgcattgtcccagacggtagtatggttatcctcggctttcacgctaatgaatttgtggtctggaaccctaggtcacatgaaaaattgcacattgtgaactgcgggggaggtcaccgaagctgggccttctctgataccgaggccgcaatggccttcgcttacctgaaggatggggatgtgatgttatatcgtgccctggggggttgtacacgacctcacgtcatactgagggaaggtctgcatgggagggagataacatgtgtcaaacgggttggaactataacactaggacctgagtacggcgtgccaagcttcatgcagccggatgatttggaacctggctcggagggccctgacctgacagacatcgttattacctgctctgaagacactactgtctgcgtattggccctgcccactacaaccgggtccgcacacgctctcactgccgtgtgcaatcacatatcctcagtgcgggcagtggcagtgtgggggattggaaccccgggaggaccccaagaccctcaacctgggctgaccgctcacgtggtttctgccggaggtcgggcagaaatgcattgcttttcaataatggtgactcctgatccctcaaccccatctcggttagcatgccatgtgatgcatctgtcttctcataggcttgacgagtactgggacaggcagcgtaacagacacagaatggtcaaagttgaccctgaaactcgttatatgagtctggctgtctgtgagctggatcaacccggtttagggccactggtagccgcagcatgctccgacggcgctgtgaggctcttcttgctgcaggacagtggcagaatcctgcagctgctcgccgaaactttccaccacaagcgatgcgttctgaaagtgcatagtttcacccacgaggccccaaaccagcggcgaagactgctattgtgctctgccgcaacggatggctcgctagctttctgggacctgaccacaatgcttgaccacgattctacggtgctggaacccccagtggaccctggcctgccatatcggcttggtactcccagcttgactctacaggctcactcttgcggaattaatagcctgcacaccttgcccacacgcgagggacaccacctcgtggcctccggatccgaggacggcagcttacatgtgttcgtactggccgttgagatgctgcagctcgaagaagccgtgggggaagccggactggtcccccagttaagggtgttggaagaatacagcgtgccgtgcgcacacgctgcccacgtgactggactgaagattttaagtccctccataatggtgtcagcgtccatcgaccaacggttgactttctggagactcgggcacggagagccaacattcatgaactctacagtgtttcatgtcccagacgtagccgacatggattgttggcccgttagccccgagttcggtcatcggtgtgcgctgggtgggcagggtctcgaagtgtataactggtatgattag

SEQ ID NO: 246822 - DNA, 4557 bp, synthetic construct
  misc_feature 1..4557: note = Description of Artificial Sequence: Synthetic coding sequence
  source 1..4557: mol_type = other DNA
atggccgctgtgggttccgggggatacgcacggaatgatgccggagaaaagctgccttccgtgatggctggcgtgccggctcgaagaggacagtcctcacccccaccagcgccacccatttgcctgcgacggaggaccagattgtctactgcatcggaagagacagtgcagaatagggtgagtctggagaaagtcctcggcataacagcacagaactccagtggcctgacttgcgaccccggaactggccatgtggcatatctggcaggatgtgtcgtggtgattctagatccgaaagagaataagcaacagcacatcttcaacaccgcgcgaaagtcgttatctgccttggctttctctcccgacgggaagtacatagtgactggagaaaatggccacaggcctgccgtgagaatttgggacgtggaggagaagaatcaagtcgctgagatgctggggcataagtatggagtcgcctgtgtggcgttctctcccaacatgaaacacatcgtgtctatggggtatcaacacgacatggttttgaacgtgtgggattggaagaaggacattgtggtagctagcaacaaggtctcgtgtagggtgatagcgctctccttctccgaagactcctcctacttcgtaaccgttggaaacagacatgtgcgattctggttcctcgaagtgtcgaccgagacgaaggttacctctaccgtgccactggttggtaggagcgggatcctcggagaactccacaataatatcttttgtggagtggcatgcgggagagggagaatggccggtagcaccttctgtgtctcatactcaggcttgttgtgccaatttaatgaaaaacgagttttagagaagtggataaacttaaaagtgagcctctcatcatgtttatgtgtatctcaggaactgatattttgtggttgcaccgatggtatagtccgtatcttccaggcccattccctgcactaccttgccaatctgcccaaaccccactacctgggagtggacgttgctcagggactcgagcccagctttctgtttcacaggaaggccgaggccgtctatcccgatactgttgctctcactttcgaccccatccaccagtggctttcgtgcgtgtacaaggatcatagcatctatatttgggatgtgaaagacatcaaccgcgtgggcaaggtctggagtgaattgtttcacagctcttacgtttggaatgtggaggtgtatccagaatttgaggatcagcgggcatgtctcccatctgggtcatttctgacctgctcttcagataatacaatcaggttctggaatctagactcatccccagactcgcattggcagaaaaacattttttctaacacgctgctgaaggttgtgtacgtggagaacgacatccaacacctgcaggatatgagccacttccctgatagagggagcgagaatggcactcctatggacgtgaaggccggagtgcgagtcatgcaggtgagtccagacggccaacacctggcctccggggatcggtctgggaatttaagaattcatgagttacactttatggatgagctagtgaaggtggaggcccacgacgcagaggtactgtgtcttgaatactccaagcctgaaacgggcctcactctgttagcctcagcctctcgagacagactgatccatgttctcaatgtcgaaaaaaattataatctggagcagacattagacgatcattcctcgtccattacggctatcaagtttgccggtaatagagacattcagatgatctcatgcggcgcagataaatcaatctactttagatctgcacagcagggaagcgatgggctgcacttcgtgcgtacgcaccatgtagcagagaaaacgaccttatatgacatggatatcgatattactcagaagtatgtggcagtcgcctgtcaggacagaaacgtacgggtctataataccgttaatggaaagcagaaaaagtgctacaaagggtcccagggggacgaaggctccttactcaaggtacatgtcgatccttccggcacattcctcgcgacatcctgctcagacaagagtatcagtgtgatcgacttctactcaggcgagtgcatagcaaaaatgtttgggcattcagagattatcacatccatgaaatttacttatgactgtcatcacctgatcactgtatctggagactcctgcgtgttcatttggcacttgggtccggagattacaaactgtatgaagcaacacttgctcgagattgaccaccgacagcagcaacagcatactaacgataagaaacggagcggccatcctagacaagacacctacgtgtccaccccttccgagatccactccctgtctccgggagaacagaccgaagatgatctcgaggaagagtgtgaacccgaagagatgctcaagaccccttccaaggactctctggatcctgatcccagatgtctgctgaccaacggaaagctccccttatgggccaagagactcttaggggatgacgatgtggctgacggactggctttccatgccaagcgctcctatcagcctcacggaagatgggcagaaagagctggccaggaaccactaaagaccatcttagacgcccaggacctggattgctattttacacctatgaaaccagagtctttagaaaacagcattctcgatagcttagaaccccagtctttggcctctcttctctccgagtccgagagtccacaggaagccggacggggacacccaagctttctgccccagcaaaaggagtcaagcgaggcttcagagctaatcctgtattcactggaggctgaagtaacagtgaccggaaccgattcccagtattgtcgcaaggaagtcgaagcaggacccggagaccagcagggtgattcctatctgagagtgagttctgacagtcctaaggaccagtctccgccagaagactccggggagtccgaagcagacttggaatgtagtttcgccgctattcactcaccagcacctccccctgacccagctcccaggttcgcgacaagcctcccacacttccccggatgcgccggtcctacagaagacgagttgtcgttgcccgaagggcctagcgttcccagtagctccctgccgcagacccccgagcaagaaaaatttctgaggcaccacttcgaaaccctgaccgaatctccatgtcgggctctaggagatgttgaggcaagcgaagctgaggatcacttcttcaacccgaggctgagtataagcacacagtttttgtctagcttgcagaaggcatcacgctttacacacacctttcctccaagagccactcagtgtcttgtaaaaagtcccgaggttaagttgatggatcgtggcggatctcagccacgcgctggaaccggatacgcgtcaccagatcgcacccacgtacttgcggctggtaaagccgaggagactctggaggcttggaggccgcctccaccctgtctcacaagtctggctagctgtgtaccggcttcttctgtcctccccacagaccgaaacctccccacccctaccagcgcaccaacccctggattagcccagggggtacatgccccaagtacatgctcctacatggaggcaacagctagctcaagggcacgaataagtaggagtattagcctgggagactctgagggacccattgtggcaactctggcacagccgctgcgccgtccatcttctgttggtgagttggcctctctggggcaggagctgcaggcaatcaccacagcgaccaccccctcattggatagtgagggacaggagccggcactgcggtcctgggggaatcacgaagcaagggccaacctgaggctgaccctttcgtccgcttgtgacggcctactgcagccgcctgtggacacgcagccaggggtcacggtgcctgctgtctccttccctgccccatctccagtggaggagagcgccctgcgccttcacggtagcgcctttcgaccatcactgcctgcacccgagtctccgggactcccagcccatccctctaatcctcagctgcccgaggctcgcccaggtataccaggagggactgcaagtctcctcgaaccaacgtctggggctctcggtctccttcagggctcaccggctaggtggagtgagccttgggtaccagtagaggctctcccaccatctccactggagctgtcacgcgtggggaacattctccacaggttacaaactactttccaggaagcgcttgacctgtatcgggtactcgtatcatcagggcaggtcgacaccggccagcagcaggccaggactgaactggtgtcgacgttcctctggatacactcacagctggaggctgagtgtctggtgggcacctcagtggcacccgcacaggctttacctagccccggaccaccttcccctcctactttatacccgctggcaagtcctgacctgcaggctctgctcgaacactactctgagctcttggtgcaggccgtgaggagaaaagctaggggacactag

SEQ ID NO: 246823 - DNA, 1245 bp, synthetic construct
  misc_feature 1..1245: note = Description of Artificial Sequence: Synthetic coding sequence
  source 1..1245: mol_type = other DNA
atggctgccgtagggagcggcggatacgcgaggaacgacgctggggaaaagctgcctagtgtgatggcaggtgtgcctgcaagacgtgggcaatcatcgccaccaccagcccctccaatctgcttgaggaggaggactcggctcagcactgcgtctgaggagacagtccagaatcgcgtgtctctagagaaggtgcttggcattaccgcccagaatagttctggactgacgtgtgatcccggaaccgggcacgttgcgtatttggccggatgcgtagtggtgattcttgaccctaaagagaataaacagcaacatattttcaacacagccagaaaatcgctcagcgccctagccttctcaccagacgggaagtacattgtgaccggtgagaatggacatagacctgcagttcggatctgggatgtggaagaaaagaaccaggttgctgagatgttaggccacaagtacggtgtggcctgtgtcgcattctctcctaacatgaaacacattgtttcaatgggctaccaacacgatatggtcctgaacgtgtgggattggaaaaaggacattgtggtcgcaagcaataaggtgtcttgccgcgtgatcgcactgtcattttcagaagatagctcctactttgtgacagtgggcaaccgacatgtgagattttggttcctagaagtgagcacggagactaaagtgacttctactgttcctctggtgggcagatctggtatactgggcgaactccacaataacattttttgcggcgtggcctgtggaaggggcagaatggcagggtcaactttctgcgtttcttattctgggctcttgtgtcagtttaatgagaagagagtgttagaaaagtggatcaatttgaaggtcagcctgtcttcctgcttatgtgttagccaggagctgattttttgcggatgcacagacggaatagtgcggatcttccaggctcactcactgcattatctggcaaaccttccaaagccgcactacttgggggtcgatgttgctcagggactggaaccgtccttcttgttccaccgaaaggcggaagcggtctacccagatactgtggccttaacgtttgaccctattcatcagtggctctcttgcgtttacaaggaccactccatttacatatgggatgtcaaggacataaacagggtcggcaaggtgtggtcagagctgttccactcctcttacgtttggaatgtggaagctttgtcgtag

SEQ ID NO: 246824 - DNA, 1452 bp, synthetic construct
  misc_feature 1..1452: note = Description of Artificial Sequence: Synthetic coding sequence
  source 1..1452: mol_type = other DNA
atggccgcagtgggctctggagggtatgcaagaaatgacgccggtgaaaaactgcctagtgtgatggcaggagtcccagcgagaaggggtcagtccagccctcctcccgctccgccaatctgcctgagacggcgaactcggctgagcacagcatcggaggagaccgtccagaaccgggtgtctcttgaaaaggtgctcggcatcacagctcagaattcctctggactcacttgtgatcctggcaccggtcacgtggcctacctcgctgggtgtgtggttgttattttagacccaaaagagaataaacagcaacatatttttaacaccgccagaaaatccctctcagccctggccttctcaccagacggtaaatatattgttaccggggagaacggtcacaggccggctgtaaggatttgggacgtggaggagaaaaaccaggtagccgagatgctgggtcataaatacggtgtggcttgcgtcgcttttagccctaatatgaaacacatcgtttccatgggataccagcacgacatggtgctgaatgtatgggactggaagaaggatattgtggtcgcatccaacaaggtgagttgccgtgtgatagccctctctttttcagaggactcaagctactttgtcaccgtcggaaatagacacgtgcgcttctggtttctggaagtctcaactgagaccaaggttacctccaccgtgccccttgttggtagatccggcatactcggagagctgcataacaatatcttctgtggagtcgcctgtggcagaggaaggatggccggtagtactttctgcgtgtcatatagcgggcttctgtgccagttcaatgagaagagggtgcttgaaaagtggatcaacctcaaggtctccctttccagctgtctgtgcgtctcccaagagctcattttctgtggctgtacagacggcatcgtccgcatcttccaggcccactcgttgcactacctggcaaacctgcctaagccccattatctgggcgtggatgtcgctcaagggctcgaacccagttttctgtttcatcggaaggctgaagctgtgtacccagacaccgtcgctctgactttcgaccccattcatcaatggcttagttgcgtctataaggaccatagcatttacatctgggacgtgaaggacatcaatagagttggcaaggtctggtcggagctttttcatagtagttatgtgtggaatgtcgaagtctaccccgagtttgaggatcaacgggcttgccttccctcgggctcgttcctgacttgctcgtctgacaacacaatcaggttttggaatctggattcatcacccgactcccactggcaaaaaaacattttttcaaatctagcccctgcactgcagatgtgcggcaggggccactctcgacaacctaacactccctcgcccggagaaatcgctagctag

SEQ ID NO: 246825 - DNA, 4572 bp, synthetic construct
  misc_feature 1..4572: note = Description of Artificial Sequence: Synthetic coding sequence
  source 1..4572: mol_type = other DNA
atggccgctgtggggtccggcggatacgctcgcaatgacgccggtgagaagctgcctagcgtcatggccggtgtgcccgctcgacgagggcaatccagcccgccacctgcccctcccatttgtcttcgcagacgcacaaggctctctacagctagtgaagagacagtccagaatagggtctccttggaaaaggttcttggcataacagcgcagaattcgagcgggctgacttgtgatcctggaacaggccacgttgcctatttggccggttgtgtagtcgttattttggaccctaaagagaataagcagcagcatatatttaataccgcaaggaagagcctgagcgctttggctttcagtcctgatggaaagtatatcgtaacaggggaaaatggacatcggcctgccgtccgcatctgggatgtggaggagaaaaaccaagtcgccgaaatgctggggcataagtacggcgtcgcctgtgtcgctttctccccaaacatgaaacacatcgtgtctatgggatatcagcatgatatggtgctcaacgtgtgggactggaagaaggacattgtggtggccagcaataaagtgagctgtcgcgtaatcgctctttctttctcagaggatagctcctactttgttacagttggcaaccgacacgtgaggttttggtttctggaagtgtccacggaaacaaaagtgacttccaccgtcccactggttggcagaagcgggatactgggagagcttcacaataacatattttgcggggtggcgtgtggcagaggtagaatggccggaagtacattctgtgttagttattcaggactgctctgccagttcaatgagaaaagggttttggagaagtggattaatctcaaagtgtcactgagctcttgtctttgcgttagccaagaactgatcttctgcggatgtaccgatggcatcgtcaggatctttcaggcccatagtctgcattaccttgctaatctccctaaacctcactaccttggtgtcgacgttgcccaaggactagaaccttccttcttgttccacagaaaggctgaggctgtgtaccctgacaccgttgcactgacttttgaccctatccatcagtggctgtcgtgcgtatataaggaccacagcatttacatatgggatgtgaaggacataaaccgggtgggcaaggtttggtccgaactcttccatagctcctacgtttggaacgtggaagtttaccccgaattcgaggaccagagggcctgcctgccttctgggtcctttctgacatgcagctccgacaatactatcaggttctggaatctcgatagcagcccagatagtcactggcagaagaatattttctctaatacactcctgaaggttgtatatgttgaaaacgatattcagcacctgcaggacatgagtcatttcccagacagaggctccgagaatggaacccccatggacgttaaggctggggtgagggtcatgcaggtctcacctgatggccagcatcttgcttcaggagaccggagcggcaacttgcggatccacgaactacactttatggatgaattggtcaaggtcgaagcacacgatgccgaggtgctgtgtctggagtactctaagcccgagaccgggttgaccctcctggcatcggcatccagagatcgactgattcacgtcctaaatgtagaaaagaattataatttggagcagacactggacgaccactcatcctcaatcaccgcaatcaagttcgccggaaaccgcgatatccagatgatcagctgcggtgcagacaagagcatttactttagatccgcccaacagggatctgatggactgcatttcgtgagaacccaccatgtggcagagaaaacaaccctgtacgacatggatatagacatcacacaaaagtatgtcgccgttgcttgtcaggatagaaacgttcgtgtatacaacacagtgaacggcaagcaaaaaaaatgttataaaggatcacagggcgacgagggtagcctgcttaaggtccatgtcgatcccagcggtacattccttgcgacgtcatgttcagacaagtcaatcagcgtaatcgacttttattctggcgagtgtatagctaaaatgttcgggcactctgagataataacttcaatgaagtttacatatgactgtcaccacctgattaccgtcagcggagacagctgtgtttttatctggcatctggggccagagatcacgaactgtatgaaacagcacttactggaaatcgaccatcgccaacagcagcagcatactaacgataaaaaacgctcaggccatccgcgtcaagatacatacgtgagcacaccgtctgagattcattcactgtcccctggcgagcagactgaggatgacttggaggaggagtgcgagccagaagagatgcttaaaacccctagcaaggactcactggatccggatcccaggtgccttctgactaacgggaagctgcccctttgggcaaagcgcctccttggcgatgacgatgtggcggacgggttggcatttcacgccaagcgaagttatcagccccacgggcgatgggccgaacgcgctggtcaagagccgctgaaaacaatcctggatgcccaggacctggattgctacttcacgcccatgaaaccagaaagcctcgaaaatagcatcctggatagtctggagccacagtctttggcttccctgctgtccgagagtgagtcaccccaggaggcaggaagaggccacccatccttcctccctcagcaaaaggaatccagcgaggcctccgagttgattttatatagcctggaagcagaggtgacggtgaccggaaccgactctcagtactgccgcaaggaagtggaggcgggtcctggcgatcagcagggagactcttatttgcgggtatcgagcgatagtcctaaagaccagtcacctcctgaagactccggagagagtgaagctgacctggagtgcagcttcgccgcaattcactcacctgcacccccaccagaccccgcaccaaggtttgctacaagtctgccacacttccccggatgcgcaggtccgacagaggacgaattgtctttaccagaaggaccctcagtgcccagtagtagcttaccacagactcccgaacaggaaaaattccttcgtcatcatttcgagaccctgaccgagagcccttgtcgtgaattattccccgctgccttaggagatgtggaggcatctgaggccgaggatcatttcttcaacccccgactgtccatcagtacgcaattccttagctcgttgcaaaaggccagccgattcactcacacgtttccaccccgtgccacacagtgccttgtcaaatcaccagaggtcaagctcatggaccgcggaggcagtcagcctcgggctggtacgggatacgcctctcccgacaggactcacgtgctggccgctggcaaagcggaggaaactctggaagcttggagacctccccctccttgcctgacctcacttgctagctgcgttcccgcaagttctgtgctgcccaccgatagaaatcttccgactccaacgtccgccccaaccccagggttggcccaaggtgttcatgccccttcaacttgttcatacatggaagcgaccgcctcttctcgtgcaaggatctctagaagtattagcctcggcgatagcgagggcccaatcgtggcaacactggcccaaccgctgagaaggcctagcagcgtgggagaacttgcttctttgggccaggaactccaagccattaccacggcaacgacaccaagcctcgactctgaaggccaagagcccgcactgcgcagttgggggaaccatgaagcaagagcaaacctacgactgactctatctagcgcatgtgatggattactgcagcccccagtggacacacagccaggggtaacagttccagccgtatcattcccagccccaagccccgtggaagagtccgccctcaggctacacggtagcgcattccgccctagcttgcctgctcccgagtcaccaggcctgcccgcacatccaagcaatccccagctccccgaggccagaccaggcatccctggaggcaccgccagtctcctcgagcctactagcggagccttggggctactccagggatctcctgctcggtggagtgagccgtgggtacccgtcgaggctttgccaccctctcctctcgagcttagccgcgtgggaaacatcctgcatcgcctgcagactacattccaagaggcacttgacctgtatcgcgtattagttagcagtgggcaggtggataccggacaacaacaggccaggaccgaactggtaagcacttttctctggatccacagtcagcttgaggccgaatgtctcgtgggcacatccgttgctcctgcacaggccctcccctcccccggacccccatctccacctaccttgtaccctctcgcttctcctgacttgcaggccctgctggaacactacagcgaactcctagtccaggccgtgcgtagaaaggccaggggacactag

SEQ ID NO: 246826 - DNA, 1302 bp, synthetic construct
  misc_feature 1..1302: note = Description of Artificial Sequence: Synthetic coding sequence
  source 1..1302: mol_type = other DNA
ggcggatatgctagaaatgatgccggagaaaaactgccgtccgtgatggcaggcgtgccagcacggagaggccagtcctccccgcctcctgcaccgcctatctgcttgcggagaaggacacgtctgtctactgcctccgaagaaaccgtacagaatcgcgtgtcgctcgaaaaggtcctgggaatcaccgcccagaactcttctggtcttacttgtgatccgggaacaggccatgttgcctatcttgcaggcatgtggagaatgggcccagccagtgagagctgtggggaggatagtatcgcaccctcactgtcacgcactgtcccaggcatgtattgtgtcgtggttatcctagatcccaaggaaaacaagcagcagcacatctttaatactgcgagaaaatccctctccgctctggcctttagccctgacggaaaatatattgtgaccggggaaaacggccaccgccctgctgttcggatatgggatgtagaggaaaagaaccaggtcgctgaaatgctggggcataaatacggagttgcttgcgttgcttttagtccgaacatgaagcatatcgttagcatgggttaccagcacgatatggttttaaacgtgtgggattggaagaaagatattgtagtcgcctccaacaaagtttcttgccgggtgatcgcattatccttttcagaggattcctcttacttcgtgacggtgggaaatcggcacgtgcgtttttggtttttggaggtttccacagagactaaagttacctcaactgtaccactggtgggcagatcgggtatcctcggcgaacttcacaataacatcttctgcggggtggcctgtggaagaggaagaatggccggaagtactttctgtgtcagttacagtgggttgctgtgtcagtttaacgaaaaacgagtgcttgaaaagtggatcaatctgaaggtgtctttgtctagttgtttatgtgtgagtcaggagctcattttctgcgggtgtactgacgggatagttcgaatcttccaggcccactccttgcactacctagcaaacctgccaaagccccattacctgggcgtcgacgtcgcccagggtctggaaccaagctttcttttccatagaaaagcagaggcagtttatccagacacagtagccctgactttcgatccgatccatcagtggctctcctgcgtgtacaaggaccacagtatttacatctgggatgtcaaagacatcaatcgtgtgggaaaggtgtggagcgaacttttccattcgagttatgtgtggaatgtcgaatag

SEQ ID NO: 246827 - DNA, 2097 bp, synthetic construct
  misc_feature 1..2097: note = Description of Artificial Sequence: Synthetic coding sequence
  source 1..2097: mol_type = other DNA
atgtccgcagtcgttgcccaaaccctgcacgtctttggattgcgctcacacgttgctaacaacatcttttactttgacgaacagatcattatatttcctagtgggaatcattgtgttaaatacaacgtggatcagaagtggcagaaatttattccgggtagcgagaaaagtcaaggtatgctggctctgtcaatcagccccaatcggcgatatctggccatttcagaaactgttcaggagaaacccgctataactatctacgaactgagcagcatcccttgccgtaagaggaaagttttaaataactttgactttcaggtgcagaaatttatttcaatggccttctcccctgacagtaagtatttgctagcgcagacctcacccccagagtctaacctggtgtattggttgtgggaaaagcaaaaagtgatggccattgtaaggattgacacacagaacaacccagtatatcaggtgtcctttagtccccaagacaatacacaggtttgcgtgaccggtaatggtatgtttaagttgctgagatttgctgagggcaccctcaaacagacctcgtttcagcgtggcgagcctcaaaactacctggcgcatacatgggtggccgacgataagatcgtagtgggcactgatacagggaagctgttcctcttcgagtccggagatcagcgatgggagacttctataatggtaaaggagcccaccaatgggagcaagagtttggatgtgatccaagagagcgaaagtctaatagagttcccccctgtctcttctcccctcccctcctacgaacaaatggtagccgcaagcagtcattcccaaatgtcgatgccccaggtctttgccattgccgcatacagcaaaggttttgcctgctccgcagggccaggacgggttctgttatttgaaaaaatggaggagaaagacttctacagggaatctcgggagattagaatccccgtggatccccagtctaacgacccgagtcaatctgacaaacaagatgtcctttgtctgtgcttttctcccagcgaggagacattagtggccagtacctccaagaaccagctgtattcaattaccatgtctcttactgagatttccaagggagagcctgcccattttgagtacttaatgtatccactgcacagtgccccaatcaccggcctggcaacgtgtatccgcaaacccctgatcgcaacatgcagtctggatcgaagcataagactgtggaattatgagacgaataccctggagttgtttaaggagtaccaggaggaagcttatagtatttctctgcatcctagcgggcattttatcgtggtgggcttcgcggataagttgaggctaatgaacctgttaatcgacgatatccgttcttttaaagagtactcagttcggggatgcggcgagtgttcatttagtaacggtggacatctatttgctgccgtgaacggcaacgtgatccatgtgtacaccaccacaagcctggaaaatatctccagcctgaaggggcatacaggaaaaataagaagtatcgtgtggaacgccgacgattcgaaactgatctctgggggtacagatggtgcagtatatgagtggaacctatccaccggcaagcgcgagaccgagtgcgttttgaaatcctgctcctacaattgcgtaactgtcagtcctgacgcgaagattattttcgctgtgggtagtgaccatacgttaaaagaaatcgccgacagtttgattttgcgcgaaatatctgcattcgatgtgacctatacagccattgtcatctcccactcaggccgaatgatgttcgtcggaactagtgttggcactattagagcaatgaaataccccctgcccctccagaaagagttcaacgaataccaagctcacgcagggccaatcactaaagtgagccgggcactctcgccaggcacacagagtcacacatgccttttacgtgccttatttattccatctacttcacagtgtctcttctctctccttctgctgtcatatctttttattcatcatagcctgaaccatcacctgctgacaatgaatattctttttgtttag

SEQ ID NO: 246828 - DNA, 501 bp, synthetic construct
  misc_feature 1..501: note = Description of Artificial Sequence: Synthetic coding sequence
  source 1..501: mol_type = other DNA
atgagtgcagtggtggctcaaactctacacgtctttggccttcgtagccatgtggccaacaatattttctatttcgatgagcaaattattattttcccgtcaggcaaccactgtgtcaagtataatgtagaccaaaagtggcagaaattcatcccaggcagcgaaaagtctcagggtatgctcgcgctcagcataagtccaaaccgcaggtatctggccatcagtgagactgtgcaggaaaaaccggctataaccatatatgagttatcaagcataccatgtcgcaaaaggaaagtcctaaataattttgactttcaagttcagaaatttattagcatggctttctctcccgacagcaaatatctgctcgcgcagacctccccccctgaaagcaacctagtttattggctttgggaaaagcaaaaggtgatggctatagtccgaatagatacacagaataatcctgtgtatcaggtgtccttttcccctcaggataactag

SEQ ID NO: 246829 - DNA, 4473 bp, synthetic construct
  misc_feature 1..4473: note = Description of Artificial Sequence: Synthetic coding sequence
  source 1..4473: mol_type = other DNA
atggcaggcaattcattggtgctgcctatcgtcctttggggtagaaaagcccctacccattgcattagtgcagtgctgctgactgacgatggagctaccatagtcacaggttgtcatgacgggcagatctgtctatgggatttatcggtggaactgcagatcaaccccagagctctccttttcggtcatacggcctctataacctgtttatctaaagcttgtgcctcttccgacaagcagtacatcgtttcagccagcgaatccggcgaaatgtgcctctgggacgtatccgacggtcggtgtattgagtttacaaagcttgcttgcacacacacaggtatacaattttatcagttcagcgttggaaaccaacgcgagggtcggcttctgtgtcatggtcattatcccgaaatcctggtcgtggacgctactagcctggaagtgctgtattctctcgttagcaaaattagtcccgattggattagcagtatgtcaataatccgttcacatcggacccaggaagataccgtcgtggccctcagcgtcactgggattctgaaggtgtggatcgttactagcgagatttctgatatgcaggatactgagccaattttcgaggaagagtccaagccaatctattgccagaattgccagtccatctctttctgcgcctttacacaacgtagcctgctggtggtatgttccaagtattggcgggtgttcgatgcaggggattattccctcctgtgcagcggtcctagcgaaaatgggcagacttggaccggcggagactttgtgtcaagcgacaaagtcatcatatggacagaaaacgggcagagctacatctacaaactgcctgcatcctgcctgcctgcgtccgatagttttcggagtgacgtgggtaaagcagtggaaaatctgataccacccgtgcaacatatccttctcgatcgcaaggataaagagctgctgatctgtcctcctgtcacacgttttttctacggttgcagagaatatttccacaagctcctgatacagggcgatagctcaggccgtctcaatatttggaatattagtgacaccgccgacaagcaaggctctgaggaaggtttggctatgactactagcatttcactgcaggaagccttcgataagcttaacccctgtcctgctgggatcatcgaccagttgtccgtcatcccaaatagcaacgagcccttgaaagtgacggcgagcgtgtacattcccgctcatggtcgcctcgtctgtggtagagaggacggatctatcgtgattgttccggctacgcagacggccatcgtgcagctactgcagggcgagcatatgctgcgaaggggctggcctccccataggaccctccggggacatagaaacaaagtaacttgtctactgtacccacatcaggtcagtgcgcgatatgaccaaaggtatctcatctcgggcggtgttgacttttctgtaatcatttgggacatcttttcaggcgaaatgaagcatatcttttgcgtccacgggggtgaaatcacgcagctcctcgtccctcctgagaattgctctgcccgagtgcagcattgcatctgttctgtggccagcgatcattcggtgggactcctgagcctgcgcgagaaaaaatgtattatgctcgcctcccgtcatctgtttcctatccaggtgatcaagtggcggccaagtgatgactacttggtcgtcggatgttctgacggatcagtttacgtatggcagatggacactggcgctctggaccgctgcgtcatggggataactgctgtcgagatcctcaacgcatgcgacgaggccgttccagcagccgttgacagtctgagccaccccgcagtgaatttaaaacaggcgatgaccagacggagccttgcggcattaaagaatatggcccatcataaactgcagacactggccacaaatctgcttgcatccgaagccagtgataagggaaaccttcccaaatacagccacaacagtttgatggttcaagcgatcaagaccaatctgaccgatcccgatatacacgttctcttctttgatgttgaggcacttataatccagctgctgacggaggaagcatcaaggcctaataccgccctgatcagccccgaaaatctacagaaggctagcgggagctctgacaaagggggaagctttctgactggcaagagagccgctgtattattccagcaggtgaaggaaactatcaaggaaaatataaaagagcacctgcttgatgacgaggaagaggacgaggagatcatgcgccaacggagggaagagagcgatcctgagtataggagttctaagagcaagccactgacactactcgaatataaccttactatggacaccgcaaagctcttcatgtcctgcctccacgcctggggcctgaacgaagtcctggatgaggtctgtcttgatcgcctgggcatgttaaagccacactgtaccgtgagtttcggattgctcagcagaggtggccacatgtctctgatgcttccgggatacaaccagcccgcttgtaagttatcccacgggaaaacagaggtcggcagaaaactacctgcatctgagggagtcggcaagggtacctacggggtctcgagagcagtgactacccagcacctgctgagcatcatctcacttgccaataccctaatgtctatgacgaacgcaacctttatcggcgaccatatgaagaaaggtccgacccggccaccacggcctagcacaccggacctctctaaggccagggggtcgccgcctactagttccaacatcgtgcagggacagataaaacaggtcgctgctccagtggttagcgccagatctgatgctgaccacagtggaagcgatcctccctcggcccctgcgctgcacacgtgttttctcgtgaatgagggctggagccagcttgcagcgatgcactgcgtgatgttgcctgacttgctgggactggacaagttcaggcccccactgcttgagatgctggcccgacgctggcaggacagatgtctcgaggtgcgggaggctgcccaggcactgctgctcgcagagttgcgacgtattgaacaggctggacggaaagaggccattgatgcttgggctccgtacttgcctcagtacattgaccacgtcataagcccaggcgtgacctccgaggccgctcagacaattactacggctcctgacgcaagcgggcctgaggccaaggtccaggaagaggagcatgacctcgttgacgacgatatcacaactggctgcctgtcttcggtgccgcagatgaagaaaatttccactagctatgaggaacgcaggaagcaggccaccgccatcgtgctgttgggggtcatcggagccgaattcggcgcagaaatcgaacctccgaaactgctgactcgccctaggagctcctcacagattccagaggggtttgggttgacatctggaggctccaattatagcttggctaggcatacctgtaaggcactgacattcctgctcctgcagcccccatcccccaaattgcccccacactctactataagacggacagcaattgaccttatcggcagaggcttcaccgtgtgggaaccatacatggatgtgagcgccgtgttaatgggtctcctggaattgtgtgccgatgcagaaaaacaactggcaaacattacaatgggactgcccctctctccagccgctgacagcgctcggtctgcaaggcatgcactctcgctgatcgcaactgctcggccaccggcttttattactactatcgccaaggaagtgcacagacacacggcattggctgcaaacacacagtcacagcaaaatatgcacacaacaaccttggcacgcgcaaaaggtgaaatcctgagagtaattgagatcctcatcgagaaaatgcctactgacgtcgttgatctcttggtcgaagttatggacatcatcatgtattgtctcgagggcagcctggttaagaagaagggcctgcaggagtgtttcccggcaatttgcaggttttatatggtatcttactacgaacgcaatcaccgcattgcggtgggcgctagacacggctccgttgcattgtatgatatacgaacagggaagtgtcagacgattcacgggcacaagggacccatcactgctgtggcctttgctcctgatggtagatacttggctacgtactcgaataccgattcccacatatctttctggcaaatgaatacttccttgctcggaagtatcggaatgctcaacagcgccccacagttacggtgcataaagacctatcaggtgccccctgtgcagcccgcaagccctggaagccacaacgctctcaaactagccaggctaatttggacctccaaccgtaatgtgattcttatggctcacgatgggaaggaacatcggtttatggtgtac

SEQ ID NO: 246830 - DNA, 4374 bp, synthetic construct
  misc_feature 1..4374: note = Description of Artificial Sequence: Synthetic coding sequence
  source 1..4374: mol_type = other DNA
atggccggaaactccctcgttctaccaattgtgttatggggtagaaaagccccaacccattgtatttccgctgtcctccttactgatgatggtgctaccattgttaccggctgtcatgacggacaaatctgtctgtgggatctgtctgtagaactacagattaacccgagggcactgttattcggccacactgccagtatcacctgcctcagtaaggcttgtgctagttctgacaagcaatatattgtgtcggcttctgagtctggcgagatgtgcttgtgggatgtttctgatggcaggtgcattgagtttactaagctcgcttgcactcataccgggatacagttttatcagtttagtgttggaaaccagagagagggaaggcttctgtgccacggtcactatcctgagatcctggtggtcgacgccaccagcctggaagtcctatactcgctggtcagcaaaatatcgcccgattggatctctagcatgtctatcatccggtcccatagaacacaggaagacacagtggtggctctgagcgtgactggaatcctcaaagtgtggattgttacctcagagatctccgacatgcaggacacagaacccatcttcgaagaggaaagtaagccgatatactgccagaattgccagtctatctccttctgtgcattcacccagagaagcctgctagtggtgtgctcaaagtactggagggtcttcgacgcaggggactactccttactttgtagtgggccatcagagaatggccaaacttggaccggcggagatttcgtgtcatcagacaaagttatcatttggaccgaaaatggccaaagctacatttataagttgcctgccagctgtttaccagccagcgattcattcaggagcgatgttggcaaggccgtcgaaaacctgattcctccggtacagcacatcctcctggatcggaaggacaaggagctgcttatttgcccacctgtgacccggttcttctatggatgtcgcgagtactttcataagctgctcatacagggagactccagcggcaggctgaacatctggaatatttcggacacagcagataaacaaggatcagaggagggtctcgccatgaccacctccatttccctccaagaagccttcgataagctgaatccttgccccgctggaattattgaccaactatctgtcatacctaactcaaatgaaccacttaaggtgaccgcctctgtgtacatccctgcccacggacgtctggtgtgtggacgtgaggacgggagtattgtcatcgtaccagccacccagaccgctatcgtgcagctgcttcagggggagcacatgctgaggaggggctggccacctcatagaaccctgcggggacaccggaacaaagttacatgtctactctaccctcatcaggtgtctgctagatacgatcaaagatatttgatctctggtggagttgatttttcagtgatcatctgggacatttttagcggcgaaatgaaacacatcttttgtgtgcacggcggtgagatcactcagctgcttgtgccaccagaaaactgttccgctcgggtgcaacactgcatctgcagtgtggcgagcgaccactcggtaggccttctttcacttcgggagaaaaagtgtatcatgcttgcttctcgtcatttgttccctattcaggtaatcaaatggcggccttccgacgactacctagtagtcgggtgttcagatgggtccgtgtatgtgtggcagatggacacaggagcactcgacagatgcgtcatgggcatcactgctgtcgaaatcctaaatgcttgtgatgaggccgtgcctgcagccgtggattccttgtctcatcccgctgtgaatctgaaacaggcaatgactcggagatccctcgcggctcttaagaatatggctcaccacaaactacagaccctcgctacaaatctgctcgccagtgaggcttccgataagggaaatctgccaaaatactcccacaattcgctaatggtccaggccatcaagacaaaccttacggatcccgacatccacgtgctgttcttcgatgttgaggccctgataattcaactgctgacagaggaagcatcccggccaaatacagcattaatctcgccggaaaaccttcaaaaggcctccggctctagcgacaagggcggatccttcttgaccgggaaaagggcagcagtgctcttccagcaggtgaaggaaactattaaggagaacataaaagagcacctgctcgacgatgaggaagaagacgaggaaattatgcgacagcgcagagaagagtccgaccccgagtatcggagcagcaagagcaaacccctcacacttttagagtacaacctcacgatggacacagcaaagcttttcatgtcatgccttcacgcttggggcctgaacgaggtgctggacgaggtgtgcctggaccgcctcggaatgctgaaaccgcattgcaccgtgtcctttgggctactgtcacgcggtggtcatatgtctctcatgctgccgggttacaaccaaccggcttgcaagctgtcgcacgggaagaccgaggtgggacgtaagcttccggcttctgaaggagtgggaaaaggcacctacggtgtctcaagagccgtaactacacagcatctactttccatcatttccttggcaaatactctgatgtccatgaccaacgcaactttcattggagatcatatgaaaaagggaccaacccggccacccaggccgagcactcccgacctgtctaaagcgaggggatcgccacctacatcaagtaatatcgtacaggggcagatcaaacaggggtggtcccaattagccgcaatgcactgcgtcatgttgccggacctgttggggcttgacaagtttcgtccacccctgcttgaaatgttagctcgacgatggcaagaccgttgcttagaggtgagagaggcagctcaagcgctcctgttagcagagctgagaagaatcgaacaggccggtcggaaggaagcgatcgatgcttgggctccttacctgccacagtatattgaccacgttatctcacccggtgtcacatccgaggcagcccagactatcacaactgccccagacgcgtctggccctgaggccaaggttcaagaggaggagcacgacctggtcgacgacgacattaccaccgggtgcctgtcatcggtgccccagatgaaaaaaatttcgacttcttatgaggaaagacgtaagcaagccacagcaatcgttctcctgggtgtcatcggcgcagagttcggggctgaaatagaaccaccaaagctccttactcgcccacggtcctccagccagatcccagaaggattcggcttgacaagcggtgggagtaactactcactcgcgcgacacacatgtaaggctttaacgttccttctgctccagccgccatctcccaagctgccaccacattcaacgatcaggcgaacagccatagatctgatcggaagggggttcaccgtgtgggagccttacatggacgtcagtgccgttctgatgggtcttcttgagttgtgcgctgacgccgagaaacagttagccaacatcacaatgggattacctctttctccggctgcagattctgcaaggtccgccagacatgccctgtccttaatcgcgactgctcggccaccagcatttattacgaccatagccaaagaggtgcaccggcacaccgcccttgctgccaatacgcaatcccagcagaatatgcacaccactactctcgcacgcgctaaaggagaaattctgcgggtcattgaaatcctgattgaaaaaatgccaacagacgttgtcgatctgctcgtagaggtaatggacatcataatgtattgcttagagggtagcctggttaaaaagaagggactccaggaatgcttccccgctatctgcaggttctacatggtgtcatactacgagaggaaccatcggatcgcggtgggggctcggcacggctctgtggctttgtacgacatcaggacagggaaatgccagactatacatggccacaaagggcctataaccgcagtcgccttcgcccctgatggaaggtatctggctacctattccaatacagactcccacattagcttttggcaaatgaatacatccttgctgggttctatcggcatgcttaatagcgcccctcagctgcgatgcatcaagacctatcaggttcccccagtgcagcccgcatcccctggttctcataacgccttgaagctggcaagactgatctggacctccaatcgcaacgtgatcctgatggcccacgatggaaaggagcatagattcatggtctag

SEQ ID NO: 246831 - DNA, 4374 bp, synthetic construct
  misc_feature 1..4374: note = Description of Artificial Sequence: Synthetic coding sequence
  source 1..4374: mol_type = other DNA
atggccggaaatagtctggtgctgccaatcgtgctgtggggccgaaaggctccaacccactgtatcagcgccgtactcctaaccgatgatggagctactatagtgactgggtgccatgacggacagatttgcctgtgggacctgagcgttgaactgcagatcaatccgagagcacttctttttgggcacaccgcatccattacgtgtctgtctaaagcgtgtgcttccagcgataaacagtacatcgttagcgcttcggagtccggagaaatgtgtctgtgggacgtgtccgacgggagatgtatagaatttacaaaacttgcttgtacgcacacgggcatacagttctaccaattttctgtgggtaaccaacgtgaagggagactgctgtgtcacggtcactatcctgaaatccttgtggtagatgctacatccctggaagttttgtactctctcgtgtccaagatctcgccggattggatcagttccatgtccattattaggtcccacaggacacaggaagatacggtagtagccctcagcgtgaccgggatcctgaaggtgtggattgtgacaagcgaaatctcagatatgcaggatactgagcctattttcgaagaagagtctaagccgatctactgtcagaattgccagtcaatctccttctgcgctttcacccagcgatctctcctcgtagtctgttccaagtactggagggtttttgacgctggcgactatagtctgctgtgcagcggacccagcgagaatggccagacttggaccgggggagacttcgtgagttccgataaggtgataatttggacggaaaacgggcaatcgtacatttacaaactgcccgcttcctgtttgccggcttctgactctttccggagcgacgtaggtaaggcagttgaaaacttgatccctccggtgcagcacatcctgttggacaggaaagataaggagctgctgatctgccctccggtgactaggtttttttatggctgtcgcgagtacttccacaaactgctcattcagggagacagttctggaagattgaatatttggaacattagtgacacagcagacaaacagggatccgaggagggcctggccatgacaacatccattagcctgcaggaggcttttgacaaactgaatccctgtcccgcaggaatcatcgatcagctttccgtgatcccaaattccaacgaacctttaaaagtgacagcctccgtgtacatccccgctcacgggcgactggtatgtggtcgtgaggacgggtctattgtcatagtccccgctacacagaccgcgattgtgcaactgctgcagggagaacatatgctgagacgcggatggccccctcaccgaactctgcgcggacatcgcaacaaagtaacttgtctgctgtatccacatcaggtgagcgcccgatacgatcagcgatatcttatttcgggcggagttgatttctccgtgatcatctgggacatattttctggggagatgaaacacatcttttgcgtccacggaggggaaataacgcagctgctggtgccccctgaaaactgttctgctagagtgcagcactgtatttgctcagtagcctccgatcacagtgttggactgctgtctctgagggagaaaaaatgtataatgctggcctcaaggcacttgttccctattcaggttatcaagtggcgtccgagtgatgattacctggtggttgggtgtagcgacgggagcgtctatgtttggcagatggacaccggtgccctcgataggtgtgtcatgggaatcactgccgtagaaatcttaaacgcttgcgacgaggcggtccccgctgctgtcgactctttgagccaccccgcagttaacctaaagcaggctatgacacggaggagcctggccgctctgaaaaatatggcacatcacaagctccagacactggccaccaatctactggcgagtgaagcgagtgataagggaaacctaccaaaatatagtcataactcgctgatggttcaagccatcaaaaccaatctgacggaccctgacatccatgtgttgtttttcgatgtcgaagctctcatcattcagttactgacagaggaagcatcacggcctaacacagcgctcatcagtcccgaaaacctgcaaaaggcttcgggctcctctgacaaggggggttcctttctcactggcaaacgggctgccgttctcttccaacaagtcaaggagactataaaagagaacatcaaagagcatctgttggatgatgaggaggaggacgaggagattatgcggcagcggagagaggaaagcgacccagaatatcggtctagcaagagcaagcctcttacactgctggaatacaatctgacaatggatacggccaaattattcatgtcttgcctgcatgcgtgggggctaaacgaagtcctcgatgaagtgtgcctagatagactgggcatgcttaagccccactgtacagtaagcttcggtctgctgtcacgcggtggacatatgtcgctgatgctccctggatataaccaaccagcctgcaagctgtcccatggtaaaactgaggtcggtcgaaaattgcctgcctccgaaggagtcggaaaagggacctatggcgtgagtcgggctgtgacaacccaacatctgcttagcatcatcagcctggccaatacattgatgagcatgactaacgccacatttattggcgatcatatgaagaagggcccaactcggccacctcggccaagcacacccgacctgagtaaggcgcgtggctcacccccaaccagctctaatatcgtgcaggggcagatcaaacagggctggtcccagttggcagctatgcattgcgtcatgctgcctgacctgctgggcctcgacaagtttcggcctccactgctggaaatgcttgcaagaaggtggcaagatcggtgtctcgaggtgcgggaagctgctcaggctttactgctggccgagctacggcgaatagagcaggctggacggaaggaagccatcgacgcctgggccccttacctcccgcagtatatcgaccatgtgatttcccccggtgtcacctccgaggcagcgcagaccatcactactgccccagacgcctctggaccggaagcgaaagtgcaggaagaggaacatgacctggtagacgatgatattacaaccgggtgtctgtcttctgtgcctcagatgaaaaagatctctacttcatacgaagagagacggaaacaggcaacagccatcgtcctgctgggggtaataggagctgagttcggagcggaaatagagcccccaaagttgctgacacgtcccagatcttcctcccagatccccgagggattcggcttaacgagcggtggttcaaattattccctggcacgccacacatgtaaggccctaactttcctgctgcttcagcctccaagcccaaaactccctccccattccactatccgcagaactgccatagatctgatcgggaggggcttcactgtctgggagccgtacatggacgtgtcagctgtcctgatggggcttctggagctttgcgccgacgccgagaaacaactggctaacataacgatgggattacccttgtcccccgcagctgattctgctaggagcgctaggcacgcactctccctgatcgccactgctcgaccacctgcttttatcacaaccatcgccaaagaggtgcacaggcatacggccctcgcggctaatacgcagtctcagcaaaatatgcacactacaactctcgcgagagcaaaaggagaaatcctgcgggtcattgaaatccttatcgagaaaatgccaactgacgttgtggatctacttgtggaggttatggatatcataatgtactgcttggagggctctttggtgaagaaaaaaggactccaagagtgtttcccggcaatctgccgattctacatggtctcctactatgagcgaaatcacagaatcgccgtgggagcgcgacacggcagcgttgcgctctacgatatcaggaccggtaagtgccaaactatccacgggcataagggcccaattacggccgttgcattcgccccagatggccgttatcttgccacttattctaatacggattctcatatcagtttctggcagatgaacacgagcctgctggggtccatcggcatgctgaactcagctcctcagcttcggtgcataaaaacatatcaggtcccccctgtgcaacccgcatctccaggatcccacaatgcactgaaactggcacgtctcatttggaccagcaataggaacgtgattctgatggcccacgacggtaaggagcataggtttatggtgtag

SEQ ID NO: 246832 - DNA, 2448 bp, synthetic construct
  misc_feature 1..2448: note = Description of Artificial Sequence: Synthetic coding sequence
  source 1..2448: mol_type = other DNA
atggccggaaactcgcttgtgctaccgatcgttctttggggtcggaaggctccaacccattgcattagcgcagtgctcttgacagatgacggggctacaattgtcacaggatgtcacgatggacagatctgcttgtgggatctgtccgtggaattgcagatcaaccctcgcgctctgttgttcggacacacagccgtgcttttccaacaagtgaaggagaccattaaggagaatattaaagagcacctgcttgacgacgaagaggaggatgaggagattatgcggcaacgcagggaggagtccgatccggagtatcggtcttcaaaaagcaagcccttaaccctcctggagtacaatctgacgatggatacagctaagctctttatgagttgcctgcacgcttggggtcttaacgaagtgttggacgaggtgtgccttgatcggctgggtatgcttaagcctcattgcactgtctctttcgggcttctctcacgtggcggacatatgagccttatgctgcctggctataaccagccagcctgtaaactttcccacggaaaaaccgaggttggaagaaagcttcctgctagcgagggggtgggcaagggtacttacggggtgtcaagggcagtaactactcagcacctcctttccattatctctctggccaacactctaatgagtatgacaaatgccacatttatcggtgaccacatgaaaaaaggacctactcgcccacctcggcctagcacccccgatctgagcaaggcaagagggtcccctcccacaagttcaaacatcgtgcagggccaaatcaaacaggttgccgcacctgtagttagcgcgagatccgatgccgaccacagcggatccgaccctcctagtgctccagctcttcatacctgcttcctggttaatgaaggttggtcccagttggctgccatgcattgcgtcatgctgccagacctccttggcctggataagttccgaccgccattgttggagatgctagccagacgctggcaggatcggtgtcttgaggtgagggaagcagcccaggccctgctgctggctgagttaagaaggattgagcaggctggccgtaaggaagctatcgatgcctgggctccttatctgccacagtacatcgaccacgtcatctctccaggtgtaacctcagaagccgctcaaacaattacaacagcacctgatgcaagtggtccagaagccaaagtacaagaggaggaacatgacttagtggacgacgacatcacaacgggctgtctgtccagcgtgcctcagatgaaaaagataagcacttcttatgaggaacgccgaaagcaggcaacagctatcgtcctcctgggggttataggagccgagttcggcgcagaaatcgaacctcctaaactccttactcgtccgaggtccagctcccagattcctgaaggatttggccttaccagcggtgggtcaaactactccctcgcaaggcatacttgcaaagcactgacctttctgttgctgcagcccccatcgcccaagctaccccctcattcgaccattagacggaccgcaatagatctgattggcagaggctttactgtatgggaaccctacatggacgtcagcgccgtgctgatgggactcctcgagctgtgtgccgatgcagagaagcagttggcaaatatcaccatggggctgccccttagtcctgcagcggactcggccaggagcgccagacatgctctgtccctgattgccactgcccgaccaccagcctttattactactattgccaaagaggtgcaccgccatactgcgttggccgcaaacacacaatctcaacagaatatgcatactaccactttggcgagagcaaaaggagaaattcttagagtaattgagatcctgatcgagaagatgcctaccgatgtggtggacttacttgtagaggttatggacattatcatgtactgtctcgaggggtccctggtgaaaaagaagggattgcaggagtgctttcctgcaatatgcaggttctatatggtttcttattacgagcggaaccataggattgctgtcggggcacggcatggctctgtagctctctatgacatcagaaccggaaaatgccagactattcacgggcacaagggccctattacggccgtcgcgtttgcgccagacgggcgatacctggctacatactctaacaccgactcccatatctcattctggcagatgaatacaagtcttctgggatctataggaatgttgaacagcgcccctcagctgagatgcatcaaaacctaccaagtgcctcctgtgcagccagcctctccaggttcccacaatgcccttaagctggccagactgatttggacaagcaatcgcaacgtcatattgatggcccatgatggcaaagaacaccggtttatggtttag

SEQ ID NO: 246833 - DNA, 3309 bp, synthetic construct
  misc_feature 1..3309: note = Description of Artificial Sequence: Synthetic coding sequence
  source 1..3309: mol_type = other DNA
atgcggacatcattgcaggccgttgccttatggggccaaaaagcccctcctcatagcataacggccatcatgataactgacgaccagagaaccatagttactggatctcaggaagggcagctgtgcctgtggaacctgtctcatgagttgaagatctctgccaaagaactgctatttggccattctgcctctgtgacttgtctggcccgagcacgtgattttagcaaacagccttacattgtgtcggcggctgaaaatggcgagatgtgcgtttggaacgttacaaatggacaatgtatggagaaagctacgctgccataccgacatacagctatctgctactatcattgctcctttcggatgactggggaaggctggctgctctgttgcggcgagtaccaggacgtgctgatcattgacgctaagacattggctgtcgtgcactctttcagatcctcacaatttccagactggatcaattgtatgtgtatcgtgcactctatgcgaattcaagaggacagtcttctggtggtgagtgtggcaggcgaacttaaggtgtgggatctgtctagctccatcaattcgatccaggagaagcaggacgtgtatgaaaaggaatctaagttcttggaaagcctgaactgtcagaccattaggttctgtacctacactgaacgcctgctcttagtggtgttttccaagtgctggaaggtctacgattactgtgatttctccctcctgctcacggaagtgagcaggaacggacaatttttcgccggaggagaggtgatcgctgctcatcgcatcctgatttggaccgaagatggccactcttatatctatcagctgctcaactctgggctgagtaaatccatttaccccgcagatggaagggttctcaaagaaacaatctatccgcacctgttatgcagtacatcagtacaggaaaacaaggagcaatcacggccatttgtgatgggatacatgaacgagcgtaaggaaccattttataaggtgctctttagtggagaggtaagcggcagaattaccctgtggcacatcccagacgtgccagtgagtaaattcgacggatctcccagggagatccctgtgaccgccacatggacactgcaggacaacttcgacaagcacgatacaatgagccagtccattatcgattatttcagcggcctcaaggatggagctgggacagctgtcgtgacatcttctgagtatatccctagcctcgataaactgatctgcggttgtgaggacggcactatcattattacccaggcgttgaacgccgctaaagccagacttctcgaggggggtagccttgtaaaggacagtccccctcacaaggttctgaagggccaccaccagtccgtgacttcactcttgtatccccatgggctgagcagcaaactggaccagagttggatgctgtccggggacctagacagctgcgtgatcctctgggacattttcacagaagagatcctgcataaattttttctggaagctggcccagtgaccagcctactgatgagtccagaaaagttcaaactgcggggagagcagatcatttgctgcgtttgcggagatcattccgtggcattgctgcatctggagggaaagtcttgtttgttgcacgcccgaaaacacttgtttcccgttaggatgataaagtggcaccccgtggagaactttctgatcgtaggctgcgctgatgacagtgtctatatctgggaaattgagacaggcaccctggagagacatgagaccggagaacgcgctagaattatcctgaattgctgcgatgattctcagctcgtaaagtccgtcctccctattgccagcgaaaccttgaaacataagagtatagagcagagatcttcaagtccttaccagttgggaccattgccgtgccctggattgcaggtcgagagctcgtgtaaagtgactgatgccaaattttgtcctaggccattcaacgtgctacctgtgaagaccaagtggagtaacgtggggtttcacatcctgctgttcgacctagaaaacttagtggagttgctactgcctaccccgttgagcgacgtcgacagcagtagctccttctacggtggcgaggtcctgagacgcgctaagtccactgtcgagaagaagacactcacattgaggaaaagcaaaacggcttgtggtcctctcagtgccgaagcactggctaagccaatcactgaatcgctcgcacagggggacaatacgatcaagttttcggaagaaaacgatggaattaagagacagaaaaagatgaagataagtaagaagatgcagccaaagccgtcccggaaagtagacgctagcttaactatcgacacagccaagcttttcctttcttgtctgctgccatggggcgtcgacaaggacctggactacttgtgtatcaaacatttgaatattctgaaattgcagggccctatcagcctaggaatttccttaaacgaggataacttctccttgatgctgcctggttgggatttgtgtaactctggtatgatcaaagactacagcggcgtgaatctcttcagccgcaaagtcttggacctgtccgacaaatacacagctactttgccaaatcaggtgggtattcctcggggtctcgagaataactgcgacagtctgcgagagagtgatactatcgtgtatctcctcagccgcctgtttctggtgaacaagttggttaacatgccgctggagctggcatgccgtgtgggaagtagctttcgcatggaaagcattcacaataaaatgcgtggagccggaaatgacattctgaacatgagcagcttctatagctgtctgcggaatggtaagaatgaaagtcatgtccctgaagccgatctgagtctgcttaaattaatatcctgttggagagaccagtctgtgcaggtcactgaagcgatccaagccgtgttgttggccgaggtccagcaacacatgaaatcgctgggtaagattccagtgaactctcagcctgtgagcatggcggaaaatggcaactgcgagatgaaacaaatgcttccgaaacttgagtggactgaagagctggaactccagtgtgtgcgaaacaccctgccactgcagacacctgttagcccagtcaagcatgactcaaactccaacagtgctaactttcaggatgtggaggatatgcctgatcggtgtgctcttgaggaaagtgaatctcccggtgagcctcgccatcatagctggatcgccaaagtctgtccctgtaaggtgtcttag

SEQ ID NO: 246834 - DNA, 3309 bp, synthetic construct
  misc_feature 1..3309: note = Description of Artificial Sequence: Synthetic coding sequence
  source 1..3309: mol_type = other DNA
atgcgcaccagtttgcaagctgtggcactgtgggggcagaaggctccccctcattcaataactgccatcatgatcacggacgaccagagaaccattgtcacaggctcccaggagggccagctctgtttatggaacctctcacatgaattaaaaattagcgccaaggagcttttgtttgggcactcagcctctgtcacttgtctagcacgtgcgagggacttctctaagcagccgtatattgtctcagccgctgagaacggcgaaatgtgcgtgtggaatgtgacaaacggacaatgcatggagaaggcaacactgccctaccgtcacacggccatctgttactaccactgcagctttcgtatgactggagagggctggctcttgtgttgcggagagtatcaagacgttctcatcatagacgcgaagaccctcgccgtagtgcatagtttccggagttcacagtttcccgactggatcaattgtatgtgtattgttcatagtatgcggatccaggaagattctctcttggttgtctccgtagctggggagctcaaagtgtgggatctcagcagttcaattaatagcattcaggagaagcaggatgtttacgaaaaagaatctaaatttctagagagtctaaattgtcagactataagattttgtacctatacagaaagactgctgctcgttgtcttctccaagtgttggaaggtatatgactactgcgacttcagcctgctcttgacagaagtgagcaggaacggtcagttttttgccggtggtgaggtaatcgctgcgcatcgcattctaatctggaccgaggatgggcactcctacatttaccagctcctcaacagcgggctgagcaagagcatttatcccgctgatggcagagtcttgaaggaaaccatctacccacacctcctgtgttccacttccgtgcaggagaacaaggaacagtctagacccttcgttatggggtatatgaacgaaagaaaggaacctttctataaagttctattctctggggaagtgtccggcagaataacattgtggcatatccctgatgtcccagtgtctaagttcgatggatccccgagggagatccccgtgaccgccacttggacactgcaggataacttcgacaagcacgacaccatgtctcaatctattatcgactatttctcagggttaaaggatggggcaggaacagctgttgttacctcttcggagtacataccatcactagacaaactgatctgcggttgcgaggatggaactattattatcacccaggcgctgaatgcagccaaggccaggcttctggaggggggaagcctggttaaagattcccctccccacaaggtgctaaaagggcatcatcagtccgtcacatctctcttgtaccctcacggactttcatcaaaacttgatcagtcttggatgctgtcgggggatctggattcctgtgtgattctctgggatatcttcacagaagaaattctccacaagttttttctggaggccggaccagtgaccagcctgctgatgtctcccgagaagttcaaactgcggggtgaacagatcatctgttgcgtctgcggggatcactctgtggctttgctgcatctggaaggcaagtcttgccttttgcacgcacgcaaacatttgttcccagtgaggatgattaagtggcatcctgttgagaatttcctgatcgtgggctgtgccgatgacagcgtttacatctgggagatcgaaaccggtactctggagaggcacgagactggggaacgcgctaggatcattctgaattgctgcgacgactctcagctggtgaagtccgtgctgccaattgcatctgagactctcaagcacaagtctatcgaacaaaggtcctcaagcccttaccagctgggacctctcccctgccccggattacaggtggaatcttcttgcaaagtgaccgacgcaaagttctgcccgaggccatttaacgtgttacccgttaagactaagtggtctaatgtcgggttccatattcttctctttgacctggaaaaccttgtagagctcctgttgcccaccccactgtcagacgtggacagtagtagttcgttctatggcggtgaggtgctgaggcgcgctaaatctacagtggagaagaaaaccctgactctgcggaaatcaaaaaccgcgtgtgggcctctctccgctgaggccttggcaaagcccattactgagtctctggcacagggggacaacacaatcaagttcagcgaagagaatgacggtattaagcggcagaagaagatgaagatctccaaaaagatgcagccgaaacctagtcgcaaggtggacgctagtctgaccattgacactgctaagcttttcttatcgtgtctgctaccctggggggtggacaaagacctggactatctgtgtatcaaacatctgaacatcctgaagctgcaagggcctatctccctaggaatttctctgaatgaagacaattttagcctcatgctgccaggctgggatttgtgcaatagcggaatgataaaagactatagcggagttaacctgttttccaggaaggtactggacctttcagataagtatacagccaccctgcccaaccaggtgggaatcccaagaggattggaaaataattgtgattccttgagagaaagcgacacgatcgtttatctgctgtcaaggctcttcctggtcaataagctcgtgaatatgccgctggaactggcctgtcgtgtgggcagttcgtttcggatggagtcaatccataataagatgaggggagcgggtaacgacatcctgaacatgtcctctttttattcttgtcttcgtaacggaaaaaacgagtcacatgtgcccgaggcagacctgtccttactgaaactcatctcttgctggcgagaccagtccgttcaggtcaccgaagcaatccaggcggtgctgctggccgaggtccagcagcatatgaaatccctgggtaaaatccccgtgaactcacagccagtgagtatggcagagaatggaaattgtgagatgaaacagatgcttcctaagctggaatggacagaagagttggaactacagtgcgtgcgcaacacgctgcctctccaaacccccgtgagccccgtgaagcacgactcgaactcaaatagtgcaaactttcaggacgtcgaagatatgcctgacaggtgcgccctcgaagagtccgagagtcccggagagccgaggcaccatagctggattgccaaggtttgtccttgtaaggttagctag

SEQ ID NO: 246835 - DNA, 3300 bp, synthetic construct
  misc_feature 1..3300: note = Description of Artificial Sequence: Synthetic coding sequence
  source 1..3300: mol_type = other DNA
atgcgcacatccctgcaggccgtagccctgtggggccagaaggcccctccacatagtattacggccatcatgatcacagacgaccaacggaccatcgtcaccgggagtcaagagggccaactctgcctatggaatctgtcccatgagctgaaaatctcagcaaaggaactgctgttcggtcacagcgcgtcagtaacttgcctcgctcgggcacgagacttctctaagcagccatacatcgtgtcagccgcagaaaatggagaaatgtgcgtctggaacgtcactaacgggcaatgcatggaaaaggccaccttgccctatagacacactgccatctgttactatcactgctcgtttcgaatgactggggaaggctggctcctctgctgcggcgagtatcaggacgttctgattattgatgctaagaccttggcagtggtgcactccttcagaagcagccagtttccggattggataaattgcatgtgtatcgtacactctatgaggattcaagacagcctcctcgtcgtaagtgtagccggagagctgaaggtttgggacttaagtagtagcattaatagcattcaggagaaacaagacgtgtacgagaaggagtcaaaatttctcgagagtctgaactgccagaccatcaggttttgcacgtacactgagcggcttctcctcgtcgtttttagtaaatgttggaaggtgtacgattactgtgacttttccctcctgttgactgaagttagtagaaacggccagttttttgcgggtggagaagtgatagccgcacacaggatcctgatatggactgaggacggccacagttatatatatcagttactcaactcaggactgtcaaagtctatctaccccgcagacggcagagttctcaaggagactatctatccgcatctgctgtgctcaacaagcgtgcaggaaaacaaaagccggccttttgtgatggggtacatgaacgaaaggaaagagcccttctacaaggtcctgtttagcggggaggtgtctggacgcatcactctgtggcatatccctgatgtcccagtgtcaaagttcgatgggagtccgagagagatacctgtgacggcgacctggacactgcaggataactttgataagcatgacactatgtctcagagtatcatcgactacttttccggtctgaaagacggtgcgggaacggctgtggtgacctcttctgaatacataccaagccttgataagctgatttgcggatgcgaagacggcactatcataatcactcaagcattgaatgccgctaaggccagattgctggagggcggtagtctggttaaggacagtccaccgcataaagtcttgaaagggcaccaccagtcagtgacaagtctgctttacccacacggattgtccagcaaactggatcagagctggatgctttcgggggatctggatagttgtgttatactgtgggacatttttactgaagaaatcctgcacaagttttttctggaagccggacccgtcacttccctgctaatgagccctgaaaaattcaagctcagaggggaacagatcatatgttgtgtttgcggagatcattcagtagcactccttcatctggaggggaaatcctgtttgcttcacgccagaaagcacctgtttccagtacggatgattaagtggcatcctgtggagaatttcttgattgtgggttgtgccgacgactcagtgtatatctgggagattgaaacagggacattagaaaggcatgagacaggggaaagagctcgtataatcctgaactgttgtgacgattcgcagctggtgaagagcgttcttcctatcgccagtgagacactgaaacacaaatctatcgaacagagatccagctctccctaccagctcggtcccctgccatgcccaggactgcaggtcgagagttcctgcaaggttaccgacgcgaagttttgcccgcgtccattcaatgtgctgcctgtgaaaaccaaatggtccaacgtcggtttccacatactgctgttcgatctggaaaacctggttgagctcttgctgccaacccccctttctgatgttgacagctcaagctcattttatgggggtgaagtgctgaggcgggctaaatccacagtggaaaaaaagacactgactcttaggaagtcaaagacagcatgtggcccactgtccgcggaggctttagccaaacctatcaccgagtctctggctcagggtgataataccatcaaattcagcgaagagaatgatggcataaaacggcagaagaaaatgaagatctctaaaaaaatgcaaccgaaaccttctcggaaggtggacgcttccctgacaatcgatactgctaagctctttctgagctgcttgctgccttggggggtggataaagatctcgattacttgtgcatcaaacatctgaacatcttgaagctccaaggtcccatatctcttggaatctcactgaatgaagataacttttccctcatgctccctggctgggatctgtgcaactcaggaatgataaaggattactccggggtcaacctgttcagccgtaaagtcttggatttgagcgacaagtacacagccactttgcctaaccaggtgggaatccccagggggctagaaaacaactgcgactcccttagggagtctgacactattgtctacctcctgtcccgcctctttctcgtgaataagctcgtcaacatgccactggagctagcctgtagagtgggcagtagctttagaatggaatccatccataataagatgcgcggtgccggaaatgacatcctgaacatgtcaagcttttatagctgtctgaggaacgggaaaaacgagagccatgtaccggaagctgacttatccctcctcaagctgatcagttgttggcgagatcaaagtgtccaagtgaccgaagcaatccaagcagtgctcttagctgaagtgcaacagcacatgaaaagtttgggcaaaattcctgtcaactcacagcctgtttctatggctgaaaacggaaactgcgagatgaaacagatgctaccaaagctggaatggaccgaggagctggaactccagtgtgtgcgcaatacgctccctctgcagacacccgtcagccctgtgaaacacgacagtaattcaaacagcgccaatttccaggacgtggaggacatgccagacaggtgcgccctcgaagagtccgagtcgcctggagaaccgcgacatcatagctggatagccaaggtctgtccatgcaaggtcagttag

SEQ ID NO: 246836 - DNA, 2328 bp, synthetic construct
  misc_feature 1..2328: note = Description of Artificial Sequence: Synthetic coding sequence
  source 1..2328: mol_type = other DNA
atgaggacctcccttcaagccgtggccctctggggtcagaaggcgcctcctcactctatcacagccattatgattaccgatgatcagagaaccatagttaccgggagtcaggagggtcaactgtgtctgtggaacctgagccacgaactgaaaataagcgccaaagagctcctcttcggtcactcagcatcagtaacctgccttgccagagctcgtgacttttcaaagcagccatatatcgtatccgccgctgagaacggagagatgtgcgtgtggaatgtgacaaatggtcagtgtatggagaaggcaaccctcccctacaggcatacagccatctgttattaccattgtagtttccgcatgacgggagagggctggcttctgtgttgcggggaataccaggacgttctcattatcgacgctaaaactctggcggtagtacattccttccgcagttcacagttcccagattggattaattgcatgtgtatcgtgcattccatgcgcattcaagaggatagcctgcttgtcgtgtcagtggcgggtgaattaaaggtctgggatctgtcatcgagtataaactctatacaggaaaagcaagatgtatacgaaaaagagtctaagtttttagagtcactgaattgtcagaccatacgcttttgcacctatacagagcggctgttactggttgtcttttctaagtgctggaaagtctacgattattgcgacttcagcctgctccttacggaagtcagcagaaacggtcagttttttgcaggaggagaggtgatagccgcacaccgcatcctcatctggacggaggatgggcattcttacatctaccagttgctgaacagcggcctgagtaagtctatttatccagccgacggcagggtgctgaaagagacaatctacccgcacctgctgtgctctacttccgtgcaagagaacaaggagcagtcccgaccttttgtgatggggtatatgaatgagagaaaagagccattttacaaagtgttgttcagtggcgaagtgagcggcaggatcaccctgtggcatattccagatgtaccagtgtcaaagtttgatggctcccctcgcgagattcctgtaaccgcaacttggaccctacaggacaactttgataaacatgacaccatgagccagtccataattgactatttctctggcctcaaggacggcgcaggtacagccgtggtcactagctcagagtatattcccagcctcgataagctgatttgtgggtgtgaggatggaacaattatcattacccaggctctcaatgcggctaaagcccgtctgttagagggcggttccttggtcaaggattctcccccacataaagttctgaagggtcatcaccagagcgttactagcttgctgtacccccatggtctcagctcgaaactagatcagagttggatgttgtctggcgaccttgacagctgtgttattctctgggatatctttacagaagaaatactacataaattctttctcgaggccggtccagtaacttctcttctcatgtcccctgagaaattcaagctcagaggcgagcagatcatttgctgcgtatgtggggaccattccgtcgccctcttacacttagagggcaagtcatgtctactgcacgcaaggaagcacttatttccggtgagaatgatcaaatggcatccggtggagaatttcttaatcgtcggttgcgcagacgattctgtgtatatctgggagatcgagacgggcacacttgagagacacgagactggagaacgtgcaaggattattcttaattgctgtgatgactctcagctggtgaagagcgtcctcccaattgcctccgaaaccctcaaacataagagcatcgaacagcgcagctcatcaccttaccagctcggcccattgccttgccctggtttgcaggtcgagtccagctgcaaagtcaccgacgcgaaattttgtcccaggccttttaatgtgctgcccgtcaagactaagtggtcaaacgtcggattccacattcttctcttcgacctagagaatctagtggaactgctgctccccacccctctatcagacgtggattcttcaagctccttttacgggggagaagtgctgcggagagcaaaatctacggtggaaaagaagactctgactttgcggaaatcgaagactgcttgcggaccacttagtgctgaagctctagccaaaccaataacagagtcattggctcagggcgacaacactattaaatttagcgaggaaaacgacgggatcaagcgccagaagaagatgaagatatcctag

SEQ ID NO: 246837 - DNA, 1119 bp, synthetic construct
  misc_feature 1..1119: note = Description of Artificial Sequence: Synthetic coding sequence
  source 1..1119: mol_type = other DNA
atggagccggctcccagcgcaggagctgaactccaaccacccctgttcgcgaatgcaagcgatgcctatcctagcgcttgcccttccgcaggcgctaacgccagtggaccccctggcgcacggtccgcctcaagcctggccttagccatcgcaattacggccctttactctgccgtgtgtgctgtggggcttctggggaatgtgctggtaatgttcgggatcgtcagatacaccaagatgaagaccgctactaatatttatatcttcaacctggccctggccgacgccctcgcaactagtaccctgccattccaatccgcaaaatatctgatggagacctggccttttggagagttactgtgcaaagccgtgctgagcatcgactactacaacatgttcacctccattttcacgctgaccatgatgtcagtggatcgttacatcgctgtgtgtcacccagtgaaagcactggactttcgaacccccgcaaaggccaaactgattaacatctgtatctgggtcttagcgtccggagtcggtgtcccaatcatggtgatggccgtgactcggcctcgggatggggcagtggtgtgtatgcttcaatttccgtcgccctcatggtattgggacacagtcaccaagatttgtgtctttctgtttgcttttgtcgtgccgatccttattattactgtttgttatggactgatgctcctacggttgagaagcgtccggctcctctctgggagtaaggaaaaagataggtctctcagaaggatcacacgcatggtgcttgtggtcgtgggggcattcgtagtctgttgggcaccgatccatatcttcgttatcgtttggaccctcgtggatattgaccgccgagatcctctggtggttgctgcccttcacctctgcatcgcactggggtatgcaaactcctccctgaatcctgtgctctatgcctttttggatgaaaacttcaaacggtgtttccgccagctttgtcggaaaccatgcggaagacctgacccttcgagcttctctcgggcacgagaggccaccgcgcgagaacgtgtcacagcttgcaccccctcggacgggccaggtggcggagccgcagcctag

SEQ ID NO: 246838 - DNA, 837 bp, synthetic construct
  misc_feature 1..837: note = Description of Artificial Sequence: Synthetic coding sequence
  source 1..837: mol_type = other DNA
atgcggaaagagacacctccccctctagtcccccctgccgctcgtgaatggaatttgccacctaacgcacctgcgtgcatggaaagacagctcgaggcagctcggtaccgcagcgacggagcactgttgctgggggcatcttccttgagtggccgatgctgggctgggtctctctggctgtttaaagatccttgtgcagctcctaatgaaggattttgctctgccggagttcagaccgaggcgggagttgccgacttgacatgggtgggagagagagggattctcgtggcctctgattcggcccacgccgctcaggtgacctgcgtagctgcaagccctcataaggatagcgtttttctatcctgtagtgaagataaccgaattctgctctgggatacacgctgtcctaaacccgcatcacagatcggctgttcggcccctggctacctgcccacgtccctcgcttggcacccgcagcagtccgaggttttcgtgttcggtgatgagaatggtactgtgtcattggtggacacaaaaagcacttcttgtgtgctctctagcgcggtccactcacagtgtgtcacaggcctggtcttctcccctcacagcgtacctttcctggccagtctgtctgaagattgttctctggcagtgcttgattcttccctctctgaattgtttcgatcccaagcacaccgcgatttcgtgcgggatgcaacttggagcccactgaaccacagcttgctgacaaccgtgggctgggatcatcaggtggtccaccatgtagtgcctactgagccgctgcctgcccctggacccgcttctgtgacagagtag

SEQ ID NO: 246839 - DNA, 876 bp, synthetic construct
  misc_feature 1..876: note = Description of Artificial Sequence: Synthetic coding sequence
  source 1..876: mol_type = other DNA
taatgtgccgcacctaatgaaggcttctgctccgcgggagttcagacggaagcgggtgtggccgacctaacatgggtgggagaacgtggaatccttgtggcgtcagactccggggctgtcgaactgtgggaactggatgaaaacgaaaccctgattgtcagcaagttttgtaagtacgagcacgacgatattgtctccacggtgagcgtcctgtctagcggcactcaggcagtgtctggttccaaagatatttgcattaaagtctgggatctggcacagcaggtagtcctgagcagctatagggcacatgccgctcaggtcacttgtgtggcagcgagcccccataaggacagcgtgtttctgtcctgtagcgaagataatagaatcctcctgtgggacacaaggtgtcccaaaccagccagccagatcgggtgcagcgccccaggatacctcccaacgtcgctggcatggcacccacagcaaagcgaggtctttgtgtttggggatgagaacggaaccgtgtcgctcgtcgacaccaagtctacctcctgcgtgctgtcctctgcagtccacagccagtgcgtgactgggttggtattttcaccgcacagactcgatcttagccagccctccccaccctccgattcagtgcccttcttagcatcactaagtgaggactgttctctcgctgtgctggacagctctctgagcgaacttttccggtctcaggctcacagggactttgtaagggacgccacatggtctcccctgaatcattcgcttctgacaaccgtgggctgggaccaccaggtggtgcaccacgtggtgcctaccgagcccctccctgcgccaggaccagcttctgttaccgagtag

SEQ ID NO: 246840 - DNA, 942 bp, synthetic construct
  misc_feature 1..942: note = Description of Artificial Sequence: Synthetic coding sequence
  source 1..942: mol_type = other DNA
atgaagctcaccgactctgtcctgagatcgttccgagtcgccaaggttttccgtgaaaactcagataaaattaactgttttgatttcagcccgaatggagaaaccgtaatttcctcttccgacgacgactccatcgtcctatacgactgccaagaaggcaaacctaagaggaccctgtacagcaaaaagtacggtgtggaccttatccgatacacacatgccgctaatacagttgtttactccagtaacaaaatcgatgacactatccgttatttatcattgcatgacaataaatacattagatatttccccggacattccaaaagggtagtcgccctgtcgatgtccccggtagacgacaccttcatcagtggttctctggacaaaaccatcaggctctgggatttgcgtagtccaaattgccaggggctgatgcaccttcagggcaaaccagtctgtagttttgaccctgaaggtctgatcttcgctgctggtgtaaactcggagatggtcaaactgtatgacctccgtagtttcgataagggccctttcgccacgtttaaaatgcaatacgatcggacctgcgagtggaccggtttgaagttcagcaatgacggaaaactgatccttatcagcactaatggcagtttcataagactgatagacgcatttaaaggcgtcgttatgcacacattcggcggttatgctaacagtaaggcagtgacgctcgaagccagctttacacctgactctcagtttattatgattggctcagaggatggcaaaatccacgtatggaacggcgagagcgggatcaaggttgctgtgctggacggcaagcacaccggacctatcacatgccttcagttcaacccaaagttcatgacatttgcctcagcatgctccaatatggctttttggcttcccaccattgacgactag

SEQ ID NO: 246841 - DNA, 1359 bp, synthetic construct
  misc_feature 1..1359: note = Description of Artificial Sequence: Synthetic coding sequence
  source 1..1359: mol_type = other DNA
atgatggggtgctttgcactgcagaccgtcgatacagagctgaccgccgacagcgtggagtggtgccccctccaggggtgcagacacctcctcgcttgcggtacttaccagctgcgccgaccggaggatcgtcccgcaggacctcagaataaaggaggaatggaagtcaaggaaccacaggtccgactcgggaggttatttctgtatagcttcaacgacaacaactccatccaccctctggtggaagtccagagaaaagatacctctgccatcctggacatgaagtggtgccatatcccagtggccggacacgcgttgctaggcttagctgacgccagtggaagtattcaattgctccgtctcgtggagagcgaaaagagccatgttttagaaccactgtctagtctagccctggaagaacagtgtctcgccctgagccttgattggtcaaccggcaagacgggacgggctggggaccaacctctcaagatcattagttctgacagcacaggtcagctgcatctgctcatggttaatgaaaccaggcccaggttgcagaaggtggcttcttggcaggcccaccagtttgaggcgtggatcgccgctttcaattattggcacccagagatagtctactctggcggagatgatggactcctgcgtgggtgggacactagggttccaggcaagtttctgtttaccagcaaaagacacaccatgggcgtctgtagtattcaaagctctccccatcgcgaacatatcttggcaaccgggtcttatgatgagcatattcttctgtgggatactcgaaatatgaagcagcctctggcagatacccctgtccagggtggtgtttggcgaatcaagtggcacccattccaccaccatttgttactggctgcctgtatgcactccggcttcaagattttaaattgtcaaaaagccatggaggagcggcaagaggccacagtgctgactagtcatacactgccagatagtcttgtctacggtgccgactggtcatggcttctgtttagatccttgcagcgagcgccttcatggtcgttcccctccaacctgggcactaagacagccgacctcaaaggtgcctccgagttgcctactccatgtcacgaatgcagagaggacaatgacggtgagggccacgcaagaccccagtccgggatgaagcctttaaccgaagggatgaggaagaacggcacctggcttcaggctaccgccgcaaccacacgcgattgcggagttaaccccgaggaggccgatagcgccttcagcctgctcgcaacatgtagtttttacgatcacgccctgcatctgtgggagtgggagggcaactag

SEQ ID NO: 246842 - DNA, 1074 bp, synthetic construct
  misc_feature 1..1074: note = Description of Artificial Sequence: Synthetic coding sequence
  source 1..1074: mol_type = other DNA
atgagcgcctttgaaaaaccccagatcatagcccacatccagaaggggttcaattatacagtctttgactgtaagtgggttccctgcagcgcaaagtttgttactatggggaacttcgccaggggtactggagtgattcagctttacgagatacagcacggcgatctgaaactcctccgggaaattgagaaggcgaaacccatcaagtgtggtacgtttggagcaacaagcctgcaacagcggtatctggccactggcgacttcggtgggaacttgcacatctggaatctggaggctcccgagatgcctgtctactccgtgaaaggccacaaggagataataaacgcaatcgacggaatcggaggactcggcataggggagggagcccctgaaattgtgaccggtagtcgtgacggcacagtgaaagtgtgggacccacgacagaaggatgatcccgttgcaaatatggagcccgtacaaggggagaataagcgggactgttggactgtcgcctttggaaatgcctacaatcaggaggagagagtcgtgtgtgcaggttacgacaatggcgatatcaagctgtttgatctgaggaatatggcactcaggtgggagaccaacattaaaaacggtgtgtgttctttggagttcgaccgtaaggatatctcaatgaacaagctggtggcaactagccttgagggtaagttccatgttttcgacatgcggacacagcatccaaccaaggggttcgcgtctgtgtctgaaaaggcccacaagtctacagtgtggcaggtcaggcatctccctcagaatagggagctgttcctgactgccggtggtgcgggagggttgcacctgtggaagtacgagtatccgattcagaggtccaagaaagacagcgagggcatcgagatgggcgtggccggaagcgtgtctctgctgcagaacgtgactctgagtacgcaacctattagctccttagactggagccccgataaacgcggtctgtgcgtgtgctccagcttcgaccaaaccgtgcgggtcctgattgtgacaaaacttaacaagatatag

SEQ ID NO: 246843 - DNA, 867 bp, synthetic construct
  misc_feature 1..867: note = Description of Artificial Sequence: Synthetic coding sequence
  source 1..867: mol_type = other DNA
atgtctgctttcgaaaagccacagattatcgcacacatccagaagggtttcaactacaccgtgttcgactgtaagtgggttccctgctcggcgaagttcgtcacaatgggcaatttcgccagaggtacaggggtgatccaactgtatgagattcaacacggagatctcaaattgctccgtgagatagagaaggcaaagcccatcaaatgcggcacctttggggcaacttccttacagcagcgatacctcgccaccggggactttggcggaaatctccacatctggaatctcgaggcccctgagatgcccgtgtactccgtgaagggccataaagagatcatcaacgctatcgacgggatagggggtctgggtattggagagggggcacccgagatcgtcacaggcagcagggacgggaccgtcaaggtctgggacccaagacaaaaagatgatcccgtggctaatatggagcccgttcaaggcgagaacaaaagggattgttggaccgtggcatttgggaatgcatacaatcaagaggagcgcgtcgtgtgcgcaggatatgataacggagacataaagctgttcgatcttaggaacatggctcttcgttgggagaccaacattaagaacggcgtgtgctcattagagtttgatagaaaggatatctccatgaataagctcgtggcgacttccttagaaggtaagttccacgtgtttgacatgcggacacaacatcctacaaaaggattcgcgagtgtgagtgagaaggcccacaagtccaccgtctggcaggttaggcacctgccacagaatagggaactgtttctcacggcaggcggagcaggaggtctacacctctggaaatag

SEQ ID NO: 246844 - DNA, 3816 bp, synthetic construct
  misc_feature 1..3816: note = Description of Artificial Sequence: Synthetic coding sequence
  source 1..3816: mol_type = other DNA
taaagagactttcagagcgaggtgctccttagtgcgatggaattgtttcatatgacatccggaggcgatgctgccatgttccgagatggtaaggaacctcaaccatctgccgaggcggcagcagccccttcattggccaacataagttgttttacacagaagcttgtagagaaactctatagcggtatgttcagcgcggaccctagacacattttgttatttatcctagaacacataatggtggtgattgaaactgccagctcccaaagggacacagtgctcagcactctgtacagctccctcaataaggtgatcttgtactgtctgtctaagccccagcagtccctctccgagtgtttggggctgctgtctatccttggttttcttcaggagcattgggacgtggttttcgccacttataattccaacatcagctttctactgtgtttaatgcattgtctgctcctcctgaatgaacgcagttatccggagggtttcggactggaacccaagccccgaatgtctacctaccatcaagtattcctgagccccaatgaggacgttaaggagaagcgcgaagacctgccctccctaagcgacgttcagcacaacatccagaagacagtacaaaccttgtggcaacaactggtggcgcagagacaacagacactggaggatgcttttaaaatcgatctctcggtaaaacctggcgagagagaggtgaaaatcgaagaggtgacacctctgtgggaggaaacgatgttgaaagcctggcaacattacctggcttcggaaaagaaaagcctggcctcccggtccaatgtggcccatcatagtaaggtaaccctctggtctggctccctttcaagcgcaatgaaactgatgcccggtagacaggctaaggaccctgagtgcaagaccgaggattttgtttcatgcattgagaactacagaagaaggggacaggaactctatgcctctctgtataaggaccacgtccagagacgcaagtgcggaaacatcaaggccgcaaacgcctgggctcgtatccaggagcaactgttcggggagcttgggttgtggtcacagggcgaagagacaaagccatgctctccctgggaattggactggagggaaggcccagcacgcatgcgcaagcgcattaaacgccttagccccttggaagcactgagctctggcagacataaagaatctcaggacaaaaatgaccatatctcccaaactaacgccgaaaaccaggacgagctgactctgagggaggccgagggtgaaccggacgaggtcggtgtggactgcacacagttaacctttttccccgcactgcacgaatcccttcattcggaagattttctcgaactgtgcagggaacgccaggtaattttgcaggaactcctggataaggagaaggtgacacagaagttctcactcgttattgtccagggacaccttgtctccgagggggttctgctctttggtcaccaacatttctatatctgcgagaactttactttgagtcctactggagacgtgtattgtactcggcattgcctgtccaacattagtgaccctttcatttttaacctgtgttcaaaggataggagcactgatcattactcctgtcagtgccactcatacgcggacatgagggagctgcgacaagctaggttcctgcttcaagacatcgccctcgagattttcttccacaatggctattccaagttcttggtattctataacaacgatcggagcaaagcattcaagtctttttgctccttccagcctagcctcaagggaaaagctacctctgaggacaccctctcactccgcagatatcccggttcagatagaattatgctgcagaaatggcaaaagcgtgatatcagtaatttcgaatatttaatgtatctgaacacagccgctgggcgtacctgcaatgattacatgcaatacccagtgtttccatgggtgctggccgattatacgagcgagacacttaacctggctaatcccaaaatctttagagacctgagtaagcctatgggtgcccagacgaaggagcgaaagctcaaattcattcagcggttcaaagaggttgagaaaacagagggagatatgaccgttcagtgccactactacacacactacagttctgcaattatagtggcatcctacctggtgcgaatgcccccttttactcaggcattctgcgccttgcagggagggtcattcgatgtcgcggacaggatgttccactctgtcaagtcaacgtgggaatcagcctcacgagagaacatgtcagacgtgagggaacttacccccgaattcttctatctgccagagtttctgactaattgcaacggggttgagtttggctgtatgcaggacgggactgtgctgggagatgtgcagttacccccatgggcagatggggaccccagaaaatttatttctctacatagaaaagccctggagtcagattttgttagcgcaaatctgcatcactggatagatcttatctttggttataagcagcagggccctgccgcagtcgatgcggtcaacatcttccacccgtacttctatggagacagaatggaccttagctctattaccgaccctcttattaagagcactatcctcggctttgtatcaaatttcggccaagtgcccaaacagttatttaccaaacctcatccagctaggacggctgccggtaagcctctccctgggaaagacgtgagcaccccagttagccttcccggtcatccgcagccattcttttatagcctccagagtctcaggccctctcaggtcactgtgaaagacatgtatctcttctccttggggtccgagagtccaaaaggagcaattgggcatatcgtgtcaactgaaaagactatcttggctgttgaacgcaataaggtcctgctgcctcctttgtggaaccggactttcagctgggggttcgacgacttctcctgttgcctgggttcctatggatcagataaggtacttatgaccttcgagaatttggctgcctggggtagatgcctctgtgctgtatgtccttctccaaccacgattgttacaagcgggacttcaacggtggtgtgtgtgtgggaactctcaatgactaaggggagacctagaggtctgagactcaggcaggccttatacggacacacccaggctgtcacctgcctcgccgctagcgtcaccttttccctccttgtgtccgggagtcaggactgcacatgtatcttgtgggatcttgaccacctgactcacgttaccagactgcccgctcatcgtgaagggatctccgcaatcacaatcagtgacgtgtccgggactattgtgtcctgcgctggtgcacatctgtctctgtggaacgtgaatggccagccccttgcttctattaccacagcttggggacctgaaggggctataacgtgttgctgtcttatggagggcccagcttgggatacatcacagattatcatcactggatctcaagacggcatggtgcgagtgtggaagacagaagatgtgaaaatgtccgtgccaggcagacctgccggagaggaacctccggctcaaccaccttcccccagaggacacaagtgggagaaaaacctggcgctgtcccgcgaactggatgtaagcattgctctcactggaaagccttcgaagacaagccctgcagtaacagctctagccgtctctagaaatcacactaagctgctggtgggagacgagagagggaggatcttttgctggtctgcggatgggtag

SEQ ID NO: 246845 - DNA, 6804 bp, synthetic construct
  misc_feature 1..6804: note = Description of Artificial Sequence: Synthetic coding sequence
  source 1..6804: mol_type = other DNA
tagaagcttgctagccaagcgattgagcctgacgtcctgcggcagttcctgggactcggcataccaagctcactctcggccacaaccaagattcttgacagttcccacactcaccggggtaatcccggatgctccggtagccagaccgcacagggattagccgaaggtccatggccggctgcgcctgacgctggcctgcacccaggggttacgcaggccccacagccactcggagaaagccaggattcaaccacggccttgcagacggccctgagcctaatatcgatgacttcccccaggaaccttcagccacagcgcgcagctttggcccctagttttgtcgagttcgatatgagcgtcgagggttatgggtgcctgtttattcctaccctgtccacagtcatgggcacgtccaccgagtatagtgtgtcaggaggcattgggacaggtgcaacccgaccattcccacctccagggggactgactttttcttgctggttcctgatcagcagacacggggctgcaacagaaggccaccctctgcgtttcctgaccttggtgcggcatctggcaaggactgagcagccctttgtgtgttttagcgtgagcctgtgtccagacgatctatccctggtagtgtcaaccgaggagaaagagtttcaacctctcgacgtcatggagccagaagacgatagtgaaccaagtgcaggctgtcaactccaggtccgatgcggtcagctgctcgcctgtggacagtggcatcacctcgccgttgtggtcaccaaagagatgaagcggcattgtaccgtttctacctgcctcgatgggcaggtcatcggtagcgccaaaatgttgtacattcaggccctccctggcccatttctgtccatggatccctctgcttttgtggacgtgtacggatatatcgccacaccgagggtttggaagcagaagagtagccttatctggagactcggtcctacttatctgtttgaagaggccatcagcatggaaaccctggaggtgattaataagttagggcctaggtactgcggcaacttccaggccgtgcatgtccagggggaggatcttgattccgaggcaacaccctttgtggctgaagagagagtatccttcggcctgcatattgcctcaagcagtattacctcagtagcggatataaggaacgcctataacgaagtagactcgaggctcattgctaaggaaatgaatataagcagccgagataatgccatgcccgtctttctgctgcggaactgtgcagggcacctgtccggctcgttgagaacgatcggggctgtggcagtaggacagctgggcgtacgggtcttccatagctcaccagcggcaagtagtttggatttcattggtggcccagctatccttcttggcctgataagcctggcaacagacgatcacaccatgtacgcggctgttaaggtattgcactcagtgctgacaagcaatgctatgtgcgacttcttaatgcaacacatttgcggctatcaaatcatggccttcctcctgcggaaaaaagctagcctgctgaatcaccgaattttccaattgatcttatcggtagcaggtactgtggaactgggctttagatcttctgcaataaccaatacgggtgtttttcagcatatcctttgtaacttcgagctgtggatgaacacagccgacaaccttgagctgtccctattctctcatcttcttgagattctgcagtctcctcgggagggaccccgaaacgctgaggccgcacaccaggcccagctgatccccaaactgatttttctgtttaatgaaccatccctgattcctagcaagatttcgaccatcataggtatactggcctgccagttacgaggacatttttcaacccaggacctactcaggatcggactgttcgtggtttacacactgaaaccatcaagtgtcaatgagaggcagatctgcatggatggcgcactcgatccctccctacccgctgggtcacagacaagcggcaaaacaatctggctcagaaatcagctgctggagatgctgctttcggtcattagttcgccacagctgcatctatcatccgaatccaaagaagagatgttcttgaaactcggcccagattggttcctgctgctgctgcaggggcatttgcacgcgtcaacaaccgtgctcgctctcaagctgcttctctacttcctcgcaagccccagccttcgcacccgcttcagagatggcctgtgcgccggaagctgggtggaacgtagtaccgaaggagtcgatattgtaatggataatctgaagagccaaagccccctgccggaacaaagtccctgcctgctgcccggatttagagttttgaacgattttctggctcatcacgtgcacatcccagaggtgtacttaattgtgagcacattctttctacagactcccctaaccgagctcatggatggtccgaaggattctctggacgccatgttgcaatggctccttcagcgccaccaccaggaggaagtccttcaggcagggctctgcacagagggcgcattgctcttacttgaaatgctgaaagccacaatgtcccagcctctggctggatctgaggacggggcatgggcccagacctttccagcctctgttctgcaatttctgtcactcgtgcatcgcacctatccgcaggatcctgcctggagggcacctgaattcttgcagaccttggccatcgccgcattcccactgggggctcagaaaggtgtaggcgcagagtccacacgtaataccagtagcccagaagctgcggcagaaggggacagcaccgtggaggggctgcaggcgcctacaaaggcacatcccgctcggaggaagctacgtgagtttacccagctgctgcttagggaactgttgctaggagccagttcacccaagcaatggctacctctcgaagtgcttctggaagcgtcacctgaccatgccacctcccaacagaaaagggattttcagagcgaggtactcttgtctgcaatggaacttttccacatgaccagcgggggagatgctgccatgtttagggacggcaaagaacctcagcctagcgccgaggctgctgcagctccatctttagctaacatcagctgtttcacacagaagctggtggaaaagctctacagtggcatgtttagtgctgacccacgtcacatcctgttgtttatactcgaacatatcatggttgtgatcgaaaccgccagttcccagagagacacagtgctgagtaccctttattcttctttgaataaagtgatcctatattgcttgagcaagccccaacagtcgctaagcgagtgtctggggctactttccatcctgggctttttgcaagagcactgggacgtagttttcgccacatacaatagcaatatctccttcctgttatgcttaatgcactgtcttttgctgctcaatgagaggagctatcccgaaggattcggcctcgagccaaagcccagaatgagcacctatcatcaagtgtttctctccccaaatgaggacgtgaaggagaagagagaagatctaccctccctgtccgatgtgcagcacaacattcagaaaaccgttcagacactatggcagcagctcgtggcccaaagacagcaaacccttgaagacgcttttaaaatcgacctaagcgtgaagcccggagaaagggaggtcaaaatcgaggaggtgactcccctttgggaggagactatgctgaaagcttggcagcactatctagctagcgagaaaaagagcttagcctctaggtcgaacgttgcacatcattcaaaggtgactctctggtctggatcattaagttccgcgatgaaactcatgccaggccgacaagctaaggatcccgagtgtaaaactgaggactttgtgtcttgcatcgagaattacaggcggagaggccaggaactgtatgcttcactgtacaaagaccacgtgcagagacgtaaatgtggcaacattaaagctgccaatgcatgggcacgcatacaggaacagctgttcggagaactaggattatggagccagggagaagaaacaaagccttgttcaccttgggagctggattggcgggagggacccgcaagaatgcgcaaacgtattaaaagactgtcaccactggaggccctgtcctccgggaggcataaggagagtcaggataaaaacgaccacatctcacagactaacgcagagaaccaggatgagctgacattaagggaggccgagggagaaccagacgaggtcggcgtagattgcacacagctcactttctttccagcccttcatgagagcctgcactctgaagactttttggagctgtgtcgagagaggcaggtaatcttgcaagaactccttgataaagagaaagtgacacaaaagttctccttggtgattgtccagggccacctggtgtccgagggtgtgttgctgttcgggcatcagcacttctatatttgcgaaaacttcactctctccccaacaggcgacgtgtactgcacacgtcattgtctgagtaacatctccgacccctttatctttaacctgtgttctaaggacaggagcaccgaccattacagctgtcagtgccacagttatgctgacatgagagagctgcgccaggctcgattcctgctccaggacatagctttagagattttttttcataatgggtattccaaattcctcgtgttttataataatgacaggtccaaggcattcaagtctttttgttcgttccagcccagcctgaagggcaaagcaactagcgaagacacactgagtcttcgtaggtacccaggctctgatcggattatgctccagaagtggcagaaaagagacatttctaactttgaatacctcatgtacttgaatacagccgctggtcggacctgtaatgattacatgcagtatcccgtatttccatgggtgctagctgattatactagcgaaactttaaacctggccaatcccaagatcttccgcgatctctctaaacctatgggcgctcaaacaaaggaacgcaaattaaagtttatccagcggtttaaggaagtcgagaaaaccgaaggggatatgaccgtgcagtgtcactactatactcattattccagtgctattatcgtggccagctacttggttcgtatgcccccattcacccaggccttttgcgctttgcagggcggatctttcgatgttgcagatcgcatgtttcactcggtcaagtccacatgggaatctgccagccgcgagaacatgagtgacgttcgtgaattgacgcctgagttcttttatcttccagagttccttaccaactgcaacggggtggagttcggatgtatgcaggacggcacagtgttaggtgacgtgcagttgccaccttgggcagatggtgaccccaggaagtttatcagtttgcaccgaaaagcactcgagtccgattttgtgagcgctaatcttcaccactggatcgatttaatctttggctacaaacagcagggcccagcagccgttgatgccgtgaatattttccatccatatttttacggggatagaatggacctgtctagtatcaccgaccctctcattaagtcaacgatactcggatttgtaagcaattttggccaagtgccgaagcagctgtttacaaaacctcaccccgcacgcacggccgctggtaaacctctgcccggaaaagatgtgtcaacaccagtatcccttcctggccaccctcagccattcttctactccctgcagtcgctacggccaagccaagtcactgtgaaggacatgtatctcttttccttgggctcggaaagtccgaaaggagccatcggtcacatcgtgtctaccgaaaagaccatcctcgcagtggagagaaacaaagtgttgcttcccccattgtggaacagaacattctcctggggattcgacgacttcagttgttgtcttggctcatatggaagcgacaaggtgctgatgacattcgaaaaccttgcagcctgggggaggtgtctctgtgcggtttgcccctctccaacaacaatcgtgactagtggcacttccaccgtggtttgtgtatgggaactgtccatgaccaagggaaggcccaggggtctccgccttcggcaggccctttatggccacacacaagcggtcacttgtttagccgcaagcgtgacgttctccctattggtgtcgggttctcaggactgtacatgtatattatgggacctcgaccacctgactcatgtcaccaggctgccagcccaccgcgaaggaatctctgctattacgattagcgatgtgagcggtaccatcgtctcctgcgcaggcgctcacctgtcgctctggaatgtgaatgggcaacccctcgcatccattacaactgcctggggaccggaaggcgctataacatgttgttgcttgatggaaggacccgcttgggacacctcgcagattattataacgggctcccaagatgggatggtgagggtttggaagacagaggatgtcaagatgtcagtgccagggctgcagatgggccgtaagcgagaagccgcagaagccttagcacaacagtgtcaagccgagggaggcaggggagattgggggttgagctctgcttatcggaggaatccccaagggctcctgccccatagtagccaggggagggcaagcggaaatcactcatcagcggctcagccttctccttggcctatgggtctgctgtaa

SEQ ID NO: 246846 - DNA, 9554 bp, synthetic construct
  misc_feature 1..9554: note = Description of Artificial Sequence: Synthetic coding sequence
  source 1..9554: mol_type = other DNA
atggaagccgaggatcttagcaaggcggaggatcggaatgaagatccaggaagtaaaaatgaagggcagctggcggctgtgcagcctgacgtgccccacgggggacagagctccagcccaaccgccctctgggatatgctggagaggaagtttctggaatatcaacagctcacccataaatcacccattgaaaggcagaagagtttactgtccctcttaccattgtttctgaaagcctgggagcacagcgtgggcataatttgcttcccatccctccagaggttggcggaagacgtgtccgaccagctagcgcagcagctgcagaaggcactagtgggcaaacccgcagaacaggcgaggctggcggctgggcagctcctttggtggaagggggatgtggaccaggacggttacctgctcctcaaaagcgtttatgtgctaactggaactgattcagagactctcggacgggtggccgaaagtggactcccagccctcctattgcagtgcctgtacctgttcttcgtcttcccccttgataaggacgaactgttggaatcagacctgcaggttcagaagatgttcgtgcagatgctgcttaacatttgtagcgatagccaggggctcgaaggactgctttccggtagcgagctccagtccttgcttattgcgaccacatgtttacgcgaacacagttgctgtttctggaaagagcctacattctgtgttctccgtgctattagtaaggctcaaaacttgtcaattatccaatatcttcaggctaccgactgtgtgagactgtctcttcagaacctatcgcgactcacggataccctgccggctcccgaggtatcggaggcagttagccttatcttaggattcgtcaaggactcctacccagtgagcagtgccctattcttggagtttgagaactcagaagggtatcccctcttattgaaggtgctactgcgatacgacggcctgacccagtcagaggtcgaccctcatcttgaggaacttttggggcttgtcgtttggttaactacctgcggccgttctgagctgaaggtgtttgacagcatcacgtatcctcagctcgagggctttaagtttcaccatgaagcaagtggggtgaccgtgaaaaacttacaggctttccaggtgctccaaaatgtatttcacaaggcctccgattcagtcctgtgtattcaagtgcttagtgtgattaggaccatgtgggcctggaacgccaggaacttcttcttgctggagtggacactccagccgatctcacagttcgttgagattatgccccttaagccagcacccgtccaagagcactttttccagttgctggaggccctggtgttcgaactacattacgttccacacgagattctgaggaaggtgcagcacctgattaaagagtcccccggaccttcgtgtaccttaatggccctccagagcatactttctatcgcgggaggagacccgctgtttactgacatctttcgggactccggcttactgggactacttctcgcccagctaaggaagcaggccaaaattatgcgtaaatctggaaataaggtatctacccccggagtccaggatccggagagggagctgacttgcgttatgctgcggattgtggtgaccctccttaagggtagtgttcgcaacgcggtggtgttaaaggatcacggaatggtccccttcattaagatcttcttggacgacgaatgttacagggaagcctcgttatcaattttggaacagctgagcgcaatcaatgcagaggaatatatgagtattattgtgggggcactctgctcctcgactcagggagaactgcaactgaaattggacctcctcaaaagccttctaaggattctggtcacccctaagggaagagccgcattccgcgtttcctccgggttcaatggactattgtcactgttgtctgatctagaaggatcccttcaagagcctccactgcaagcatggggcgcagtctctccccgtcagactcttgaactcgtgctgtataccctgtgtgcagtgagcgctgctctccattgggaccccgtgaacggatactttttcaggagaaacggactgttcgaaaagctcgccgaggacctgtgtcttttgggctgctttggcgctttagaggaggaaggcaaccttctgcgctcttgggtagacaccaaggcaaggcctttcgcggaccttttagggacagcattttcttcctccggaagtctgcctcccaggattcagagctgcctgcaaatcctggggttccttgactcaatggcctccggcaccttacatttgagaggggacctgaaagaatcattgagaactaaacaggggccagtggtggacgtccaaaaaggggagaccggctctgacccacaaaggaacttcaagcagtggccagatctggaagagcgtatggacgagggtgacgccgctatcatgcacccaggggtggtgtgtatcatggtgcggttgctgccacggctgtatcacgaggaccacccacaactgtctgaggaaatacagtgctctttggcctcacacatccagtctttggttaagtccgaaaaaaatcgccaggtgatgtgtgaggcaggacttctgggaacgctgatggcttcttgtcatcgcgctctcgtgacaagtgggagtcccctgcatagccgcctgatccgaatttttgagaaattagccagccaggccattgaaccagacgtcctgaggcaatttctgggtttgggcatcccatctagcctttccgccacaaccaagattctggattccagccatacacataggggcaaccccggatgtagcgggtcacagacagcccagggcttggcagaagggccttggcctgcagctcccgacgcagggctgcaccccggtgtgacgcaagcacctcagcccctaggcgagagccaggattctactacagccctgcagacagctctctctctgatctctatgactagcccccgtaatttgcaaccgcagcgggctgccctggcaccatcgttcgtggagtttgacatgagtgttgagggatacggttgcctgttcatcccaaccctgtccactgtgatggggacatctactgagtacagcgtgagtggcggaatagggactggtgccacaagacccttccccccaccgggtggtctgactttctcgtgctggttcctaatctcccgccacggtgcagcaaccgagggtcaccctctgcggttcctgacgctcgtacggcacttggctaggacagaacagccattcgtgtgctttagcgtttccttgtgtcctgacgacctaagcctggtcgtgtctacggaggagaaggagttccagccgctcgatgttatggagccagaggacgatagcgagccctccgctggatgtcagctacaagtccggtgcgggcagctgcttgcatgtggccaatggcatcacttagccgtcgtcgtgacaaaggagatgaaaagacactgtaccgtctcaacctgccttgatggacaggtcattggctcagcaaagatgctctatatacaggccttaccaggtcctttcctctcgatggacccatctgcatttgtagacgtgtatggttacattgccactcctcgcgtctggaagcagaagtccagtctgatttggcgccttgggcctacgtacctgtttgaggaggccatcagcatggagaccctggaagtgatcaacaaattgggcccaaggtactgcggaaattttcaggcagtacacgtgcaaggggaagatttggattctgaggcaactccttttgtcgctgaggaacgagtgtccttcggcctgcacattgcgagctcgtcaataacaagtgtggccgatatcagaaatgcatataacgaggtggactcacgcctgattgccaaggagatgaacataagctcccgtgataacgccatgccagttttcctcctccggaactgtgccggtcacttaagcggatctctccggaccattggtgcagtggcagtcggccaacttggcgtccgggtcttccacagttctcctgcggcttcatcgctggattttatcggtgggccagcgattttgcttggtctgatctctttagccactgatgaccacaccatgtacgctgcagtgaaggtgctgcatagtgtgctgaccagtaacgccatgtgcgactttctcatgcagcatatctgcggttatcagattatggcgtttctgctgcgcaagaaagcaagtctgctgaaccaccgcatctttcaattaatattgtctgtcgccggaactgtggaactgggttttaggagtagcgccatcaccaacaccggtgtattccagcacatcctgtgtaattttgagctttggatgaataccgcagataacttggaattaagtctgttctctcatttattggagatactgcaatccccgcgagaagggccaaggaatgccgaagctgcccaccaagcccaattgattcccaaactcattttccttttcaatgagccaagcctcatcccatcaaaaatatccactatcattggcattctggcttgtcagctgagagggcatttttcaacccaagatctactgcggatcggacttttcgtggtgtatacactgaaaccatcctcggtgaacgaacggcagatctgcatggatggcgcattggatccctctctgccagccggatctcaaacttctggaaaaacaatttggttacgtaaccagctcctggagatgctgctgtctgtaatttcgagcccccagctgcacctgtcgtctgaaagcaaagaggaaatgtttctcaaactaggccctgactggttcttgttgctcctccaggggcatctacacgcatccactacagtgctggccctcaagctcctcctttatttcctggcgtctcctagcttgcgaacccggttcagagacgggctgtgcgccggatcctgggtagaacgatcaacagagggggtcgacatcgtaatggataacttaaagagtcagagtcccctgcctgaacagtctccatgtcttttacctggattcagagtcctgaacgacttccttgcacaccacgtgcacatccccgaggtctatcttatcgtgagcacctttttcttgcagactcctttgactgagctgatggacggcccaaaggacagcctggatgctatgctgcaatggcttctccagaggcatcaccaggaagaggttttgcaggccggactctgcacagagggcgcattgctgcttctcgaaatgctcaaagctacaatgtcacagccgctcgcaggaagcgaggatggtgcatgggcgcaaacttttcccgcaagcgtgctgcagtttctctcactggtccacagaacatatcctcaggaccccgcatggagagctccagagtttctgcagacattagcgatcgccgctttccctctcggagctcagaaaggggtgggggcagaatccacgaggaatacctctagcccagaggctgcagccgagggagactctaccgtggagggcctgcaagctccaacaaaagctcatccagctcgcaggaaattaagggagttcacccagctgctccttcgggagctgctgctgggggcttccagccctaagcagtggctgcccctggaagtattactggaagccagccctgatcacgcaactagccagcagaagcgcgattttcagtccgaagtactgcttagcgccatggagctgtttcatatgactagtgggggagatgcggctatgttccgagacggcaaagaaccccagcctagtgcagaggcggctgccgctccctccctggctaacataagttgcttcacgcagaaattggtcgaaaagctatacagcggaatgttcagcgcggatcctagacacattttgctgtttattctcgaacacatcatggtggtgattgagacagcgtccagccagcgggacacagtccttagcaccctatattcttccctcaataaggtcatcctgtactgtctttccaaacctcaacagtccctgtccgagtgcctaggtctgctgtccattctagggtttctgcaggagcactgggatgtggtttttgctacctacaacagcaacatctcattcttgctctgtctgatgcactgtctgctgcttctaaacgagagaagctatcctgagggctttggtctggaacctaaacctaggatgagtacctaccaccaggtattcctcagccctaatgaggatgtgaaagagaagcgcgaggatctcccaagtctgagtgacgttcagcataatattcaaaagaccgtgcaaactctttggcagcagcttgttgcccagaggcagcaaacactcgaggacgcattcaaaatcgaccttagtgtgaagcccggagaaagggaggttaaaatcgaggaagttactcccttgtgggaagagacaatgctgaaagcctggcagcactacctcgcaagtgagaagaagtctctcgccagccggtccaatgtcgcgcaccactcaaaggtaaccctgtggtccgggtctcttagtagcgctatgaagctcatgcccggacgtcaagcaaaggatcctgaatgtaagaccgaggactttgtgtcctgcattgaaaactaccgtcgtcgagggcaagaattatacgcaagtttatacaaggatcacgtgcagagacgcaagtgtggaaacatcaaagcagccaacgcatgggcacggatccaggagcaattattcggagagctgggcctttggagccagggtgaggaaacgaagccatgctccccttgggagctcgattggcgcgaggggccagccagaatgcggaaacgaattaaacggctgagtcctttggaagcattgtcttctggcaggcacaaggaatcccaggataagaatgatcacatttcgcagaccaatgccgagaaccaggacgaactcacccttagggaagctgaaggggagcccgacgaggtcggagttgactgtacacagctcacattcttccccgcactacatgagtctctccactccgaggatttccttgaactctgcagagagcgccaggtgatccttcaggaactgctggacaaggaaaaggtaacccagaagttctcactcgtgatcgtccagggacacttggttagcgaaggcgtgttgctgtttggtcaccagcacttctatatttgcgagaattttactctcagtccaactggcgacgtgtattgtacgcgtcattgcttgtcaaacatttcggaccccttcatcttcaacttatgcagtaaagacagaagtaccgaccactactcatgccaatgtcacagctatgccgacatgcgggagctgcgacaggctcgttttctcctccaggacatcgctctggaaattttctttcacaatggctacagtaagttcctggtcttttacaataacgataggtccaaagcgtttaagagcttctgctctttccagccctcccttaagggtaaggcaacaagcgaagacaccctaagcctgcgtcgctatccaggctctgataggatcatgctgcaaaagtggcagaaaagggatatttcaaactttgaatatcttatgtacctaaataccgccgctggtagaacctgcaatgattacatgcagtatcccgtttttccttgggtcctggctgattacacctctgagacacttaatctcgccaatcctaagatctttcgcgacctgagcaaaccaatgggggcacagacaaaagagcgaaagttaaagttcatacaaagattcaaagaagtagaaaagacggaaggtgatatgactgtgcagtgccactactatacccactactccagcgccatcatcgtcgcatcatacctggtgaggatgcctccttttactcaggctttttgcgctctccagggaggctccttcgatgtagcagatagaatgttccattcagtcaagtccacttgggaaagtgccagcagggagaatatgtctgatgtgcgcgaactgacccccgagttcttctatctcccagagttcctcactaattgcaatggggtggagtttgggtgcatgcaggacggaaccgttctgggcgacgttcagctcccaccatgggccgatggagacccacggaaatttatctctcttcatcgcaaagcgctggaatctgactttgtatccgcgaatctccatcactggatcgacctcatttttggctataagcagcaagggccagcagcagtcgatgcagtgaacatatttcatccatatttctacggggatcgcatggatctatcatcaataacagatcccctgatcaaatctaccatcttaggctttgtgagcaacttcgggcaggtgcccaagcaattattcaccaagccacacccagcacgcaccgccgctggcaaacctctgcctggaaaagatgttagcactccggtgagtctccctgggcatccccagccatttttctactccctccaatctctgcgcccatctcaggttaccgtgaaggacatgtaccttttctccctcggatctgagtcgcccaaaggcgcaatcggacatattgtgagcaccgaaaaaacgatcttggcggtggagcgcaacaaggtgctgttacctcccctgtggaaccgaacattcagctggggatttgatgacttctcctgttgtcttggcagctacggttccgacaaagtgcttatgacgtttgagaacctggccgcttggggcagatgcctgtgcgccgtgtgcccgtcacctaccacgatcgttacctccggtactagcacagttgtgtgtgtgtgggaattgtcaatgaccaaaggtcgcccaagaggccttcggctcaggcaggccctctatggccacacgcaagcagtgacttgtctggccgcatcggttacttttagcttattggtctctggtagccaggattgcacttgtatcctgtgggatctagaccatcttactcacgtgacgcgcctaccagctcatcgcgaagggattagtgccataaccattagcgatgtgtcagggaccatcgtttcctgcgcaggtgcccacttaagtctttggaatgtgaacggacagccactggcttccattacaaccgcttggggcccagaaggcgcaatcacttgctgttgtctaatggagggacccgcttgggacacgagtcagatcatcatcactggctcccaggatggaatggtgcgagtatggaagacggaggacgttaaaatgtcagtgccgggacggccagccggagaggagccccctgctcagcccccaagtccacggggacataagtgggaaaaaaacctcgctctttcccgcgagcttgacgtgtctattgccctgacaggaaagccgagcaagacttctcccgctgtcactgccctggcagtaagccggaatcacacgaaattgctcgttggggatgagaggggccgaattttttgttggagcgcagacggcta

SEQ ID NO: 246847 - DNA, 1965 bp, synthetic construct
  misc_feature 1..1965: note = Description of Artificial Sequence: Synthetic coding sequence
  source 1..1965: mol_type = other DNA
atggaagccgaggacttatcaaaggcagaagatcggaacgaagatccaggttccaaaaacgagggccagctggccgcagtccaacctgacgtgccccacggcggtcagagcagcagtccaaccgcactatgggatatgcttgagcgcaagtttctcgaatatcagcagctcacccacaagagcccgatagagagacaaaagagcttgctgtctttgcttcctctgttcttgaaggcatgggagcactctgtgggtattatctgcttcccgagtttacagaggctcgctgaggacgtaagcgaccagctggctcaacagttgcagaaagccttggtcggaaagcctgcagaacaggcacgcctcgctgcgggtcagctcctgtggtggaagggcgacgtggaccaggacggctatctcctgctgaagtctgtatacgtgctgacaggcaccgattcggaaacactgggccgagtggccgagagtggccttcccgctctcttgctgcaatgcctatacctatttttcgtgttccctctggataaggatgagctcttggaatcagatcttcaagtacagaagatgttcgtgcagatgctcctcaacatctgctcagattcacagggattagaaggccttctgagtggatctgaacttcagtcccttctcatcgctaccacttgcctgcgtgagcatagttgctgtttctggaaggagcccacattctgtgtcttgcgggctatttctaaggcccagaatctgtccatcatccagtacctgcaagctactgactgcgtgaggctgagcctccaaaacctctccaggttaaccgatacccttcccgcacccgaggtcagtgaagccgtatctctgattctggggtttgtgaaagactcttatcccgtatcttctgcactattcttagagtttgagaattccgaaggttaccccctgctcctcaaggtgctgttgcgctacgacggcctgacccagagtgaagtggaccctcatctcgaggagcttctcgggttggtggtgtggctcacgacatgcgggcgaagcgaattgaaagtctttgattctatcacatatccccagctggaaggctttaaattccaccacgaagccagtggggttactgtgaagaatctccaagcttttcaagtcctgcagaacgtgttccataaagctagcgactctgtgttatgcattcaggtgctgtccgtcatccggacaatgtgggcatggaacgcccgtaacttctttctccttgagtggacgctccaacctatttcccagttcgttgaaattatgcctctgaaaccagccccagtccaggaacactttttccagcttctcgaggctctggtgttcgagttgcactatgtgcctcatgaaattctaaggaaagtgcagcaccttatcaaggagagtcccggtccatcttgcacactgatggccctacagagcattttgtccatcgcgggaggcgacccgctcttcactgacatcttccgagactccgggctcctcggattgttgttagctcagctgcggaaacaggcaaaaattatgcgtaagagtggaaataaggtaagcacgccaggagtccaggaccctgagcgcgagctgacatgtgtgatgctgagaatcgtagttacgttactgaaagggtcagtccggaatgccgtggtactcaaggaccacgggatggtgccatttatcaagattttcttagacgacgagtgctaccgagaggccagtctttccatcttagaacagctctccgcaataaacgctgaagaatacatgagcataatcgtcggagcactgtgtagtagcacccagggagaacttcagttgaagcttgacttgctgaaggtaatatcttctcccccattgcggcttgcttctctgtggatttgcacgaagagatccacttttgctcaagcctttgtcttcatgtag

SEQ ID NO: 246848 - DNA, 1659 bp, synthetic construct
  misc_feature 1..1659: note = Description of Artificial Sequence: Synthetic coding sequence
  source 1..1659: mol_type = other DNA
taagacgacacggtagtgtgggcagaggagtgcgtggcgtgtgctaactggctgtggatgaacacagccgacaatctggagctgagtctcttttctcatctcctggagatactgcagagcccccgtgagggtcccagaaatgccgaggccgcacatcaggcacagctcattccaaagctaatattcttgttcaacgaacccagcctaattccgagtaagatctctactattatcgggatactggcttgccagctgcgaggccacttttcaacccaggatttattacggatcggcttgtttgttgtgtacactctgaaaccttcctcagttaacgagaggcagatttgcatggacggcgctctagacccaagtctgccagcaggcagccagactagcggaaaaacaatttggttgagaaatcaacttctggaaatgctgctgtcagtgataagtagtccacagctccacctcagcagtgagagcaaagaagagatgtttttaaaactggggccagattggtttcttctgctcctgcagggacacctacatgcttcaactaccgttctagccttgaagctgctgctctatttcctcgcatccccttctctgcgaacacgcttccgggatggactctgcgcgggttcctgggttgagagatctaccgagggggtggatatagtcatggataacctgaaaagccagtccccgctccctgaacagtccccttgtctgctgccgggattccgagttcttaatgattttctggcccaccatgtgcacattcccgaggtgtatctgattgtcagtacttttttcctacagacccccctgactgaactaatggatggtcccaaagactccttggatgctatgttgcagtggctgctgcagcggcaccatcaggaagaggtgctgcaagcaggattgtgcacggagggagcgcttttgctgttggaaatgctgaaggcgacaatgagccaaccgctggccggtagcgaagacggcgcttgggcacagacctttcccgctagtgttcttcagttcctgtccctggtccacagaacctacccccaggatccagcttggagagcacccgaattcttacaaaccctggctatcgctgcctttcctctaggagctcaaaagggtgtgggcgctgaatccacacggaatacgtcctcccccgaggctgccgctgaaggcgattccactgtcgagggcctccaggccccaactaaggctcacccagcacggcgtaagctacgggagtttacccaattgctgttgcgtgagctcttgctgggcgcatcctccccaaaacagtggcttccgcttgaggtgcttttagaggccagcccagaccatgcaactagccagcagaaacgggacttccagtccgaagtgcttctgagcgcgatggaattgtttcatatgacttctggcggtgatgcagccatgtttcgcgatggcaaggagccgcagccatcagcagaagcagctgctgctcctagtcttgccaacatctcttgcttcactcagaaactcgtcgagaaattgtatagcggcatgttttcagcggatccccgacacatcctgctgttcattttggaacacatcatggtaatttccgccccactgcaggctcgggacttcagctag
